United States Patent Application Publication US 2007/0083945 A1 - sequence listing, part 15

SEQ ID NO: 97355 - DNA, 256 bp, Glycine max
agcttgttttagtcatatatatgttacaaaacaacgaaagcaaaaaattgaatcgattattgcagatacagaaatacttaaacaaacctggcaattaggggttttgcggctttttgcaaattccgcccatgtttctggatcaaggccatacttgactgtaagatcagatatttgctgaccttcattgtcagcaaagacaaattttgaagtcaatgaagacttaaattgcctgcatctagctgcaagtgatgacatc

SEQ ID NO: 97356 - DNA, 307 bp, Glycine max
tctaaaccaacccgtttctctccccctttggcaacatcaaaaagccagagtacgtggtaatcaacacaagatggaagaataaaaatcaaatataactcaagttcacataatcattcataagtcaaaaccaaatataatccaatcataaaatactaagtgccaaataccgaaagataacgaaagttcaaaaaatgatgacttaaaaagcatagccaaatacacggcttacaataaaagataataataatctaaaactatgaaggtggtggaaggtcgaagcaccgacgaagataacctgcatcctctt

SEQ ID NO: 97357 - DNA, 258 bp, Glycine max
agcttgcttgtggggcttctatggaggctggatctttgagcttcaatgaggtccttcaatggtgattttttcaccatggagatgcagcggaaggcaaaggagaagaggagatgggaggcaccatccactagggaataagacaaggaagaatgagcttcaccaccaagaattgccttggataagaagcttgaagaggatgctttaatggaggaaaagaaaaagagaaggggggagcacaaaattgaaggaataaaagag

SEQ ID NO: 97358 - DNA, 306 bp, Glycine max
tgcttgtggggcttctatgtaggctagatctttgagcttcaatgaggtcctttaatggtgattttccaccatggagatgcagtggaagacaaaggagaagaggtgagaggaggcaccatccactagggaataagccatggaagaaggagcttcgccaccaagatgagccttggataagaagcttggagaggatgcttcaatggaggaaaagaaagagggagagtgatcgaggccgtacccgaatcaaataaacattaaaatgtagtaactaggaagtgatcctaggtcgttttccaacgagcaatg

SEQ ID NO: 97359 - DNA, 257 bp, Glycine max
agctttttttctattctttatttacatatgagaaatggtaaaaacaaactctttaacatattatctcttgttaattaaaatttattaaaaataacaaaatttgccaaatctcacatcatatttaacgactctctcttccaatttgataattttcaataaaatttaaccaattggatatgatatgtttgaatatgtgctaaagagtgtgttccatagatggaataataactcatacactttatttaaccaactaagtt

SEQ ID NO: 97360 - DNA, 303 bp, Glycine max
tgtataataaattaacaggttctttattttggtgtttttccaaatatcattttaatcaaattaacgtggtcaactacaataataacctcacacggcctcttgtttgtttgtgttcacaagtttacatggtttctgtttatgaactttttactctattttcttggctcattgttctaatgaaatactgcaggcccaaatgcctcacttgaagaattggtagattttataggtgttgctcaaatggcaaaggctgaggatgctcttctgcctcctgaagaaaaggtagcaatgtagccatattgg

SEQ ID NO: 97361 - DNA, 248 bp, Glycine max
ttgctatatgacgacgaaccaaggagagccaagtaggtccgaagatgacaaagacgatgacaaaaagtccaaagaacgacaacaagatggagccaacaaggtcaagagcacgattaattccaaggcacaggagaagaaaccaagaagattcaagaatcaagagaagctcgatttcaagactcaggagaagatgaattcaagactcaagagaagaaaacaagaagactgcacaagggacgcatcgaaaa

SEQ ID NO: 97362 - DNA, 248 bp, Glycine max
acactatcaaacacgcttgcttcaacgtaaatgacttttttttcaccgaccgatgaatggtgatcaacggaccaagagagaagttaagcctacccagggaccctaaggatacaattgtggatgagaatgccctattcttcgccgaaaataaggctaaatgaacggtgatctagtttatacacggtgatggacccttgctgttggatctgttagccctatccatgaaaggtaagggggaaatgccccgc

SEQ ID NO: 97363 - DNA, 254 bp, Glycine max
tgcttgtctaataaacacaccctttatatgtgtttgtatgtgtgtgtgtatgacatagagttagattattaattatgcttcctttaatcttctcttttcaggttgttttgtatgatttgagcaaaagacctatagaacgcaggttcgtaaggaaagatgaagttataaaggaaggtgaatcaatatattttgatggacatttagtggaagtaggacaacctgaagggattcatcactctccagcgaagttaaat

SEQ ID NO: 97364 - DNA, 305 bp, Glycine max
tcaggttgctcattgactctagattgttgcaaagaaggacagagatctgtatggtgatctgcagaagaacatagaccacagactcttgcaacaggtgcaaatttctgattcatggcaagctgagttactaggttgaccaaggcatcaagttttccctcaagctttttattttcagcagatgaagatgaatccgtggccacctcatggaatcctctaaggacaataacatcatttcttgcactgaattgttgggagttggaaaccatcttctcaatcaaattcccagcctcagcaggagtcatatc

SEQ ID NO: 97365 - DNA, 253 bp, Glycine max
agctttttatttattttcattcaactatgtgaattttatattaatcaccaatttacattattatgttaaacctttaaaaagcctaattagtgatgtaaccatataccctagttagtcgcataacactaaaccacaattagtgaaacctgagtagttacactactagaaaataggccttttacatcggttctgagagcctttctacatcgattttgacacgtggttgtagataggagtcgttgaaaatgctagg

SEQ ID NO: 97366 - DNA, 302 bp, Glycine max
ttagtcgaatagaataatccaaaaatgtcaaagaattgggtgttgaaaaagcataacaagactttctgtgattggtttaaagatacaatctttgcatatgagaatgcttcagaaacattaagaaagctagcagatgggcctaaaagaaatgttataacttggcagggatccgacttaagcaagtattcattttacacaaaagcacaagatgacaaaagtacaatgcagaacaacggggtcaccctaagggcagaatctcaacactttgcaagtgtgaatgacgccaatcccaatgtagcatc

SEQ ID NO: 97367 - DNA, 261 bp, Glycine max
caggcatgctagcttgaagaggatgctttaatggaggaaaagaaagaaagaagggggtatcattaaattaaaggaataaaagagggagagaagtggaactttgaagtgtgtctcataagactttcattcatcaaagttaccacaagtgttacacatgcttctatttatagactaggtagctttccttgagaagctttcttgagaaaacttccttgagaagcttctttgagaaaacttccttgagaagctagagcttagcta

SEQ ID NO: 97368 - DNA, 301 bp, Glycine max
tgcacttcttcactctcttcaggaattttagcctctttcccacttagacctgttagctttgggagccaagttatcccttgcattctagacttcaaccatttgtgatagtcgcctatgacgccattgctacttcccctaagctccttatcttttctttccattgtattccatgctttacggattctctgaagtatcttcgcattagcttcaatgaaacctcacgcgatgatttcctccaagatgcacctctcatagggtagcctaactgtcttatggccaacacgggattataattaataca

SEQ ID NO: 97369 - DNA, 254 bp, Glycine max
ttgcttgcatttggagaggttccctcaaccgccctaattccttgatgctggtggtatctgggcttttgaccttgacttggtagaacctcttaccggtttgatttgttcccatgcttactaaagtgagataaaagctggtgcaaatcaaaactccgatatctcatgggtggaatggatgaatgcatgatggaatgcatatgacacagatgcaatttaggaatgcgggggtccggggaatttgtccccttcttaga

SEQ ID NO: 97370 - DNA, 303 bp, Glycine max
tatgcacggaaaatgtaattatgaaattgagatgcccgaagaaacaccatttcctagttaaccatgcattaggtaccatgttcaattattttgttttgttgttgtgtgtttttgtttttttttttttagaaatgggtttatgatcccaacatggttggctcatggtgcctaacacatgcaactaagaatgtagtgtgaagtttcacgcttccccttttttgtttttgttttgtagaggaaaatgcaaggatgagcaaacatgaaaacaaatggtatgcaattttgcagatcaaaaagtttgtt

SEQ ID NO: 97371 - DNA, 259 bp, Glycine max
tttgcaagcttgtacgcacatcgttcgcgtgtatgatatccactccacaaggtttgaagtagaggagagcttcaaccctataacgcaacgtggcggacaaaagtgggcagtaaacttgaatgatcgtcattatcaatgcggaaggtattctgcgcttcactatccatgttcacacattattgcagcttgtgcttacgtgagcatgaactactaccaatatatagatgttgtttatacaaacgagcacatcttaaaagct

SEQ ID NO: 97372 - DNA, 299 bp, Glycine max
tgtagacaaccctgcagttgaaacattcaatgctaactttttccaacctttgtcgcccttggagccccaattgctttgatctctccgtacatgagtacatcatcgacaatacgcgttccatgtcccaattccatgcaaaataacttcttgtttcttcattattttagcctgaaacttttcttatgaccatcattttcttcattagatgacttcattgaagttaatgccacttatttaacttgcacataaaaaatattaaatacaatctactttattcatttgaatagcccattgcacaa

SEQ ID NO: 97373 - DNA, 258 bp, Glycine max
agtttgctaagctttacccataagcaactggactatgtgtacttgattatttactccatcattcaatgtgataagggccctgtactggacttaataactatacttaccgtttaaatggaatttacatgggggaagggctagagctgattaagagtgattgattaattttataccttttattggtaattgtaacagaaatttcttgacatcttaagccttaatgctagaggatcctttgtatgttagccagcaatccac

SEQ ID NO: 97374 - DNA, 300 bp, Glycine max
tgtcaaaacagaaaaccaccacttggaatgcagccacgaggtgccgacgaggctgctggagcaactcggacaagattccgatgacggcacggcggcgcgtgaactacacgcgctggaagagacacgaagctgtaaccgcgcgttggaggcgcgtggaagctccgatgacggcgcgttttgcaaggttttggtcgcgcttttccgacgatcctaaccctggtctcgccggagaagatgacggcggcggacggcggcggacggcggtgacaacggcggacggtggcggacgacggcggcgga

SEQ ID NO: 97375 - DNA, 258 bp, Glycine max
agcttgggaggattgattgggactcggcgttgagaggaacgaggataagggctacgtggaagtacgtgagctcagttggaggtgggcaacaggggatggtgggtttgtacgtggtttgtggatgtggagaacttgttttgcaccatcgcccgacctccacctagtaccacatgtgatggataccccataatcctacaagcttgaaatgaggaagtgtagaagggtgaaacttcctgcttttattcgttgaccacaaag

SEQ ID NO: 97376 - DNA, 304 bp, Glycine max
tgtaagcccaaagtattcttatataaaaaaaaagattgcaaataagggcataaagaaagaggtgccataagtgctaaggttaaaaaaaaaactttgaaataagggcggaaaaagagaggtgtcgtaagtgccaagaagaaaagtgctgttagaggaataaaggctgaaaaataaataagcctaggcaagaaataagtgaaagtttttctaaggatgcatgctctcttataatcctaagttttttatatcccagaaaaaccatgatttgttgtttagccaggccccattacaagccaataaaagt

SEQ ID NO: 97377 - DNA, 257 bp, Glycine max
agcttgtttgcctaggatctacttcatcaatggattcctttgcttcttggaagatgaatggcagcagaatggagaaggaagagagagaggaaacgccacttcaaggagaagatgagtctagaagaagctcaccaccatatgaggccatggataagagctcggaggaagaaggagatgaatgaagggagaggaagagaagagcatgaaattttgtgctctaaaacagctctaaaatctgaagcttaattttcaaatga

SEQ ID NO: 97378 - DNA, 308 bp, Glycine max
tttgcaaaggaagaagaagaagatgaagttcaagaaaatgttcaaagagattcaaaggttgtaaaagaatatgtggaaaagttgtttgtaaaggttgtaggtcatgttcaaatgcaaatcaaggtcttacttttatagactcttcaagtctggtcaagaaaaccattagaagagttataacctttagaaaaatcaaaaaaccattggataagttacatcttttgatttttgttcaaaacttgtcactggtaatcgattaccaaatccttgtaatcgattacacaaagcattctatgaaaggatgtgac

SEQ ID NO: 97379 - DNA, 258 bp, Glycine max
agcttcattaataatggcctcagcaaacttcttatttccagaaggaaattcaatcaatagacctccaatctttaatggagagggttaccactactggaaaacccgaatgcaaattttcattgaggcaatagacttaaacatttgggaagccatagaaataggaccttatatacccaccacagtagaaagaaccacaatagatggaagcacaacaagtggaagcacaacaatagaaaaacctagagatagatggtctga

SEQ ID NO: 97380 - DNA, 304 bp, Glycine max
tagctattagagaggtgtgtgtagctaagctctagcttctttaggaatcttctcaaggaagcttctcaaggaggtgagcttagttattacaggggtgtatgtagctaagctctagcttctcaaggaagttttctcaaagaagcttctcaaggaagttttctcaaagaagcttctcaaggaagttttctcaagaaagcttctcaaggaagctacctagtctataaatagaagcatgtgtaacacttgtggtaactttgatgaatgagagtcttgtgagacatacttcaaagttccacttctctac

SEQ ID NO: 97381 - DNA, 258 bp, Glycine max
agcttttgtagtgaaaggatgtgactcttcacatttaaatttgaatttcaacgttcaagggcactagtaatcgattaccaaaacattgtaatcgattaaaaccttttgaaaataattgtaatgttgtaaactcagtttgaaaactttttcaaactcattttgctactggtaatcgattacaacaatatggtaatcgattaccagagagtaaaaactctttggtaaaggttttttcaaaaaaccatgtgctattcaaag

SEQ ID NO: 97382 - DNA, 304 bp, Glycine max
tgagatgaattgatcgctcattttatgattcaaggtttggattctaactgggaagtattatccaaatgcggatctaaatcaagtcacccaatggttataattgctaggaacagagttataactgctggttgttaagattcttgattttaatgcaggggttttgagttgatgattaaggaattggttgttgatcttgaaatccttagaattttcagagtcaaggaattaacatgaaatgaaccaatgaatcaaataacattaaatatatagaaatcatttatgtgtaatcccaatgctttattcc

SEQ ID NO: 97383 - DNA, 259 bp, Glycine max
agcttgctcacaagattctccttgcctggcacttcaaaaccttctggttgggtcatattgatgcaagctccattggagcttgtaggcctaggatcttcttcatcaatggattcctttgcttcttggaagataaaaggcagcggaatggagaaggaagagagagaggagacgccacttcaaggagaagataagtctagaagaagctcaccaccataggaggccatggataagagcttggaggaagaaggagatgaatgaa

SEQ ID NO: 97384 - DNA, 305 bp, Glycine max
taactttaatgttatgtaaaatatttaacttaatgtggcatgctcaaataaatattaaacatctattttaacataatctatagctaattaaaactgatcaaataatttataattatttttaagtgcaatttaacatattagataacatttataattatttaattggttattgaagggtgataatttaatgttaatggccaggagagctttcgctcggtgcaaaagttctttagattccatctaaacttccctagatgatgtaagccagtgaaaggggcgaattctagggtacgaaagtgaaacta

SEQ ID NO: 97385 - DNA, 303 bp, Glycine max
tgtaggattatggggtacctatcacatgtggtactaggtggcggtcgggcgatggtgcaagacaattctccatatccacaaatcacgtataaacccaccatcccctgttgcccacctccaactgagctcacgtactcccacgtagcccttatcctcgctcctctcaacaccgggtccccatcaatcctctcaagctcccatgacatccaagaaattccacattcaatcatcatggactaacaaaaccaagcaaaacagggcaaaggcagaaaactctgcccaaaacacaactctaaaccacat

SEQ ID NO: 97386 - DNA, 240 bp, Glycine max
tgctttccttatggacgaaaggctcaagggggccctcgactatatatggcctgacgccctaacgccttcatgtggctcactcatagccaaaacagaggaagggacactaggggcaaccacatcaaaaccaacaacaaggccaacctcaccacttaaattgaccccttctccattagaaggggggacattgtacggtggcgcacattgaccaatccgttcaacctgttttatacgaggctc

SEQ ID NO: 97387 - DNA, 301 bp, Glycine max
tcttacggatcaactttttttttaagaaggtatggaccaacttgatccgtaagatggtgaaaaaacttgcggatcaggttgatccgtaggctccttacggattaacgagatgcggaaaaggcttactggttaagatgatccgtgagtttgtttaacaccttacagatcaagttgacccttagcgtcttatggattaagttgatccatcaagaagcttacggatcatgctgagcagcatgtttattcaacgccttacgaattaacttgatccggaggacacaatatattgttgaaaaagacg

SEQ ID NO: 97388 - DNA, 254 bp, Glycine max
ttgcttgaccaatcccgacccaacccgggcatagtcggtcaatgagaacctgtgatgtacctaaacaggtgagctcctggcagtcaacagataaaaggaacaaagaccacaaagcaaggaggcttgtggtggctggccagctgtgaactttgattgatatgtgggttatggcctctggtaatcgattaccaagggtgggtaatcgattacaaggcttaaaattgaagacatgaggctaagatggtctctggtaa

SEQ ID NO: 97389 - DNA, 302 bp, Glycine max
tgcttgtggagcttctatgtgtaggctggatctttgagcttcaatgaggtcctttaatggtggttttccaccatggatatgcagcggaagacaaaggagaagaggtgagaggaggcgccatccactagggaataagccatggaagaaggagcttcaccaccaagattagccttggataagaagcttggagaggatgcttcaatggaggaaaagaaagagggagagaaagagagaggggggagcacgaaattgaaggaagaaaaaaaagggagagaagttgaactttgagttgtgtctcacaa

SEQ ID NO: 97390 - DNA, 251 bp, Glycine max
tttcttcaacaaaggggagatggaccatttcaagtgcttgaaagaatcaatgacaatgcttacaaagttgagctgacccgtgagtataatgttagctccaccttcaatgtctttgatttatctctttttgatgcagatggacaatccgtttttaaaacaaagccttgatatgatggagaaaatgaggaggacatgatcacgatcaagggcttggttccccttgatggacttggagggcctatgacatgggc

SEQ ID NO: 97391 - DNA, 300 bp, Glycine max
ttcgtgaaattcaaatggtttaaacttttcacacggaggtccgattcgggcgcataatttatcgagacactcgaaattgaacaatgcaagctcttgagaaattcaaatggtcataacttttcaatcggaggtccgattcaggcgcataatatatcgagacgctcgaaattgaacaacggaagctttcgtgaaattcaaatggtcataacttttcacacggatgtccgattcaggcgcataatatatcgagacgcttgaaattgaataatggaagctctcgagaatttaaaatggtcataa

SEQ ID NO: 97392 - DNA, 256 bp, Glycine max
agcttgcatgatttacattctccccctttctcaagcaaattcttaattcttcttcacatcgtcaaaatcttcatgatttacattctccccctttttgatgatgacaaccacctgtaggttaggagcaacaacaaagaaaaaatatctatttgcatatagtttactcccccttggttttggaatgattgcttatatgaaacagttgaagatttcatatttttcatatgtaaaccttattgtctcataaacaatagat

SEQ ID NO: 97393 - DNA, 303 bp, Glycine max
ttgacttgagtaatcaagagattataaatatgtgaccatggcatgagttttaatcgatttttataatcatatatcatctatcatctatctttcaatctatctttcaatatcttctttcatctctttctacagaactttctaattcatttatcttcatctttctaaaagtttttgttcaacactttctcttccaagaaaagttctttgataaaaaaacttgtgttattcatctttttcattctcttcttcctttgccaaaagaacgaaggactaaccgcctgaattcttttgtgtttctcttct

SEQ ID NO: 97394 - DNA, 253 bp, Glycine max
agcttctcaaggaagttttctcaagaaagcttctaaaggaagctacctagtctataaatagaagcatgtgtaacacttattgtaactttgatgaatgagagtcttgtgagacacaactcaaagttcaacttctctccctttttcttccttcaatttctttctcccccctctctctttctctccttctttcttttcctccattgaagcatcctctccaagcttcttatccaaggctcatattggtggtgaagct

SEQ ID NO: 97395 - DNA, 302 bp, Glycine max
tgaaggtgttcgtgttatataagttgaatcacaagagaatattctgagacaaaacaaacaagtcctgtaaagctgttagtccattggacgaaagaaacttgatcgaattgagtgaatcttaggtttgctaagttagcgagtttcattgtatttgagcttattgtgtaaacactccttgagtgattagaatactttttctatcaaacacatattgtctgtgaaagctaggagtgacttagtgacaaagaatactcgagtattaatctcagggggagattaaatgaagtgccaggagtggccta

SEQ ID NO: 97396 - DNA, 301 bp, Glycine max
ttgattagtctaaatggaaatacataaaggaatataattaaagaagcttttacagaaatatgcacatgagagcttaagatataaatttgaccatgaaacttattggaataagcaaaaaagagcttgttttgataagctttaccgagaaacttattgaaatgagtaaaaaagagattataagagtcataatttaatttttatgctaaatatgtttttgatccctaataaatacccgaattttatgtttgttcactaataaattttttctttgcattgagttcctaataaaacaacaattttt

SEQ ID NO: 97397 - DNA, 257 bp, Glycine max
agctttcataagttaagtcaggtgcaaccatctccctaagattcctctcatgaggtggagattgagccatgttctcagtatgaaaattagcaaccgaatgctcaaaatcagaatgttcagaattactagcaacagaatgaatagaatgctcagaatgcacagaatgctcggaatgctcaaaatgctcaaaatgcacagaatgatcaggatgcacactctgcctaactaatctatgaaaggttctatctatttcagga

SEQ ID NO: 97398 - DNA, 305 bp, Glycine max
tgaaattcagaaccgaagctctgatctaaatcaaatgacaataaccttttactcggatgtccgattgtgtcccgtagtatatcgagatgctcgaaatttagaacagaagctctgagcagaatctaatgacaataactttttactgggatgtccgattgtgtcgcgtagtgtatcgagacgcttgaaattcagaacagaatctctgagaaaaatgaaatgacgataactctttacttagatgtccgaatgaatcccgtattatatcgccacgcttcggtttgataacggaagacatgagcaaaatc

SEQ ID NO: 97399 - DNA, 260 bp, Glycine max
agctttgtttcgcaaaaatcacaaaaaatcgttctaaggtccaacgccttaaacggtcctctttttttttattggttaacatggaccgttcaaaaacataaaatcaacatgtaattttaccacttttgcaagaactacgtaggtccgagttcctcatcgcaattgaggatacgtaggagcaaaaccccacttttgtcgaccgcccctagagatcgttaatggtccaacgccttaacgtttctcttctttcaaaaaccaag

SEQ ID NO: 97400 - DNA, 307 bp, Glycine max
ttgatgatatggtcttcacttactaaaggatcaaagtgggtctaaaaagaggcaaatctgatcatcatgctttgataaatgccaaaaaaaactagggcaaataaagagggtgaggatgaaggagaggcccgtgctgtgactgccattcctatacagccaagtttcccaccaacccaacaatgtcattactcggccaataaccaaccttctccttacccaccacccagttatccacaaaggccatccctaaaacaaccacaaagtctgtcttccgcacttccaatgacgaacatcacctttagcacaa

SEQ ID NO: 97401 - DNA, 258 bp, Glycine max
agcttctgtgctgctcaattgctccaggttgctgtatggaagggcaaaggtctgtatggtggtcagcagaggagcacaaaccacagactcttgcgacaggtacatatttcggattcaaggccagctgggctaccaagttaaccaatgcatctagttttccttctagcttcttagttttggatgatgcagctgagtttgtagctacctcatgcactcctctaatgactatagcatcatttttggcgctaaactgctggg

SEQ ID NO: 97402 - DNA, 305 bp, Glycine max
tattccacacgttgtttggatggattggacaagtacttcatgcttctagtagatgggttatccagtaatagataggtctctcctggtgtttcttctagtcattaatcttgttgacttacatgcaacaaagtggttaaaataatttatatcttttttttcattgaaatcttaagagaacaatattctgcaaagcactttaattgaattattaatttattcttgtttatatgattctatttaaaagtaacatatcttggaatctatcttttatttccttttatatgtttaatagtcacattgagtaa

SEQ ID NO: 97403 - DNA, 258 bp, Glycine max
agcttgtgttcttcatgagttatacatatatatgacaaaagttactaataatatctttgcgtcacaaggaacatccacatctaatctaagtttgcttccgagtagtaaaagaagcttcatgaagtttttcattgtgttcaatctttttttttcttttgcaactcgtctcacgacttctttggcatgtttcctcttccttaggttgtgttcggtttgaaggaaaaagaaacggttaaagttctagcagcaatgaaaaga

SEQ ID NO: 97404 - DNA, 301 bp, Glycine max
  unsure (1)..(301): unsure at all n locations
tgaactgcactctctcgtttctggtggaatgtagaagctttttccctactgttgcacatatgatgatgagagaaagctatgggaatgccggtgcaattgctgtaggcctgttgcaattacttgnttttagaagctacctgcattcatgngggaccgagatnaatcatcncatttttgttgcctnttttaatattgcagctctttaaaaccacatatggaatttgtatatgctagatttgcgtactcacaaagttgcatggcctgggtcgccctcttctgtccattcatgcagcattgtgct

SEQ ID NO: 97405 - DNA, 261 bp, Glycine max
catccttgcttccctgatcacatccctttcagacaagagattgtatgtgatggctttctggccacccactttttttgcatagagggctctgtggatttgagagttataagccttctcccatccttcatagtaggtgcttccttcatgaaggcacccattagccttggcaatggtgtcccttgacaacattacaacaactcgtaggaccttggacacaatgatcttgttgtccaaaaattcaatgttcctccagaacatcca

SEQ ID NO: 97406 - DNA, 304 bp, Glycine max
tgttgggagtgactgaaactccatataattggcaaaggcccgtgatcaaagcaagaaaccccagggccctattggacttctctgggtccactgggtgtctaggaggtgtgatccctgcaaattgatatatagcgtttgagatcagctgggccatatggatactcacctgagttaggatggcatagaccagctgacactttggcaggtcgaggtctgaattatggtcgctagagagaatgttgttgagcagcaacgtcatcccaatctgcgtaagggtagttatattagtgcacatgatccacac

SEQ ID NO: 97407 - DNA, 254 bp, Glycine max
tttcttgtcaaataaacacaccctttatatgtgtttgtatgtgtgtgtgtatgacatagagttagattattaattatgcttcctttaatcttctcttttcaggttgttttgtatgatttgagcaaaagacctatagaacgcaggttcgtaaggaaagatgaagttataaaggaaggtgaatcaatatattttgatggacatttagtggaagtaggacaacctgaagggattcatcactctccagcgaagttaaa

SEQ ID NO: 97408 - DNA, 303 bp, Glycine max
  unsure (1)..(303): unsure at all n locations
tcaggttgctcattgtctctatattgntgcaaagaaggacagagatctgtatggtgatctgcagaagaacatagaccacagactcttgcaacaggtgcaaatttctgattcatggcaagctgagttactaggttgaccaaggcatcaagttttccctcaagctttttattttcagcagatgaagatgaatccgtggccacctcatggaatcctctaaggacaataacatcatttcttgcactgaattgttgggagttggaaaccatcttctcaatcaaattcccagcctcagcaggagtcata

SEQ ID NO: 97409 - DNA, 258 bp, Glycine max
ttgctttgagccaaaatcctaactcaccataaaccttgacccagggtgagaatgtcaatccttaccctcggaagcgaaaagaatagaagggaaatttccaatcaaagaaaaggaaagaaggaagatttccaatcaaagagaaagcaaaaaaagaaaagaaggaaaattcccaatcaaagagtgggagaaagcaaaaagaaaagaaagaaaattcccaatcaaagaatgggagaaagtaaaaaaggaagaagaagaagg

SEQ ID NO: 97410 - DNA, 306 bp, Glycine max
tttctaatatgaataacctttgattcacttagtgaaaaagtggagagaaaatgtgtgagagatctctctaaaactttatgaaacaaatatttgtaataaaaaaaatagtattttccaagaccaagtcaaagataagataaaacctagtctaacaaactaaatcaacaagaccaagttaaacaaattatttttttttataaacaataaattaattttaaaaaaacattttctatatttaattaaatagacatggtattgaaatatcaagaacatatagaacacaaaaaacacaagatgtttaactat

SEQ ID NO: 97411 - DNA, 256 bp, Glycine max
ttgcttctcgacatattatgcgcccgaatcggacatccgtgtgaaaggttatggccatttgaatttctcgagaatttccaatgtttaatttcgagcgtatcgatatattataagcctgaatccgacatccatgtgaaaagttatgacaatttgaatttcacgagagcttccgttgttcaattttgagtgtcacttaatgtgatgcgcctaaattggacattcgagttaaatgttatgaccatttgaatttctcaag

SEQ ID NO: 97412 - DNA, 303 bp, Glycine max
tggaggattatggggttcttatgacatgtggtactaggtggcggacgggcgatggtgcacaacaagttttccacatccacaatgcgcgcataaacccaccatcccctgttgcccacctccaactaagctcacgtactcccacgtagcccatatcctcgtttctctcaacatcgggtccccatcaatcctcccaagcttccacaacatccaagcaaaacaaaattcatacagcacaagctatcacagccaagtaaaacagggcaaaggcagaaaactctgctcaacacaccaaccaaaatcaca

SEQ ID NO: 97413 - DNA, 256 bp, Glycine max
tttcttcctcaattattatggattgatgctcttaagacggatatgtatatattaaaccgagttccaaccaaggttgtctcaaagacatcttttgagttattcaagggttctgaaaccaagtttgcgacatatacgcatttggggatgcccgtttgaagtaagaatttataatccacaagagaagaaacctgaccctaggactattattgggcatttcattggatatgctgaaaggtctaaagggtataggttctat

SEQ ID NO: 97414 - DNA, 299 bp, Glycine max
ttcaatatatttgaattgtttataatgttgttatcctcttatcaattggttacaaaataattacaagttatcaacatagttattatgctgttataacaatcctaacaatcaagaacccaaggcatccgcccaatgttataaataactagggtttatactcccttttcattcattctgagctcactcacctacttacttatatgtcggagtcccttttgtaggtatttcctcccctctccccctcattccttcgatgaaagatatatgcaagtctgacacaagagatcgtgaagtctatt

SEQ ID NO: 97415 - DNA, 252 bp, Glycine max
agctttaagaaggcactgaccttggagccaaaggatggttagttacgaacatacaattttgggtcaggcctttgtcatgtacttttctgtgttataattgccgagaaatatttgaatttcttcattattttagctaaggtattgatgcattattgagagtcagtttcacattttcttaaatttaaaatatggatttaacctttttaatgatacaagctgtaaattaatatccagatgatgatagaagatggg

SEQ ID NO: 97416 - DNA, 299 bp, Glycine max
tgatttggtagaaagaatgtttgaagatgaaaaaatatggtacaagtgaaaataaagccgggatataatatattctgatcgttatgcttgactgaagacagatggtttacttcaatgttgatatattctgtagatttcatttgtaaagcgtattgttgcactcatttctaatattcgtattttatttatcaagtaaactcagataaaatttaatctaaatttttcactaaatcgtacagatttttgaagaaatattgtattttaaaagtactatttttagcatttcgcatatgtatggg

SEQ ID NO: 97417 - DNA, 255 bp, Glycine max
tagctttgagccaaaatcctgactcaccataaaccttgacccagggtgagaatgccaatccttaccctcggaagcaaaaaaagaatagaggggaaatttccaatcaaagaaaaagagaaggaaaatttccaatgaaagcaaaaaagaaatgaaggaaaattccccaatcaaagagtgggagaaagcaaaaaaaggaaaagaaggaaaattccctaatcaaagagtgggagaaagcaaaaagaaaagaaaggaaaa

SEQ ID NO: 97418 - DNA, 301 bp, Glycine max
tctagccaaatggacttactttgaattaattcctttgatagcccctttgagcctatgttcccctttctttgttttgaagctcattacaagccttaagtgaaaaaccatgatatcaccttacctttaaggaattatggagctttggaattgttttgggaataagtgtgggtgggtatgcttcattggaagatatgatttttggccatgcttaatgttttattatggccatgcttgatgtatatatatatggcctagttcttgctttaatctttaaattcgtactgtttattaaagaaaaata

SEQ ID NO: 97419 - DNA, 298 bp, Glycine max
taacacaccggtttttgcataacaatctttggtttaaagctaagtacaacggttttatcaaaaaccatcgttgtgtttacaacaataccaataagatttccactctcccgtcgtcactctctatgaatcctcagttcttaatatatttatatctaactttatatatatatatatatatatatatatatatatatatataatgagaggaaacatcttatatgtggagtattaaggtttaatctaaaaaattcacatgatttattaaaaaaataacatgaatttttaagtggttaattgg

SEQ ID NO: 97420 - DNA, 257 bp, Glycine max
agctttgattatatggtcttcaccgacgaaaagatcaaagtgggtctaaaaagaggcaaatctgatcatcatgctttgataaatgccaaaaaaaaaaactagggcagatgaagagggtgagaatgagggagaagccgtgctgtgactgccattcctatacagccaagtttcccaccaacccaacaatgtcattactcagccaataacaaaccttctccttacccaccacccagttatccataaaggcaatccctaaa

SEQ ID NO: 97421 - DNA, 303 bp, Glycine max
tgaatacaatgaaactcgcttatttatcaaagttaagattcactcaatttgctcaagtttccttcgtccaataaaactgacagtgttacaacacttgtttattttgtctcagattattctcttatgatttgacactcttaacatgaacatattcaagctttatacagacttcagagctttgatccattgaaagatcccagctagctgttgtctaatattcttggcacttgacacgaggccactattatgcagagagagagagagagagtgggggactagaaacactttctacaacatatcttt

SEQ ID NO: 97422 - DNA, 257 bp, Glycine max
agcttgatattttagatactgccaatttggtacatatcaaatatcaactgctagctaggtagtttcagttatttactaaaaggtatcatgattctgttatgcttctcggaaagtgtgtgtgcctaactatgttcaatatgatgcaggcaatccaagagtaactcctgaagtgaccagagatgtttgcttattggctagaatgatggctgctaacttgtactactcccagatagaggatcttatgtttgaggtaattg

SEQ ID NO: 97423 - DNA, 306 bp, Glycine max
ttataagtgcgggtctgggatactaatgtcaagtgttcgcgatatgtggagatgatgttccaagtacttcagatttggtccgaccatgccctcctgatttccagctgggaaattggcgagtggaggaacgccccggcatttacgcaacaagcataatgtaaaccttcacggttttaaaagctctatagttgggcctatgctttagagttttctttttgttaaggctttgtgtcttttgattttgaatttataatacaaggatctttcttcatctgttcctgggctctacccattctcattcatttg

SEQ ID NO: 97424 - DNA, 259 bp, Glycine max
agcttgattgaagaatccagaagaagatgagttatacatgttcgctaagcacaccactttatctcactaagcgcatagcttcagttcatccgctaagcgagaaatgtgcgctaagccaaaaatcactaacgtgtgctaagcggtccataagtgcgctaagcgcatgagcacaaacaaggccacctatttaagcctgaaatcagattttagaaggatattttggactgggattcaaagctttgcatgcctagggtttcta

SEQ ID NO: 97425 - DNA, 305 bp, Glycine max
tcttgaggaagctacatgatgttgcctcggtaaaaacgcttcccagccttcattaaccgttggatcttctcgaaatttggtttacaacttcacaagacacttgtccatgatctgaccgttgggatcttcaagaagatgtctggagtgtgggctaagcttccgttcctggagcatttcttatttaagcatttcggccattgctttcgtgtatcttaggaaaaacgtcatttcttctcctttctttcttccaaagtcatttctaacatcccaatcactttctccatctcccacagccaccattagcc

SEQ ID NO: 97426 - DNA, 258 bp, Glycine max
agctttttttttataaggtcttgattatataatatacacgacaatagttagagtatttacaaacatttatgacaagtttagggtttgttatagtgtctggctaaggcacatgccacaatgtatgggataagactgtactttactatgaaaataatacattacccccactttgctatttatcatattctagggaaataagtgaccaatagtctcttcccaagcaagcaattaatttaaaatacatataacagtcttatg

SEQ ID NO: 97427 - DNA, 306 bp, Glycine max
tatttgtatatgcatttggtttgtttagtgtgttaatcaattctgaatctgtttctaggctcagaatcagaggttcatcgtgcttctgaggatgtgttggtccacaaaaccaggcagccagggacaaagagacaagtcgaagttgatttagatttcacaagttttgtcgagaaaaaaatatccgatatcttttctcctcccaggaatcccaaatcattacagctacctgaaaatataccacctagcattacaaaacttccagaggactgccactatgaaccagaggatcttgtcaatttatttctt

SEQ ID NO: 97428 - DNA, 255 bp, Glycine max
agcttataaaaggaaagaaatcacaaggtaaaaaaagacacaaaaattatatgtccctagcacaacaaataactgaatttgaatgtgggtgagaatataaaggaagggcatacaccaaattgcatcttgatcaataaagaataacagagaaacattatggtgaaaaaaaaaaattgaccttgatattcaagcgccaatcacaaggatgccaccagcaaacagtatgcccaggatgaactgttatttgcaacatag

SEQ ID NO: 97429 - DNA, 297 bp, Glycine max
tgggcttgagcctttctacttattaggatctctagcaagaacgaggggactcccttgaatactacttcatcatgccatcggaagaaattcttcactctatgctgaaatggctatctctacactagcacaacactaacttgacttactagaaacgatcatactcaattcctcataaaacaagcatcctgaatgattgagctcaagcaaagcaccctaagagcaagaaacctgaccaattttgacaaagcctctcggtctactacttcagaaaaggcttcttactactctaggtaaaaa

SEQ ID NO: 97430 - DNA, 255 bp, Glycine max
ttgcttcatggtgaatcaaaggtgattcaaaggtgttttgaagataacaatgatgataacaaaagatgatgacaaaggtgatgacaaaaagctcaaagatcaatcaaagaacaactcaagtgaatcaaagatcaatcaaagaacaactcaagtgaatcaagaacaattcaagagttcaagataagaatcaagaagaattcaagactcaagacgaaagtttagagtcaagaatcaagattcaaggttcaagatctc

SEQ ID NO: 97431 - DNA, 303 bp, Glycine max
tcacagaaaggaagtttccttcaagtaattgtcttttttttttccttttattacatttattattcttattcaataattcatatcacactttcttgattattatagtgttcctttgttttaatttacccactaccaattaagctaaagtttatgtgattgtgagcgtgagtatatagttattgaatggtgccaactctatgtgagttagaaagttatagagacttgttcttatgatatccagtgttgatgcgtgtcattagcattttttttattatcattgtgtgcgctggtattatttttaat

SEQ ID NO: 97432 - DNA, 256 bp, Glycine max
agcttatgacagcaattacaagcctttatagagaatgtgggaaacacaaattaaataaaaaataaataacgacttaaaaactagatgcatttatcaaaaaacatcgctatctaccatgttatattttatataaagagtattaaaaatgcacaattaactatttaaaccataagagtaaggtaaatcagttataaaggtgttgacaatttaaaagctgatatatatcagacgaaacctatttggtgtatgtatttgg

SEQ ID NO: 97433 - DNA, 304 bp, Glycine max
tgcagccattagaataaaatgttcatgttattagaagtatgactgaaaatgttagtcagcttgtcagattgattgtgaaggaatgcattgactgtatcccggtgagagtgtgatccttaaattttgagagaaacgactatcatttagtactgatttttgcacgaatctctgaagtatggactgaatgcatgtaattgaggatgatgaaggctatgtttgattgtgatagccacttagccaaaaagctgaccacgtgcttgaatgatttatcccttgcacccagtttgagttgaatgaattattg

SEQ ID NO: 97434 - DNA, 256 bp, Glycine max
agcttatagtacaagtgtatattaacaagaattattcaaacaagagcatataaaaaatacaaaaataatggatctagccttatcttaatgtattcaacctgtcctcttctttattccactgtcctttgatccaacacacaggagactgttttttcttgcttctccttcccaccactttcgcattcttacctaaaacatgcatacctttcgggcacaatgtaggggtttggttgatgtgtgtccacttattattaaa

SEQ ID NO: 97435 - DNA, 302 bp, Glycine max
tcacaaaagtttgtattgcttgaaacaagcaccgaggcagtggtacaagaagtttaatgagtttatgagcaactcaggattcaaaagatgtgacatggaccattgctggtatgttaaaaaatatactaatagttatgttatccttgttgtgtatgttgatgacatgttgattgcaggatctagtatggcagaaattaacaggttgaagcagcagttggcagaaaactttgaaatgaaggatcttggtccagctaaacaaatccttggtatgagaattcttagaaacatatcagaaggaattt

SEQ ID NO: 97436 - DNA, 255 bp, Glycine max
agcttatggcctgtttccacattcagatcaaatcagtgtttcaacaattgttcttttatcaagtccatgcaaaaacatttgagtccatttggtattcgggaatgtccttcattattttcatcctcaagatacacattttcccttttcaaaaacccttttgttgtgttttgatctacaaaatttttgaagagtaccggtggttgttcctttcaaaagcacgttcgttttatgaaaagggtttgaatcctggacaaa

SEQ ID NO: 97437 - DNA, 299 bp, Glycine max
taatgacttgcttagtatctttttgctacttataatgtcattcatgaacatacaacatgttgctcagacatgcatcatgtcaaaatggtggaaggatagttgaaatttttctatagttctattttaccttccattgatttcagcaaccatgttttctttgaattaatgcttgagattgtatcttaacacaatggaaataatcccctacatactattgaccagaatctccataattactttaaacctgagatattactaatcttgaagggtattttgtgtcttataatatccaaaaactg

SEQ ID NO: 97438 - DNA, 254 bp, Glycine max
agcttcttagtctcacctgatgaagatgaattcatggctacttcatgcattcctctaatgacaatagcatcatttctggcactgaattggtaggagtttgaagccatctactcaattaaattcctagcctcagcaggggtcatatcaccaagagctccaccactggcagtgtcaatcatactcctctccatgttactaagtccctcatagaaatattgaagaagaagttgctcagaaatctggtggtgagggca

SEQ ID NO: 97439 - DNA, 300 bp, Glycine max
tcaccttttggtcctccttatagttggtgcatgagaaaacatgctctattttcatctcccactccaagtaggcctccggatcattctttcctttaaatggaggaatgttgagtttaataccatcaattcggttttgtctaggaacaccatcattccctcttctcctcctttcttcttcattatgatctctattctccatttgatccaacctctcatggagcgcatcatctctttgtttcattaacctctccaaatgttgcatcaaagcttgcatttggaattgcgaaagccccactccat

SEQ ID NO: 97440 - DNA, 252 bp, Glycine max
tttcttgcacttcttcgctttcctcagggacttcagcttatttcccacttaggccttttagctttgggagccaagttattccttgcgtctagacttcaaccacttgtgatagccaccaacgatgccattgctacttcccctaagctccttatctttccattccactgtattccatgctttacggattctctacagtatgattgataatgaagcattgttgagagaacatgtatgattgataatttcaaacag

SEQ ID NO: 97441 - DNA, 290 bp, Glycine max
  unsure (1)..(290): unsure at all n locations
tgaacaagctacaaacaacttgtctcccccaaaaaaccaataaaggacatgtcacgtgccagttggagagcccatcttaaagctatagcctctgtaattttgggaaccaataattgatttgtaagtttcgttgttgttattaggcattgcccctgagagattatgcatatcagacccaagcccacaccattttgtttacgttaagggtgnnannnnngantgngatagncacttaanctaattgctgaccatctacttgactgatttatcccttgcacccagtttgagtt

SEQ ID NO: 97442 - DNA, 254 bp, Glycine max
tttctttgaaattattatctccatttaccttgcttcggttttaagacaacacattgggttaagacaatttttgtcccaaatttgggggagttgttggatggataaatttaaaggtaagaaactacaacacacatagcaaattaataaaatgtcatgtcttaaaaaaaagaaattcaaatgagtgtgtgctgttaaaacaaagtcaagtgaaaggctagtgaatgggctaagtggattgaaaagacaaactgggg

SEQ ID NO: 97443 - DNA, 300 bp, Glycine max
tgaacgagagagatacctctaagtgatgcaaagaggagccgacggggagctcacgataggtgaggggagttattataaaatttaccgttttgacaccatagttagggtcagggaacctagctatgagaatatccgcctgttcctgttgcatgctgattttctttcaagaaaactatgttttaaactaatgggatgcgatatatatattgttgatgaataacattattgtttattaaacttgtgttgtttgaagacttggggagtgtggacctcgggcatgaaaaatatatttgtagaagc

SEQ ID NO: 97444 - DNA, 297 bp, Glycine max
  unsure (1)..(297): unsure at all n locations
tgtcatgctaatccctctgatnttagaacaaactcatgtaatctattattcacacgcgtatgtgtggaatatcctaccatntatatcaacatagaggccatccaacacattctaattgtcacacacatatatgcatgtgaagagaacatacattcttacgctcgaggcattgcgtgcaaaatcacacctaatttatatcttatacatatgctattacacactatctacatatatgtgaaaatatttatacgaattgtattgttcactccattattctattgcaagctattacttatg

SEQ ID NO: 97445 - DNA, 176 bp, Glycine max
tatcgacacttttcttttaagtgtcagaatgacaagacacttaatcgatactaggcatctatcgatacattttctgaatggttataatgctgataacactaaatcaatactggctaatctatcgatacttcatgaaaaatcattaccttaagattaatcgatacagacatatacta

SEQ ID NO: 97446 - DNA, 251 bp, Glycine max
aatcacaaatccatttttatgtacaaaccagcaatggctatcagtgaagttatctactggtgtaactggtctaatacaggcttgtgttgaagtgtgaggaactacaagatcgttcaatctaatggtttgctggtccaattctgaactggttatgttagtaaaatattatctctaacagtgatgtgtgtcgtagcctaacatggggtgccaaatataaacatccttgtgcactatttctttccattctttac

SEQ ID NO: 97447 - DNA, 284 bp, Glycine max
tgtattgacatatactgaaaaccaattgtttcgcagaactttgtctatactagaaaacacctattgtcgatgctatgcagataagtcaaaatacttacattttcatctgggtgttcaaaaaaaaaaccactttgagataatctatattattatactttttagcaaagaacttttaccttattttggtgttagacagtcctattttgaggtgcttaaaaaacactaggcattgaccatttatatcatttgttatacaaaaaaatagtgagagttggaacgccttt

SEQ ID NO: 97448 - DNA, 151 bp, Glycine max
  unsure (1)..(151): unsure at all n locations
cacatggagcatatgaatctccaacaacacacccatctgttattatttgcgttcgcttcactagatgctttgatagaaatgcatatatgtgatgaagaggctcacaaccaacatcatacattcactngagaacatccgattgccatcaatc

SEQ ID NO: 97449 - DNA, 400 bp, Glycine max
cccatcatctattataaccaaatgtgtaaaatttgaaaacagaaaatatcaactgaaattgacagtgggcgcttagcacgacgcaactcacttatcgcgcctcatgaaatataactcactagcttagcacaacaggtgcacgcttagctgagtacgacatacaattttactttgcataattggcttagtgagaagacactcgcttacccaaacaattatttacactgcctaccagaggctcctatgcacttgcactgacctatggttacagcaggtgctggctattaacacatgaaaactacctaagctccttactacaattcaatttacagttgtggtacaatatggctaccatatgcgaaatgcctataatactggtaacagacaaaaattttagtct

SEQ ID NO: 97450 - DNA, 122 bp, Glycine max
ggacactatcgctggattgatacgaaaatgtcgaaagagtatcagagactgatcggtctcatgccgaagccgcgacgtaaacttgaatgaaccatctgaaccatgtaggtccatgcattagg

SEQ ID NO: 97451 - DNA, 329 bp, Glycine max
  unsure (1)..(329): unsure at all n locations
atgcactatgtcatcaatcaacatagacatattatggtangacgaacctccttcttctatnggtttctttgccatgtctgcgtactatttagctttttctcttcttttttcatgatctccacctttacgcatcactttctctatggcctctntaacactgtcctttttcacctctcgaacacattctccatacttatctttccctccacagtgaataacaatttcagttctcatcgtcacaccaatcttcaccacttgagaaagaagcttctcattgtataacatttcaacagcagacacaggtaatatcaccaaaggcacaccagcac

SEQ ID NO: 97452 - DNA, 295 bp, Glycine max
  unsure (1)..(295): unsure at all n locations
cgggtgccgggtagaacttgggacgagtggtctatgcaaacatctgacattcaccacccgctactgcgggaccggagcctacaggactttggacaccgtaagaacaaaccaagcagagctggtnggttgcacttggacttgatgaattttaaatggctctggtatcattacaagggtggaatcaatcacgcttaagtgaatgaactagaggcttgtatcgtacacggaggtattatacacttaaatggacagaagtaaggctctggatcatacagggggatcattcagctataat

SEQ ID NO: 97453 - DNA, 215 bp, Glycine max
  unsure (1)..(215): unsure at all n locations
aatcatagagtgggagaaagcatnaagaanagaaagataattctcaatcaaagaatgggagaaaataataatggaagaagaagaaagaaagaaagctcctgatcacggatcgacggaaacagaagatatgtgcagaaggtcttggaccgacaatatctgacaatacaaattgcaccaacgacaaaagaagaaggaaccacactaaatggcttctc

SEQ ID NO: 97454 - DNA, 353 bp, Glycine max
  unsure (1)..(353): unsure at all n locations
tgtaccacacatcgactcgaatggtttcactcttatggtttcgcttganggttcaagttaaaccggagttcattgatttgatgcgtgtgatagcgtttgaatacattgagattcatagtgaccatccactacggttgtaggttaactggatgatgtacaaatgactaacccgnataatcttgtgcgatctcttttctcttatctagttgcatcatgtgatataaatgaacagtcttgataaacttatttaaggtgtgtatggtttctggtcataactgttgaaaacatatgtaaacctgataacaaaggttactattaatgatataatgagagaatttttgatcattaaccct

SEQ ID NO: 97455 - DNA, 460 bp, Glycine max
  unsure (1)..(460): unsure at all n locations
tagcatgcgttatgagatactcacaggtgttntcactcctttttagccacattgcccctaatgggcttctaaactacctanaatacctaaccctaaaactaagtaacttacctaacagcaactaactacaaaaaccatanatcaactatcctaatggttgaagcaagaaaagtaataatagaagtatgctaacttacttggattgtctttgaaatgaagaanatatgatgcagagaagcagtacacacgtagcagaaagcaaaagaatgctcatagatgaaaaggtgcagaggtttgggtgcatangtagcaacccaagtgcctctgcctttgcttttaanaactgaaatttgatggtgcgctagtgggaattgtgttagcgtgcaacggacgttgagttaaaacactacgttaactacctcggctagcccaactgagtgtaaatctgaagcattgggat

SEQ ID NO: 97456 - DNA, 211 bp, Glycine max
caccaagtgaagagatatctctgctactaaccttgattcactcagatgtgagcacgactgcactctgagtttggtgtttactagaagctttatcatatggatctcacacaatgtgaaagttttaatgccaagttgcttcttggttgatgagcatacaacccttatgaacatcttttttttcctaagatacggaaagcgccattcttttcta

SEQ ID NO: 97457 - DNA, 286 bp, Glycine max
  unsure (1)..(286): unsure at all n locations
tcaacaggtaagttcccgaaatcaacctttcatcatttatgtgccttagggccccattgttcactgctttattttatttgttggttctgaccctttgactgcttaaccttattaagtgttttcgctaaaccaaataaaaaattccccgacattgagtgaatatctntaattctgtagaaaaatcgacacttctgcgaccacgtaaaccaaagagcaatatattatataaaattcttataatataaaaacaacgcgttttttgattctttatcatgcaaacaaggag

SEQ ID NO: 97458 - DNA, 346 bp, Glycine max
  unsure (1)..(346): unsure at all n locations
atcacttatttttactcaagaatgactcttggcatctcatggaaatcgtgtacatcaagcccacaattaagtatggtttcttttgaatttctaactataaatggtaaagtacagctttgcanaaaatggatattctttggtttttcatcaaaactagtanatactatcctaaacacctttgatactgtgctaatctccctagaaataaagtgtacacaagtgaacctcagacagagaatgatcgaggccgtacccgaatcatataaacatgaaaatgcagtaactatgaagtgatctatgtctgttccaacagcagtgcaaaccaatgttatatatacttgagaac

SEQ ID NO: 97459 - DNA, 332 bp, Glycine max
  unsure (1)..(332): unsure at all n locations
gtctaactaacaactaactatcataactaactaccaactactttctaaccatagttgactctctaatgattgacttctaacatgactaataagtttttatctataaaaaagattctaaagagtcatgtgatagtcattagaataaatntgtaatggcaaaatcctgatcattgatttatgagaattcattaatataattaggaataatatcttatagtttgtatcacaccacaaaaaaagaagtgatcaaatatacangtactctggtcttcccanacttctagtctctccccattttaaatatatttctttgctactaannattcattcca

SEQ ID NO: 97460 - DNA, 264 bp, Glycine max
tgatcaactctgttaatggctgtgatattattcagatattttaaaaaagcacatctttcagtactgcaaaaagccaaattatatctggtaacatcacttcacctgagagttctatgctcatttgactgatctatcaattggatgaacttctaccctcatgctatatgctgtgtcacacttctcttgaatgagtgacttatactagactatactttcgcgcgcatatctgttatacagttgaacatgactgactgaatgctagtc

SEQ ID NO: 97461 - DNA, 466 bp, Glycine max
  unsure (1)..(466): unsure at all n locations
tgctgcctatgcgacaagttgttggttttattggttgtaaggaataaggagcatagtatgctctttactccataatgacaattcaagaccaactntactcttcatgtgttngttgatggaactgaagaattctaagaatattanacatctgattggggaatannatgttgtttcaaccatgacacatgnnttgttaaacccctattgaatttttttatcatttgcattgtattaaccacacangaggcaaatagcttttgaaaatgtagttgaactttacaaacaactgnggcctatatttctacacataagcatataatactttaccaaatacaataaacatattctgttagattatacttcataaaaattttaaagtggtcagtcagagtaatccatcattctttgatgctataccatggtatgcactcgtctctactangtttttatacttatagaaagcgta

SEQ ID NO: 97462 - DNA, 260 bp, Glycine max
  unsure (1)..(260): unsure at all n locations
gagagctgtctgaggaagtgtggtggctgagtgaagacacacacacactctctggttttaaataaaagggttntctctttntctattatattattcaagctatgccacatgtccctaattgagtggagcanaagggcccactttccctttntactgtgacccacactcagccacaaaagtggngaanatctgacctttganacgctaaaattctgccttcgtttgcatgccgtatctctggttcagttcctcgcgttctc

SEQ ID NO: 97463 - DNA, 370 bp, Glycine max
  unsure (1)..(370): unsure at all n locations
gttaccgacatagggatctatcttatcgattatttcttcaggtgatatggtaatgtaccaacattgagtgataggttcaactctagcgtatcgctcgtacggttcaagttagaagggaagtcattgaatattgattgtgtgtgtattgtgtgtgtaatacattgagattcatagntgaaatatccaactanggttgttaggtataactggatcgtatgtataaatgactaaacccgcataaatactgttgtgaatctcttctgctctaatcctagtatgcatcaatggtgataataacattgtacacgtctgtgataacactttgatttaaggtgtgtaatggtttctggtcataatcttgttgaaacta

SEQ ID NO: 97464 - DNA, 290 bp, Glycine max
  unsure (1)..(290): unsure at all n locations
ggagcactgatatgaacgaataaaagagggagagaagtggaactttgaagtgtgtctcataagactttcatccatcacagntacaacaagtgttacacatgcttctatttatagactangtagcttccttgagaaactatcttgagaaaactttctttagaagcttctttgaganaacttcattgagaagctagagcttagctacacatccctctaatatactaagctcacctcttgagaagctttcttgagaagattcataaagaagctagagtttagctacacacacc

SEQ ID NO: 97465 - DNA, 235 bp, Glycine max
gacttcatgacttctataaaatatatttctgttactcttattatctctacttctttatgaatgtaaatatttacactcaaatttatgcattgctttatttgtttcatgagtaaaacattgacgtatgagaaaatggacttatctttatacaatagtgaaaggttaattgtgatctgtttgcacgcgatttttttattaatgattgcacaattaaagaggattttcttattccacc

SEQ ID NO: 97466 - DNA, 419 bp, Glycine max
  unsure (1)..(419): unsure at all n locations
tgtgctagagtcacaccttctatgctngtggcatctanagagaatatgctangatgcatntggcatattctaagaatattccttttagattcacaagaaatgaanattgaaatcacaaatttagttattggcctatgctataaatagaaacatgtgtaacactttgtcacaacttgatgaatgaganacttatgagacacatttcanagttcaacttctctctctaatctcttntaattccccccgcccccatctctctcaatttcttcctccattgaagcttcctctttaagcttcttatccaagacactctcttggtggtgaagcttctccttccatggcttattctntagtggatgacgccttctctcacctcttatcctttatcttccgttgcannatcatgggctgaaataact

SEQ ID NO: 97467 - DNA, 137 bp, Glycine max
tcaagaatgagtcaacaagttcaagatcaagagtaatttcacgtttcatgagaagaaatcaagaagattcacgaatcaagagaagtttgaattcaagattcatgagaagaaatcaagatgacttcacaagggaagta

SEQ ID NO: 97468 - DNA, 351 bp, Glycine max
tcctatactgactggcgtcgacccattctgtggaaatgtgaggaggtttgaaaggcaagctgcggtgtattttatatatgccttatgtgttttatcaatatctcattgtgataattaaaatgctgagatttttttaactgagctatgtctatgactctaactaatcactaatttatttaagaatgatgggggcctatttctttgcccagagatataaaataaaatatgtgttatggattaaattaatatagttataaagtgtatacaggtaacaatattttatacagacaactgcaattactaaagatgctatgcctggctaaaataaatataattcattcgactgcatat

SEQ ID NO: 97469 - DNA, 272 bp, Glycine max
  unsure (1)..(272): unsure at all n locations
atgaaagatgcaatgcagcccatactaatctcactcaagtanataaataaataaaatagtgaaactgataaatgattatacgatttctattgatctttacctacagtanaataagtaaagcattgacaacaaagagaggcattangaaatagaatgagatcacaaatgcangattactatgcacgaaatatagaaccactactagaaattgattgagagagagaatgaaaagtaaaagaataatattnttttacagaagctgaaacgtactt

SEQ ID NO: 97470 - DNA, 223 bp, Glycine max
gagatggaatcccttcaggaaaagatcagacagtcccactagagtatgataaactgaagtagaaaatatgaggaaagaaaagactgaattagctaagagctgcttaggatctaatgcagtgaaaccccaactttttgcgagtccaatggaaatgatcatcattcttatgatgatggccattagcaatctattgaatattgttgtactctatcaatcagcaatt

SEQ ID NO: 97471 - DNA, 92 bp, Glycine max
  unsure (1)..(92): unsure at all n locations
aactcatgaaaaagcgttataatgtttctatataaaaacgttgtgtttatacaataataataaanacatgatatgtcatccatatgatgaac

SEQ ID NO: 97472 - DNA, 351 bp, Glycine max
  unsure (1)..(351): unsure at all n locations
gaggaaactgcgactctattaaagaagttattagacatgagaagctgatgtcatacacagctctttgacaacaactaccttgatgaaattgatctttgtcctttcnactgatgatttgtcaaaaattgaccctgactaaaaatacctctgtcctgttaatttagaagcattggtcaagaaattacttaattggggtgaagcattcatgaaagaaaagtaactcgccaccacaatagtgatgtaaataaagaaagaagataatggctgtcatagcaaacactggagaaaaaggaaactctgttaacagacctggaagcaagatgtttctaatctaactgatcaaaacaagat

SEQ ID NO: 97473 - DNA, 203 bp, Glycine max
  unsure (1)..(203): unsure at all n locations
atattaaataacttaatttcaagtgaagcttagactcanaaacaaaaggggagaatatggagaattaagtgagtggtcgactatgaaanagaatgtatatgtgtctcttgatttcaggaatgtcatcatcaaaaaggcggagattgtagaaacaaactctatgatgatgattcacgtataaatcacgtagttttgatgatgac

SEQ ID NO: 97474 - DNA, 315 bp, Glycine max
tggggcctcaaactcacttaatttcagtccaacgtcttactattttatgttcactaaatcaaaactaacctaaatgatactaaagctcgcgggcccgtaccactatacttgctacccaccctgtaccgaggaacggcctaagtggctcctcacccttatcaactatctttctagatgtctgcctagcataatggcctacaatgaggttacaaaataggctacagtataattgcctacactgctttcctgatgagagatgcataatctacctggtcaaaattgtactaatacaaagatacatctcatacatttctg

SEQ ID NO: 97475 - DNA, 302 bp, Glycine max
cggaagggattcacattcagtattgtgctgccggttgtttactatgaaaaaggctgtcacttaaactattgtgcttctggtcctttaatgaagaaggctgaagtaagacaccccacttcctaacttgactgtttaggcccactattgtacttcaggaaaaactaactttcactaactcaacacagtaggagcaccactgtcactagcaactctgctggctctattgaagggtggactagatgatctggccaagtcttgatcactccggagatgttgcattgcagagcatttatctatatagc

SEQ ID NO: 97476 - DNA, 323 bp, Glycine max
  unsure (1)..(323): unsure at all n locations
tctaaatataatgtagtgganaaaggtttatagtcactcaaataatgtgggatgtcacattatctatgaaagttaacattacaataaatcgaaaatctcgtatgttattaaatctattacataatacttaatgaaaataagcacgtgacaatacaagttgaacctctaagaaagcatcaaacacatccttatatagaggtgataaatctttatgtgtaatcaagtctcatatcacagaataatctttatatcacacacataaatcaacttataaagatattttatgatctcgtgtaccngaatggaaaacgtaatgatctatc

SEQ ID NO: 97477 - DNA, 342 bp, Glycine max
atgtttaattttttacctcgtatctttccgttaatattaaatgaatattattgcttctctacttaaaacaattctctcttataattgaattaacacttattttatgatacatttttatttttgtaaaaactataaaatcttacatgcttcttcaagagaaagtacaacatcttataataaaatcctctcttctactgcaaatataatttttatatctctatttaatttattttataaactactttatatgtcaaaagattttaatattttttatgatcaccaaatcctttgctgcaaaaagtcccatattttttttcttcaaactcacccgacagggttcta

SEQ ID NO: 97478 - DNA, 188 bp, Glycine max
catctcttaatcctttcaaacttattatgtggtgactttggaacatggatggtcattacagagcttattatcggtcattgtacacatataaagctgctgagtgatacgttgctctttttatagacgaatgatggccggaatgctactaagttgaaaaaccaaaggtcaatctaccatacaacgaactg

SEQ ID NO: 97479 - DNA, 298 bp, Glycine max
  unsure (1)..(298): unsure at all n locations
actcgcatgtctgggtgagtgccgtaatatatcacggcgcactcaaatgaatgttgaagctgagagcaaattcaaacgacaataacgttntactccgatgtctgattgagtcccgtaatatatcgagacgcttcgaaatgaatgttgaaggtcagagcaaattcanacgacaaataactttttatcggatgtctgaatgagtcccgtattatatagagacgcttcgaattgaatggtgaacctctgagcaattaaacgacaataactcttactccgatgctgattgagtccttatata

SEQ ID NO: 97480 - DNA, 409 bp, Glycine max
  unsure (1)..(409): unsure at all n locations
gcgggatccagagaaacacacgctatgtctgcagcgtgcgcctagcgtgcgatctgaatgcgctaagcgcgtttacgaaaggccanagctcacttcatcagctataaatagagagtcagtccaagggaaacaacacacctcgcctcagagcacttncctcagcattccaagcctgagctctctcttntctctctatattctttggntttattaacccccttctttctttcacccccattttgtaaagcccctcattgggccatgagtggctaatcccctatctagggcctgaaaacctaaaagccacgatgtatggtgacttcagagtataatgcaagaggatcatttanggttcatgtctaaactatcttctatctgcattatgccctaataatttggtttattcctc

SEQ ID NO: 97481 - DNA, 312 bp, Glycine max
gctcttagcactgagctcactaacctggtccttctgacctgtgttctgctttctacccctcattacaatattgcaacttaattaatcaatgaactgtgagatatttttcactgagacactacaagcattatgtacatcttaaaggctgctaccactttggggatagaagttcagccacctccactgaccaaacaaaacacactctctgaccccatcctaatgtgattgaaaaaaataaacaatcatgagtgtatctgacaagcacatactgagcccttcagagaatcatttactacaccacaactttcctct

SEQ ID NO: 97482 - DNA, 257 bp, Glycine max
  unsure (1)..(257): unsure at all n locations
acagctcctctgtaggagatgactgagagggacatgccacactacctattgattgaatcaactttttagaaatgggtactactctgacttggtgaaagttgatcctatnggatcttatcatcaagctttatgtaatgagatccgctattgtatgtacaaagactaatcctatcagaaattaaaagtctgcgatggaggtcattctaaatggagtgctgtctactctatcttgagataggattagcttagctgctaaa

SEQ ID NO: 97483 - DNA, 288 bp, Glycine max
cataacttttcacactgatgtccgagtcgggcgcataatatgtcgagaaggtcggaattgaacaacggaagatcttgagatattcaaatagtcataacttttctcacggatgtccgagtcaagcttataatatatcgatacgctcgagattaacatcggaactctcgagaaattaaatagtcataacttttcacacggatgtccgaatcgggcgcataatatgtggagaggctacgaaattgacaacggaagctcttgagatattcatatggtcataaactttcacag

SEQ ID NO: 97484 - DNA, 218 bp, Glycine max
ctcaaatctataacattcaatttcgagccgtctcgtatactactggactcaatcagacatccgagtagagagtatagctcgttgaatagctgagagcttcacattcgatttcgagcgtctcttatattacgggactcaatcagacatccgagtataaagttattgtctgttgagatggctcagacggtcaacattcaatatcgagtgtctcggtatat

SEQ ID NO: 97485 - DNA, 322 bp, Glycine max
  unsure (1)..(322): unsure at all n locations
actcggtatgtctgatgagtcccgtaatatatcgagaccgtcgaaattgaatgttgaagctctaagccaattcanacgacaantaacatttactcggatgtctggatgagtcccgtcatataccgagacgctcgaaattgaatgttgaatctctcagccaattcaaacgacnnataacttttactcggatgtctgattgagtcccgcaatatatcgagacgctcgaaattgaatgttgaagctctgagccaattcaaacgacataacttttactctgatgtctgatgagtccgaatataacgagccctcgaaatgaatgttg

SEQ ID NO: 97486 - DNA, 385 bp, Glycine max
  unsure (1)..(385): unsure at all n locations
ctaagcttgtctatgcttatatattcaactacaatgaatatatangatatgttactataatatatggatatcagaaagatcggcaataattactataccgcagataggtattcagaatatcatatacctctcatagtatcgggtgcttgccctattcaaaatatacctcttgtagtatcaggtacttagtctagccgaatacttgacaccccttatagtatcagatactcggtctaatccaatatctgatccctttgtaatactcctgctaaccaaaatcgaatatgtctaatgtatctttgacacttattaagaagattcctagataactataaaaatattagggagaatcagtcttatgatattatacttgacattactattt

SEQ ID NO: 97487 - DNA, 235 bp, Glycine max
  unsure (1)..(235): unsure at all n locations
tacaacctctctaccacaccantatccaaggcatccttataacccaagctgttccgcttcatgacaaacccttaccaccaaaaacaccacaaagatttcacaaaacctgtaggtacccaattctgtgcattgctaacttgaccatatcactatattcatggagcaaacccaacaagtctacctcatttttagatacatcaaccacttgctatttgagagccgggcatcttacttg

SEQ ID NO: 97488 - DNA, 240 bp, Glycine max
  unsure (1)..(240): unsure at all n locations
tcagctctcganacttctggagctgagctatctacccctcttaaactagctcacctcttggaagctccttgagaagatcctaaagaagctagagcttatgtacacacacctctctaatagctaagctcacctgcttgagatgagaagctagagcgtagctacacacccctataatagctaagctcaccccatgacaaantacatgaaaatacagaaaaattcctactacaaagactactc

SEQ ID NO: 97489 - DNA, 326 bp, Glycine max
  unsure (1)..(326): unsure at all n locations
cctgttgtcttatacttcactgatactgggtctttctcgttatggccaactacagctggctaagtcgctgctagatgagatgctcatgaaaggcattattcctgatcaagttctctgtattcgtctattgagaaagtattatgaactatgagacatcaatgaggctctggcacttcatgatgatattgcgaggacgggcctantttctgggactattgacataacagatccctcttgtcacacttgagaagaaaacatgtatacatacttgtcttctgttcctattttggtggctacaatctaattacttcatttatgccaagctc

SEQ ID NO: 97490 - DNA, 464 bp, Glycine max
  unsure (1)..(464): unsure at all n locations
tacctatcttgagtgcacaaatcaacaagagattctaattattaattntntatntcattcaaccatgagtnttaaagtataaaatatttatggtaattattaacacttttacaatganataatagtgaaacatantagaacagaaatgatatttagcctatanttttttatatgtatgaatcaaatacaagtatcaagaaatttacaataacttatcacactactaactaacatagtagatctgacatantatgtagatgatatatgaaacaaatanaaggggtgacaatactagtgtatctttgccattattaanacttaagatcaaatatttttaatataattatatatgatttaatgattaaatttaagtattttaatatactaagaactagtatatttagaaaaaaatggtatagatatactattntntctaaaatcatactaatacttttgtactacca

SEQ ID NO: 97491 - DNA, 386 bp, Glycine max
gtctatatctgatattcaaaataatctattggatgtttcatgatgagtatattgaggtatatactgactaaagtatgttgtggatacgaaatatattatgaatggcctgaatgtgatgatgagttgactatacttgcatacacactgtaaccttaaggcacagtaatctgacagttatagggtcctatggacccgcagttatactgagctgtagtaaatattgaaaatgaattgaacatcaggcctgctgtttatattcctatgaagactgctccatggagatgtcgctgcttagcgaaaaatttactgaatggcactgtgacagctgacaggttgtgtacctggtgattatgatactgcgtgattttaagggactagaggaatgg

SEQ ID NO: 97492 - DNA, 170 bp, Glycine max
  unsure (1)..(170): unsure at all n locations
atgctgtattagngatactattcaaaatgcgagtttntcacaattcttttactctttgtttctttctttcccaaccatcttggtctaactatttctgtgtcaaatatagtttgtagcttggtttcatatgcgaattgttatgtgaatgactatgctacatgcgcttatgc

SEQ ID NO: 97493 - DNA, 207 bp, Glycine max
  unsure (1)..(207): unsure at all n locations
cacaaccccatctttgcacttgatcccaataacagttctgcaacatagtttcaaatctatgatcactaccaatacaaaaattacaaaatcatttataannaaaaaacatactcataattattaaataaactcttttttttcaatttaagaccacgaatttagangtntantantaataataataataataataataatgataagtac

SEQ ID NO: 97494 - DNA, 262 bp, Glycine max
  unsure (1)..(262): unsure at all n locations
gctatgactgaattncaatagactcatattttataaacaatctctttcatacacttacacgatatttggctagtctatatgttgaggatgcataacttccaccaaaactctagttcacaaacttcaaccaatgttataagttattagaattgaaacttaataattataggcattcaaatatcagcattaattattagtagggaactcgtcatattatcgaggctatagtttgtctgtacgcatgagaaatctaactggtcat

SEQ ID NO: 97495 - DNA, 224 bp, Glycine max
ctctggacggacactaactgggaattgttcggagaaaccacgagcgctctagcttcgaatttcgggtgattccaaattcccttcttgggtgtcgccgtctcacccttcgctcaccgtatccggatcgactacattctcttgtcctaaggcccttgtcgggcttatttattgatatatcgcccctgacggctaacatattaagattctgctatcaaataaaaatt

SEQ ID NO: 97496 - DNA, 161 bp, Glycine max
  unsure (1)..(161): unsure at all n locations
cccctgaggagagtgaagaggtccaangccttataggcagaactttgaaaggcgcaagcggtctatggaataatcaagatgatagctatcaatgtctggaaagagtgcgatgaactaagagacatcaatatggccactgctgaagcattggatcgcgaaac

SEQ ID NO: 97497 - DNA, 128 bp, Glycine max
ctataaatcattctgttgccgactcacctagttatctttagttagtggttcttgataggatcgatatcacacctatagatctggtaaaacattgatccttgcatctgattttaagctcccagctctac

SEQ ID NO: 97498 - DNA, 181 bp, Glycine max
tctaatctatatatagacgcatgtgtaatacttgctgtaactctgatgaatgaaagtcttatgagacacacttcatagctccacttctctcgctcatttattccttcaatatcgtgctcacaccttctctcttacatttcctccattaaagcatcctcttcaagcttcttatccatggtac

SEQ ID NO: 97499 - DNA, 294 bp, Glycine max
  unsure (1)..(294): unsure at all n locations
atgtgttctacaactctatatcatcactttgtcatatccgcngaatcacacatcttatacataatatatgttcctcgagtggttgcatcgattacaacactaatgaccatgtaaatattcgtattctgagaatcgacagtctgctggtgagtaaccccactcgagattatctcacaacataatatagaatctggtgatgtaacaatagtataagaaatgttgcttataagtatatgtgtctatacattttcattaatatttataattcctataaagagttattagcaaaactgt

SEQ ID NO: 97500 - DNA, 368 bp, Glycine max
  unsure (1)..(368): unsure at all n locations
ctcatcgtgctagcgcanatatanatctcttagcgcgcataagtggatatcggcttagcgtgcttctctcgcttagcggatgagctgaagtggtgcgctggatgacctgnagcggtgcactcagcgaacctgacagctcatcttcttctggatgattcctcgcgcttagccactgagtgtcgcacatagcgaatgatcgctaagctagaagaatggcttagcgagaaggtaanaataagcattttttgcccatttgcctnnaatacccgaaatcgagagaaattgattattatacacacataacaaaagtatanattatctattacctatatttaatagagagtacttataatattacacaacaacta

SEQ ID NO: 97501 - DNA, 202 bp, Glycine max
ggactgaggtcttaacttatctcagtcacagtgtcctgttatttaacagtcctctggagctctaaaactctggagctctgaaaatctggactggtactcccccttaaactactactctgactctgaactactactcccccttatacacactctcgaagacagcttccccctttatactccctgcaaatgatcaaaaattctc

SEQ ID NO: 97502 - DNA, 138 bp, Glycine max
  unsure (1)..(138): unsure at all n locations
gagacattcctatgggacgagacctgcanacgagacttcttactcttcaagaagagcattgtcacaatgccagtcctgagtctagctaggccacgagtactcctactcctacatgtcttagtagttgtcgaagtcgtt

SEQ ID NO: 97503 - DNA, 201 bp, Glycine max
caacaaatacttctttcgcaaagggagttgttattccactagtaatgatgaagacatgacatatattatacatgtcatatagaaatattaggactattaatttcttctaccttttgctctaaaactatttctaagtaattccactatcaggaattaattttcattcagatctattcagttaagaaatgttccaaacaatgt

SEQ ID NO: 97504 - DNA, 201 bp, Glycine max
  unsure (1)..(201): unsure at all n locations
gtactatgtgangtgctgttgtatgtaactgcacctatttgcaacgcctcacttgcacgtaccctggtcaacacattatccaaacgatattaccgtccatatcacatcaatgaagctcttggggcttgggttaccacttggctctaccggaagactccaagatacataacgtcttctactactccatgcttataccacatc

SEQ ID NO: 97505 - DNA, 340 bp, Glycine max
  unsure (1)..(340): unsure at all n locations
cgttcaaactcaccatagtttatcttttgcttcctttcttcttttatctgctgataaattgagcatcttttgcgtacccacatgccagattttgtggtgtgaatctctgatnttggttttctatatcctagggtattgcacgtggngattatatggagttntctcntctgcatcttatgtttagcgatactgttggtattggctaaaactgtggttgccggtgtttatgtntntagagagactagtttgagatacactttcatagttgcattcttcgtgttgaatgatgtctcagcagcaaaacctatcttccgtttcgcaatctctgctacaacaaaca

SEQ ID NO: 97506 - DNA, 275 bp, Glycine max
  unsure (1)..(275): unsure at all n locations
ctctcagagtctcactctttgtccactcataacactacattatcactntctaaccctagggtaactctacccttcatccctagcagttgtccatccacaatttcagcacataaacatcacaagcatcatcataaataaccctaaactgaatgggtaagcttgactcacaccanacatggcaagtcaacacgctctcaacatatctcttcacaattaactatcacanagcataaaccaagtaaaactacccatcatatctgccanagccccatacc

SEQ ID NO: 97507 - DNA, 62 bp, Glycine max
aaggagttgcagataccgaaacgacttaatttagttgtaatgtgacaaaaattatgtagtta

SEQ ID NO: 97508 - DNA, 323 bp, Glycine max
acatggtgaccgaagaactcacataagcatgtcacaattcaatgctgaatgactttcagcactcttcacagctcacatatgcgaaaacgacactcacatatgtctctgcgacactatacactgccctcacataactcaattctgggcatgtgatggaacacccacaaatggatcacgccgacctatagcactatagcggattatgtcatatcttgaagttgctgccatgtgtgccaattgaatggagacatcttcttcactacaacgtacataaagcctacacatgagctggctttcatgataatgcattatcatgcgttggc

SEQ ID NO: 97509 - DNA, 328 bp, Glycine max
  unsure (1)..(328): unsure at all n locations
atactcatgcatgcacatggccatcatctccagagtccacctctgctcacctacgaaggttggaatgctatatacgacatgtgtgcaaccatcangaggccaaccataggggtcaagcacggctgaatgagagcatttagtagtacaccctacatctagtaagccaagatcccaacccttatgcgtggcctactcctaagcaatatgaagccgcaatggcatggcttggagaatggcccgattataaacaggggcagggcctgcagggaccttctaagatggagatggagcttacgacgatgatgacatgtgtacgtgatggaacttt

SEQ ID NO: 97510 - DNA, 392 bp, Glycine max
  unsure (1)..(392): unsure at all n locations
aataataaaggactagtaccttgtacctcattgcgtcgatatcctaacttgtcttttatcatgtattgtaattcttttgaagttgactctttataacttatntaagcatttttttaattatgtacatatggataaagattctctgtctcttctctatctctttcttaagttagatttaacgaaaatccacatacttttccttcttctctattcgttcctttcttctctactactgaaactcatttgaattgctgaagataacccatacaccagcgttgattgtatttataaataaacttctccagacgaaacttttattgctatgagattactaaatgaaaaaaaattatccacatatcaaattgttctgatataaaacatgtattttaaaa

SEQ ID NO: 97511 - DNA, 328 bp, Glycine max
  unsure (1)..(328): unsure at all n locations
tgtcataagtgctcttatataaacaatatagtcgatgctgagaatataataaccctatgcngaatacatggatgattatctaggataaatactctcttataaccctgattttgaatcccaatataaaactaattttttgattgtcatgccacattcaaacaatatagtcttactaccaatgtaagcaggatacttaactgaatgactgcaaattggaacataattgaagtcaagaatttaaacctcaccatatactgtgcgcaaagaacactaagcttggagagagtgcgcagccactgttgttatgaacaaccatctactatgttgt

SEQ ID NO: 97512 - DNA, 350 bp, Glycine max
  unsure (1)..(350): unsure at all n locations
taaactagctagacatttcgaaaaggctattgtgactcacgtaactgtgcgtcctatgaatcatatgttgngtacgtagatcgtgcttttgtcaaaagcatgttatgaaatctcggtcttctagtaagaactttattcttcttacgcaagtctcgtatattcaatactcttgatatctatgtgcctattgaggctgaatgatacacttacggttgtttgacgtgtggaatacaatatggggaaattgacgataacgttcaacaggactatcataccaactttgagattacctaagcggaaatgattaacgaccaaaatcttttggaaaaaacacgtcacttttaaggtgt

SEQ ID NO: 97513 - DNA, 247 bp, Glycine max
  unsure (1)..(247): unsure at all n locations
tatatagcacactataactactatgtgacaggannatttcctcaatttctcatgtatattatggaaagatcaaggaggggttntcagcatgaaatgtatccacttctcccactcgagaagttagagaaatctttatcacaggtttaggcttgatatttaagtgactcgctattttcttgagaattttggaatctcaagggagtggagtcacatttggaagcctttttaaacttattgtctattcgat

SEQ ID NO: 97514 - DNA, 286 bp, Glycine max
  unsure (1)..(286): unsure at all n locations
tcaacttgcatctatatatactttcaccctcactctctttcgcctcgagctgagtcgtgtgctgctataagccctcaaactgttcggcctatctctttcaacctcttattctcattaatgctcgtatgccacatgcgcctcactgcatactttctgcctgaggtgcgctgacttnctgccttatgttttatgtcgtttaagtgacttttgttcttagactcggtttacatgaacttactcgacaagtacctgcgtgactcacatgtaatcacaaaacatgcgtctt

SEQ ID NO: 97515 - DNA, 367 bp, Glycine max
  unsure (1)..(367): unsure at all n locations
taccttcatctgacttagcattcaaatttcctaagttatctnttccattattcaatacaaaacatttacaaccaaagatatgaagatgtgagaatgttggttntctgtcattgaacaattcatatggagtnntcttanaatgggtcttattaagccctatttaaaatgancatgcagtggtaatggcttcagccccaaagtattntggaagaggagtatcatttaataaagttctagcaatctcttnccaagatctattttcctttaacaacaccattttgttaggggttcttggtgcaganggttatgctcaatcccatgctatcacaaataattannatcttatttcaactcaccccatgacact

SEQ ID NO: 97516 - DNA, 298 bp, Glycine max
gatctaaatgctaaatgacaaatgacagatgccactctgctactatctatgaaggtctattattcagacaagggtgaaacactgatgccctatatcctattcacaatatgttttaacagcccaattggtaacacactcgtaacataccgacaatatgcattagttgtaaactttcaattatgttttaataccccaggctcggtttcccatttggtaaaacttcccaatagcaataccctcttaacaaaccttataaaatcccttttactttctggtgaacacatctccctacacactc

SEQ ID NO: 97517 - DNA, 353 bp, Glycine max
atggagctcaattaacagagcttgacaaataatgacatactttactcgatgtcgatggtccgtatgatcagaccttgaatcaaacagaactcgaaaaatgaagacatacttttattgagtcgatgaaccgtatatatcaaacctcgatttggaccggagactgacaaacaatgcaatactctacacgagtcgatgatgcgtataattagacctcttctgaacgaacttgacaatcaaaacaaactttattgagctgatggccgagatattaagccgcatatacagacctgcaataacacatattactgtgtgatgccgtattcgactaataacaacttggaataaacaattta

SEQ ID NO: 97518 - DNA, 318 bp, Glycine max
  unsure (1)..(318): unsure at all n locations
gacttgatgactccctgctagatatttccaatgactcatcaagattttcatggttatgccattattgtaataaagacaatcgcaacgttaataatatggatgagattggtgtcatcacctctcattctctaaccatcatatgtttggataattatntaaacttcacctgaacatgaacgtacctgctgggttgtttgtcaattgatatgtgtcctaagtgatctccaagtctgcccatcacaattgatgtttacacgctggtggggtgtcgagcgacgagaaagtgataacattgatgctggttcaatcataatatag

SEQ ID NO: 97519 - DNA, 469 bp, Glycine max
  unsure (1)..(469): unsure at all n locations
atgacacanatgcanaaatgatgatctggaaattntatgcaaaactggcatgcatgcacctatgcggacactcaaatgtcaaatatttatggacatgtgatgctacggcttacgatttatttcctctattttaaatcaacccaatgtctccaanatatgttcttttatcaatatgtgcattcattccaagtcaatttgggccgtcggggaaatttcacagcatcactcttcaggtgtgacacagttttttctcttcaaaatcggcatgatcaatgaattttcttcgaagaaagttgaaatatctctttcaaagcatgtccgtttagctgacacctatttctctttatcacttttccttactgcttctttttttctattgcctccttcttactccgcacttcttttctatgtgtctttttttactgcctctcttactcttgtcctttcatacaatactttcttctattta

SEQ ID NO: 97520 - DNA, 205 bp, Glycine max
tcacgacggatcgcctggtggagtgtttgagggcttctactgtggcagcacaagtatacttaagattgtttctatgaagagagcagtcacatctgctaaagttgtcctgctagaggattagactatctatgttccgctaaagattttctattcaaccttccgcgtttttaaagtgttgaaatacagtatactggaccttcaatgc

SEQ ID NO: 97521 - DNA, 308 bp, Glycine max
  unsure (1)..(308): unsure at all n locations
cgataagatttatgtcactcccatatacacgcattaatgggggcacaatgctgatctccgtgtggctctatcttcaccagagcaacagttgctgcaaactgaatatgaagattatgccatgtctcacaccagtagcatttgctttcttcgctctgtgactctcattgtatggaaacagaattaatanntaaagcatgtggttgttccatcactttctgagagttgatatggctaatggatataatattatacagatgctgatgattttgcttcgacgtgaagctataatggtcacaaagaactctgga

SEQ ID NO: 97522 - DNA, 204 bp, Glycine max
  unsure (1)..(204): unsure at all n locations
agagcacagntcctagacttatcccaatggtctttttcatgcacttagctngctcactagctntatcaatatcgttggctttgaccttgttacattagcacactatattcttttcttttcttttctttatataacatacaacttgtgtgttgtgtgcgatgatgctttctctctttcttttcatgcaaattagttccactcccc

SEQ ID NO: 97523 - DNA, 527 bp, Glycine max
  unsure (1)..(527): unsure at all n locations
cttctagacttctaaacgtgcatacgtagcactgtccttganatttagctntctaagacgatgcttacgtangcacagtcttggtaagcaaacattctaagactgtggttacgtaagcatgtcttagaaagcttactttctgagacggtacctacaaattaccgacttcgtaaagtgtgctatttccaagacgatgtgttcttactcgtctgtgaaatggaacactttcaatggtgttagcttctacgacggtcgacaatcgtctttgtatattattttggaccgtcgagaaaaccatttttcagtagtggttaaggaacgggaaactaattccactcattcactaaatagctttggctacatcttgtgacttttctcttaaacgaaaatatgcaaacactatattttcttcctaacctggttggatgtggattaaattctagaaatcattcacacatttgttgcttgattaatccttcatttgaatatttgttgatgagaatcattcttgatttattcctgttgat

SEQ ID NO: 97524 - DNA, 392 bp, Glycine max
  unsure (1)..(392): unsure at all n locations
cttcacaaatcgtctattaaaactttgctaagccatgaaactcctcacctctgtcacagacttatgtgagggccatcttgaatagccctacacttctcctcatcaactngcactccttttgactcacaacaaccaagaacacaacatggtagtacaaagatgcttttcaagatgcatacaatgtctttctagcacagcagacagatttaatgacaatatgaaacaagtgagtgctataanagaatatcataaagacacacacnaacttcctatacttctcagaatggtcatatctatgaaggctcgacgtagtagccaaaggtaaccacatccacaaccatattgtttaaagagttcatcatccctcctatctaattgatgatccctttaat

SEQ ID NO: 97525 - DNA, 176 bp, Glycine max
  unsure (1)..(176): unsure at all n locations
ctgtgcaatccctgaataaatatttgatgatgactactacgaactgttcggttggcttcatccggtgatgctttntggtatacctcnactggtaatctttcttggccgatgtcgcatcggattattctcgatcaatggttgtaatggagtcttttctctcgtgaggtcggttacat

SEQ ID NO: 97526 - DNA, 183 bp, Glycine max
agatatgggagcaactgatgatgggctggaacattctctaagctgcggcatatttggcctgattggatgcttaaagccttgcaatgctatctagcgactctgaagtttacaaatgcttgcagactccagctcattgaagaaattcattgtcacagccctgtcatctgttgattttcatggaca

SEQ ID NO: 97527 - DNA, 342 bp, Glycine max
  unsure (1)..(342): unsure at all n locations
gctctaggttgctgcatggaatgacanangtctgtatggtggtcaatataggagcacaaaccacagaccctcgcgacaggtacagatatctcggtcaaggccatctgggttaccangttaaccaatgcatctcagttgccttcaagcttcttatgtatcagatgatgcagccgagtttgtagctacctcatgcactcccctaatgactatagcattatttctggcgcataactgctgggagttggaagccatcttctcaattaatattctggcttcaacaggagtcatgtctacaagggctccaccactggcagcatctatcatacttctctccatattact

SEQ ID NO: 97528 - DNA, 363 bp, Glycine max
  unsure (1)..(363): unsure at all n locations
gctaagtacatacggtttatcaaaaaccatcgntgtgtttacaacaataccaataagatntccactctcccgtcgtcactctctatgaatcctcagttcttaatatatntatatctaactntatatatatatatatatatatatatatatatatatatataatgagaggaaacatcttatatgtggagtgataaggtttaatctaaaacattcacatgatttattataaaaatacacatgaattcttaagtgcgtaatcgggcacatgacattaaatcttgatcattcatgttcgattagacagtccccatttaatcttctaaccctcatatacgagacatctctcatatatctatctatata

SEQ ID NO: 97529 - DNA, 339 bp, Glycine max
ctcttcaaagcgttctgacttattcaaatgcgattaagcctctgctacagttataactcttctaaatgggcttctcgaccacacatgaagagtctataacagcacggctgtgttatgcatttcaatcatattgaatactttactttttcaatcaatcctctacaagccatgactctatttgaccttctctactctttgaccaaagcttttgaagtttctggttatcaaccttgaaacgtgtgctattaataagactgcgaccatggtatggcatatagaatgctcatattacatgatcatctgatatgctaattgaaagatcagtatatggatgcctac

SEQ ID NO: 97530 - DNA, 126 bp, Glycine max
  unsure (1)..(126): unsure at all n locations
ctgcagcttacctattgctntacattattagatattgatccattctatcttgngccggactctcaccacttatgatagccgcatgatccatactgcttcctaactcttgccttcttacctgctcaa

SEQ ID NO: 97531 - DNA, 358 bp, Glycine max
  unsure (1)..(358): unsure at all n locations
tataacaagctcggtattggagcaatccacaaaagtaagtaatgcattgactagctataagttctgctagtcagagggaatgattatctatgtcaataaagaactatctagattgtatgcattgaacttggcttattcacatgtntattccattctagttcatagggtcctatgattggaaattttgatttttctcttattatatgtcagcattctataaaacatacaacccttattgcacagctaagttcgagaccctatcatttgctgttgcatatcgtgacgaattcatgtggagactatgtactggcttatacatgtcaatacaacatattttttgccagttatgagagccttt

SEQ ID NO: 97532 - DNA, 334 bp, Glycine max
  unsure (1)..(334): unsure at all n locations
tttggctctattagccagtactttttagtggaagtgatgatatttttctcgttgtgatatatattttggaacaacaaagcctgaatcttaaaanatatcatatttatctcagaaatacattggtcatcaattacatagtnggctattctcaattgtaaataacattctaaaattaaatgtgacgaaattcactaatatgatacaactacgtaataatctaataaatctataataaatatacactattgctatatttaaaagtatatttttcaactaattattatttaattaaaactatacctgtattgctctctacaacttcactatttacaat

SEQ ID NO: 97533 - DNA, 349 bp, Glycine max
  unsure (1)..(349): unsure at all n locations
tacgaggaacctgatagggatgctagtntactattcaacttctggatttctgnacactagtaggagtgcacatctatagtaaggttgtgcattagtgcagggtggctntaatttcccgatgtgtgagcatgaaccctangaacttgcctccgttgaccccgaaagtgcattattccgagttgaggcgcatgtaatacttgtagatttctccaaatacgtcttccagatctgccacgtgttgtgctattgctttgagattgacaaccattgcatttgacttacacctctacattccgactgatgtactatttgacgatcctgtccatcaatctttggtatgtggcacatg

SEQ ID NO: 97534 - DNA, 496 bp, Glycine max
  unsure (1)..(496): unsure at all n locations
gaacatgttattagaagtatgactgaatatgttagtcctctcgtcagattgattgtgaaggaatgcattgactgtatcccggtgagagtgtgatccttatatattgagagaaacgactatcatttagtactggattttgcacgaatctctgaagtatggactgaatgcatgtaattgaggatgatgaacgctatgtttgattgtgatagccacttagccaaaangctgaacacgtgcttgaaatgattatccttgcacgccagttgagttgaatgattattgattgattgaccttaacctattagtgtatctctgataccttgcttaggtgacgaagcatatcataaagctggtcaaacaaattgcctaatttgngggtttatgtaatgcaattgccanattctggagacatggtagaataaatggcaacaacacatatcacctgttctatgtaaaaatgagataacaaagttaaatgggtgtgaatatgaagact

SEQ ID NO: 97535 - DNA, 67 bp, Glycine max
tagggatctagcctatcttatgtttcacctgcctcttcttactcactgcctatgatcacacacaaga

SEQ ID NO: 97536 - DNA, 174 bp, Glycine max
ctcagctccaaagttgttggctgaacagcccgagcatggacttatgttaatggttatgagcactccgatcaaagatgtgactggacattgtggatgttaaaatatcaatagtatgtatctcgtgtgatgtgatgacatgtgatgcggatctatttgcataataacacgtgaaca

SEQ ID NO: 97537 - DNA, 186 bp, Glycine max
ttactcaaagatccactcaatgttctggttagtacggctaccacgtttcaccatctaagacttttgtgaccacaatagcgatttgacagaacctatacatcttaagacatatcagcttttattatatttgatgtgcaaaagaaaggccactattgcagaacaaatcatttctgccaatctgttgcg

SEQ ID NO: 97538 - DNA, 304 bp, Glycine max
  unsure (1)..(304): unsure at all n locations
ccaataactattgctcagagtccatatgtctaatacactctatattatattttctcgtgtggatattccttttccaacaattgtgcttttttttgtgttgacctgatccaaaacaaaaccaatctgggcattgttgagatcaactggtgaaaaattgacctgataatacttgcccctgtatagctgtctaccttgcggacnctgtcataacatttcatcacatgattcatgataattaacacgttagtctaatttccactttaatgagttatgataccaatcctgatatagatttctaaagcat

SEQ ID NO: 97539 - DNA, 234 bp, Glycine max
  unsure (1)..(234): unsure at all n locations
acatagcatcatttctggcactgaataggtanggagttgaagccatctcctcaattaatattctagcctcagcaggggtcatatcaccaagagctccaccactggcagngtcnatcatactcctctccatgttactaagtccctcatagaaatattgaagaagaagttgctcagaaatctggtggtgagggcagcttgcacgcaacttctngaatctttcccagtattcataca

SEQ ID NO: 97540 - DNA, 403 bp, Glycine max
  unsure (1)..(403): unsure at all n locations
tcacctttggtcctcctcatagttgttgcatgagataacatgctctattntcatnctcccactccagtaggcctccggatcattctttcctctatatggaggaatgttgagtttaataccatcaattcggttntgtctaggaacaccatcattccctcttctcctcctttcttcttcattatgatctctattctccattngatccaacctctcatggagcgcatcatctctttgttcattaacctctccaaatgttgcatcaaagctcgcatttgtgaatgcgaaagccncacttcatcattacgattagtacctgacatctcatacaaacaaatcaaacgtaacaagacaattatagttgctggttgaatacctcacccactcaagtgtatcacacaattat

SEQ ID NO: 97541 - DNA, 294 bp, Glycine max
  unsure (1)..(294): unsure at all n locations
acttatgatagccgncgatgatcccattactgcttcccctaagctctctgtcctttcttcacgccgcatcccatgccttgcgaactccttggagtaccctcgcgttgtggtcaccgaaaccccgtgcgatgaaaggcgtgatgctttcgttggatggcactcctctcatggggaaccaagctgcttatggnaggacggtatattataatacaacccttgtcccatcagggaacattgacatcttccatgaaataaatctgatcttcttctttacgaggaccaatacaacccccc

SEQ ID NO: 97542 - DNA, 390 bp, Glycine max
  unsure (1)..(390): unsure at all n locations
agcttgcatcgtgagacatcagaggctattattttattaaatgtgggtaggaaaaattcaccacattgatagagaanaatctaacatcatacatcttaggcaaataaggcatgctagcccccaacattattgcattntgattccatctttggacattgtgattntgaaaaataaaaaacccaaagtttattatggcatttcatcaaacatacaactcccaactgatctggcaaaagaaatagtgagtagaaaatggaacttgcagacaacaaacaaataaaagatagatgattttcttttatcattcgcagaacagaanaattgaggaaacacactgcannacaaattttagaatttcttatgtgacattatactaactagtgaagaatt

SEQ ID NO: 97543 - DNA, 272 bp, Glycine max
gaataggaaagctatctttgattgtgatggcattcaaggccctataatctgagcaaaatctccaagtgccatccttcttcttgataagaatgattggaggtgaaaaagggcttctgctacgggcaataatcccttcctcgagcatgtcagctatcattaattacttcaatctgatcctttcgtaccttcaaccaatgggattgaatgattgtgagttcttctaagaggaaacctgatggacatcacagactgttcataaatgtagagatcat

SEQ ID NO: 97544 - DNA, 478 bp, Glycine max
  unsure (1)..(478): unsure at all n locations
agctntctaacatgttaaagatcacccatatcatatattccattcagaagttatgattattcaagaagttggctaacctatatcagaattcagcataatgggttacacttgaacaaataatgaatatgcttacctctgcagtatatgattacttacgtctaanaggattaataaagctttccaaccaattntagcctatattacctaagaaaagtctcaactctcagccattaacaagggataaatgtaattctgcatacacaaagtaatacatcaaacatggagaataaaaggtaaagaaatctttctgggtttgctaagcaaattntgtgatgtgacgatntaattcanatatgaatttagccaaaaaaattagatgaacaaatccggngaagaaaaatagaagatgcaagcaaattgctatgtgttcttatncgaattggtagaacttcctcatgacggtattccttcatgagct

SEQ ID NO: 97545 - DNA, 458 bp, Glycine max
  unsure (1)..(458): unsure at all n locations
tgtaggattatggngtacccgtcataatgtggactatgtggcgatcgggcgatggtgcaagtcgactctccacatccacaaatcatacataaatccaccatccccagttgcccaccttcaactgaactcacgtactcccacgtagcctttatccttgttcctctcaacaccgggtccccatcaatccctccaagcttccacaacatccaagaaattcaacatccaaacatcatgaactatccaaaaccaagaaaacagggcaaaggcagaaaactcagcccaaaacacattgcaataccacaactttccttactcaaataccccagtaacattctcttcgttccgattcgttaaccgttggattgactcgagaaatttactggaggtccctaatacataaatctacattttgaccgttgggatctgctagaaaatgtccataacccaatatgtactac

SEQ ID NO: 97546 - DNA, 359 bp, Glycine max
  unsure (1)..(359): unsure at all n locations
ctcgtcccggatccttaagcacctgggctgcagcttttattggttcttggatggctactctatgtataattagatagcagtagatcctgaagaccaagaanaaatttcttttacatgccctttcggtggcttttgttacagaaggatgtcatttgggttatgtaatgcccctggcacctttcagaaatgtatgctaactatttttgctaatttggtcgaaaaatgcattgaggtgttcatggatgatttatcagtatctgactcctccattgaatcttggttattcaatatgggattggtgctaaagcggtgtgtggaaactaacttggtgttgaattgggagaaatgccatttaatgg

SEQ ID NO: 97547 - DNA, 443 bp, Glycine max
ggtgactcatagttgtgctaagccatattctgcccctttgtgcaatatgacaaccattttgggggatagaggaccggtggattcaagcccactagtggacgacttcacccaactggtgggagttctcagccagttaacaaggtgtcttaatctgttggtagaagtggtggtggtcctgctactgtgtctacaccactccggtgtgggaagtgtggtcagcttggccatattgctcattagtgcatagatagagaggtgacttactttaactgccaaggtatgggccacattagcaccggttgcccaaaaattgatcttctatggattcctacacatgtttattctaatccccgagcacaagtaactcatcctttatcttgatgtagtcgctcaagtgttctctattagcaatggtgacatttctggtgctctagagcctcctc

SEQ ID NO: 97548 - DNA, 240 bp, Glycine max
  unsure (1)..(240): unsure at all n locations
ccagcnctacctaaggaccaccttgaacacggccgatgttatcccttttgagcctccgcaccccatcctctgtgtgaagctcactacaacccgtatgtgaaaaaccatgatatcaccatatccggaacgaattaagcagcttaggaactgttctgggaataagtgccgcggggttcacacctcagaggataactcggtacgttggccctacaacatgacgaagtccaggccatacttgat

SEQ ID NO: 97549 - DNA, 384 bp, Glycine max
  unsure (1)..(384): unsure at all n locations
aacgtgcattttgtgtttatacacaattcccggtacaccacaacaaaacagtgtgtcagaaaggcggaatanaactctaatggatatggttaggagtatgttaatcaattagactttatctgtatccttgtggatgtataccttgaaaactgccacgtagttgttgaacagggttcctagtaaggtagttccaaagacaccttntgaactatggacaaataggatacctagtataaggcacctgcatgtttggtgttgccaggcagaaataaggatttataatccgcaagaaagaaaaatggatgcaagaacaatcagtggatatttcattggttatccagaaaagttaaaggggtatatgtttattggtctaatcatagtatg

SEQ ID NO: 97550 - DNA, 447 bp, Glycine max
  unsure (1)..(447): unsure at all n locations
gcttctcaggaagttgtctcaagagagcttctcttggaagctacctagtctataaatagaagcatgtgtgacacttgttgtaactttgatgaataagagtcttgtgagacatacttcaaagttccacttctctccctcttttattccttcaatatcgtgctcccccctctctttttctctccctctttcttttcctccattgaagcatccttccaagcttcttatccaaggctcatcttggtggtgaagctccttcttccatggcttattccctagtggatggcgcctcctctcacctcttctcctttgtcttccgctgcatctccatggtggaaaatcaccattaaaggacctcattgaagctcanagatccagcctccatagaagccccacaagcaagcttccatcanggatggcaacaacgttggtcatgagttcaatggtatg

SEQ ID NO: 97551 - DNA, 236 bp, Glycine max
  unsure (1)..(236): unsure at all n locations
agcttcctagcgngttctaattatatggtctcttagatctatcatatgctgacaatagtcgagaagtccatggatcttctcgggggcggagtaggtgtctgccatttgcttggccttggctagcaaacggagaagttcttgactctcngtcaaggtagagcannatggtccatcctctagcctnctttttcgcgtacacctgggcatactcgttcgccactctatgctcgtgggcc

SEQ ID NO: 97552 - DNA, 245 bp, Glycine max
catgtctaataactattgttttctaggcttcccttattttccctgaaacattacaatgctggttgggctcaccatttaacgattcatgaatgctggaaacactatagagttttcataacttgaccttcatgccactaagatctcaggacgagaagagaattcacttccttgctctgactctggatattttaaaaattacactcttccagttaatgtccctaagaggagcacttggcttctgcatg

SEQ ID NO: 97553 - DNA, 449 bp, Glycine max
  unsure (1)..(449): unsure at all n locations
ntttgttgtctacatggttcatcttgaaatattaatattcttagacagtctggatgatacatgtattatatgcatgcctggctgggtcaatttatttattttccttgccaaaggagaagcttgtgattgctctttatatctgcggtagtgaaaaatcaatcttatcttttctgaaaatttgttgaagcttaatatattttggtctccagttacatcattaattaccacctctcacatgtgttttcgagaataacaatggatgaatagcaaagcgaaatacttggtctttcatcacaactttttcgagctatgacagagtatcccctttctgtgttattattatttccaatatggtgtgtgatgtttcactttcttgttggactaatcgttccctgaaaagaattatgttccttgaacatctgacatnattgtatggggatactgggata

SEQ ID NO: 97554 - DNA, 463 bp, Glycine max
  unsure (1)..(463): unsure at all n locations
agctnttacactatggtctctttataattacaattctaagncaatcaatttacgatatataatagattatgatttaataattatataaaaaatttatattaaaaacaatattcgcttatatttaaatataattattgtattgaaaaagacaaataaaaatatgagtttaatgtctatgtatttatagagtaaaacaattttatattatcgtctcattatacattataatttaaattattttaaaataattattttaaaaattaataaatgataagttataatttgataattgtgtaaaaaaaattatattattgatatataaccattcttctctaaaatataaaaaagagagtggagttgaagctcattttctctttgattntcaaattcttttgtaaaaaatgaaagaaattctgtttttgaagaactatgttgaacaagcatttgagttaatcacgtcaat

SEQ ID NO: 97555 - DNA, 410 bp, Glycine max
tcttccggaagacactggaattcttccggatgtaagcttctttcggaaacattccggatgacgttcttccggaagttgtctgtgagtttctccggaagacacaaattattcttccggaagaaccccatgtttcttttgtgtatgtctgtctctgatttttggtgccgacgtgttctggttttccccctccgatattccaatcgtgtcactgtgcctctttgctctttacccatgggtggttttctatttccctaactgcagggttgggccttttccccctttgccttctttgattgtttgccatccacaccgttctttctcctttattctcttgcgagatgtttctttttttccttttggcgctttatggttcattttctcttattcccctcggactatttttttttttt

SEQ ID NO: 97556 - DNA, 380 bp, Glycine max
  unsure (1)..(380): unsure at all n locations
caagcttccgaccggagcttttgactttggtgacaatgaatggctcaagcgagatgaccgtgtccggcgaagtgatgggttggagaagtccctatttccaaccatttcttggaaccgaatgagtgaggcataggtgcctgccttggcaatgagttcttcatgtgcgcctgtctcaacaacttggccttgttgtataactgcaatggtatcaacattccttatggttgatagacgatgtgcaacaaccacggttgttcttccaaccatgagcctgtctagtgcctcttgaacaatgttttcagaccctgcatcangagcactagtagcttcatctaatagaagggattttggatttttaacatagctctagcaatagcaat

SEQ ID NO: 97557 - DNA, 471 bp, Glycine max
  unsure (1)..(471): unsure at all n locations
nggatgcagattatttccacggatagattctaaatctgctgaagatgcacaaccgagaaactctgttgcaacttctagttcattgaatagaaatgaatgcagtgccggatacctgngtccaaaagaaacattaaaaagtcaatagtcattaactgttcacactatctccaaacattcaaactcataacagacagtgcaatctagaactattgaaagtacatgtgaagttagattaagacaaatgggcccataggctgcatacaactcatgatttcatgaaaaattgaaaatgtttccaaaagcagtttcaactttgaaaagatacaaacatcattagtggacagtgtgaaggaagatcacaactgctgcaacattccatttgaaggatcaagggatgtacttacatgcattntacttctctgcaacatanatttcatggacaaatgcccagtgacttatttccagaaatca

SEQ ID NO: 97558 - DNA, 441 bp, Glycine max
ttaagtcaccgcggctgcaagctattgattgttgttgtctccaatccatgacctgcctattataattctccattatattcttttctttcttctatctcttctctataaataaaagacttcttttcgtaattcccatattcagtagtagaaccactgaaccgaagcaatggatacgcaactttcctaccgcctcgagccatggcacaccctcgccggaaaagtcgtaatggtcaccggcgcctcctccggcctcggccgagacttctgcctcgacctcggtcgggctggctgtcgggtcgtcgtggcggcccgcagagtcgaccgcctcgagtccctgtgcgacgaaattaacagcatggccgcctgagacggtggccgaagacgccgcgccgtcgccgttgaactcgatgtcgctgccgatgaccacgtcgtcgacaaata

SEQ ID NO: 97559 - DNA, 342 bp, Glycine max
  unsure (1)..(342): unsure at all n locations
tnccgcatgcgtacttggaaggacctgattactgctctcctaaggcaatatcagtataattccgatatggctcccgatcgcactcagctacagaatatgttcaagaaggaaggtgagacctttaaagaatacgcacagcggtggagagacctgacaacacaagtggcccctcccatggtcgaaaggaagatgatcaccatgatggtagacaccttgccagtgttntactatgagaagttggtaggttacatgccgtccagcttcgcggacctagtattcgccggcgaaagaatcanagtacggttgaaaagagggaagttngattatgtttccctcacaagt

SEQ ID NO: 97560 - DNA, 468 bp, Glycine max
  unsure (1)..(468): unsure at all n locations
agcttatggaaggttttatccgtcccttatctagaggtaaatgaagactgctttataatatgatggtgatttggctgaatctatttatattttagaaatgattagctatatttttcattcttacaagacatgttcaggcccttaattgtttgttatacagtcttctttgcagaagttggcgggtcaaccctggattctcatcatggttttgttgtagaatatggtaaagatagagatgttgactcatgtacgacttctgctggatctgtatttgttgtatcgttccataggtcatgtgcataatatatagtaagtgaacctacatcatggtattattataactatggagcgttgtggttaataataattcagacagcttattacttcttttgaagtttcaaattcatactatagctggatagagaccttanatgctntattattggtgacgtatttcgatgatgctag

SEQ ID NO: 97561 - DNA, 407 bp, Glycine max
  unsure (1)..(407): unsure at all n locations
tataatttcttatttttctaataacaaggtgcaattatacatgcaatntatctggtaggccttcatttgcaaagaatagaaatccaaaaaatattgtaaagcacaaagcagagaccaaagggtgcattttggaaatgatgattttgatctttttatttgagagttggtttggttaaataacatggagattttgtctaaagttgagattggaaagcataaagcacagaccaaagggtgcattttataatttctaccatactgttgggtcaggggagattgngaccctattgattcgcatgttcccatttaacaaacacagacgccatttctggctacttttcttctccagctcccaggactgcctctattgtttttttntnttttggcgccatcgattgatattaact

SEQ ID NO: 97562 - DNA, 473 bp, Glycine max
  unsure (1)..(473): unsure at all n locations
agctntanggatntcaaattccgcctgataacaatataaaagggttattgggaagaaataacaaatttagactactaaagaanatcaacgaagaaaactcaaatacttgaatatcctcccatantcaaatcctttgagcagcagggacttgcttccaggtgtcatatgtcacgtcgaccttatcacgagcaacaatccccaaatatattcttaatttcttcttgtggggaccgtcggccttgccggtagcaggattgacgttgaccacaggtctttctgccccaagtggtctaatggccaatgatcgtaaccgtgtcaccttgcgtgtccgcttcaacgtagatggagacgctaatgcgtctgcgggaggaggaggaagaggaggaaaaggcgangcanngtggagtaccatggtcctttaaagagaanaagttgagttagttaatattatcaaaaaacactgtatgagttat

SEQ ID NO: 97563 - DNA, 224 bp, Glycine max
agattccaagtgtgatgtttaaagatttatggatcggagccacaatcacactgtctccgtgtgagggtccattctctctctatacacattattttgcaaatcccaactgtgagaatgcgaggaaataagctctgaagatgatgctccaatttcagaacaatcctacggttgacgaatctaggatcataatcttactgggataagtttgggtgtatgcgggaaaa

SEQ ID NO: 97564 - DNA, 450 bp, Glycine max
  unsure (1)..(450): unsure at all n locations
agctntagatatgaggactatatnggttttattattttcatacntgaaaacggcctttactctggttttctgattagaattctaacactgcagatcttcaatttgattacttgggtcaaagatttctgtcatctcattcatggcaactagttagtgaaacatatatnttccctatctgtttaatctttatcttttaaccaagttattcatttatgttgttggttattgtatattactttatgggcttcttcggtgaaatcatttttaatttttaaattaatattgaatgactatgggtttcctgcacgacttcagtttgaaaataattgtgaagttggagccttctctanacttaccaatgcctactggttggtgccattggaggttctgaaaactctacaggttctgaanactctctctagatggagttaagttattatatatgtattt

SEQ ID NO: 97565 - DNA, 458 bp, Glycine max
  unsure (1)..(458): unsure at all n locations
aactcaagcttggagttaaggaaagaaggtgaaaagtaataatgatttttatgtatctntctttccctttcccggggtgagtgcgcctgcacgagcacatgtnttgtgtatgtgtgtgtttcttttccagtaaaactagggacaaggtggtcaccttcttacattacagtgctactctatgttntcatataactacaaacctttgatgctggcaccagtctagttttcaagtgctgttgccttatcatataaaaaggaagtagacactatacaaattgtactcaaagaccaaaccacttgtgtctttaatgaattagtgaccaaatttagtgactaacaatngttttcccttgctaattctagggtcacaaaaaaatttagtgatgatctctttaaaagttttcatatanaatattctcgtactaattttaatattgccttgatgtaaattactcaat

SEQ ID NO: 97566 - DNA, 450 bp, Glycine max
  unsure (1)..(450): unsure at all n locations
agctngcactataataatctggaaaagatctattctgactaatggagaaatctgcatattaagctggtccatgacacccgcaattacctgctccagttggaattaatgcatgttaaaatgcattaaagtatatctgtatttattcctaatggcaactcaaaaccaagccacttatctacctcaaactgaaaatcttaggatatgaaaacataagaaaatttttgaataaagaaaatagataaggatagataatttgacatgccatggtgaaaaaagagctgaactgaatgattgcttaatttctttcttctttttaggaaaaaagagctccatgattgtatttntaatgttgttctcatggaatgatagtaatgtgcacacctgtgtctaccttatatcaccaacattaaacatattcatactagataatattttttgtactattaatat

SEQ ID NO: 97567 - DNA, 477 bp, Glycine max
  unsure (1)..(477): unsure at all n locations
cttgacaagacagtacacactgctgtcttcttcaacctattataatttggaaatctactctaaagatacatctaataatacccataattataataattaggattaggtaaaataaaataaaaaacattattaggtgctcttgaactattatatttcgattagttttcacgtgatatataattaagagttattgattctttttttagtaacttaaaaaatttcttctgtaaaaaaataacttacatattttaaatgtgtcatataaaaagattgattcatatcatgaatacgtgggtggataaagatcacctaataaattcttctattcaagagtagtgagaaaatntaatttaagtgacctataacgtcttagtgtataagtttgtacttaattatcccaccaaaaatgaatcttattntccacagngagtattattcaacatatgattaagggtatatttgagtgaagtattataa

SEQ ID NO: 97568 - DNA, 448 bp, Glycine max
  unsure (1)..(448): unsure at all n locations
agcctttcttaagttctctggttntccatttcttgttttcaatcttgngctantaaacattttcattcccttctccctctgccaaaaagaattcgccaaggactaaccgcctgaattctttttgggtctctcttctcccttttccaaaagattaaaggactaaccgcatgaattcttttgtgtctcccttctccctaggcaaagaattcacaatgacacagtctaagaattcttttgattcttcccttccccatatacanaataatttataggactaaccggctgagagttcttttgtatcctcattcacaaagtttcaaatgtctaaccgggtgagaacttggtcttaacacattggagggtacatccttttgtgtacaagtagagggtaaatctacttgtgtttgactgagaacaacagagggtacatctcttgtggatcggttct

SEQ ID NO: 97569 - DNA, 433 bp, Glycine max
  unsure (1)..(433): unsure at all n locations
ttagactatattctaactggtttatcttgcagcaatgtatatcctatcttgtaccagnttgggatttaagtttgtttaatgtaatcaccataggaagccatgaataagagcttgaaggtaggagaagatgagtggaggaagagggagagaatgagcacaaaatcttgtgcctcaaatgaggtctgaaatttgaagtgtaattctcaaatgatcaaagttgaaaaaatgcacacacatgacatctatttatagtctaagtgtcacacataataggagggaaatctgaattctatttcaatttcacttgaatttgaaattgaatttgtggagtcaaactttggagccaaaatcttactaattatgattagtgagatttagctatggttcagcccactcatgcaagatcaagtccaagattctccactaagtgtgc

SEQ ID NO: 97570 - DNA, 238 bp, Glycine max
gaaagaggtaaatctaaccatcctactttgatgaatgagaaaattggggcaaatgaagagggtgagaatgaaagagaaacccattgtcataccctaatttcgttcggggattattacttgatgatatgcaacctttgatcgaccgctttgagatactcggcatcctttgttcacaatatgtgaagtcccgagacatgccggaaatcaaaaggaagtaggcttacgcgatccgtgaaat

SEQ ID NO: 97571 - DNA, 452 bp, Glycine max
  unsure (1)..(452): unsure at all n locations
gcttctaaggaagttttctcaagaaatcttcttttgaagctacctagtctataaatagaagcatgtgtaacacttgttgtaactttgatgaatgaaagtcttatgagatacacttcaaagttccacttctttccctcttttattccttcaatttcgtgctcccccccttctctctttcttttcctccattaaagcatcctcttcaagcttcttatccaaggcaattcttggtggtgaagctccttcttccttggcttattccctagtggatggtgcctcccctctcctcttctnctttgccttccgctgcatctccatggtgaaaaatcaccattgaaggatctcattgaagctcanagatccagcctccatagaagctccacaagcangcttccatcatggtgagtgggcaaccctcttttgtaaatcactcatgacccaacatcttatga

SEQ ID NO: 97572 - DNA, 400 bp, Glycine max
  unsure (1)..(400): unsure at all n locations
accttaagcaccgcngctgcagctgacggctatcattaatttatcagcctgcaccganttgggcgatcacggtggcgagggcttgtcgctctgggaggctcattcctccgtccccggcgtcggtggacaagtaccgaaccaacatcttctccattctaactacaacgctttctatctgcttcttcttttataaaaaaaatcattttgtggaatattatagctcanggaaatcgccggagctagaaagtgtggccggaagagatattctgcctcgtggatctggtgaatctcactctttctcttactatgttctcgttattcactgaccaaaataaaaaaaatttctcgcatttcacgaatctctcagcaatttagtcataagtggtacttatggtgaatg

SEQ ID NO: 97573 - DNA, 282 bp, Glycine max
ataatgcaactggcatcagggccagagttatatcatgtaatgtccgagaatctcactaactataattgtgactacagatatgctcatctacttcccagggatgatgaggcatttgagcattacaatactttctcttccaagcgcctagatgaggtattcctgcttttattgaatacgtgattaactctcctatacttgagctatgactatactatatcattattaatcttttttttgggatgagtgaagtctcctattacaaagacaggagagacagtacat

SEQ ID NO: 97574 - DNA, 423 bp, Glycine max
aacgcgttggaaactggaagtactaccagcactgaactatttattgcctgtccctcttggttaccgggttagcttgaaatttgaaattgtagctacttctttggtcacattaagatttgttcttttaccaataaagagccttggaattgtgtaaaattattctttgaacaaccctattggtccgctactgtttgtgatgcacgcgatggctattgaatttagccgttgtgtataacatccccaactccaacttctcaagcacttttatgtaatgttccgtttgatgcttaaaaatatcatttggaaagtcagtagtattaatcttgagattcgatgtgttggactaaattatactatcctttgaatcgtacatcagcacaccataaaaggttgagaccatatgacatatgtaagttaccttca

SEQ ID NO: 97575 - DNA, 396 bp, Glycine max
  unsure (1)..(396): unsure at all n locations
agcttgacantattatattttttttattgtatangaagataanggcgatgttgagaagatgaacttgtcctagatttcacaattcatagctccaatgttgttaatggataacaacaatttcatcttggcattttatgtatctgagacaattttattaaatgctctagttgtttagtaatttcaattatgtatgttgtcttgacaatttggtattataatgttgctgaactatgattaagactaattgttggatttaagacttttgaatggtattttatgcatttgaatcgagacatttgatattttgatttgaattattaatttcatgattatattacatcgttcaaatggttatttaatacatttatctattattcgtattatattcgaatcatt

SEQ ID NO: 97576 - DNA, 383 bp, Glycine max
  unsure (1)..(383): unsure at all n locations
tgcaagtcagaaaagtctgctgatggattcaaatntaacattccactatgactccaattcgtctttcttcataaaaagcacttagcttctcgaanaattggcaaggaaattaaatcatgtatttctcatacaaaattatattcttatttttcctatgcacttgnggtgcaaaagctgaggaccctttatggcgattctgcaatgaaaacaccatcattggcagtggaggaaaattatcagccaatattgataaaatattgactgaaatagccctcanaactccctccacttggtttgttgccaccacatatggcaaagaccaagacaaagtgtacgcactcgctcaatgtaggggagatgttagcacccaggattgtccaatt

SEQ ID NO: 97577 - DNA, 443 bp, Glycine max
  unsure (1)..(443): unsure at all n locations
agcttgtgagaatattaantatatagctcgaaggttcccctaaacagccagttgtaaattntcagaggctgaaatttacgtatgttgctttctctaaccacaaaatagttcagttatctccctaaaaataatatttaattgctttctttaagagtgcaagtccatttttctcattttctaccaatttatttgtacagagaaagcattntatgctctgaagagaatgcaaccaaagaaaagaaaaatggttgatcgtcgcgcctcanaaagtcggaagataaggtattgaaagattgctatattttttttctctctaccgntgtatatatatcttgccgtaatttatgaaatggaataatttttgaatgatttgatgaaggtataatgttcacgacaagatagtaaatnttatggccccactacctgccaatgttccttccatg

SEQ ID NO: 97578 - DNA, 376 bp, Glycine max
  unsure (1)..(376): unsure at all n locations
ntagcaactctttctttttgnttagtcaaaacttctaatgctcttaatctctcctcatctaaatcaactaactcatctgacatcattttccaataatggtcgattggaatgtccatttgtttttgtaccctggctgattgcaaatgtatttcgaccggaagtacagcatcgtgcccataagtcagtcgaaatggggtagtattaattgattccttaggagaatttctacatgcccataaaacttgatctaacgttttattccaatttcttggcttttgggcaatgtgttttttaatcaagttaattacaatcttattggctgcttcgacctgaccatntgcttgcgcgtaatatggtgttgaggttaataatcgaa

SEQ ID NO: 97579 - DNA, 445 bp, Glycine max
  unsure (1)..(445): unsure at all n locations
agctnggaaggatgcttcaatggaggattatattgtgggagatatagagagaggggggagcacgatattgaaggaatataggagggagagaagtggaactttgaaagatgtctcacaagactctcattcatcaaagttacaacaagtgttacacatgcttctatctatagactaggtagcttccttgagaagctttcttgagaaaactttcttgagaagcttctttgagaaaacttccttgagaagctagagcttatctacacacacccctctcataactaagctcacctccttgagatgcttccttaagaagattcgttaagaagctagagcttagctacacatacctctctaaatgctaagcccacctccttgaatgagaagctagagctagctacacacgctctataatagctaagctcatccgcatgacaaaacacatgaa

SEQ ID NO: 97580 - DNA, 478 bp, Glycine max
  unsure (1)..(478): unsure at all n locations
tcttttggaccttgaacaagcaactaactcctcttttataacctgttatgtgctcgcgactggtctctctcttcccttcgcagcttgagttcactattgctaccccatagagctccgtgaaatttattccggccatactcttccttgcgagccctcttggtctcttgttcaagggcccttgtggtagttgcattctcttcccgtaacccggcacactccttccgaatgtgtgtagcggccaacttgaacttctccttggcgagtttcgcctttcctaactcgcttttgagagnctggacttcttcgtnctcttccggtgcctcagaactctcttcgctgacgacttttaacttggcgagccaatctanacctcgtatatgaactatcagccattcgtggtacccaccaatgatgccattacgaatgctcctaagctcttgatcttttcttaacggngtttcccatgccttatggaatc

SEQ ID NO: 97581 - DNA, 476 bp, Glycine max
  unsure (1)..(476): unsure at all n locations
agctntttcggaggcatttcctgcgaagatttatgtttggaaagtcaatttgcaaggaagtgtcattntaaaggctgaccaagtaaaaatggcatacaactgcttccaacacaaacatcaatttaaatttatgacaagctcacatacatacttttatgatcatacatgcacgcaagatgctccgctacctaaaaactatactcatgcacattcaaagcattttgctacccacattacatacatgcatntctttgctaaacttatacacatgcatacttgaagtattttgctacccaagatcatatacacgcatgtcccatatatctttgctgccaaacaaatgcacacatgcatattcaaagtatctttgctactcaaattacatttcaattcaacaagggtgttggtgaggtatctcgccacctatacatcatattgggtgnagcactttttctatctatatgcacatacatata

SEQ ID NO: 97582 - DNA, 374 bp, Glycine max
  unsure (1)..(374): unsure at all n locations
ggcttctacactagatgcaggcattgaaagacaaattcttcccctttgtgaagaagatcatgttccttatgggatgttgttcactcaaaccatgaggaatgttggtgaatatgagaacctaataaacgtttcatatgattatgagaacctaatgtcaatgtgcatttgctcatgttcagaagatcattatgttggatcaagtgggctcgtaataattaagaagggggggttgaattaattatgaatatgtcttgactaattaaaacattatccctcttaatgttactagattcaattatgctntactactaagttatgagaaagttaagaacataaacaataacttatacaaaagtaaagcccatataaaaact

SEQ ID NO: 97583 - DNA, 248 bp, Glycine max
acgactagatattatgatgctgcaataccatatgctccaacactgcatgatagtgccccaccagctatgggttatctctttctaacgtgaacctgctgctgaacgaaccctcattattagtctcgatgaaacacacgcaggggatggattcgaatgatggtaccacattcaaacaccttatattataatagttttcattacagcaccaaaatgacgttagacctgccctctttcttcattgtgtgtat

SEQ ID NO: 97584 - DNA, 274 bp, Glycine max
  unsure (1)..(274): unsure at all n locations
actcaagcnntcactgaggctgcgcagactcacagcgttttcctgttgtgtcatatctagtttaacataaacagcaccccgcttatatccagcccgattcattttctcacccaccctatccggaaaatgataggagcaatcggtctgcatgcctgttgagtgtccaacaacaaaagtgtgaagtctatcttccactcgaaaccaacctcggcctgtagggtgggtaatttgctctctctattatcagtattctggcttctgaaacttcactcac

SEQ ID NO: 97585 - DNA, 300 bp, Glycine max
  unsure (1)..(300): unsure at all n locations
caccgcagctgcagctgactacctacaaaggggngtttagttttggagttatcacgctgagaggctgaacagaattttgggaaaccactggaaacagattctctagtcagaactactttgatccgtagggactatttatgtcagttccttggtctggacctcttcttgtcatttctatgaaaatctcggttagcttcttcttacacataacctctttcagggctagatatttttacatcgtatattgacttggagtatctttctctatgtgcagatcaatacactcttctccctatgtta

SEQ ID NO: 97586 - DNA, 484 bp, Glycine max
  unsure (1)..(484): unsure at all n locations
gaccttagaaacccaagcngctgnactaaaagctaacttctcaaattaaaacaatattttagattaatactggtgtgacaatgaatctttatatttatctccttagaggtaagtcggccataaattattattttagtcaagactttcgcttttcaagtcagaaaaaagagaaaccaaactcacatcctttgatggcacatgctaacttccataattgcggacattgatcaataaggtgattgtgtctaacaaaacagaacaaaacatcaccaaagcacttcataccccctctccccccaaatcatacacaacccagggaacataaagaagataaagtagcagctgcacaataatttagctgaatttgtaagtttagacaccacaatattattgaagatgaagagagaattttcgctcacagatattccatagctgcaagctcaaagagaataccacatgaacgtcattatcttaatcatgatgc

SEQ ID NO: 97587 - DNA, 431 bp, Glycine max
  unsure (1)..(431): unsure at all n locations
ggacactataaaactcagctttaggggtctgatagtaattggtttatgtgttcacaaggaaccacttttccatgatttctcgcaggctggcctgttaaaggcgcaaaatttctttgaatttctcttcagacacacctgttggagcaaaggcaatcaaatgagtgatttattttggagtcttggaagtgaagatagttttgagtacatattcatgtatgagttgggaagtgacttcaacctgtggaggttcaacaacatcgatcttatgtccaagatgagcatatattttgtttatcaactttcaagctnttcctgttgttgcttggcttctgccaccttctgcatctccataagctgtcggttaagcttttcctatttgcattggagttcaacaaccattctttgtcttggaacccaagggttctgatcaa

SEQ ID NO: 97588 - DNA, 470 bp, Glycine max
  unsure (1)..(470): unsure at all n locations
agctttttcactgtacacctactttgctatgcacganaaactttntctatatacacacgcattaaaaaactctttctctttatatcaacatggtctatataaaacctctattccttttcaaagattctttttccttttttcaacatacactcgttgtttatacaaaaatttctttatatacactcattgctcacacacaagaatttcttttcacacattatttatacacacaatcttttcatacactgtgtatatacaaaaactcttttcttttcttcatatacagatatgacatttgttcacaatgcctccttctttntctattcttggtgttatcatgatgtntgttcattttaatttaggacggcgttcctaaatgaaaactctacatggttccggaatttcacaaacattatcgaaataacgaagtagcactaaccaacagtccagacaaatgttgcacaaacaaa

SEQ ID NO: 97589 - DNA, 280 bp, Glycine max
tccaggacctgcgcggaagcgccacaacgtgttattcatataaactccagggaaacgttgcgccctcactattaaaattcaggaacctacacacacgttggcttctggtgaaaccgggaatgtggattacaatgctttgataggcgtccgacgaggatagttccggtcggagttggagagggcacacctgttgctttccttgcggcacaagcctgataaggcaactgcgttcatcgaaaggtgcgagctcgcggatgaccgtgatgttgagtctgcgaaa

SEQ ID NO: 97590 - DNA, 474 bp, Glycine max
  unsure (1)..(474): unsure at all n locations
agctntcataaatgaaatcaggtgcagctatctccttaagagtcctctcaggaggtggaggttgatccatgttctcagtatgaaaattagtagttgaatgctaaaaatcaaaatattcaaaatcgccctcaacagaatgctcataatgtacagaatgaccaggatgcacattatgcataactaatctatgaaaggttctatctatttcaggatcaaagggttgtaaatcacctggattgcccctagtcatgcactatatgcagcaaataatgtgtttctcaacaagcacctaacaagggggtaaaactacagctataatcaaacgatattaaaatgggctggaaatttgtgaggaacaccctacaatcatgagaagatagcacaaaaaaatttcaacaaaaattcaagtctaactatgaanactacctaagcnanagttagaananataggacaataagacttggaaaataaaa

SEQ ID NO: 97591 - DNA, 429 bp, Glycine max
  unsure (1)..(429): unsure at all n locations
tctcctccattntgctatatatagggggagaagtgatatagaaaatggttcagcctcttaggcacttctctctctctcgaaattgctgaggaaaattatttctgtgaagaaaatccaagccgaggcgcttccgtaacgtttccgtgagaaattacgcgaagattctcgaccgttcttcaagattcatcgttcgttcttcgttttcttcagtcttcaacgggtaagtacctcaaaccaagcttttcaattcattctatgtacccgtggtggtccatattttgtttcatgtatttttattctcattttcattcgcttntataccccttttgacgtgcttaagccatttatctaagtcatttctcgcttaatctaaaaataaaataaatttccaccgatcgtctgaatgtatcatccgttattctggtaaaa

SEQ ID NO: 97592 - DNA, 287 bp, Glycine max
cacagaagaggaaatcactaaaccagcaccaaagcaaagcaggagaactccacgcgaagactcctcaacccacacaaaaaaaaggcaaacaaaaagccacaacacggacgacaggcaaaaaaacgaacgacacccaggcacaaaaaataaacatgcacacagacaatccccaaaaaggaagctccgcacaaaagcaaatcggtagcacctcataaatggcaaccataatagaacaaacgcaacgagctcgcacatagaaatcacactaggggaaaagaaggaactac

SEQ ID NO: 97593 - DNA, 363 bp, Glycine max
  unsure (1)..(363): unsure at all n locations
agcttataacccttttgtcattattaaacaagctgaaattaatcacaatcacaagcaagatatcctaactacatgcatgagataagaatgaanagtcgaatagggaaagagaagctgggttgcctcccagtaagccctctattaacgtcactaactcgacaagtcaggtgccttcaaggtggcatgaaggtcacaaagaacacatcctccttacagttccaccttttagctaggaataccatgaacatcattgtatttggaagtgcatgcaaactcatttgcaaagagaggatggtgatcccaaagagaaaaacacataanactctctttgctcctctcgcctttgttcttgacaaaaaaaga

SEQ ID NO: 97594 - DNA, 433 bp, Glycine max
  unsure (1)..(433): unsure at all n locations
tccattcatttatatctcaatctaactggcttctcatatagaatganttgaacccacccctataatataaagggacgagtgcctaaagaccgtccatcttcagattgagccctattttttcctattactttctttnttgattgtatactcccttcgtggatctcccctcttatccaatcaaccaactgtcccaggccgagaaatagcgttcccggaagaagcgccacccctagctcgactgtcttcttttgaagaccaacgagactactaggtgaggaaggaattntgtacaaactcagactntgaatggatcacttttcatcctaactctcagaagaccaagcatgaatagacgtangcagtgcataagaatctctaattcctaaacaccctacggaaagatgaataaccttttcatggagccgcactcgaa

SEQ ID NO: 97595 - DNA, 393 bp, Glycine max
  unsure (1)..(393): unsure at all n locations
ctgagggacaaaagataaagaaatgaatgaattgaaatattatctatagtaggatctatggaattaatcttagttaattaaatcaatgtacgagtttctccttattactacattatttcctacgtgaaaggaggagaaccacaagttgctacacggttatacattaattattaaaaggcatgacatgcacataggtttgtaataataagttcagttcctaggatatgtatatgtgggctctttagttgctttacaacttgtttagacattaattttaatcaaaaccatattttgctcaaaggttgaacggtgcattaatctgctaaaggataagagcattaaagagagcattanatttagttagctcaccgaaactcacgtacgtgtatccta

SEQ ID NO: 97596 - DNA, 403 bp, Glycine max
tgcttaagcatggcatcgcttatacgagctaagtcaatgtgtagctatgggattattggaggtactcgcttaagcgtcatattttgtgcgcttaagtgaggagagtccgcaactgagaaatttacgactagtggacctcgcttaagtgagcatttactcatgcttaagcgagctatgtagtcacgttaggccccagcccacatcataatataaaaactagggcgccataaatgaggggattcagagcgtgttggaaaacaactttctctgtgagagagaaccatctttagggctcttagctttaaatctttatatactctttatggtccggttcgagtattataatcaagcaactaatctccttctctgtcgaagttgggaacggctgaactcaatttcatgt

SEQ ID NO: 97597 - DNA, 478 bp, Glycine max
tctactcatgtggcacggcgggcttacttcaccttacattctcgttctctagctttgactaccgctttgccttcccgcgatgcttctctgtatatctgcctaagagggcttaaagcctaacccatacttcccacgattccctttggcatttatcaagttagtcatgccgccggtgtctttgcctaaacccattccgggttcgtaaccgttcctcaacataactcgggccatcattactgctgcatctgacaagcaagcttgcccagagaaagagtccacggaggaaatgcttaccacctcaaaagactggaaagcggtgtctaatgatttctctgcggcctccacataaagcatagacgatgggcagctcaccaagatggcttcttcgcctgatacgatgaccagatgcccttccactacgaatttcaacttttggtggagcgtagagggaacaactaccactgagtggatccacgga

SEQ ID NO: 97598 - DNA, 502 bp, Glycine max
  unsure (1)..(502): unsure at all n locations
ttagagccacctgcggcatgcaagctntctaacatgttaaagatcacccatatatattattccattcagaagttatgattattcaagaagttggctaacctatatcagaattcagcataatgggttacacttgaacaaataatgaatatgcttacctctgcagtatatgattacttacgtctaanaggattaataaagctttccaaccaattttagcctatattacctaagaaaagtctcaactctcagccattaacaagggataaatgtaattctgcatacacaaagtaatacatcaaacatggagaataaaaggtaaagaaatctttctgggtttggctaagcaaatttgtgatgtgacgatttaattcanataggattttagccaaaaaaattagatgaacaaatccggtgaagaaaaatagaagatgncaagcaaatgctatgtgttcttatcgaatntggtagaacttcctcatgacggtattccttcatgagcttc

SEQ ID NO: 97599 - DNA, 451 bp, Glycine max
tggggtacccgtcatatgtggtactaggtggcgatcgggcgatggtgcaagtcgactctccacatccacaaatcatacataaatccaccatccccagttgcccaccttcaactgaactcacgtactcccacgtagcctttatccttgttcctctcaacaccgggtccccatcaatccctccaagcttccacaacatccaagaaattcaacatccaaacatcatgaactatccaaaaccaagaaaacagggcaaaggcagaaaactcagcccaaaacacattccaataccacaactttccttactcaaataccccagtaacattctcttcgttccgattcgttaaccgttggattgactcgagaatattactggaggtccctaatacataaatctacattttgaccgttgggatctgctagaaaatgtccataaccccatatgtactatcct

SEQ ID NO: 97600 - DNA, 446 bp, Glycine max
  unsure (1)..(446): unsure at all n locations
tttagaggctaacattaacctctcttacttttcttgtgaggacaacgnaaaggctaacttagattgtgatattagggtagagcaagaacttaaaaagagatctacttcaataatcttatggctctcactcttatccaaagaaagaccaatgtcaaggcatcttatgggtgacaccttctaagcccacagatgataaggggaatacaatataaaagcaaacccctaaggctagtatgcaagagaaaactagctctataaagtgctttaaatgtctaggaagaggacacattacttctcaatgccccaccacaataaccatgattatgaggggccaagacatttatagtagccaagatgaggctactacttcnaccttctctagtgaaagtgaagaagctaaatgtgaagaatctacccccaagaagaatgacaaccactagtggtta

SEQ ID NO: 97601 - DNA, 464 bp, Glycine max
  unsure (1)..(464): unsure at all n locations
tatgtcaagaaccagaatttacatttaacaaccatcattgcttatgattaatgccaaaaaaatattgtttaacacaactgtaataaagtacctgtttaacaccatcactcaagctcaagtcacaataatttatttaataacactcacaaccgataattgtacattcatgaatatatcatcaacatgaaaagcttcacaaatttagtcatattccactaaattctcaacctgataagcatcacaagcttaaattctcaaaatagagtgcctacacaaacttactcatatttcactaaatacatatttgaaggctaaatacaaaattaataccaaatttgaacacccataaaatcttctttcactaacataccaattcaaaaattccacaattacaatctgcacattacanagaaaccaaaaaatcaccatgactntcttcctaactaattacanaatgataacat

SEQ ID NO: 97602 - DNA, 351 bp, Glycine max
  unsure (1)..(351): unsure at all n locations
agcttctanagaaggtgaacttagttatttaaggggtgtgtgtagctaagctctagcttctcaaggaagctttcatttagttagtgacctagtgatgcaatcctaccctgcaagggcattggataaaagactccaagtagattgggctagagatccaagggaagaccctagggttctcatgagccttanggtagatttcgagcccatgggctaagtatgagcccgcttatctttgtaaatattagaatagggtttcccttcttttgggccttgtattntgaccattctagtagtatagggttctaacccttgatttcagggcattttgagtagtctttgtagtagggactt

SEQ ID NO: 97603 - DNA, 435 bp, Glycine max
  unsure (1)..(435): unsure at all n locations
tctttgagaaaacttccttgagaagctagagcttagctatacacacccctctaataactaagctcacctccttgagaagcttccttgagaagattcctaaagaagatagagcttatctacacacacctctctaatagctaagctcacctccttgagatgaaaagctagagcttagctacacacctcttataatagctaagctcacccccattccaaaaagtttgttaagtcatggtagccccaaatttcccttatacttggtggagtgggccaatcacgaatgacctttattctcttaagggccatggaaaccccttgagcactatttaaaaaaataaggaaagttatgcaataaagcatacctttttctgtattttcatgttgagtattcctacaaaaaaatacgacanacctaatgtgcttatatgagcacct

SEQ ID NO: 97604 - DNA, 402 bp, Glycine max
  unsure (1)..(402): unsure at all n locations
gatgagggtttggnntcgaagagcttaaatccttgtgctttgttggtgcccaaaataagtattataaggcaccaaatccctatgataggtggtatgatgaatctgttgagtggtgcaaccctcttttgtaaaatcactcatgcacccaacatcttcatgatttgtgtacatagggactcattaggtaggtttgttcttattttttgtttcaatacaaacttaggtgctcatatgggacaccttangtgtgtcatatatttttgtaggaataatcaacattacaaataaagaaaaaggtatgtgttattccattactctccttaacttttaaatagtgatcaagggcttcccatggaccctaagagaataaaggtcattcttgagtgcctactccaccatgta

SEQ ID NO: 97605 - DNA, 266 bp, Glycine max
  unsure (1)..(266): unsure at all n locations
taaccacanaagcagaagctacacatgatgttatctctctcaagacaaaagcaaaccaataacaagtgcttaaccatcatataggcagaagcaacaaagtttaaccatcaacaaaagaagctaaacacaatgcttaaccactataaaaggatcattgccctatccaactcttagcaaagttcggatgattctncntcnggcccactcctgaaagcacaaggtctcttctgggatcacaattaccgacactaagcctgcccaaatat

SEQ ID NO: 97606 - DNA, 419 bp, Glycine max
  unsure (1)..(419): unsure at all n locations
agctttgacatagaaagagtttcatgctattgtgataagaanaatactacaagatgctggtatcacctttccacttgcccctaggcttacccaagttggtgtggtgctaaccatcacccaaaatgacgcttcattcactttccaatttgcaagacactntgatgtaagatgcaaatacatgcatgttcatgatcggacgttaaacgtaataattaaaggggtgttgtgaattttgttgtcgtgttcaatattatttgacgcttatggcacccctgctaaacatgttgaatggctccgaaataccgattgtgtgagtgaacaagaacgagagtgtacgttcatgtttaaaggcaataaaaaaagtgtaaggacacaacaccagaaggagagatgcanatcattaatccatatntattaat

SEQ ID NO: 97607 - DNA, 470 bp, Glycine max
  unsure (1)..(470): unsure at all n locations
tgaagcccactaaaagttattgaagagagttctttcactatataagtgnntctcgcaaaaaaaagtttaagcaaatgggctcatacatttttttgtatcctggttaattgacttgtctgactttcatttcaggttggtgacttgggcctgtccaaagtgaaatgccagactttgatatctggtggtgttagaggaactctaccttggatggccccagaactgctgaacgggagcagtagccttgtttcaaagaaggtgtatttggtgctntaacttatttgaaacattgatttattttgatggcttccttcatatttgccattctataacctacttttggttctcatatttatcgattcaggttgacgtgttttccgttggcatagtcatgtgggaactctttacgggagaagagccatatgccgattngcactatggngccatcataagtaataatccgtactttgacc

SEQ ID NO: 97608 - DNA, 211 bp, Glycine max
acccctattgttctttgaatgttatgttaaccctaactctttgactttgctaagtttgtttaactaaaaagtcacaagcggcttggaaaactatgaaagcaacaatgaaggaagttagcttgtacagccacaagaaaaaagtgttcacccgaatggttggggcataaaaaaggttcgacagaataactaccaggaaggccttaggctaaat

SEQ ID NO: 97609 - DNA, 344 bp, Glycine max
tctcgatatattatgcacctgaatcagactttcatttgttaagatatgaccaattgaatgtctggagagcttccgttgtgcaatttcgagcgtctcgatatattatgcacctgaatcagacttccgtctgaaaagttatgaccatttgaatttatggagagctttcgttgtgcaattccgagcgtcttgatatattatgcgcctgaattggacttccgcgcgatatgtcatgaccatttgaatttctcgacagcttccattgttaatttcgagcgtctcgatatattatgcgcctgaatccgacttccgcgcataaggatcgacctttgaatctctccagaact

SEQ ID NO: 97610 - DNA, 401 bp, Glycine max
  unsure (1)..(401): unsure at all n locations
agctttacagcagatattagttatgaccttctaacctataattaaaataacttaatgccattaacctagggaattaaaacaaacttaatggctgagtgtaactgaaattgtggcaaccaaaagtcacccccaacagccaacaagtcagccaccatttggtctcccaaaaggctgatgcctacgatgccaattgggcccttattacaacttgaactaaagctaactaaagccgctttagttgattaacccaaaacatatttttggtcagccaactttacaaggattgggccattatttagacaaactaaacactctaaaattgaaacaaagtggtgtcatctagtcctccttcattggggccatgatacaactcacaaccttggactttttncttgaaactt

SEQ ID NO: 97611 - DNA, 475 bp, Glycine max
  unsure (1)..(475): unsure at all n locations
aactcaagctgaggattatggggtacccatcacatgtggtactaggtggcggtctggcgatggtgcacaacaagttttccacatccacagtgcgcgcataaacccaccatcccctgttgcccacctccaactgagctcacgtactcncacgtagccgatatcctcgtttctctcaacaccgggtccccatcaatcctcccaagcttccacaacatccaagcaaaacaacattcaaacagcacaagctatcacagccaagcaaaacagagcataggcagaaaactctgccaaaacaccaaccaaaatcacagcttttctcacttaaagaccaccagtaacaattccttcgttccaattcgttaaccgttggatcgactcgataatntactggaagtctctagtacataagcctacattgtgaccgttgggatctactagcaaacgtccagaactcattctgtactactctttccac

SEQ ID NO: 97612 - DNA, 460 bp, Glycine max
  unsure (1)..(460): unsure at all n locations
agcttgtgcaagggcatgatgtattgttttttattgtaaaagngggtgatgaagaacgacttccaagtgtaactgttaaaataattaattgtggtgaacattatgagggtgagaattcctcagccctttatggagaatactaagttctacccttaatatgaaatatgattatatgaataattaggagtgtaagcaggtgcgggtcacctgcgaacctgaattgatccaaaccaacccaaatagtttgggttgcgtaatatttttgtttgggtcaaacccaaactggaccaatcaacctgttgagttttgtgttggtcacgggttataatactttgaaatgctgactcgctgacttggcccattgactcattaattngtattaaattattattattcatactaatatatggaatatataatataatattttaaattttaagacatcaaatactattgacta

SEQ ID NO: 97613 - DNA, 466 bp, Glycine max
  unsure (1)..(466): unsure at all n locations
tttggagtagaaacatgggaccaactcattntatttcataaagtcgtatctagtcaaaatctgagagaccatacaagtttcctagcggnttctaattatatgggccattaagtctatcatatgctgacaatagtcgagaagcccatgaatttcttcgggggcggagtaggtgtccgccattgccttggccttggctaacaaccggggaagttcttgactcccgttcaaggtaagagcaaaccgatccatccacatggttgcctcttggtgtaaagagtcgatcacccttcctctagcctctttntccgcgtatacttgggcatattcgttcgcgaccctatgctcgtgggccgtggctagacttaattcttcttggtactcggtgatgatagctagcatggtggtctccgtctcgcataaacgctgagacaagctccttttggaccttgaacagggcactaactcc

SEQ ID NO: 97614 - DNA, 325 bp, Glycine max
  unsure (1)..(325): unsure at all n locations
tcttcttgatatcatcaaaatcttcatgatntacattctgcccctttttgatgatgacaaccacctgtaggttaggagcaacaacaaagaaaatatctatttgcatatagattactcccccttggttctacaatgattgcttatatgagacaattgaagatttcatatttttcatatataaaaagttgtctcataaaacaatagataatttttcgtactatgttatcttttatctatctctcccactttgtcaacatcaagaacaaatcatgaatagaaaggagaaagatgttaccactcgttgcagtgtatgagaatcaagtga

SEQ ID NO: 97615 - DNA, 414 bp, Glycine max
  unsure (1)..(414): unsure at all n locations
tcanacacttatgtaatggattatgatcatctttgaatcaattaaaacaaagagttttaacttgagaagcaattttataactttagaacttttcttctaactccttcatttatgatgcatgatgcacatatgaaatgataaatactaagatgcaacacacaacaacaatcaatacaaatgccatttaagaaagttaggcatgtaaaagaacaaacttcttcaagtcttcttcaagctttcaagactaagtcttcatgttgctctccctatctctaacaattagcttttcttncccttctttttnnatttgctactnngtcataacttttggatctttntggcaatgccaaagctatttagccccttgtcttcatttagctatagccttgctagccctttatgcttcctctaatt

SEQ ID NO: 97616 - DNA, 480 bp, Glycine max
  unsure (1)..(480): unsure at all n locations
agctngttacanaagccttcttatgtatgcattatgatatatgtaagatgtagtatataaaacaacaaataacatagtgtaaaaaggaagggaagaggagattcaacatatagattntatactagtttaccccaaccttgggttacatcctatcatcacccaaactgatgagattttcactaacacaactaacgacatgttggatttttacaactgtcaaccacttgttggactttacaacatctccctcaccataccacacctggacttggcttggacataacacatctcaaccacaacaccatgggagagaaaatccaagtattcttaaccttttcaggtgagcttaacccatagaatgattctcctcactcttgggaagctaaacccattgaaccacgacactcacttggtcatgggagagacaatacaagtatttctttcacttcttcaggctacccaagtntatttcactctatc

SEQ ID NO: 97617 - DNA, 460 bp, Glycine max
  unsure (1)..(460): unsure at all n locations
tataatgaaattataaacttcaactctatttntgcagaatatcgattcaacaaaatgtttgtnaaccttaagatatagaacataagtaagactcccactaagctaaggtactatcaagaattaaacccatattatcaatgtgctcatgaaaaactttaagtgtcataccattagtaagtggatcagctagcatcaaatgagttcctatatgttatatacaaatctgtatttttttgaattctctatttaacaacaaaatactttatttcaacaaacttttacttggttgaatccttaataataccactaagatattgttccaataaacacccgatgactactgtaatgttgcaacaacaggcaagcctattacaataatttagcaataataaattctagtatgatgtctcatagcaaaatattaactccaccaacacggttagatgaggatccntatatg

SEQ ID NO: 97618 - DNA, 495 bp, Glycine max
  unsure (1)..(495): unsure at all n locations
agcacctgaggcatgcangcttaaagagaggctcacaagtggctgttttttgttatatgaacctcgctatgtagcttagatgccctatgaaacctcggacctgcttcttagtgcgtggctcacggaatttgaggatggcatttaccttgtctgggttcacctttatcctcttctggcttatgataaaagtgagcaactttcccgacttgaccccgatagtgcacttcacgggattcaaccttaatcggtacttacgtagcctctcgaacaacttccgttagttgacgaggtgttcctcctcggtcgttgacttggcaatcatatcatccacgtagacctcaatttctatatgcttcatgtcatggaataatgctaccatagcccgttgtgaagtttccccaacgttcttaagctccaaggacattactttgtagcataacattcccacagggtgacgaaggtcgctcttccatgtgctttggtgcatctttattt

SEQ ID NO: 97619 - DNA, 474 bp, Glycine max
  unsure (1)..(474): unsure at all n locations
actcaagctntctccgcgaggtacgtangtcaactctgtgggttgttgtacctgtgtgcacaatggtagaagtatgctaagtttggaaggagtgatgtggttattgcatgatggtagaagtatgctaagtttgagtgggtgttcttggtttatagctttttatgctaagttgctatctctattaatttgtctctactcttttttttttttttctgtgtgcatcccatacccagcacaaggccacataaacccaatgctcaagctagcgaaactgttgatttcagttacactttgatgctccacattgtcaataaactacccaagctacttttctcaccaatgatgttggtctagttttggtatggctattttgtgacgtatattgcacttttactattactttntctcactggaagttattgactatcacaagtttgttgactatacctgatgctttactatacttttctactg

SEQ ID NO: 97620 - DNA, 353 bp, Glycine max
  unsure (1)..(353): unsure at all n locations
tatgcagaagctgaaattctgcaacttccgcttaagaggcttcacatgtcgctaagcggtagtgtggtttctgtgaaggccagctaagaggaccaaggctcgttaagccggcaatgcccttttcaagtttattttttcagtttttgaatctgaataacttgtgtcttgttaactgtttggttcctatatctgcaaatggcttctaagaaacgcaagagtgctggttcaagacccacaacacaatatgatacacggagatnttcctccttagatgctcggaactggtacacggataatgtcctgtggagaaacatcttgcctgagaggaacgtggagctcctccacactgagct

SEQ ID NO: 97621 - DNA, 390 bp, Glycine max
  unsure (1)..(390): unsure at all n locations
agaatcaatataatggttagatgattccatgggtcttcttaacccatcatttgtcttcatatatttattacctgttttgccttcaccaatcttatgaagaacttggtcatggtagttaaactgcctctgacggaaacctctaaatctatcattccagtcatttctatatttnttttctttttgcactgcaaaaatatgatcgtattaataaaacttaagtactagatgtactgaagaggtcagtaattacacaggcagaatctgccatacccagctacaaaaagaacacataagaaacaaccctatcctcacacacccctagacatttttgcttagcctagtagacattggtaaagggatatggaatnttctcctgcctttaccagacca

SEQ ID NO: 97622 - DNA, 420 bp, Glycine max
  unsure (1)..(420): unsure at all n locations
agctntaggagaaaccataaaaactaatgtagtttctaaacaaaaatcaattgaggaaacttcgccaaaaatccccattgagaaacctttattcaaacctttcaaagttagtgagaaggctaaaagaaaagttagggaacttagaaaaactaaatccttaattgaaggcgtaggtgacaaccatagtgaattactaaacaagattggtagtttacttaaagtcattccagataccccccaagcctcggaaaatacttccaaaatggtaacaagaagtacctccaaattaatcaatgttattaatgaagatagtgaccaaaactcagataacacaactgagataggatcagtgtcagaaaagaatataaatccaattaattccaaacactggaagacaccctccaatatatattatcaacg

SEQ ID NO: 97623 - DNA, 473 bp, Glycine max
  unsure (1)..(473): unsure at all n locations
actaagcntttattgtttcttttcttgatatcattggtagaagttatattgctattgttcatgaattntatcgcaggaactttaatgtaccctcaacattgactataatgaacttgaactaaataaaagataagaaaaagaaacactaaagtgatatgaggatcgtgttgagataaagtcactctagaagttaatgttttaatggtgacaaaacactataatgcaaaactaaagtaactaaacttagctactgatggttgctttgagtgttctttattaagacagaacatatttagaagcatggtataggtgtgaagcattggcctatagtggaagctttctatggtatcttctgcaatcagaagcacgactaccagaaagagagcctattagaagctggaaagacaatcatgttttttgggtcaaagtgtgtaacacccttatatacnatatatatttattagttattataa

SEQ ID NO: 97624 - DNA, 109 bp, Glycine max
gcaccgagctcagctgctgaaccagccaggtttttttataaaggacccccaataacgcttaaagcactcagaaaactatcacttataatgacggagatcaatgactact

SEQ ID NO: 97625 - DNA, 367 bp, Glycine max
  unsure (1)..(367): unsure at all n locations
ctgcagcctaggctcatgtgctctctattctaacagatgtctcatggcctcaaanattttgaaatggacaacatcatcaccaaactccatggaaagaagtcctgcctgcgcatcaatnttcggcctagctgtcatcaaaaatggtctccctaggaccaatatggacccatggttggaagactcattctccatatccaaaatgtaaaaatctactggaaaaatcaaatccttaacttgcaccaacacatcttcaataactccaagtggaatcacgacactccggttggctagatgaatgacaacaatgatgggtttcaaatcacanagatgtagtgatttgtanattgaagtgtgtgtgacattaatt

SEQ ID NO: 97626 - DNA, 409 bp, Glycine max
  unsure (1)..(409): unsure at all n locations
tgagccaaaatcctgactcaccataaaccttgacccatggtgagaatgtcaatccttaccctcggaagcaaaaaggaatagaagggaaatttccaatcaaagaaaaagagaaggaaaatttccaatgaaagcaaaaaagaaaagaaggaaaattccccaatcaaagagtgggagaaagcaaaaagaaaagaaaggaaattcccaatcaaagaatgggagaaagtaaaaaagggaaggaaagaaagttcttgaaggaaaaacagaaggaatatgcagagaggtctttggaccggacaatatctgaacaatacagaattgtcaccaaatgaacgaacaaagaaggaaagggaaccacgacctanaatagtcttcttccttttgataccaaccaaaatcccgtgcgctagcg

SEQ ID NO: 97627 - DNA, 255 bp, Glycine max
  unsure (1)..(255): unsure at all n locations
tgcaggaacagaggcagccctactatccagtatcgatgacaatacaatcaatgcctccacctcatcctcagattaagcttgcacagattccaagggggctaaaataatcttaacctcattattaggatcaaggtcagagtaaccttctntcatcttgaggatgagcaaccggcgcataaggtttcttagacggctcgagacggcttatattacatatctgaggatagccttaattaaccctgcagtactcattct

SEQ ID NO: 97628 - DNA, 335 bp, Glycine max
  unsure (1)..(335): unsure at all n locations
gaattctctntgattcaggcgtagagaggctaaggtcttatgttttcataaaaaagaagggcccacggatcttaataacaataatccacacaagctctatatataatgatgatgggagctggattctctacggaatgggatcaacctcctcgtgataagataccccccggatctatccttataaaggtagacactgactttgtgactattcatgatcacatgtggcacatgttcatattgccatgcanaaagttttcgaggggaagcgaataacatttcaagactatgcaatagagccccctttgaatgagtcatccttatccgccgaaggagat

SEQ ID NO: 97629 - DNA, 329 bp, Glycine max
  unsure (1)..(329): unsure at all n locations
agcttgcacgtccaaggtgtgtttgagtatatctatatagaaaacaagttataacataagctagagtaaatacacaaagtttatacatgttcacttaatctcatgagcttgatatggattattttggcaagtacaccagtcgaacaagttatacaatgaataaatcaagatattgttttcccatgagactcgtgcaatataagtaaggcaatgtactattaacttaggctntagaactacacatganagcactataaccatgagctttaaagtggttttgtgaagtacaaattgataagtgattgatacaagacagtttataatttatg

SEQ ID NO: 97630 - DNA, 420 bp, Glycine max
  unsure (1)..(420): unsure at all n locations
tgtatgctccactttgcagaatgtgtcagaccttgaaatgtccttcccacttggcggccaatttactttcatttgtgtccttttgggcttcacctttgaccctccgtacctttggctgaccccaaccgctatttcaattctgttagaattactttgatggctactttgacttggccatttgtttgtgggtgttcctcaaatgtgacccgatgcttaatgtcaagtcctatcatgaactcattcgacttcttatctataaattggaatccattgccagccataatgacacattgaatgccgaaacaggtgattatgtntttcataagatacttttggacattctgaccactgattggtgccaatgggtttgacctcacccatttagtaaagtagtcgactgctactaacatannattatgt

SEQ ID NO: 97631 - DNA, 425 bp, Glycine max
catagttggcataatattttacacccttataagatcatacaacaacaacaacaacaacaacaacaactacaacaacaacatcaaagcaaggaggaacaaaaagactcacactttatattttccagagaacattccatgagaccaaaactcactcactcaccaataaagcgcattgccaaacaaaaaggtctggccaccttcaaaagggtacagcatctcatactgcgagccaagcctcatcctctgccgtgtcacgtcacttctaagaagcaacctgaaatactcagagctgttcctctcaggccacgcttgaagagcacagaaccgtcgctgccccttgaagccaaatgagccttagcctcctcagagaaacggtgaatgagcctagaagataatgtgacctccacggcacccttcatggcaag

SEQ ID NO: 97632 - DNA, 459 bp, Glycine max
  unsure (1)..(459): unsure at all n locations
ntgaattcaaagattacagctggtgcgccgttaattatttttagaattttaattcaaaggagatttaagaatgttgtagatgttggaaatttcctccactggctagctgaactgcctacaatatttcttaagccaataggagtagttacttagccattaagggttcttaatttttaatttgtttttcctataaaaggttaccatggtcacatttttctgaatgagattagagtaaataaaaatagagagattaaatgtgagaaactcttcctcctgtatgtgagtgtgtgtgtcaattcttctcttcaatttattcttccgttgcgtgtgtgtntatgggtttaatttatctcacggntaataattggtatcagagttcgagaaatatgatagtagtgtgagagagacaaaaatagagtgtatcaggaacaagagtgttctcactatgtataaaaaaat

SEQ ID NO: 97633 - DNA, 467 bp, Glycine max
  unsure (1)..(467): unsure at all n locations
agcttcattaagaggcttcctcaagaatcttcctcgnggnttctttgagaagctntctcaagaggcttctttgagaagctagatccttatctacccacacccctctattaactaaattaacctccttgaaaataattacggataaaataacacaacaaatataatcaaacatcaaacataattattaatatatcgatatatatatatcagggtgttacaactctcccacccttttagaaatttcgtccccgaaatttaccttactcaaacaaggatgggtgagcttctcgcatcttactttctaattcccacgtggaatcttctccttatgcacctccctagatcaccttgaccaacgaaatctctttccctcttaggtgtntcgttcgcctatcctcaatcctcanaggcaatgtttcatatgtcanaatctncttcacttgtacatcatccaattcatcacatgg

SEQ ID NO: 97634 - DNA, 434 bp, Glycine max
  unsure (1)..(434): unsure at all n locations
cttgaatgatcaagagctggccttgatgcatgctntgtatcatagataagaaatgctctgagctctgagcaaacctgtaagaactggagctgctagtgctatagggaggggagaggtaaaaggagctgagatagggggagctgaagtagatagggcctcagatatcctaaccttggaattttgggttccccgaaaagtgaccgagggtcatccaggttccggtagttctttttaacatatgccaaattaatggcttggctcaagttctcgaaagtcaaagagtcagaggtgactccccgggccttgcacaaggcagtgatgagggcaggaaaacctagcctcagggagtcttgctgagcaataagagtaatctgactcgagatgaggtacccnagggtcatgtncatcttttgaataatccatatattaacctg

SEQ ID NO: 97635 - DNA, 337 bp, Glycine max
agcttctcctctcaattgctataaagatttttagatttgaagtgcaaaaaggttcaacccgttatgcacttctctatctttcgaataagcctgtgaataatgtttccgtgaagaatattcagaccgacgcgcttccgctatgttttcgtgaggaatttcgtgaacattcgaccagacgacgacgttcctcagtcgtccttcatcgtacttcaatcttcaacgggcacaaactctaaaccaagcttttcgagacattctatggacccgcggtggttgcattgcgtttcgaggattgatattatagcttcatatacataatataccccctttatacccc

SEQ ID NO: 97636 - DNA, 284 bp, Glycine max
actcaagcttgtcgccattactctatcaatagggggacgagtgactgatagatgttttcaaccctcctgagatcgtcggaccactaaataggattgatcaagactcgtttgcgtgaagaagatcgcagcctgtgcgcattcgtctctcgtccgatacgcttcgcgtggcagatacgcgaagagtctacggcgacttacaatcgctcttcagggtcctcggccttctaccggtctgtacccgaaatcacactcttaaattcattctatgtcccttggtgggccca

SEQ ID NO: 97637 - DNA, 451 bp, Glycine max
  unsure (1)..(451): unsure at all n locations
agctngtattggatgccatgatgcangttgatacataatacattcggtgagtatccccttatgcatgacatttctttaattttntcttctttntaaactgaaattaaattggtctttcttccttattcttcctattttaacttacaaggggcaactctatttacaaacgatttacagaggtaaatggagtaaacctaagcaccctcatgcagtgaaatgaaaatatggaatacaaagcactgaatattttaaaggataaaagtctatttgaaattataaaattcagagatcatttctttcatacttaatgaagaatgaaataatctatcaagttcaactgtttctatgcaagtattgcaaactgtcttgctaagntgaagcatgaataatatatctttgttgaaattgctgcttaccaagtcttatagatcaacaatgtgatttaaagcac

SEQ ID NO: 97638 - DNA, 476 bp, Glycine max
  unsure (1)..(476): unsure at all n locations
cttgactaaaccaatggcatggacactgganaagactaaatgctattttcaaaattgtactaactgatatctctgtctcagggagctatgccagggaccaagggtacaggtggcttcggtttctttattttatccaccaaaatagcttgagtagttagaatgacaccagcaacagaaactgcactttgaagagcacatcttgcaacacgactaggatccgctactccagcattcaaaagatcttcatacgtgcctgtcattgcattatatccagttctccaatcatgtgttctagtcttccggacaacaatgtctccatcaactccggcattagttgcaattgattttgcatgttcaaggagtgcctgcaacgattcatgtgcaaccgcttacatatgttaaaagcactccagagtccagacaagttcatacttcatatggaataacctcttttatgtgcttgactaagctataca

SEQ ID NO: 97639 - DNA, 336 bp, Glycine max
  unsure (1)..(336): unsure at all n locations
tcagagtcacctgcggcagcaagcttgattataattaaatcaacacaatatagtttatgaaaaagaaaaagaaaatccaatcacataaagttatatattaacaactaacaagttcttacaacttcatgattctattgtaatgcaaccattttaatattcatatattttcctcacctttatccaacaaaagaactcatcttacatctgccctatcttattgacatgaccagttgccactgtgcagcanataaggacataacataactttgcttctcatanattgaattatatagaagnctcccaaaggtcgaaagtttctttcaaagcaaacatttt

SEQ ID NO: 97640 - DNA, 453 bp, Glycine max
  unsure (1)..(453): unsure at all n locations
ntctcatttgtgtttattccanagttaatttagttttcatacccaatgacatttggtgggtagattctagtgttgttactcatataggtatgtttttacaaggttgattgtggagtcatttgtcaagtgatgttgaaagaatcatttatatgggacaatgacaataaagttgcaattgaagttataaaaacttttagcttgcttttaaagatatattatttggatttggttgagacatatgttgcactatctattatatagaattcgatttctatttctattttggataaattcagttattattgttcatttagaaacaataaagttaatctctcttatgattcaaaagttgttaattacgggcctttaattgatattaagtattcttattgcaaaaggattngtacggtatagaacatatattaaatgagaaattttccactttataacata

SEQ ID NO: 97641 - DNA, 378 bp, Glycine max
  unsure (1)..(378): unsure at all n locations
ggaacccagctggccttgaaccaaaaatctgtacctgttgcaagggtctgtggtttgagctcctctgctgaccaccatacagacctttgcccttccatgcaacaacttggagcaatngagcagcccgaagcttatgctgctaatatttacaatagacctcctcaacctcagcagcaaaatcaaccacagcagaaaaattatgacctcttcagcaacagatacaaccctggatggaggaatcaccctaatctcagatggtcaagccctcagcaacaacaacagcaagctgctccttcattccaaaatgctgctggcccaagcagaccatacattcctccaccaatccaacaacagcaacagccccagaaacaaccaaca

SEQ ID NO: 97642 - DNA, 409 bp, Glycine max
  unsure (1)..(409): unsure at all n locations
ngagatgaggaagtgtagaatggtgaaacttcttgcttttattcgttgaccacagagtggtacctggagatatgtcacggtggtcaggagatcttggggacgtcaggtggggtgctattgcccaaaaccaagcttgaccaatcccgacccaacccgggcatagtcagccagtgagaacctgtgatgtacctaaacaggcgaggtcctgacagtcaacagataaaaggaacaaagaccacaaagcaaggaggcttgtgtggtggctggccagctgtggactntgattgatatatgggatatggcctctggtaatcgattaccaagggtgggtaatcgattacaaggcttataaatgaagacaagagactaagatggtctctggtaatcgattaccaagggagtgtaattg

SEQ ID NO: 97643 - DNA, 470 bp, Glycine max
  unsure (1)..(470): unsure at all n locations
gctttcatctagccaagattttacattagtgttacaacagaacctagcggnttctaattatatgggccattaaatctatcatgtgttgacaataatngattagccatgaatttcctctagggctgaacacacttcggccatggcccttgctttggctagtagtcgtgggaggtcttgacttccatttaaggtcaaggcaaacctatccatccacatggtcgcttcttgatgtaatgcgtcaatcaccctccatcttgcctccttctcagcgtatgcttgtgcaaagtcctctactagcttntgctcatgagccaaagattggtttatctcctttntgtactgccctattatagctagcatgctttgctccgtggcttctaagtggctgggccaaattctcttggatcttgagcacgcagctaactcctcttttaagaccatgctatgtactcgtgagtggtctctctctt

SEQ ID NO: 97644 - DNA, 466 bp, Glycine max
  unsure (1)..(466): unsure at all n locations
ttttcggagccccgagaattacgttttcgttcatgtgttctccatcttctagttngntgccatgcgtagtgattgcttanggcaattctccattctcaaccctttttcggagccccatgaattgcgttctcgttcatgtgtcttccaccttcgagtttggagccatgcgcagtgattgcttagtgcaattctccattctcaacccttttttcggagccccaagaatggcgttttcgttcatgtgtgctccatcttcgagtttggagacatgcgtagngattngcttgtgcaattcttcattctcaacccctttttcggagccccatgaattgtgtttttgttcatgtgtcctccatcttcgagtttggagccatgcgtagtgattggcttgtgcaattctccattctcaacctcttttagagccccatgaattgcgttgtcgtcatgtgtctccaccttgagttcg

SEQ ID NO: 97645 - DNA, 450 bp, Glycine max
  unsure (1)..(450): unsure at all n locations
agctntttcactgtacaccttctttgctatgcacganaaactntntctatatacacacgcattanaaaactctttctctttatatcaacatggnctatataaaacctctattcctttacaaagattctttttccttttttcaacatacactcgttgtttatacaaaaatttctttatatacactcattgctcacacacaagaatttcttttcacacattatttatacacacagatctttcatacactttttatatacaaaaactcttttcttttcttcatatacagatatgacatttgttcacaatgcctccttcttctctattcttggagtatcatgaatgttgtcaatttatttaggacggcgttctaaatgaaacttacatggttctgatntcaacaacttatcgacatacgaataacactacgcacgtccaaaaatgttgccaaac

SEQ ID NO: 97646 - DNA, 470 bp, Glycine max
  unsure (1)..(470): unsure at all n locations
tcaggctgctcaatngctccaggttgctgtttgttatgtcaaaggtctgtatggcggtcaacagaggagcacaaaccacaaacccttgcaacaggtacagatttctgattcaaggccagctgggttaccaagttaaccaatgcattccagttgccttcaagcttcttagtttcagatgatgcatatgggtttgtagctacctcatgcactcctctaatgactatggcatcatttctggcgctaaactgctgggagttggaagccatcttctcaattaaatttctggcttcagcaggagtcatatctccaagggcttcaccactggcagcatctatcatacttctctccatattactaagtccttcataaaaatattggagaagaagttgttctaaaatttgatggtggcggcaactggcacatagtntcttaaatctctcccagtactcatacaggctctctccactgag

SEQ ID NO: 97647 - DNA, 479 bp, Glycine max
  unsure (1)..(479): unsure at all n locations
agcttganaactagtagtccattttcctttgcaggttatcatacanaagaatgacaaatccatatgattaaaacctaatttacccttgtttgtacaagaaaagactaagactcaaagtagtgattcagagatatctcaacccttatatacacatttcaaagctctcaaggaatcttcaatagatctttcttcttttggaacaagtacaatcacctctttagtgatcatcatagcttttacatccaatcttcattattggcatcaagtccctcatcttgctctaaaaaacaaaatggtatatggagtaagtcacccatctcctctgaaaccacacagaaacaacctttatgtcacaacacagatgcaataaccatcataaggtcgtcctctcatggtctcactcatcacttgactcacgtctgactaattcttatttcattggatctcaggcctnctgccactagaacatccagaattca

SEQ ID NO: 97648 - DNA, 440 bp, Glycine max
  unsure (1)..(440): unsure at all n locations
tctagccaaatggacttaccttgaattaatttctttgatagcccttttgagccttgtttccctttccttgatttgaagctcactataagcttctagccaaatggatttgtgcagggcattctgttatgctattcattattcagagcttttgttttagggttttcgtttttctgcttgaggctactgntcacgtaatgcaattttacgctttctgcttctaattacagtttcgntcttgcttcttcttctattttcatttacgattctgctcatttacgtttctgtttaatgtttcatttgcattctctgtttgaatccatggaaggctagattttctggtggtgcttccttttgaggacgaagcccaactctctttgaaggttcgcttgtaatgtggtgtcctgcagatntccctcaccagtatcccaatttctgacatt

SEQ ID NO: 97649 - DNA, 404 bp, Glycine max
  unsure (1)..(404): unsure at all n locations
agcttggagattttgggcgcgttattgttatctaatggtagataaaatacattagaagagtgaaaatgaagagggcatgtcccatgataaatatcccgaagaagaatgagtagattctctagctaagaaacacttccataacaaggaatgagcaattctgttgccataagaaagtgaaagaaataaattttagaaggcattaacagctgtgtgagcatgtgatggataagttaccttcttcaattcaactnttggaggaggttccttgtagaaacttggcattggagtggctttganagtcatgggcttcctcaattgcttgatctcagcctcctgggtttcctgccagaaaatccgaagaaaaaaagaaaaaaaaatanggtgataagctggcaatgagaact

SEQ ID NO: 97650 - DNA, 454 bp, Glycine max
  unsure (1)..(454): unsure at all n locations
taagataccgatgactagaaaatggaatgaggctatgaattatcaacattatgactaagagggagaaccaagtacttctaagtattgagctgaaagagatcttttattcaacttttgtcactattataccagnttttgttgattataaatatgttgatatgacttagtaacaagcaactttattctatatattatcattttaactgtttcaaaaattctagtaaagattagtgacttatccaaaattatttgtgtaagcatatatatcatatttagaactgtatttntaatagattggtacacttattagtttttatgcatagaataaatatttttgtaggttagaatcattgtgaaacacaataaatattaaaaaatgaacttaatttctacatcatttgtgactacaactgatgtagaaagnttctttacaacatttggtttgagcaaaatg

SEQ ID NO: 97651 - DNA, 456 bp, Glycine max
  unsure (1)..(456): unsure at all n locations
cacctgcngcatgcaagcttcngcctattattgcacatctccttctagatccagcatatcttggaatttgctgtattgcatccagtacaggtatgtttacctctacttttctaaatgtttccaagatctgcttctttggctcttccatatttttgttggaaattgctcttggagggaatggaagagggatatgttgcttctctttagattcacctgcatacaaattgttacgtatcttactcattaaattatcgtcatcatctttttctggagtagagtgaaagtgggcaggttcattcgcagatgacgaagatgttgctggttgatgttcttgacactgctttcccgacctcaatgcaacggcactcacatatctgggattctggacagattgagaacgaaacctgcagaactctgggactgttgctgattaactgtgtagccaatctcccatct

SEQ ID NO: 97652 - DNA, 463 bp, Glycine max
  unsure (1)..(463): unsure at all n locations
acactaaaaactaagcntggtatctcttcaggatgatcaacacaatactgcatttgttccctcaactctggcgtgtgcaaatagcttaacacattagctaaactaacaatttaaatccactagcttaaactttacaagcttataacagaaacttagtacccaaattccttgttaaggctatttgcaagagttgtggcagcctttccaccaccatatgttgacacaaattcatctttgacacgctctagaaaagccttgngtaatgattttccaattgattcatgtgcaacaacacaatgtagaagcatatatgatatgaagtttaatgatgccaaagatgagcgcgatttaagtcaagaattcagaaatgcaagaagaacgatgtacttaggatctttgaaagaatccttcattaatactgcatanngttggctaaaggaaaatatttacanaagtttttttt

SEQ ID NO: 97653 - DNA, 498 bp, Glycine max
  unsure (1)..(498): unsure at all n locations
gcagacccgggaccttaagtcacctgcagctgcaagctggtcttctaagattaganctttagcacctanacccatgaattccacttcatttgtttctctactcatcgcttcatcaacatccatagtagtttcagctccatgaccaatggctctatctttagcacacaaatccactatatcaccccagttttgaagcaccttgaatcaaaacggtttagctgatttatgcgactagaataaaaaaagtcaaattcaatctgctntgaataacanatagcaatatattaaagaatacttacaatgcaatattcattccaagcattttcattctcaattgtgatcatgtgcttagtgtcatcccaatcaaactcaatctggccaaggatctcacttacaataccatatncacaatctccataattgatactggttttgacattatttgatgtgacattaacattaaagcttgagacaacactgtggctgtagcattcaatg

SEQ ID NO: 97654 - DNA, 408 bp, Glycine max
  unsure (1)..(408): unsure at all n locations
ntaaattctacaatgaatcacatcattattgttctaactttcatttgcgaaatggtgtcaaaatgttaaacaactaagaagcaaattaaagttagactcagacctcaaatttgcaaaagaaagattcgaaagaattgaaagtgttgaagaggcaatatgcggcactaccaaaacaagaaaaatttagcatttaccagcagtaattggtattagcttttgtttatttgatctgggtaatatagatagctaccacgataagcaggaatttattacanaagagttatctattgaagtttatttatttttctttaataattaatttatataaaataatacgcatcatctttcttgttttcgtactttagatttcataccgatagcagattgtatgagaaacatattacatct

SEQ ID NO: 97655 - DNA, 63 bp, Glycine max
aagaccaaaaggagaggagacccgggcaacaccaaacacccgcaacaacaaaagcaggcagca

SEQ ID NO: 97656 - DNA, 418 bp, Glycine max
  unsure (1)..(418): unsure at all n locations
agcttcatgatggtacaacattactaaatttctttttgcacaattagatcaagacactctcanaatactcatcatctcagaggaatgggagaagttttgaaaacctggtctaagactctatttgagtccaagtttccgtcctaattctatatataataacttatgttcatggagatcacctcattgtaataccctatttgatctggtattgcccctctgaaagtttgatcttctcttggcggttgcctttggatacattaccaactaaattggcattatatatgaatatgctntgcgtaacttgacttgtgaagacatngatcactnnttttntgtaagttctgtcataaaaatgtggtcttctttatatgcatggacaaagttccaagtcgtgtttccttcacaagtgcaacacact

SEQ ID NO: 97657 - DNA, 467 bp, Glycine max
  unsure (1)..(467): unsure at all n locations
cttggaagattacagatggcaggagccaaagtaccagactgattgtgtttgtnaagtttcacagaagttaccactgaacctgtgcaatacacaccagtccaattgcaaggagtcaaatcagaagaatcccagttatagagattgttgtttgggtcaagaagggaagctttgaacctcaaaagactcaaaccctcttcattaaccgaatttacaaggacaatgccaaggcaaaaaaacagcaccatgtaaaccccatttaggaagtggaaactactacactccaatgccatcatttctctctcagacaaaccaaaacagcacaaggggttggctttatttggccaagaagaacacaatagttgaaatgattaagctaacaaaaagagacaataagggaaaggtttcacagaagtagcatgtggtaacacgggacaattgagaggatggtcagacaaagcagaatatga

SEQ ID NO: 97658 - DNA, 464 bp, Glycine max
  unsure (1)..(464): unsure at all n locations
agctntgtataatgagaatctgtccttcttacaagctntgcaatttggcatatgaagtttgagagctctgggcagataagtctgctaaagctgggagtggggtgaagtaaaggatgcaaggatgccagctattggcgcaaaggaagagggagcatcagctgctctgagcttgctcttccttgcctctagaaatttaactgtttggtcatttgcattccaacagttccttatgatataagctaagtcaatggtcggccttaagttttcataggaggtaagggcatcaaatcctactcccctcgatctacacaaggttgtgattaaagctggaaaacctaagtgagaagagttagactgagccatcatggtcatttgtccatagatcaaaccaccaatgttcatgtccatccttgtgataagccatagaccnacctagctctgtctgtgttcaaatctgaagtatg

SEQ ID NO: 97659 - DNA, 424 bp, Glycine max
  unsure (1)..(424): unsure at all n locations
tggattaacacctataattcttgtcctaccaagccattgttggctctntataaatcagaatagatttgtggttgaagtttactcagagactaaatctagaatcatcttacacacgagtatacaactcaacgcttagtctntttttctcgatatgttcaaggtgttttgagagaattttctaactttacaaggatatataaaaagatttttgtagaaataataatgaatgtttntcgtgcaatattcttgtattcagtcttcaaaggctatagattatataggcttcatctntaagtattcattgtctcattacaggtagatattntcacttgatctttgtttgatgaatatgaccactgngagcatttgattcttgcatcanatgcatgtcccttccttatgcagagagtccactcttcaatgc

SEQ ID NO: 97660 - DNA, 472 bp, Glycine max
  unsure (1)..(472): unsure at all n locations
agcttaagctaataggggaagatacctgttgcccncttatgcaagagcactttgggcttcaagcatggtcaacacatagaaccacctaccttctgcttaaattaaaagttttattgaaattcctgtacaccaaatcaatgggatagtgatttaatatagatctgaaagatacaggacagacatgattaatctattagacttgttacctgttagctatgcttgctttgttttagcattgtcaatgattaacaagctgaaaatgaacattcactgtggtgattagtgatatatgagcacaaattatggaaaatagcttccactgaaattgatggaacactcaccactcacatcccacgactctcctatgactgtntatgtggtacaatccaactctgtaagagaagatgtcttaagtgatgcagaatgcatttagtgatatagatgagcacaaattatggaaaatagcttcact

SEQ ID NO: 97661 - DNA, 467 bp, Glycine max
  unsure (1)..(467): unsure at all n locations
tggtcgcgtgtattataattnttntgtaactccaggatattatatttttgctgccccaatagatgaatgtctatgtgatgaatgtttctggagagaatgcagtcgaggtaggagatgagggcaaccaaagttaatagtaggggtgtgaagtgtaacaaaaaagtaaacaataaggtaattgtttaaagcatagttatgaaaatcggatcagaccaattcgattgggaattagtggcctgattgatctggatcaatcatcggaccagaaacgcaatcgacctgatttgacctgaccaaatttagttaaaactgtcccatgccggattggttcggatcaacccagtcgatctttttttgtaaaactaacatataatatgttcctataaaattatcttgatcatgataataatttataataactaacaattattatcttgagcagaattgtttctacaagtttgagtcct

SEQ ID NO: 97662 - DNA, 463 bp, Glycine max
  unsure (1)..(463): unsure at all n locations
agcttgtaggattatggngtattcatcatatgtggtactaggtggcgatcgggcgatggtgcacaacaagttntccacatccacaaatcgcgcataaacccaccatcccctgttgcccacctccaactgagctcacgtactcccacgtagcccatatcctcgtttctctcaacaccgggtccccataaatcctcccaagcttccccaacatccaggtaaatcaacattcaaacagcacaaactatcacagccaagataacaggacaaaggcagaaaactctgcccaaaacaccaacaaaaatcatagctttttctcacttaaagaccctagtaacatttccttcggtccaattcgttaaccggtggatcgactcgaaacttntactggaagtctctagtacataaatatacatnnttgaccgtgggatctactagcanacatccagaactcattctgcattac

SEQ ID NO: 97663 - DNA, 432 bp, Glycine max
tcattctcagatccctcttgttggaatagacttagctttaacagcttaccaaagtttagactaatttagcctaagcttggtcctcaaatccctcttgttggactagacttagaccaaacagcattattgtaacagcatatctaaaaccaaaacttaatccgcagatccctcttgtaagactaagtttcaattctgcttcattcaagttctaaggtaacaatacatttcccaacgctaaagtcacctaactatgcacacaaatggatgatcagaccaagagcatacggaatttaagcattgaaagaagcattgaacacaagaaacacaatcaattagatattaaagtaattacatcagttgttctttagaaatccccaacaagggtggttagccaaccattatagaagaaagccctacaataataagcttaca

SEQ ID NO: 97664 - DNA, 449 bp, Glycine max
  unsure (1)..(449): unsure at all n locations
agcttctatagaaagttcgttcctaatttctctacaatngcatcacctctcaatgagatggtgaagaagaatgtggcatttacctggggtgaaaaacaagagcatgcctttgctttgctcaaagaaaagcttactaaggcacctgttctagctcttcctgacttttctaaaactttngagctagaatgtgatgcctttggagtgggagttggagctgtattgttacaaggtggacaccctattgcttattttagtgaacaacttcatagtgccaccctcaactaccccacctatgataaagagctntatgccttaataagagcccttcaaacttgggaaacattaccttgttccaaggaatttgtcattcatagtgatcatcaatcacttaagtacattagagggcanagcaagttaaacaagaggcatgcaaaataggtagagtacct

SEQ ID NO: 97665 - DNA, 378 bp, Glycine max
  unsure (1)..(378): unsure at all n locations
tgtatctgtgaattcactcttgatctcaactataacatattgaaaaacattagncgccacaaaaggaccaatccactatgacctcaacttaccactcaggagtccgagcctagagttatacaataaaactttatgtccaaccacaaagtccttcttagctatcaagctaccatggaacttcttggtcttctccttgtagaatttggaattctcataggctgctaaatggatctcatctagctcccctagttgcaacttccattcctctccatcctggtccatagagaagttgcaagtctttacagcccaataggctttgtgctctatctctacaggaagatgagatgccttgctaaagacaacccgataaggagacat

SEQ ID NO: 97666 - DNA, 282 bp, Glycine max
ggacctagcactgagctcagctggaatctttgttttacattttgcattcgagacagatgttggaacctgatatcatactatcttctggaaaacaaaagctcgcgaacggttcagggttatgcgacttgatgtagataacatgtcttacgatgtataaattcatttactacatctggatggaaatattattatatctatacaaccatagtgacagtttattccttatattgcaagccggtgcttcggtttagagagtatactatgagacattcgtgactataa

SEQ ID NO: 97667 - DNA, 479 bp, Glycine max
  unsure (1)..(479): unsure at all n locations
agctntgcaatatttcatcgcctggcacatatcgttgatattcaaactatttctgcactagacgagtccaatcaaccaatcccaaacaaagtcatattccatcgacttttttggtcatttaaggcatgcattggtgcattcgccttttgtgaacccattgtgaaaatcaatggaacatggctatatggaaaatacaaagggacgtttttagttgtagttgcacaagatggcactaacaacatatttgcattggcattttccattgccaagggtgagacaacagatggatgacacttttcttttttgaaaacttgagaatacatgtgataccacaacatggtntatgcttaatctctgacaggcacgagttaattaatagtgcatacagacgacctgacagtgggtggacagcagactactcgtcacatgtgttctgtattcagcgcatatgccataactacataaaatagttcaaaatg

SEQ ID NO: 97668 - DNA, 470 bp, Glycine max
  unsure (1)..(470): unsure at all n locations
tcgattcaaaattgtttataaataacacaaagngtcttttcttgtactccttgcacccccaatttaaaccaacatacctataaccttgtatgtcatttccccattgaaatgatatcagcagcacaaggtacacatcttacattttgaaatgtttggatgacattgatgtgtagcttattttcatagaccccatgccttcaaccttcattttcttaccatttcctaagctgaaatgaccaaacttcccattaattttcaaagattaatagattgttgtggctctacaaacgtgcttcaaagagtaaaatccatgacccatgttgatctagcaacatcctccattgtcaaatacacatcttcatcttcaaatatttggatcacattagcataagacttaacatcatgttgtcttcataacctctcattctttaggccatctctcatttctgggcacaatcgtttgatatgac

SEQ ID NO: 97669 - DNA, 471 bp, Glycine max
  unsure (1)..(471): unsure at all n locations
agcttgtaaactttatacaagaatgaagctccgataccacttgtttggcttctctaaagatcttcattcaggttttccaataatgataaccctcaccattgaacatatgagcctaatgatagaattttcctcagaatatggaaatttggatgaggccatatctattcttgaagtttctagactttatacaagaatcctgctctgataccacttgatggaccttgtggcctcaataatcttacgagggattggcttataatacagaagaagcaacaacaatcaatttaacactgttctttaaacatgcaagacacaattgatggaacaaaataaataagatatgggaagagataatgcatacacaattttatactggttcggccactttccgtgcctacattcagtactcaagcaacccacttgagaatgtcactatctttgtaaatcccttacnagtctgaacacacaggg

SEQ ID NO: 97670 - DNA, 443 bp, Glycine max
ggaccttagaaactaagcttacacatgacatgggtctcttctctaagcatgcatgttgatttaaaaatgcatgtagccagagattctcatataattggtattaaaaaatttcacaaaacgcatatgtagttcaaataactcacaatatagggagttcatctattataaactcacgtaataataaaattaattagagaagacttactttcaatagattctcttaacaaacttacctgtagcatagcttaaactaaaatctgagaatttcttgcaccctatactcattatcattttcctattattgagactgaatctaagactctagaacatactatcctccattggccatggacctagcctacacagaaagtttttgagacacacatacgcaacatatatgcaggggaggaaaatgacctctaaactgtatcatataaacaacg

SEQ ID NO: 97671 - DNA, 332 bp, Glycine max
  unsure (1)..(332): unsure at all n locations
agcttcatagtctgaaataaatatcttatttaatgttataactaaaaaagagtccaaataggtgacctcttgatttgcaatcaaatgctctaccactaaacgatagacccatgtgatattntaatcatcgataatatactatgattgcaagccaganacaaaattcatttttgagaagaagcctattgttccacgggaagttgtgcgtaaagccatgatggaaagcagttgcaaacgttcaagcttggttatgaggaatctacgatccactgctgagctatgtatgaacccatttgatggttaaaatcaataatattctatttaatgaaaat

SEQ ID NO: 97672 - DNA, 461 bp, Glycine max
  unsure (1)..(461): unsure at all n locations
accctagaaactcaagcttccggggtcaaattagnncttgtcttagctgacatgactttctgtgttacatgacctcaatcttcttttaaatgaaacatgcaatggagttaattattgacggcctctgatttggaagtgttcctataacaggggcatatgggttgatgacttgatcgatgtcatttagattggttaaccaacatattgtgaagggataatattaaacccaaaacattgattgtgggcatgattagctagtagttaaaattaactacggaaaacataaataaatcaagcttaccataactagatgtgtagctcaagaacaaagcttaccataactggttagttagtctcacgaacgtgagatacttgggatgactttgtatctgattcaatgatttagaatgaaacgctttaatggatgacgatgactcggagtatgtattatataattaaag

SEQ ID NO: 97673 - DNA, 404 bp, Glycine max
  unsure (1)..(404): unsure at all n locations
atgatcaagacagtctctatagtcttaggaaaggtatattaaatangaacggaattcctaattgaagtagcaaaagggttggccaacaaatggaagttaaaaagtctctttcaagagatttactctctggtaatcgattaccagaggatgtaatcgactaccaatggccaaaaatgatgtacaacagctattaaaatttgaattcaatattgcactgtgtaatcgattacacatatatggtaatcaattaccagcagttatngaacgtttaattcaaattttaaagcttgtaatcgattacacacatacctgtatcgattaccagaggagattntcagataatattctcaacagcgcatcttttcttttggtcttgaatggcatcaaagcctattatatgtgac

SEQ ID NO: 97674 - DNA, 440 bp, Glycine max
  unsure (1)..(440): unsure at all n locations
agcttttgtcactccacccatatctggtcttgacattaaccagacttaacaccatcgacatcagcgtcaatgaattatggcacctcatatacaaaggcttctttgagtcactctgcaatccttcatacataggggcatgtgcttgctgaaaagactcttgtccaaggtcacgtatcatatcctccaagtgatctcccatttctaccatcaaacggttagattgngacccactctgcatgtatgtcaattcaccaagccatatacacgtcgtgtaattcttcttaatcccatcacacaatagatgctcccgtatgtcgtctagtatttgtcgtcttccattcaaacaattgatgtaaggacaataatattttccatcnttcatccggtgacctctttctgaagcaaaatgtaagaattgctcgatgccttcctcatattct

SEQ ID NO: 97675 - DNA, 467 bp, Glycine max
  unsure (1)..(467): unsure at all n locations
tcgaaggggagagagaccaatcacgagcacattgcatgttcttaaaagaggagttagctgcttgctcaaggtccaagagaagcttgtctcagtgtttatgcgagacagagaccaacatgttagccatcgtcagcaagtaccaagaagaattaaatctagccacggcccacaagtacaaagtggtgaacgagtatgcccgagtgtatgcggaaaaggaggctagaggaagggtgatcgactcgttacatcaagaggaaacaatgtggatggaccgatttgctcttactttgaacgggagtaaagaacttccccaattgctagccacggctaaagcaatggcggacacctactccgcccncaagcttctcagctcgtgctagggactcttccaattcagcacttgtacaacctagagcgcccgcgcccatccagagggagggcccccaagctccggctccaactctgac

SEQ ID NO: 97676 - DNA, 458 bp, Glycine max
  unsure (1)..(458): unsure at all n locations
agcttgaccaatcccaacccatacccggtatagtcagtcagggagaacctgtgacgtacctaaacaggcgagctcctggtagtcaaccaataaaagaacaaagaccacaaagcaaggaggcttgtgtggtggctggccagctatggattttgagtgatatctagaatatggcctatggtaatcgattaccaagggtgtgtaatcgattaccaagggtgtgtaatcgattacaaggcttaaaaatgaagacatgaagttaatatggcctctggtaatcgattaccaacggtgtgtaatcgattacaaggcttataaatggagacaggaagttgagatagcctctggtaatcgattaccaaacggtgtaatcgattaccaggcttagaaatggagataggatgtngaggtggcctctgtaatcgaataccaatgttgtgtaattgattacacagagtaac

SEQ ID NO: 97677 - DNA, 468 bp, Glycine max
  unsure (1)..(468): unsure at all n locations
tacaaatctatnttaagtccaagcccataaacgaaatttttaaaatctagacaagataagataagattggatgaaataaaatctggacgaaataaaatctagatgaaataaaatctgtataagataaaatttgataaaataaaattgtctgctctcttcaagtccaagctcaattccggattcaagcccaattgcatataattctcctgaaattaaattaaaacacaaaattagtcaagtaggcccaaatgataaaactacataattaatttgacaattaaggctaatcaataattaaaatggtgacaaaaagggttaagaaataggagaaaataatgacacatcaaatccccccaaacttagccttttgcactcctgngaaaaataaaaaagcaaagcaaggaacaaatccagagacattatagagaaacaaataaacacaaaaacaattacatatttctcaatgaa

SEQ ID NO: 97678 - DNA, 473 bp, Glycine max
  unsure (1)..(473): unsure at all n locations
agctgggcgggtttactgtgtatcagattctcacagataagactgtgttganttgaagtgaagagtgaagactaaacgtattagtgtggttaaatttttcttttggtcatcagtattcagttatggaaagaactttaacctatgtttgatagagagaaaacaagacgagggagaaaaaaatttaagaattaaattggaggtaaaataganaggaaaagaataaaaaatgatatgattgcaacattatttggtaggataaaattaacagaaaaaataaatatgtatataacataatataaatatctctaaaatagtatactccaanttgtgtatcacgtatcggcacattactttttaaagatattttattacttaaaacttttcttgntgtgcaaatcacactttttttattnttttttctttcacgttggttgtgtctagcaccgcaattcctctatatnaaacaatacttt

SEQ ID NO: 97679 - DNA, 348 bp, Glycine max
  unsure (1)..(348): unsure at all n locations
tcttgcgtagccgctctcggtgctcagaattttccanttacaaatcccttntattactagctattttgaattctttagttcctgaatgtacaaccttcaaattgttgctcgttcccctctttcttttctgcaaaaaagataatcaaatgctgtcaaaacatggatgaagtcctaagaaaatcaaaatcaaagaaaacatggatgaaatcacaattaagaagcacaactacctatctttcagagtcctttggctaatatttcttgtctccttatgtggtnggggattggttaataatcttatactcttgccttccaaaaaaacttatcactaatcctcttttcattaat

SEQ ID NO: 97680 - DNA, 391 bp, Glycine max
  unsure (1)..(391): unsure at all n locations
agcttctaaagtctaacctaatataagcatacctgccagcatcttcaggttcatctaactcaaaagcatccaactcaaatctttctggtttagtaacaggcatacacaacgtttccacacatactaagccttctttgttgaccacaaatntgttgattttgacgagaacctcattacaatcttcaagcacatattcaacctttttatagaatattctgatagtgccaaaaagaagttagccaagcaatctgtaggatacagcatcaatttcttgcaaatcttgtctgcagaaggtaaaaatgaaatgaaaataatggcaaaacaatagcatatatcacaaatcttaaaatgattcacagaagaataaactcttaaaataacatcattttgg

SEQ ID NO: 97681 - DNA, 422 bp, Glycine max
  unsure (1)..(422): unsure at all n locations
ntataatgagtaattgtgccaatgcaccctgaatatacatcttaccatccctctcacacctctaattatttccaccgcacaaaatctgcactataaagtccatcacctcctcttgtattcaccaaatagactattagccccagaggtccaagactgaccctaatcacactntataattattttttttttcgtgttggcatatttcctttttctaaacattttgtgctctttttgtttgtggtagatccatgagccagaaaacaaaatcccattcatgggccttcgttgcagatctacttggttgaaattcattgaccgtgtcttatatttctntgccctctcttttatgctttgtcttaccctttgcggtnaccatggccaatatacatcttcaacgaccatgatttcattgattaattaaa

SEQ ID NO: 97682 - DNA, 412 bp, Glycine max
  unsure (1)..(412): unsure at all n locations
agctttagattcatatatagttgcttattataaatactcttggtagactaaaatttagatctattgttaagatgagaagataacatatgtaatgatttggtcaaaactagttaaagaatttgtgcgaagaaaagttaagaataagaaaatggaagagtgcacaaaggtntttatattggttcaccctaaccttaagccacgttcaatcgtcacccttatagatgagatgtcactaacacaactagtgcacaactaaaccagctaaccactggatttcagcaacttgctgtacacaaatgatcaagctgaatgtttngatgatgccaaaggatcacatgcttctcacagctttattcaagacaaagaaattaaagatattcaagatggatgatcaagacagtctctagagtct

SEQ ID NO: 97683 - DNA, 292 bp, Glycine max
  unsure (1)..(292): unsure at all n locations
tgtangagtatggggcacccattatatgtggtactatgtggcggncggccgatggtgcacaacaagatttccacattcacaatgcgcgcataaacccgccatctcactgttgccaccttcaactgagctcacgtactcccacgtagcccatatcctccgagctctcaacaccgggtccccattaattctcccaagctttcacaacatccaagcaaaacaacattcaaacagcacaagctatcacaaccaagcgaaacagagcataggccaataactgtgccaaaacaccaac

SEQ ID NO: 97684 - DNA, 122 bp, Glycine max
  unsure (1)..(122): unsure at all n locations
agctcgacacatatatgctccccattctacatccgagnganaagctacgaccatgcgaatttctcaagaacttccgggaacaatctcgagcatcttgacatattatgcgctccaatccgata

SEQ ID NO: 97685 - DNA, 60 bp, Glycine max
acagagctgtgtgttgcactggatttggtatatctgatgggcttgtaacataccagtata

SEQ ID NO: 97686 - DNA, 321 bp, Glycine max
  unsure (1)..(321): unsure at all n locations
atgtttggaggcctctggtaatctattaccaggctgtgtaatcgattacacagaggaacatgccactgttaatcgattaccagttatgtgtaatcgattacacagtgcatttttgcaggtntcatgtcctgaggctgtgtaattcgagtttagcctctggtaatcgattaccaaggctgtgtaatcgattaccagagatgaaaagccttgagatacccctcttacttacatgtagtggttatgagacgcattgtgttgctccgtagttagatatcacgtganagagtctacccctttcttttatttcttgtagatcgtgat

SEQ ID NO: 97687 - DNA, 469 bp, Glycine max
  unsure (1)..(469): unsure at all n locations
tttattgatattaattcatttaatattggatacctttgaaaataaaatagataccgcgcatagcacggatagaaaactacttttcttacaattcaaaaaagaagccatcgaattgaaaacgacatgcatgactatgtgtcatgtcaattaactcaaaataactatgacttcttccaagattaataaggaactttctttttttttcacagaaattaaatttagatatcaaagaattataataatttatacaaattattcaatcaattattgatggtgtaataacttctagttggatatatagaaagcgtaatctaacaattatcgcgggaagaatctaacactaattaatacgtgtcaaanattttcaaagaatacttcatgggattctaatcagaaagattctccgccttattaatagccccacatctatatcacatatactatctttgacaagtcactcagacaagtc

SEQ ID NO: 97688 - DNA, 375 bp, Glycine max
  unsure (1)..(375): unsure at all n locations
aatgctgcaagaaatctagtccctctacanaagaccattagatcatttgcaaagaacgcgtgacttggaaaacaaactacttgaggacccaccagggagtgcattatcccttgttgtcaaaagatgagatacctctacttagtgcttcttctaccaaatagaanagaaggggagataggggattgccttgaggaactccacgcttacaggcaanaaaaccagcaggcttactattaacaagaanaatataaattcgctgaatggaggataatagcgacccaatgacaaaattgcttatcatagccaaagccaacaaggacattcaacaagaatntcaatccaatgtatcaaacgcctttcggatatcaatcttta

SEQ ID NO: 97689 - DNA, 382 bp, Glycine max
  unsure (1)..(382): unsure at all n locations
ttctcgctaagccaatccgctggcttagcgagcgtccgctaagcgtaacactcattggctaagctcaaggaagaatctggaagaagatgagatgtacaggttcgctaagcacactgcttcatctcactaagcacacgctaagtcaaaattcactaatgtgcactaagcagtccagaattgtgctaagcgcacgagcacgaacaaggccacatatttaagcctgaaatcatatnttgtgaagggagttanggctgagagccgaagctttgcatgtctagtgattctagagagggaaagggccaagttccagagagttttgagtgaatttgctgtgtgaagatctgtagagactagagcttgaagaggaagctgttctgagagc

SEQ ID NO: 97690 - DNA, 343 bp, Glycine max
  unsure (1)..(343): unsure at all n locations
atacctctctaatagctaagctcaccttcttaagatgagaagctagagcttagctacacacccnctataatagctaagctcacccccatgacaaanaacatgaaaataccaaaaaaaagtccttactacaaagactactcaaaatgcctcgaaatacaaggctaaaaccctatactactagaatagccaaaatacaaggcccaaacgaaggaaatacctattctaatatttacaaagataagcgggctcatacttagcccatgggctcgaaatctaccctaaggctcatgagaaccctanggccttcccttggatctctagccaatctacttggagtcttcta

SEQ ID NO: 97691 - DNA, 393 bp, Glycine max
  unsure (1)..(393): unsure at all n locations
gtcacctgcggctgcagctgaagctaagaaaagcttgagatgtttataagaaagtttggcttttagatgttattagcagcttcaactaccccattcatcttgggcctgtatggcgtggaattatggtgttggatcctgaaatcctcacacatttccttcatcatnttgttgttcagattggtggcattatttgtgataatcttcttgggcaacccataccggcagattatctctttcttaatgaacttgaccaccacactccttgtcacactggcatatgaagcagcttcaacccatttggtgaagtagtcgatcgcaaccaanatgaagcgacgtctattcgaagccttggcctcaatagccccaatcacatctattccccacatagagaat

SEQ ID NO: 97692 - DNA, 268 bp, Glycine max
  unsure (1)..(268): unsure at all n locations
ttaaatcgcaagaatatccgcttatccagcagattacatgctcagccccatggccctcaattctgactgcaatgaatagcgcttggcgacatatggtcgcgcttagccaanggaagccatcgctcagcgatcagtttgtcgcttagcagaattcaactcgaatttgatttggcttatctaaaccttggctagcttagcggaaataaccttangtgtcagagtggtgtgctaagagcttaaactcgtggcttagtgcatgagtgattat

SEQ ID NO: 97693 - DNA, 575 bp, Glycine max
  unsure (1)..(575): unsure at all n locations
agctatccttattggtgaggtgtggttcatgtctgtgtaaatagacaaataattcatttctagaatagttcatttttctttaaaacgtggtttataaagatcaaaacattttcaaatcttggttttggttcacaacagatttttttttccctttcatttgttcaccagaaaatgcacacgttnttaacttcatttaattattattgattaaaacattttcatgttgtgatttgattcaacacacgtttgagtntatttcttctntcatgtactcaccanagattggaacatatataatcgtattatataagaagggaaacgacattaaattcttgcattaatttttataaaatatttcttattagagatcaaataaaagtataaattaatatgaaatattgtacatttatttaagagcatgtggggttttaattccatcaagattctaaaatatgctttatataccgaattcaggataataaactactcagaacaaacatntcatgattttatatttcgcatgattacgtattatgtngacatctgtttattttaatgcgtaactattttatatc

SEQ ID NO: 97694 - DNA, 293 bp, Glycine max
  unsure (1)..(293): unsure at all n locations
gctatttgcaccccctggttactatatacacccctgccttttnttgctgattnctttttcgtaacgttacagaactttacgaatntcataacgatacttgttntctttccgtaatgtcacggaaccttacggattacgtaatcatcccatttttggatttcggaaagttacagaacctcacgagttgtgcaacaatgctttcctttgacttncagcatgttacggaacttcacggattgtgcaacaatgctttctttngacttncggcatgtcacggaacttcacgaattgct

SEQ ID NO: 97695 - DNA, 228 bp, Glycine max
tgctacatcctcattctactaccaactggtatgcaggactatacttgaagattattgttactatgatgattggtgctgcatgatacatatcttcactgaaatcatgacaattaccaaagtgatttgatataccaggatccatgtcataaaatctaaattgaatctgactatggtctaatgttttgcaggtactttaacttatacttgcctgacattgaagatatctta

SEQ ID NO: 97696 - DNA, 210 bp, Glycine max
  unsure (1)..(210): unsure at all n locations
tatggtgcattagaaactggttctttcatcaggtgggctactgaatgggaagaacatgcaaagccgctgataactgangcaagttcattcttctattctatgcactatgtcattatcangtcatctactcttgtggtagttgactttttgtgtctcagtgatcagttcttgatttatatgaatagacaaaatcttgaatagacagaatct

SEQ ID NO: 97697 - DNA, 408 bp, Glycine max
  unsure (1)..(408): unsure at all n locations
atcttaagtcactgggctgcaagctatactgcttctggatggtactctggatacttatatattacagnggaccccaaggatcaggagaagacgaccttcacatgcnnctttggtgtctttgcctacagacagatngttgttggattatgtaatgcacctgccatatttcagatgtgcatgnttggccattttgcagatatggtggagttggagcataaagcctaatgggccctcanactgcttaactttgattaagctacatctagagagaagatgaagttacagttgctagagttagaagaaataaggatgaacgcatatgaatcatccaagatttataagcanaagatgaaggcgtatcatgacaagaaagtacaaagacaaaactttcagccaggacaacaagtc

SEQ ID NO: 97698 - DNA, 345 bp, Glycine max
  unsure (1)..(345): unsure at all n locations
agagaagtggaactttgaagtgtatcacataagactttcattcatcaaagttacaacaagtgttacacatgcttctatttatagactaggtagattccttgagaagctttcttaagaaaacttccttgagaagcttctttgagaanacttccttgagaagctagagcttagctacacacacccatctaanaactaagctcacctccttgaaaagcttccttgagaagctagagcttagctacacacatccctctaataactaagttcaccttcttaagaagagaagctagagcttagctacacacctctataatagctacgctcacccctatgacanaatacatg

SEQ ID NO: 97699 - DNA, 348 bp, Glycine max
  unsure (1)..(348): unsure at all n locations
catcttagtacatttgatacctattttgcattgttcatcatcatagtgtgagttgaagaaaatttctatagtagaaaaatttcttcagaggcaaaaactctttgtttaatngattatagagtcgttgtaatcgattacaacanagtgtatgaagcttaaagaagtgtcatgtatcggtttaatcgattaccggagcactttaatcaattactctattttttgagacagtgatngatttttctagagtctctgctttaatcgattacttctctctcgttaaagttgtcagaggtgaacaagaacactnntaatcaatattntcgtcatctaatcgattacattggtctt

SEQ ID NO: 97700 - DNA, 368 bp, Glycine max
  unsure (1)..(368): unsure at all n locations
caacaagttttccacatccacaatgcgcgcataaacccaccatcccctgtagcccacctncaactgagctcacgtactcccacgtagcccatatcctcgtttgtctcaacaccgggtccccatcaatcctcccaagcttccccaacatcaaagtaatacaacattcaaacagcacaaactatcacagccaagaaaacagagcaaaggcagaatactctgccaaaacaccaaccaaaatcacagcttttctcacttaaagaccccagtaacaattccttcgttccaattcgttaaccggtggatcgactccaaattnttactggaagtctctagtacanaagcctacantttgaccggtgggatctact

SEQ ID NO: 97701 - DNA, 353 bp, Glycine max
  unsure (1)..(353): unsure at all n locations
gctgtctctanacagacatatctcctcttttaagcttgtatctgaagattatagtcgttgggatattaaatgcatgcattaaatacacgtacttcttcatgctgagaaatcactcttcgtcgctagcgtgtggaatactacaacaggaaatcacttccttttatatcacagcaagtatgtgtagcaaagctctttttntatggcaatcgaggaatgatagagcttgaagtcatatattcttcatacgatttgatagatcctacgagactgtctctattaaatagatctctgacanagtattaaataaattcttaaatgtcatctntaatggtggatcagagcatgattctatc

SEQ ID NO: 97702 - DNA, 333 bp, Glycine max
  unsure (1)..(333): unsure at all n locations
acggaggaccacgactgatgactgcgagtgagggctttcaaagcagaataacggtgagtagcagcttcagcacaacacgaccacggagtcgcgactcgtgagtaaaggagtagttatgcttcaaaatgacgctgtttcgaaaatttcatgaactcgcggactcgtcgcggactcgcgattctacctaaactcgttcgagnttgcgctaaatcggacaagtctactccgatttcgattctacnttccgattaactcgctgaccctgggtagaatagtnnaaatgtacgattntacgagttaaatcgcgatttaacaaccatgggtgaagtcata

SEQ ID NO: 97703 - DNA, 458 bp, Glycine max
  unsure (1)..(458): unsure at all n locations
agcttctttgggaccttgaacaagcaatcaactcctctttagaaccatgctatgtgctcgcgactggtccctttcttnccttcgcaactngagttcactattgctaccccatagagctccgcngaaattgttccggccatactcttccttgcgaagccctctggtctcttgttcaagggctcttgcggtaatngcattctcttcccgtaacccggcacactccttccgaacgtgtgtagcagccaacttgaacttctccttggcgagttntgcctttcctaactcgctcttgagagctnggacttcttcgtcctcttccggtgcttcanaattctcttcgctgacgactnntaactnggcgagccaatctaaacctcgtacgcgaactntcagccattcgtggtacccaccaatgatgccattacgaatgcctctaagctcttgatctnttcttaacg

SEQ ID NO: 97704 - DNA, 340 bp, Glycine max
  unsure (1)..(340): unsure at all n locations
tgagctcacgtactcctacgtagcccttatccttgttcctctcagcatcgggtccccatcaatcccttcaagcttnncatatatccaagcaattcaattccaactatcatgaactaccctaaaccaagaaaacagggcagaggcagaanactctgcccaaaacatattcacatattacagctntccttactcanataccccagtagcattctctgcgttccaatatgttaaaccgtggatcgacttgaaaaatttattggaggtttctagtacataagtctacattttgaccggtggggatctgctaaaatgtcagaacccatatgtactacccttccat

SEQ ID NO: 97705 - DNA, 390 bp, Glycine max
  unsure (1)..(390): unsure at all n locations
ctgcagctcgtanatgcatattctgtctctttccgagttgcaccattgtaagccataggacttgacaagcagtcacacctaacttttaattcacttttttgctgccattctgcattcatagatcctctcanaagaaatgatagccaatggaatgaaaaatcaatcataaaataccgatttagcanggaaacaattttcagaaagggaaaagcaaagggtattatatctaatctggaaaccttgtacagcaataaatatttatagatgagctattacagcaagatttaagcatctacagaaatggcgagggaaattgttgtataagatgccagaagtatgacatgttaccctcagagaaccaaaactgtaattcatcatcacacttaaact

SEQ ID NO: 97706 - DNA, 180 bp, Glycine max
gctactaaagacactagtgcttagcaaaattccacataagaactaggattgggctatcatatgcaaaactattacgcactcacaagtaaaatgatcccaattacaaaaggacaggaaaggatgatatgaccaagcacggtgtgacattgttactacggataactccatgtacagccacat

SEQ ID NO: 97707 - DNA, 361 bp, Glycine max
  unsure (1)..(361): unsure at all n locations
cagagtagaggcagagaactctgcccaaaactcattcaaatttccacagtttccctactcacctaccccagtaacattctctttgttccgattcgttaaccattggatcgtcttgaatatattactggaggttcctagtacataaatctatattttgaccattgggatctgctagaaaattcctggaacactagatgtactaccattcccgtgactagcaatgcacaagccattttctgcactatggtaaaaatctgctgcaccaattaacagtatctttctgcataatatggcagatntcaaaatacaacttgcccacantccaatttactcacattggatcctacaagtcctaatcatg

SEQ ID NO: 97708 - DNA, 363 bp, Glycine max
  unsure (1)..(363): unsure at all n locations
taagttccatagcttaagcttgaccctggtagaaaaatgaagataatgagcttacaaggcttaagctctatagctggagctcaacctttgaataaaaataaagaaaagactctagcaaaacttaagcattagagcttaagctcgagcctataattaaaagaagaaaaatcacttacaaggcttaactcgaggctcaaagaaaaaataagaaaatanggctaagaattgacccttgagaanaatgaagaanagactccgacnnaaacctaagcttggagaataaactcgaccacacaagaatgaagaanatgaacttacaaggcttaagctttacaacttaagctngaacttgaaagaaacatg

SEQ ID NO: 97709 - DNA, 247 bp, Glycine max
  unsure (1)..(247): unsure at all n locations
tgatgacttttcgcgcaggagaatgatttctagattgagtcgggaacaacttctgagtcttgacagagattcacgagcgatgtttatcacgaggattcctgatggctgaatgttcatgagctagattcacgactcaaagattctagaatctngagaagacttactcaagatacgttcatagacggtttcagatcattgaggcgcacaagaagttgttacacaatcgttaccgaagagtggtcgctct

SEQ ID NO: 97710 - DNA, 305 bp, Glycine max
  unsure (1)..(305): unsure at all n locations
tatgaaacaatcacttctataattttgaatatattgatnaaagattattaaaagagaagaataatagagaagtgaacataggattcatgaatccttccaataatggtacaaggaaacatacactagcttcatttcctctgtatgtctaagaaacaaaccccttcaaaacaatttgtgtaaccatganatcatcttcaaaaccacaacacacctatttttcgtgagtngataggcaaatattgtgtgacanggnttttgatgagtcaaagaagtttctcgtgcttgtcaatagcaaatatgctcaa

SEQ ID NO: 97711 - DNA, 355 bp, Glycine max
  unsure (1)..(355): unsure at all n locations
agctgcttgtggngcttctatggatgctggatcttttatcctcaatgagggcctntaatggtgattttccaccatggagatgcagcggaagacaaaggagaagaggtgagaggaggtgccatccactagggaattagtcatggaagaaggagcttcaccaccaagatgagccttggataagaagcctggagaggatgtctcaatggatgaaaatatagagggagagaaagagagaggggggagcacgaaattgaatgaagaaaaagggagagaagttgaactttgagttgtgtctcacaagagtctcattcatcanagttacaacaagtgttacacatgcttctatttatagact

SEQ ID NO: 97712 - DNA, 321 bp, Glycine max
  unsure (1)..(321): unsure at all n locations
atcttaactcacctgccgctgcaagcttgacctgctccaacaaagtgtttgttttatatgttgcanacacacttgatccaagtgcacgtaacctttctcataaatggcaaactatttcttacacgctttctaatgaactctttcttcactcagttatgggagttgcccattcatcatcacctaacggcggaanaactgttgtgtgtactttcactggaatgggtctaaggacagctgagaacctgctttctttgatgcacaacaactttgctgagtcgggtttgcagctcaacagcttcactgagatgagttggattcatt

SEQ ID NO: 97713 - DNA, 366 bp, Glycine max
  unsure (1)..(366): unsure at all n locations
ttaacatttaacaatgcatttgctaacacattcacatcttaaataaggaactaagaanaattatttcatgatgaatgaagaatcacctgaacttcttcattatggaaatgtctctgtatcatttccaatatatggtcagcatgtgaacaccaatgtgaataaaattcagtttctgaactagatgtngcttcttcactttgaatactttcaatcaaagacccggaactcattaaatggctttcttcttcagcatgttcttgatagaaagaaaactttccatctactgctggaaaataacctcgtcctctgcaatactgcattcatagaaataatcaattaacccatcccttngtgcacattctaact

SEQ ID NO: 97714 - DNA, 539 bp, Glycine max
  unsure (1)..(539): unsure at all n locations
agtcacctgcacgatgcagctgccaagtgaggctaagtttctgaagtcattggcgttatgatgganaacatcgaaaaggcaagacttatatacaaaatggcattgcttagagttctttaactgagtngatgtcaccattcatcaaatatgtagtactaatttggattaaatatttcattaacttttctcataggttcttgatcgtggagaaaagattgagatgcttgtggataagactgacaaccttcgctcacaggtctcattttcttctttatantttatttcttaaatatatntttaatctttaaaatatacatgaattnttatntactctcttnntattttgttaaaatagtatctacaatatnttcttttgtgttaattagttcctgccaaccgtcgtacctagctacttacttntaattactctattatncaataaaatatttgtttaatttgtcatgcgatgacatatttatttatataantnttgtacatacctatttatataattntnntagttagtcatataaatatat

SEQ ID NO: 97715 - DNA, 261 bp, Glycine max
  unsure (1)..(261): unsure at all n locations
atttgtatcttgtgataggggcaggatcgttntangaaatagtcaaataccgagccgaatccaaagacagagatgaatcgaggtaagcggtaacgcggccacgaattgctgcgccatgtcatttcctgctttcaggtacttatggacgggcacgagtggaggctangcccatgatcaatggatcgtcgtcccacgtccagcttcggacaagcgagaagcgctactgggagggcagccttgtatcctttaaatcctacttat

SEQ ID NO: 97716 - DNA, 453 bp, Glycine max
  unsure (1)..(453): unsure at all n locations
tctctaaaaattcaggatggtgatgatagaaaccaggatattagcttaactattaacaatatcaaggctataatcctagtgagtataacaacatcttctaaaatccttcttttatcaatataatctcactcctttctatagaacttagacaaatggttaatagttacaccagaatatatctcacacatgagctcttcaaaattttgcctgatgtgataatntccgtagtgtatactggatgccttcngcttataatattgaattaactccttcaaagtgagaaggtccttntagagggatagtttctanntgtataactataatgtanaaagcattnngtgatatagnntagagttattatctctttaatcctanatnnttacgaatctattctaaccntgacttaatattatnttaactttaattttatcatctaatttaatcctatttttt

SEQ ID NO: 97717 - DNA, 451 bp, Glycine max
  unsure (1)..(451): unsure at all n locations
tgcctacaagaatgacttgcctagtgagtataatgtaagtgccactttcaatgtgtctgatctatctctttttgatgcagatggaggagccttggatntgaggacaaatccttttcaagaaggagggagtgatgaggacataaccaatgaccatgaagcacttgaaggtcccatgaccagaggcagacttaaacaagcccaacacgtcatagagacaaggctggtcatttgtatagctgccattgatgatgattgaaggcccaagtggagaaagatgaaggcccanaggcagaggcactaccaagactactaattgtngctgaaggcccaaactaacttgaaggcccaagttaaataagttttagttataattattttattgtaatttggccaactgttagacccatgttattttatttatgtcnatcacataatattgtttgtttcataa

SEQ ID NO: 97718 - DNA, 243 bp, Glycine max
  unsure (1)..(243): unsure at all n locations
actctcagccacttatgatagccggcgatgatcccattactggcttccctaagctatctgtgctttcttcacgctgcatcccacgccttgcgaactccttggaggactctcgcggtgtggtcactaaaaccccgtgcgatgaaaggcgtgatgctcttgtctaatggcgctcctctcatggnggagccaagttgtcttatggcgagaacgggattataattaatacaaccccttgttcccatc

SEQ ID NO: 97719 - DNA, 239 bp, Glycine max
  unsure (1)..(239): unsure at all n locations
aagcttatccaaacagggtcaaaagcataaacaacaaccttgaaacaatagtgataatcaaatgagagatgatacatagcagacaactcanaaatagtgagtgactgagatatcatgttggttgagagcaactttaattcccttaaaataatttttcagaaaaaagcaacagtcgcatcacaaattgtgaagttgaaggagctgatgtggcaaccaattatatgcaaactgttctttta

SEQ ID NO: 97720 - DNA, 424 bp, Glycine max
  unsure (1)..(424): unsure at all n locations
gcgtccatatgctatttttcctctgaatatagaattgagttaaatatctttttaattcttatagatttaatattttttcttttaatccttgtaaaanaaatatttttttagtatctttaaattatcttaaattttattnttattnttatagatattctaaataatttttctatagtttaaagtgttatctaaaatactttaagaattaanaacaaaaaaaaaatacaagggataaaatgaaaaatacttaaatttataaaaagaanaaatatatntaaatctattattaatcacaaattatttagtataattttaanataattatatgaaataataaatttatcatgaatacttttcataagaatagggggntattatatattatatatatatatatatatatattatattattattattatta

SEQ ID NO: 97721 - DNA, 356 bp, Glycine max
gagttctgagagattctgctgtgtgaagatctgcaaagacgagagctcatagcggaaggcattctgaaagcttgagatgtgtttgtgagtgattgtgagatcctataggtgaaggagacatccttaccacttgtattgttgcactctttcatcttgttcttctatgtgttcgaaaggaggtttccggactatggaaagctaaatcctctgttggatcttccctgtaggtacctgatgtaaatatatctctatctatgtaatgatgcttcgtgtgttctctgagctatcattctttcattacagtatgccattaccttgatcacgtagatgcattctgttgtaggggcattcaacag

SEQ ID NO: 97722 - DNA, 488 bp, Glycine max
  unsure (1)..(488): unsure at all n locations
agcttgatctttgatggaacaaataggcaaaatggattgacatgtattggttngcctctcacgttntgggcattgcaaaaagaagtaaagttcagcacaagctcaagacgataaaagactttgatgaagactgatacaattccaaccactatgcctaaactgggagggatagctgcaaattagttaggagttaggagagtagtgttcttatggttgcatatttatgtntatcttttatgggtaagcaatgtagtaacaaattgtgcaattgatataggtgttggaggtatattctgtangggcattggtgaatnntgcaacctcgatctttaatttggtttctcagttcgacgaattcaattattgtannatgtgtacatagcttttggtccccaataataaannattgactttgtatggggttcagtattngcaaatgtgtacatactataaccatgtntacctttcagtcgtgttaccaaactaca

SEQ ID NO: 97723 - DNA, 343 bp, Glycine max
acactatattatttctaagcttccaaatagaccaagttgaggctcaccaccagtattgccatactgtttgccttagttcatcgagttgaacaccaacatgtagaagaaagtgctgctttggactatacgggaatacacctttaatctgaaaccatgacatggtgtaccaccagatgggttgattatacagcaatggaaaaacatatgggatgcgtccttctctgaattctgcagaaaggacattgcaagttgtatctgacctgtctcatctcaaatttgcgtgtagtatctatctctatcatctcatgcacagggcatggagatatacagagatcactatctg

SEQ ID NO: 97724 - DNA, 344 bp, Glycine max
  unsure (1)..(344): unsure at all n locations
ttcatataacctcctcctctanatcaccattaagaaaaagctgtttcacatccatttgttgaactcaagtcaaaatgagcaactaatgccaagaatatacgaagagaatctttcttagatactggagaanaagtctctttgtaatctattccttccttttgagtaaatcccttagcaacaagtcttgccttgatctctcaatgttgctaatgaatcccttttggcttaaagacccattacatccaatggccttcgcccattaggaactctacanggtccaaactttgtactctgatggactcatctatcttcatgcatcatacataatttactcttacactcat

SEQ ID NO: 97725 - DNA, 447 bp, Glycine max
  unsure (1)..(447): unsure at all n locations
cctccaagtctcttgtttcttcgattatcgtgacaatatgttcatactttggatctaatgatctaagaaattntctccataattttacatcatcaagcttttcaccatttctcttaagttgagtggtgaccattatagctcttaaagtttgaagacataccttcttgaccggatctattcccttatataaggtttgaaacttctcccacgcttctttcaccgactttgctntcanaaccttctcgaaagcatcatcatttaatccttgatagattagatagagagccttcttatctctctttcttgagtctctcaaactatcatctttgagttgagagagactatccttattctctgtctctgggtgacctttctctactattctcaaaacatcttgcacaccaagaagagctntcatattgatactccaatcgtatagttgtattg

SEQ ID NO: 97726 - DNA, 257 bp, Glycine max
  unsure (1)..(257): unsure at all n locations
tgttattggctgagtaatgacattngtgggttggtgggaaactcggccgtataggaatggcagtcacagcatgggtttctccctctttctcaccctcttcatttgccctagtattatttttggcatttatcacagcatgatgatcagacttgcctcttttaaacccactgtgatcctttcgtcggtgaagaccaaatccgcanagctgtgaaggtgcgtagcccaccatctttacgtagtagagtattgatgatgtg

SEQ ID NO: 97727 - DNA, 381 bp, Glycine max
  unsure (1)..(381): unsure at all n locations
agcttgaatcggacctgagtgtgagaagttatgacctatttaatntctcgaaagctttcgttgttcaatgtcgagcatctcgacatattatgcgctcgaatcgaacatccgagtgaaaagaatatgaccattgagtttctcgagagcttccgtggttcaattccgagcatctcgacatattatgtgcccgaatctgaccttcgtgtgaaaagatatgactcattgaatttctcgagagcttccgatgtttaatgtcgagcgtctcaatatattgtgagcctgaatcggagctcagtgtgagaagttatgaccatgtgtatttctcgagaggcttcgtggttcaatttcgagcatctcgacatattatgtgcccgaatctga

SEQ ID NO: 97728 - DNA, 306 bp, Glycine max
tgtagcctttggtctctactcattcccctacgaagctgagtggaacaacgcgaggctggatagtgtcaggcgaaacttcgagtctctagaaagtcttctagtataagatgtcagtggagcttcactggtcgataaggaccttggaaaccatgaagttagcgattatgatggaagcaaccatagggtcatcttagttgatgagggtgatacccttgaagtctctattagtgaaagtgataggaggatgacttcgtggggatggtgtatcgacatagttgatgtcgatgtcgatgtccccgatggcat

SEQ ID NO: 97729 - DNA, 495 bp, Glycine max
  unsure (1)..(495): unsure at all n locations
atccttaagtcacctgcggctgcagctttaccnagagttttactctctggtaatcgattaccagtttactgtaatcgattaccagtggcaagttntgttttcaaaaagctttcaactgaatttacaacgttccaatcaatttcaaaatggtgtaatcgattacaatatattggtaatcgattaccagtgtgtttgaacgttgaaattcanattcaactgtgaagagtcacatcctttcacaaaaatgctntgtgtaatcgattacaatgatttggtaatcgattaccagtgataagttttaaataaaaatcaaaagatngtaactcttccaatggttttcaagttttctaaaggttataactcttctaatggttttcttgaccagacatgaagagtctataanagcangaccttaacttngcatttacatacattnttgaatacattgatttcaatcctttacaacccttaagtctctttgacaatcttcttgaa

SEQ ID NO: 97730 - DNA, 242 bp, Glycine max
  unsure (1)..(242): unsure at all n locations
ccccatgaactaccccaaccaaacatagtccgccacgtcccatcttcacccgcacccataatcgaatccattcccttcgcagaggatcaaggaaagattgatgcgcttgangatangctgagagtggtagagggcctcggcaattacccattctcggatctagcggacctatgtctcgtgcccaacatcatcatccctccaaattcaaagaccagactttgataatacaaanggatgacatg

SEQ ID NO: 97731 - DNA, 476 bp, Glycine max
  unsure (1)..(476): unsure at all n locations
ttctgttgtacaaaaaatatacctgtagtctgcactatcaaccatgtattgtgtgccccactctttctcttaaggtattgtagctctgcaccagcttcaaatattcactctaggtagatatntgctngagaaacctcttatntatcctcctggtgatctcccaacaaattctcgtgcccaaacttctggacttgatgtgtcaggcccaaaaccaagaactgaagtcagcccttggtaaatgttcataactgngagtttttgattctctcttgactgttttacatattgaaatattactagacatgatagtcaaatggaaaaggaagaaggaagaagacctgggttttggtgtgatcggagggcatgactanaaagcataatctgttacacactactgactgaagtaatattctaatcatatgtatatatatactgtagctgctagaaaatnacatctagacatctaaaaaatacgc

SEQ ID NO: 97732 - DNA, 430 bp, Glycine max
  unsure (1)..(430): unsure at all n locations
atctctcagtcacctgcacgctgcagctttaaggaggtagctagttttagatgggtgtgtgtatctaagctctagcttctcaaggaagtnttctcagagaagtttgtcaaggatgttttctcaagacagcttctcaaggaagctacctattctataaatagaagcatgtgtaacacttgttgtaactttgatgaatgagagtcttgtgagacacaactcatagatcaacttctctccctntttcttccttcaatttcgttctcccccctctctctttctctccctctttcttttcctccattgaagcatcctctccaagcttcttatccaaggctcatcttggtggtgaagctccttcttccatggcttattccctagtggatggcgcctnctctcacctcttctcctttgtcttccgctgcattctcat

SEQ ID NO: 97733 - DNA, 573 bp, Glycine max
  unsure (1)..(573): unsure at all n locations
gtcacctgcacgatgcagcttctattcatggttccaaaatttattttcattcttatatgtttgagacatcaaggacctgagctctttgttcatctgagtcattntgtgtaacttcattcaaggtaagggggatctttccacttcttgaaccctaaccttgttgcctttggaagctaggctttattgcatgttngtttgatgtctaaatattcgtagctactgtcttggctggaactagagtatatgttgtctttctggaaattctaaggtaaaaattagttctttaggtgttaaaacttaagggtagccttatantcatttaatcggagtttctagcaaagcttgaataaacaagtttaagacatttattggaaaaatatgcatgaaatataccggagtgagagtagatggctctcttcttaagttntaccacaaaatgagtttttagtgtgagatgtcggtacatatagactatgaanatcattctgaacattaacactaaataatagacaaacttgtaatgatgcaagatttaacgaacactgcatgaatatgcttagaatcactagattt

SEQ ID NO: 97734 - DNA, 357 bp, Glycine max
  unsure (1)..(357): unsure at all n locations
gctaagacaacttgtgtataaantacaataagggtggtatctattaaaatagagaggttttccttctggaagaattttccaactntagaaattttcttaattcttagataatttactaatgctaatgcaagcaataaagcaataaactagttctttccaaatgcttatgcaatgcaagcaaatatggcaatcatacgcagttcatctccccctttgggcattaacaagggccaaagagttaaacttatgcacaaaaaagaacacacanattggaggagataaaccatagcatttcattaatcatgaaacattgcannacaataatcattaatcatggacctttctaatcaaacactt

SEQ ID NO: 97735 - DNA, 440 bp, Glycine max
  unsure (1)..(440): unsure at all n locations
tttgattcatcccattggatttctgaacattgctntatatgtgtctgaacaatttacatataataagttgctcatattntacacaggtagccgcattagctactcttgccattcttagactaattgctgcttcatcttcatcaaaggaaaatgaanatgtctctatcaaatgtattacattntctcagcctcctgttggaaatgctgctttgaaggagtanngtttccctgtntttttttccctcattaattnttggttaactgcttatccttttccaaaactgcanaacaaggatattagttagttattttttgtttttgcttttttttccactatgtaatagaaaggtggcagcatattcagagtactgattccgaagattgttcactatttatctctgctatttcacatatatgctaactccccgcctttaaataac

SEQ ID NO: 97736 - DNA, 282 bp, Glycine max
  unsure (1)..(282): unsure at all n locations
ttctatggctgatgttgagaaagtctgctatatcatataattgagtaattttagtgcgtgtgctcatgtccaactactatgtttggctgaggttcatctaactgattgatattcaacttgaagtaatgaatttgtaggtatttggttcatggtattttgtgtggaacaagtggcctcaatgactntatgaggggagggggggttaattaagcttataatttttctactaacaagctntaatcctctnttaaatgatatgtgatagaattagaatgtagaaga

SEQ ID NO: 97737 - DNA, 419 bp, Glycine max
  unsure (1)..(419): unsure at all n locations
ataaacctggacatcttttagaaatgcttgntaagtcaagacaggtagaaatccagtgtctccatttgggacctactgctcagtaaatctgttgagggaaaaattcacagcctccgtcttaacatcattggggttctgaatccattcacactgaataagaattccttgaagaccattataatgtcttcttgaaatgatgactntatggaaatacgttgagttgctgtccccttcttttagccatttagctctagatttctgccttaataaagattcataagctattganggcctccacaattcttgtttaattctctcttaccttatctcatatagatangctctatagatgctaatctcacttattgactctttgaatttgtgatccctatcatatgatttgcagggaaagaacactc

SEQ ID NO: 97738 - DNA, 326 bp, Glycine max
  unsure (1)..(326): unsure at all n locations
aaaagaatagaggggaaatttccaatcaaagaaaaagagaaggaaaatttccaatgaaagcaaaanagaaatgaaggaaaattcctcaatcaaagagtgggagaaagcaaaacaaggaaaagaaggaaaattccctaatcaaagagtgggagaaagcaacaagaaaagaaaggaaaattcccaatcaaagaatgggagaaagtaaaaaggaagaagaagaaggaaagacagctcctgatcaaggatcgaaagaaaccanaagaaatgtgcagagaggtctcttgacccagacatatctgaacagtacagaattgtcaccaaatgaa

SEQ ID NO: 97739 - DNA, 174 bp, Glycine max
ctccttgcctggctctttaaactcttctggggggacatatagatgtcttcctctaaatccccatgcgagaatacagctctaacatctaactgctccaagtgaagattctctgcagctactatgctcagaataactacgatggtagacatctttacgactggagagaagatctct

SEQ ID NO: 97740 - DNA, 347 bp, Glycine max
  unsure (1)..(347): unsure at all n locations
cgtgcctactgccctgttctgaatctgtgtgctaagctatnntccttgagtnnttgagtgttaaaatatatgattatccttanaattttcttaaataggagtntttttagaaaaagttatgaataaaacaagttttagaacatnttactagataaaatttgtcacgaaaataatctagcaggaaagttgtatgggattagttttattaaaagtttgacctcaaaaatgagtntatggggcgtgaaaatgtaaggtagcatataagaattgtgaaaaaccaattctcggagcatcgagagggactaagaatangtaggagtgaaactntgtaaactgagcgatagagt

SEQ ID NO: 97741 - DNA, 335 bp, Glycine max
  unsure (1)..(335): unsure at all n locations
atgttgatattctggtgttcctggggtggagatgatggtacagcgggtgaaccagaagcggaagtttcttttggtgaggaagccatggaataacagagcgtttggaatgatttcgtaaatctcagaacactattgggaaatgctggtgaaaacacgaatgccacgaaaatataaatttgaatgaagaatgtatatggccgtgtgaagcaacggtcgaatttgccttggttcagtagtgaacgtgctattaatgttaagtgattcgntcgggcacgttcagatatcagtagttgctaccaattctctagcagacaaatgcncagcttgcccctcag

SEQ ID NO: 97742 - DNA, 175 bp, Glycine max
  unsure (1)..(175): unsure at all n locations
acggtttaaaagctctatagttggcctaggcttagagttttcccttttgtaaggctttgtgtcttttgtttttgaaattataatacaaggatctttcttcatctgttcctatgtctctacccattctcattcatttgcatgtntacttctttntctgaaatggcagatctgatga

SEQ ID NO: 97743 - DNA, 294 bp, Glycine max
  unsure (1)..(294): unsure at all n locations
tatagtgggatcttcttcttacactgactaaggaggtgttgctattctatactcatccaaagtaggcagcttggctggagggattcttttatcctcaagtttagtgtatcaatatggctcttagattaaaaatgctgataaacttatttatgtggccnatgagttcgtgctccatttttgaaagaatgatgcctactatgggaaatactctatatgtggagataacttgattggatgaggtcaagngaatactggatgcaggcaaaaataagtaccttgtattgatgacacctg

SEQ ID NO: 97744 - DNA, 427 bp, Glycine max
  unsure (1)..(427): unsure at all n locations
actgagttggttngagggcaacgagccccacctcaccttgntgctattaactgttgaatgtagatatgccttttactttcaaatatgatagagctggatgatatgaacaaatgttccttnttcttactaaaaacctttataaggaaaggaatttcttaatattctctttatagtatatgcgaggcacaaccataagcctaaagagtgtgccaccattgaagatatgtcanatggtgtaaacgtatcggcgctcaccctatccaaattgtccagtcaataacatgctctgtaatgagtctatgtggatcatcattatacaaaaaggacatcccatttatttctgttacagccaaatgattaaataatttcaaatctnggatataccccttgtaatctattataatgagggcgtgaaccattcaatgtg

SEQ ID NO: 97745 - DNA, 274 bp, Glycine max
  unsure (1)..(274): unsure at all n locations
tgcggcatgcaagcttctagaagatacctacgctatcgctgtgcctgtgtgtgcacccgtgaagtactaagcttctagcacgtaatctctcagatagctacgagtgtggcttcctcttttaggccttccctctactaacttcttgctgacgtcacatctgggcctggctgcttgcggttcataactgttacttgtaacactatgggcttgtcaagatgtaatattccctattantagagtaagaatatggataatttacatataacccatagta

SEQ ID NO: 97746 - DNA, 456 bp, Glycine max
  unsure (1)..(456): unsure at all n locations
attcgaaacatggaaagctcctanggttcatancaaatctaatcgnatacaatatgagataatcaattattttcaggtacaatatcacaatcaatatgagaaatagtgtagaaaactcttaccaattcanggtagatgtgcccttcatctccacaagcttcttcaacccatgatactcgaagagttctgaanaaacaaaacctttagtctttagccattccaagtttagaaacatgaagtgaatcaactccttctaagcataattgtacacgtaggacacttcataatgttcctttgaaaaccatgaagtgacctttggagagggtggtggtgatggagaccatgtngtccttttgcccttattggaagagtgaccctttgaggctcatttccttttgtatattgttttagggttgaggtctgtgcctatgctctcatcttcttgctttagtttac

SEQ ID NO: 97747 - DNA, 488 bp, Glycine max
  unsure (1)..(488): unsure at all n locations
gagaagtgaaatngagaaatgaagtaaattggagcaaactctcacctcacacaagtctataacatcaatttaaacttgctcaaactggatgtacacctaaaattccactgaatcaaaatgtgactcctcaacacccaattntaccctagaaatggctctttgttcaacttggtcatttggttttctctcttgtacagcccaagctttctcataagtcctaaatgacatttcaagctaggattaactcactntaacctccaaatgccactaaatccagatttgaccttccaactctcaaaacctcactctttttccactcataacaccatattctcactttctaaccctaggtaactctacccttcttcctaacagtttccataagcaatttcacacataacatcacaagcatcatcataaaaccctaaactgatgtggtagctactacaccaacatggcagtcacatgcttcacaatctctccaatac

SEQ ID NO: 97748 - DNA, 307 bp, Glycine max
  unsure (1)..(307): unsure at all n locations
ctataacaccggctccgcttccctaactgtactggaggcgggtgcggnggctttatcctctatgggttttctggagttntaacatgacctccgagatggaagccatttgatcttttaaagacgatagatcggccttcatcttgtcctgcacgccctcttcattatcccattttctggatcgagtgttataggggtgccttggtgttttcttagttatgatgaaattcctnaagaaataaacaacggtgagtatgccaccaaaacatgagtatgcanatggatgatcggagcacttggatgcacccca

SEQ ID NO: 97749 - DNA, 223 bp, Glycine max
  unsure (1)..(223): unsure at all n locations
ccctaaaaaagcctntgatgggtaaataggttaggcttaagccatatactnttacttaggcctagcaaagtctagnctcaactcaacctattttacccctaattatgtgtaattntactctaagtttaattgagccagtcatgttctcttattttcaaaattaaacacaattgatattatgatcattcttcttctaattaagacttcaagttttatcttttta

SEQ ID NO: 97750 - DNA, 399 bp, Glycine max
  unsure (1)..(399): unsure at all n locations
gatccttaagtcacctgcggctgcagcttatagtgcgggttaagacatataggccaagtcgccgcgatatgcgaagatgattacccgaggagatcgganttggtaccgccctgtccttctggtttncgactangaaattggcgagtggaggaacgcccagacgtttacgcgacaaacatagtgtaaccctttgtagctttaaaactctacggtcgggcctaggctttagagtttccttttgtaatgcattatgtcttttgttcttgaagttataatataaagatctttcttcatctgttcctgtgcctctacccattctgattcatttgcatgtttatttctttacgcttaanacgccaaatccaatgacgagtccctcgaaggtactaatacttggga

SEQ ID NO: 97751 - DNA, 438 bp, Glycine max
atcttaagcaccgcagctgcaagctggcattcaagttatgaatcatacctttaatccagaatgcttccttcacaccttcagctagggccatgtattatgtttcagttgttgaaagagcaacaactgattgttgatttgctctccaactgattgatgtaccaaacaaagtaaacacatatcctgttaaggacttccttgtgtctacatttcttgcaaaatctgcatctgcatagcctgtgactactgcttcatgtgttgtcttcttgtactttaaaccagctttcaaagatccatttagataccttagtgtccacttcacagcttcccaatgtgcgctgccaggatctcccatgaatttgcttataatacttataacatgagccaaatcaggtctgctgcaaaccattccatacattatgcttccaacaccactagcat

SEQ ID NO: 97752 - DNA, 288 bp, Glycine max
  unsure (1)..(288): unsure at all n locations
atgggatggagaataaagagcacctcgtanttctcgtacctctctcagcaatacaattgtatcccttagaacttgaggaaatgaaatattatcacatcattctcttatattaataatatactcttttctttcatttaggagctgtttatttccgaaataactgtgttttctcaaaataaatgttcctaagataacagtatcttatanatagtatgctgattctctcttactgccgtcatagtatcgcagagcatgtatcattatcatgttcagcattgactctttacg

SEQ ID NO: 97753 - DNA, 364 bp, Glycine max
  unsure (1)..(364): unsure at all n locations
aacacaagtgcaaactgaagtgaacaccgacatgatattgaacacatgaaatggaanatgatgcagtgattaatctgctaacacaagctagccaaacaaatccaaacaaggtaaaatctataccattctgagttagaagctattgtgtatntcactntcattntcagtctntaatggtccctttacacagaanaaatcaaaccttgtctcaaagaaaactggtcctgcatctgcatctacaaataattctggtattgcaaagaaagtgagttgtgcagcaacaaaaaaggtaggacttcttgcgtctttgactttanaaacccagatcatggtgtacacataaaactgactattttggtgggtt

SEQ ID NO: 97754 - DNA, 230 bp, Glycine max
gcatatgaggaagcgtttactgtagatgagatggacatgatgaagtgattgtgtgtgggtgagagacatgagtatgaataaactgaacttacggggtcgcgaacaatcgttgaagcgctgtgtttgtgtgaagagagatcacgatgataatcctacaagtatgttggggcatgtttcgttcacgtgtatcataccctaattatcgccggtgacctttgtttggtgacatg

SEQ ID NO: 97755 - DNA, 357 bp, Glycine max
  unsure (1)..(357): unsure at all n locations
agcttgttctatgtggccattcactttggggagcagtgagttngattcatccattcggatttctgaacattgctntatatgtgtctgaacaatttacatataataagttgctcatattttacacaggtagccgcattagctactcttgccattcttagactaattgctgcttcatcttcatcaaaggaaaatgaaaatgtctctatcaaatgtattacattntctcaccctnctgttggaaatgctgctntgaaggagtangttntccctcgtttttttcctcattaattntgggtaactgcttatcttttcaaactgcaaacaggatatagtagttattttggttttgcttttttt

SEQ ID NO: 97756 - DNA, 485 bp, Glycine max
  unsure (1)..(485): unsure at all n locations
taattgtctttgagtttggcggccatgatcaacaaagtactttcgacacctactatatgttgacttaaccaacgctgttattggtatgctgcgacaatctttcaacaccttattcacacattctgagaggttggttgtcatgtgaccatatcttcatccaaatgtatcgtaagccatgctccatttttccttngaaatgctatcaatccatgttactatggctggactcaatngacgaaattttctaagttttgatcaacacatgcttgaaggagtgacgctgcacaatctttacaccttattacacttctgagaggtggttgcatgtgccatatcttcatcaatgatcgaaccatgctcatttttcttgaatgtataatcatgtactatgtgctaattacaaatttctaagttacaaccatgctgaggaggacctgataattgtcctcnagtgagagattaactaatactctgtaataactaca

SEQ ID NO: 97757 - DNA, 240 bp, Glycine max
agatcttgtgtacttgaagattcaaccatacaagcaatactccttggcgcatacatactttcacaagctatcagcgaggtattatggtcgctacaatggtattgaaaggatagggaaggtagcatacaaattggaccttcctgcgaacacgaggattcacaatgtatttcatgtgtcattataaataagcatcatggtgaccatgtagtctcagaacaactaccaagactcactgaagat

SEQ ID NO: 97758 - DNA, 258 bp, Glycine max
  unsure (1)..(258): unsure at all n locations
cttgagtagaaaattgntgttgaacaaaagctacccaatctaaggcttggattgcactatgctcagcattgccaaagcaggaattgttccattacttcatagaattttttagcagtctaagtttttgagtacatcacacaccctgagaccgatgtgtcccaaacctctttgaccaccttgagacaatcatgatcaccagatcacantttaaggaacgtaaaaggagagcaaccttgttgtcagctcactgcaacacca

SEQ ID NO: 97759 - DNA, 337 bp, Glycine max
  unsure (1)..(337): unsure at all n locations
tggaaactgagaacacctcatctcttgtcttgatcaaggatgcccacactattctgctatgctcatctacaaaagatgtgaagtacttgttaccacccagatatggtacctcgaaaggaccacacacattagaatgcacaacaccaagtgcactggaagctctcattggcaaatgggaaataaaggaatttctnggttgcttgccaatgagacacacatcacacacctcttctgtacacttaattttggttacctaaaccatatattaggactaacatattcaacatttgaaattaagtgacagacctggatgccaagccactcaattggtgatctt

SEQ ID NO: 97760 - DNA, 340 bp, Glycine max
  unsure (1)..(340): unsure at all n locations
agtcacctgccgcatgcaagctnggacaatgttgataacaagacatacttcaattgtcttcatttggtgacaactntattttcatccaaatgatntttttgcatgagaagggtttaaatgggaaaaaattaattntcatgagaaataaattttcaaaaaatatatgtacaactaaccttgtagaatattgtccaacaaatttcccaaattattataaagtgatatgataatatttagaaattntgttgtgaaaatacggttgtaggacaacaaaggaacaataattatgaaaaatagattcttgtaatttgtttggcttgagaaaaatatgacatattat

SEQ ID NO: 97761 - DNA, 371 bp, Glycine max
aaaatatataacagcaccgaggttctaatttattggactccctctctccctcgcgggagactctctctctctctcctctctctcttctattttttcgtttttagatttagactctcttctctttctctcttattttcagggatgctacaacaccaggtcacacttttagttttatcaataaaatttcattctctatttgattaatggaacgctaagtccgcagcgctgttttcccttgaggatcaagcacagttctctttgaggttctattattaccgttaaattctgtttagtttttcctcttcactaattactctgaatttgttgcttttaattcacgcatgcttagtgcttgattaattgtctctgcg

SEQ ID NO: 97762 - DNA, 385 bp, Glycine max
tgtgcatccaataccctgagaggatgccccatattttcttttaactggactgatccatttgcttccaaagtttcatggccttgcaggtgaaaacccgtacaaacatctgaaagaattccatattgtttgctccaccatgaaacccccagatgtccaggaggatcacatatttctgaaggcctttcctcattctttaaagggagtggcaaaggactggctttattaccttgctccacggtccatcacgagctgggatgacctcaagagaatattcttagaaaaacttttccttgcttccaggaccacgaccatcagaaaggatatttcaggcattagacaactcagtggagagagcttatatgaatactgggagagattaaaaaac

SEQ ID NO: 97763 - DNA, 90 bp, Glycine max
ctgccatacatgccattggcggcgtcaaacaaccctgtgactctcgatatgtgtcgctattgcatcacgctcgaagagagcatgtatggt

SEQ ID NO: 97764 - DNA, 379 bp, Glycine max
tatgcgagatagagaccaacatgttatctaatatctccaaggacgaaaaaaagataggtctagccacggcccactagcatagaatcgcggatgagtatgctcaagtatatgcggaaaaaaaggctacaggaagggtgatcggctctttacaccaagaggccaccatgtggatggatcggtttgctcttaccttgaacgggagtcaagaacttccccgattggtagccaaggccaaagcgatggcagacacctactccacccccgaagagattcatgggcttctcggctattgtcagcatatgatagacttaatggcccacataattacaaatcgctaggaaacttgtatggtctcttataccttgactggatatgactt

SEQ ID NO: 97765 - DNA, 392 bp, Glycine max
tgctctaaatttacattggtgtttgtatttatgggatgaggttatatgccatttttgctttaagagtaatgtcccactggtaaaactaactttccaaatgtttgccttctcaggaatggccccgaggaagcttgcctcaaagaggtccaggaagggcaaggcggccaaaggaactagttccgccccggagtacgacagtcaccgctttatgagaattgtgcaccagcagcgcttcgaagccatcaagggatggtcgtttctccgggagcgacgcgtccagctcaaggacgacgagtatactgatttccaggaggaaatagggcgccggcggtgggcaccactggttactcccatggccaactttgatccagaaatactccttgagttttatg

SEQ ID NO: 97766 - DNA, 403 bp, Glycine max
gacacataaaactcagctgtgataacaatttagcaacgaggagggagtttatttattgtgcgcaggacgtacggtagtgggcacacgatactttgatacttgcaaaactaaatgaggtggccacataacagacaacacagtggctgctaaccagatttgaggaatactactcagtatgaaagcccgcttaaaaaggtccttcaacgtaatgacattgtctccttgcaccgacccgcttgcattgatacctaaaaacttgacaggcataaaaagtgtcctaaataaaaacaggagataaaacaaactactgcagctcatctatcgtcttgaacttcccctctgcttcagcagaattaactccttgaaactctaaataaacagaaaggttttcattgacaacagc

SEQ ID NO: 97767 - DNA, 387 bp, Glycine max
tgttctggctaggcttttgcattagctagttctttttctcttccaacaatgggtaaagctaaaaaaggacccaaatttgcggttatgaagaaagttgtcacttccaaagcaatcaaaaagtcagttttttcttccttatatatatccctgttaaaaatagtcctacatcggataattcatgaacatgataagtatttatataattgggtacaccactcccttataaactggtttttaaggggatatttcagatgactttgctgcactataaaatttaataatcccagttataactaaaacattagctcctccattatgcttgggttttgctctattttcgttgcctgaatttgttctaaaggaaaagttatccagaaacatgtaagc

SEQ ID NO: 97768 - DNA, 384 bp, Glycine max
tcatgtttttccatagtctccatgtgttttagaatttcatgaattttctcttcttgcatttattggtcaatgtctcaacttcagccattttcattttttgtgaagtctcgttgcatgattctttcaatgtaccttttgattgtgaagaaaagtggttgagttgatcaacaacaaagagcttcttcggtgatagttgaagaggcaaggtgtttttgtcctgtgcagtggattttttttatataaattgtttaaaactgaggaaaattaattatatataatcaacttatatgtgaaactttgattaaatgttaaaagaagtgattcattatttactagcacaaaaaaatagtagtaatagtgtaagaaaggcaacagtgtaacgtg

SEQ ID NO: 97769 - DNA, 383 bp, Glycine max
tttttgtacgacaccttgtacacaaattcactgtttattctctcttgaatcaaaaaaatttttattgatggatcttctctgatcatgcctgtcaataacataacaaaatttaaatgataattaaaaaaatgaacataatatgaacataaaaatacatacctactacacaagtgacaattaaatctgaatcaagtttctcgtgatcttgtgtcatggtcatattcagacatgtgtgtggtccacccccattgcgtgactttccacgtatctgtttttttagatataattgccctcatatagaaagggcaaggacactctgcatttttattcacacaacaaatcacatacttgttcgttttgctttcaacaactttgaagctttg

SEQ ID NO: 97770 - DNA, 335 bp, Glycine max
agcacgagctgcagctttcgcatgtatgcggtagctttcgcggtttgcgatcatcaaacaacttcgtatgttaacaactatcgaatgtttaagtacctaataatgcccagtatctagtcgttttgcaatggaaatttttatacaagatgctttgataattattagaatctaagtaagtccactctaaaaataatatacttatttatttatattataatgaacttcattaaaaatattaactaatgatgctaataaaatatctgcctttacaggatgataagcataagatgcttgctaagaatattacttcttagctaataaatgaaataaagtct

SEQ ID NO: 97771 - DNA, 384 bp, Glycine max
tgctctaaatttacattgatgtttgtatttatgggttgaggttgtatgccatttttgttttaagagtagtgtcccactggtaaaactaactttccaaatttttgccttcgcaggaaatggccccgaggaagcttgcctcaaagaggtccaggaaggacaaggcagccgaaggaactagttccgctccggagtatgacagtcaccgctttaggagcgctgtacaccagcagcgcttcgaggccatcaagggatggtcgtttctccgggagcgacgcgtccagctcagggacgacgagtatactgatttccaggaggaaatagggcgccggcggtgggcatcactggttactcccatggccaagtttgatccagaaatagtccttg

SEQ ID NO: 97772 - DNA, 99 bp, Glycine max
gcacgagctgactggatcaatcttatatcatgacccttgttgaaaattcaagctggcaactaaaaagccaagttatacctaggaatttaccatggaagt

SEQ ID NO: 97773 - DNA, 391 bp, Glycine max
  unsure (1)..(391): unsure at all n locations
aaactcaagctttctataaaaaagntacatattaaggtttttaattcttaccaactaaacccacatgattaatgtaatgctgtaaaattttactttattcacatacagaagaatctattatatttaatataaaagaatttgtgtttaattttcttcgtgtgtaaagttttattaaattgataacaacgagttaaaaatttatgacctaagataaaaaaaaattaagttgcaaatggactaaatcaaatcttaaaaattattcaaattttgtatttataagttgaatcaaactcaaacttccttaaaaaaaaaagtaaaatcaaactccaacttactaaaacctaactcaccgtatcttaattgcacctctaatccaagaaccatgctggtg

SEQ ID NO: 97774 - DNA, 365 bp, Glycine max
  unsure (1)..(365): unsure at all n locations
tcttagtctcgatggatgaatattaatnttttgctactccangcactcctctaatgacaatagcatcacttctggcactaaattgctgggagtttgaagccatcttctcaattaaatttatggcttcactaggggtcatgtctccaagggcttcaccattggcagcatctatcatgcttctctccatgttactgagcccttcataaaaatattggaggagaagctgctcagaaatctggtggtgagggtaactggcacatagtttcttaaatctctctccactgaactgactaatgcctgacatatcctttttgatggntgtggtcctggaagcacggaanactttttctaagaatactctcttg

SEQ ID NO: 97775 - DNA, 394 bp, Glycine max
  unsure (1)..(394): unsure at all n locations
ttgacgggtaattataatattaatcaatataacgttttggattacgtttatagctnnngacagagaatttggaaataaatgccgtttgtttattaattagagagactttgcataatactactgatatgcacgttgattcgggttggatcgatgttgatattgaaatatacggtatacaaagctacacttataaaaattgtatgaaaaggtacgataagtattcaaaaggctaataatagaccagttcgtgtgaaatataatgcaaaactgtgctttaaagctccattttgatgaacaattttaatattctatgaaacaagtagccaggaatatttagttctcccttttaacaaataaattaaaaagtatctcatcattgaaagaaatacaaagg

SEQ ID NO: 97776 - DNA, 105 bp, Glycine max
tgtgatagtgatggggttgatgaatgcctagcttatgcttgacatagactgccatgccgtttgttgtgctacccccacaggtcggaagctatgcttacgggactt

SEQ ID NO: 97777 - DNA, 390 bp, Glycine max
  unsure (1)..(390): unsure at all n locations
tgcaagtgtattgactgtatattgaggatncnnttttttttagttttttatctttccgcaggggagtttcactaagtcccatgtcaaccctctaacatggcaactaaaaaatatgagttacgtaaggataggtcattcaagtcttttttctaattgaatccagctagtatcactttcgtacagtatccttcttatcacggtaatgcgaagtgatgaataaattaagaggtttttgttttcttacaagggtgattaaattgaatgagtttataataaactaaatattattattttaattttgttttgtgagttgtacttcatatatgcaacttaacttttatcataaaaaatagataaattgtatttattaaatacagtttatgtattttt

SEQ ID NO: 97778 - DNA, 184 bp, Glycine max
  unsure (1)..(184): unsure at all n locations
atcatagtttgctctctcatctagcattcgtctcatattganacctatttcgtgtcgtccagatntaaaaaaaacttctcttactttatttcaaaatcattcttctggttaccttacaactcactcaactctatcattaccctttgtcaatatgcataattaccaacatgcagacatatctaat

SEQ ID NO: 97779 - DNA, 383 bp, Glycine max
ttacaagtcatgtatgttccttaattcctttatcattatgttgccatattccaattcgatcttacattttatgatgttcagatatttatttgatcatcactgtagcttttaatatgatagtttattcattaatacaattcctatgatgagtttgtttcctacattcttacctttcagtaagttattctttttgtaatttattattattgaatatttctgctaattttgcttcacaaggtggtaatactgaggtcccatttgaataaatttcttcataaacattatttatacgagaagaaaattaaaaggtatattgaatcgagattctcccacaagttaaaatcaatttttgcacttaacttttataggtctcatctaacttc

SEQ ID NO: 97780 - DNA, 169 bp, Glycine max
  unsure (1)..(169): unsure at all n locations
atgctgtgtatgaatatcatatataatgacagcacttatatgttactcatttattgcgttcatcgcattgctacatcaatttagnaacagacatattttgaaatagtacaacactccaattagagtcggtccaataaagcacttaacagacggactaaatcggcgtaaa

SEQ ID NO: 97781 - DNA, 221 bp, Glycine max
  unsure (1)..(221): unsure at all n locations
actatatgaatctgctgtcgctgtctgtcgatacgaaaacttctctgcactntcagctgcagctccggtcactatattacccgagttgtcatttgctacctaatgcccgtaacgatgatacacccaacttgaccctgtgaatatgccgcctcccaccaccccgaagcaactctgtgggacaccgtctgcccatcttcctgtctcaagcaccgtattgcata

SEQ ID NO: 97782 - DNA, 392 bp, Glycine max
tttgtttatttcttatttcctaatatgtaaagcatttattcttttcttttgaaaatccactaaattatctattgcagcatggcggcagcttttggttcaagggccttgttttcattagtaagtggcatgggtggaccaaatcaagcaacaaatgcactcacttctggacttttctttgcacttgttcaaggcggacttttccaggtaggcttgaaggaaaagctaatgcctctttcacagatattgtaaacccttgatattttgtacctccatttgatcagagagaacaatgattgctcggctttccatttctgtgacatactaagtgaaagtgccttactgtttattggtatcatttataaaaaaaaatcttggggcaatcattgttgggg

SEQ ID NO: 97783 - DNA, 140 bp, Glycine max
gacacattgaaagtatcctactgacataactcataatcataagtgtgactggatggtacaactcttttaaatatcatacttttcatggcttatatctgcatgataatcaaataactcttgatatcttaaataattactga

SEQ ID NO: 97784 - DNA, 377 bp, Glycine max
tagcacgcagagactaacgccgtgttctacgcttttcgtcaatcgcggccgacaagcccgttgacacgcggatatttacgtcattttccgcgctcacaagatctgtcatactgacatttgagtcacgttggcgggcggaaatacccaagtggttatccgtataaacattcttttttgctatctgtaagacgaaaaggctgatagcacgcagagactgacggcgtcttctgtgcccttcggcaatcgcggccgacaagcccgttgacacgcggagatttacgtcaacttccgcgctcacaagatttgtcatactgacatttgagtcacgttgacgggcggagataccctagtgggtatccgtataaacattctttttt

SEQ ID NO: 97785 - DNA, 381 bp, Glycine max
tcttaaggatggttgctcgattcgtcttcaaggttttattatgctcatacctaggtccctttggaaaaggctcacacttgtcgtgtttgtgtcgcttgttcgacctatgcgagttggtccttgtgctaccttcccttttgtcacatttatgttcaacctatcgaacttcatttcaaaacctcaacatttcttccatctgaatgtaccattggctcgctctcgtaactcatccatgttgttagaaggtttcttgcatagactgtcgacaaacttgctaggtcatagggccagcaacatggaatgtagcgccacctcaagattgagattcctgatttcgaaaatagccaatcgaacctgcccataaatttttagagtgactca

SEQ ID NO: 97786 - DNA, 383 bp, Glycine max
ttaacctcatcgtctctcacagtctttttatttggtagccaatccaatccttgtgtccggactctcagccacttatgatagccgccgatgatcccattactgcttcccctaagctctctgtcctttcttcacaccgcatcacatgccttgcgaactccttggagtacctttgcattggggtcactgaaaccccgtggtgaggacaggattataattcatacaaccccttgttcccattaagggaacatttggaaatccttcggatgaagatagaatcctgattcttccttccttctagcgagggaaccaattaacagacgcccctctatgctagccaagagttggtcccaattcgtctttctttttttcgacgcacgagcggg

SEQ ID NO: 97787 - DNA, 232 bp, Glycine max
ttttccatatcagggcaacttttccactaaacggtggagagcttgtgaatatattcttgaatcactgatactatggcgcagcaaacctcgatcattgcatatacagcagaacttagtgagagtttttagctgcttgtatatttacaaccctcagtttagaggtctcgatatttcatttactacattagcctgtactatacatatcccacgtacattactattctggaaatgc

SEQ ID NO: 97788 - DNA, 385 bp, Glycine max
  unsure (1)..(385): unsure at all n locations
tgttaaagaacttagaaaaaatcaagattaagcttgttctttcatcgnacgcgtgtataatatataaagcattatttaaatctattccataaataaattaaattacatgcaaaaacaaattttaaaaaaataacataatatatatttacgaccaaaaatttatataatatatatataaaattaatacaaggaattatataactaacctagcatagcaaatttaaatatttgtaactagaactaaacctaacatacaaaactaatatcatttaaaactataactaatattatttataactataagtaaaactaatatcttttaaaactaaaactaaaactacactaaataatttaaattatcaaactaaacctaatttaccattta

SEQ ID NO: 97789 - DNA, 262 bp, Glycine max
gcacgagctcacttaacataccatcatcaaaagcttttagcttgttgtcactcaaaatagcttactttacatttccaaccatttatctgctcaaaatgctatgtgaaaaagtccatgtttgagaatataaggtgtacgggttgtatatgtaagaatttacacgctactagactatgatagagtaatatgtatgtgccaaagataccttaatttatgatgaaatggtggctgacttagtaacttgtcaaatttgagcgtgagt

SEQ ID NO: 97790 - DNA, 371 bp, Glycine max
  unsure (1)..(371): unsure at all n locations
gtgagatttgaataatttatgatttttanactaattcaaaagcttatatgagttaatttggcaggtagaatattgaaagaaaattaaggacggttagacaattaggtaattataactaactgagtttgttggtgcaagcttccttcatatgtataaaaattattctttgtaaaacattctacagaaatcaataatagaactctcattctcaatttcatttactctctcatcctcttaatttctctctaaacagaaattgtgtgtgtgaaccacccttgctccaaatatatatacgtgatctcttttttaaaaaaaaggaatatatacgtgactaaacaattggcaagtagagatgtcaaatactattctta

SEQ ID NO: 97791 - DNA, 345 bp, Glycine max
tggttgaggagctcgtaaagtatctggagttttttttttgaatgaagcccgctcacggtgatgttgcgccatggggacgctctggagacacctgagaataggcgagaggaagcgctctccactaaggagaactccctgggtaaagagctccaccaccaagaagagccttacattatacgcttggggaggatgcttctgtggcagaaaaaaaatacggagagacagacagacggggggccgccatgttgtatgaagatcaagggagaaaagttgaacattgaggagcgacccacaagactcttgtgcatcatagtgcaaccagagatacacatgcctctatttata

SEQ ID NO: 97792 - DNA, 376 bp, Glycine max
tagataacgcaacccctcgcattgagaataagatttttgtcaataatgcccacgctgttgacgatttataaaattatttttgcgggtgttgaaaccatcaattacaagaacaatcgtactaatatagatctatacacttactaccaaaatatatagtaacatacataattagatatgggaatattacaaatagaccgaaacccggaaatcccatcaccttctttcaaattgaatcccattccccctacaagtggtgctggaccgcattaggttttctgtttttataatttcaaatggttgtgtacaaatcaattcatacgtatcaataaactaaataaccctcttatagatatttgataaatgaggtacataatac

SEQ ID NO: 97793 - DNA, 357 bp, Glycine max
cggtcttagcacgagctcgcttgattgaaagtcctttatctacctgagaaactcattttcattatagatgcacaacacctgggcagtgctaaagtttaggcctgatttaaatatgacaaatcattgcgttggtatacattgccgacttgtattgtcaataaaccgcaataaaaactctaatgacacttgactctgacgagccctaacttatgattatcaggagaggggtgtcttgctatgcactatgtcgatgctcaagaatgcgaatttgtagatcactctcaagatgggcattgatcttcttattactgatgatgatgtaggtgtttctctgatttgcattttttacactctctc

SEQ ID NO: 97794 - DNA, 405 bp, Glycine max
ctatagcacactcaagctttaaagaagaagatacaaacctttcgtgcaaacatttttcattcgttctttttgtaaaaagctttttgtatatttcatgtaaagttagaaagctctaaaaaaaccttgatcatattaagagaaaagactaagtgttgattacacatccgtttgtaagatgattatggatttaacgagtaagaaaactcaaccaacaaatctcttttgatctcttttagagacaacagtagcttggtaggacaaagaataccagacattcatcaagcttggggtagagcttgatttttagagccagaagtgacagtgaataatacttgtaacttgtgagaagttagtagaacttcttgttttgtcaagaacaagacgtagcctcaatggtagagacag

SEQ ID NO: 97795 - DNA, 404 bp, Glycine max
  unsure (1)..(404): unsure at all n locations
atttaatcttgataatatataataatggaatgatatatcactatgtaaatttttaatatatacttaatattactaatgtaacttactgtagactgattgaaataaaatattagtatatttcatttaataaataacactgatataaatacttatagtatactcatgattatggatcaaggagtgatcaaaaatacattaantanatattgatatgtgtgagtgatttatatttctaaattttatgattgagccatcaactattttatgttacaaatatcaatataaatatacgaatgcatttctattatattactttataataaataacttatgcacataattgatatctctatacagtgagagcatgggattatcagtaatatcatgtggcaaatatactctct

SEQ ID NO: 97796 - DNA, 391 bp, Glycine max
  unsure (1)..(391): unsure at all n locations
tgagctcattgctgctgtcccatagaacccctctgtacttgttcctgcttttggntttctgctctaatgctttgaccgtagtcatgttgacatctctcaacacatcacactctttcctgaccctagtgactgttgtctttagcttctccttgaccattctcattttttcgagctccgctttcaaagcttgcacttcttcgctttccttagagacttcagcttctttcccacttaggccttttagctttgggagccaagttatcccttgcgtcctagacttcaaccacttttgctagcagttgatgacgcccttgctatttcccctaagctccttatctttcctttccactgtattccacactctaaggattctctgaattatcttcgcatt

SEQ ID NO: 97797 - DNA, 362 bp, Glycine max
  unsure (1)..(362): unsure at all n locations
tcctctgccgtaaaaaagatattatcggccagcgtttgtaaaaaaatttctcaatgtcggctgaaaaatatccgtcggggctatttaactaccgatgtcggctattgttttttctattccacccctgaattatatttggatgatgcctattaagaaatgttcggtcggggtcatccggtcatgcctctttttgaggcctcgaactggcgaatttcctaatcggccgacgtcggctagcatttttttcgatcaatatctgtgtgaatcatgtttttttttgccaaagagggcttatgttttcnngggcgacaaaaagagaacatgccaatgtcngnccaaacacaattccgcacgaaaaaacc

SEQ ID NO: 97798 - DNA, 246 bp, Glycine max
tacagctcaggggatctacatctttttcctaagaagattgacacttttggtctatttgtaacatatgctatggaactgtaataacttgaattaatgaaattcaatgtttactagttttaaaacatgggcaagccaaatgtgtgacctaggtaggcttggcaaattactcaactttgcttaagatcaattactgtgtgaagcatagattgtgtcctcatcgatcgtgttctgtgtgggcaccagaac

SEQ ID NO: 97799 - DNA, 391 bp, Glycine max
  unsure (1)..(391): unsure at all n locations
ntgcagatttggtcttcgccagtgaaaggatcaatgtgggtccaaaaagaggaaaatttgatcatcctactaggacgactgagaaaactggggcaaataaagagggtgaggatgagggagaaacccatgctgtgactaccattcctgtacggccaagtttcccaccaacccaacaatatctttactcagccaataacaaactttctccttacccaccacccagttatccacaaaggtcatccctaaatctaccacaaagtctgtctaccgcacttccaatgacgaacaccacctttagcacaaaccaaaaaacaccaaccaagaagcgaattttgcagcgagaaagcctgtagaattcaccccaattccagtgtcctatgctgacttgctc

SEQ ID NO: 97800 - DNA, 412 bp, Glycine max
cactatgagaaactcacgcttgtagcaaatgcaaaccacaataactttttactcgtatgtccgtttgtgtcccgtaacatattgacacgctcgaaattgaaaacagaagcactgagaaaattcaaatgacaataactttttacgtggatgtccaattgggtcccgtaatatatggagatgctccaaattgaaaacagaagtgcctatcaaattcaaatgacaataactttttactcagaagtgcgattgagtcctgaagtatatcgggacactcgaaattgagaacaaaagcgtgcgagcaaattctaacgataataacttttaactcggatgtgggattgagacccgtaatacattgagatgctcaaaattgaaaacagatgttctgagcaaattcaaatgacaatgactt

SEQ ID NO: 97801 - DNA, 396 bp, Glycine max
acctataaaactcagcttgtggaagcccttgaagctttgcacttttgtgctcgttccaaaacttgctaaattctgaagttgcataagttgcaagaaatccgcacatccgtgttcaacaatctctaattttcattttgtttacttttgggctcaaaacttctatcgcctactagtttatgtagactttttagactctattttagagttctgaacttcgttttagacagcttagtggggaacaaattgagaggcttgattactctttcacttgcggttagaatcttttctattgattgtttttgtttcatggatacttgcgaacagtctttatttctaagattaggcataaccttatgctgtttgaatgaattaatttcctctatccgttgtcctttg

SEQ ID NO: 97802 - DNA, 324 bp, Glycine max
aaaaaatatttattatctcatttgacgttatttttagtgttattacaattattaatattcaaaaaattatagtaaaatcaataaaatatgttgaaattaaataatcatcaaactaattaaactaatatgcagataaataacaattatcgcttataacacataagacttatttaaaagttttgatacagaaaatctatatcttcccataatcaaatttattgactctctcttaataaatacttttttttacttgtcaatgatctatctcgcaactaacctgaatactctactaatagtgttaaatgaaagatgacgctatattat

SEQ ID NO: 97803 - DNA, 383 bp, Glycine max
  unsure (1)..(383): unsure at all n locations
ttgagcaaattcaaacgacaataacttttcactcttatgtctgattgagncccgtaatatatggagacggtcgaaattgaatgttgaagctctgagcaaattcaaacgacaataactttttactcggatgtctgattgagtcccataatataacgagacgctcgaagttgaatgttgaagctttgaggaaattcaaacgacaataaatttttactcggatgtctgattgagttccgtaatatatcgagacgctcggaattgaatgttgaaggtctgagcaaattcaaacgacaataactttttactcggatgtctgattgagtcccataatataacgagacgctcgaatttgaatgttgaagctctgagcaaattcaaacgac

SEQ ID NO: 97804 - DNA, 123 bp, Glycine max
  unsure (1)..(123): unsure at all n locations
cacgttcattacggctataactcataaaaatgcgctaatgtangcttactcatcagcgtcaattacggactaattgcatcggaaagtatgcttaatggtaactcacttattcacgtcttttac

SEQ ID NO: 97805 - DNA, 382 bp, Glycine max
tcttcccaatgaagtcaacaccaacaactaaaatctcctttctcacctcatcatcatatactctagccctgagtgcaccaaagaaatctgcaatcataaattgcataccattagtcttattgtaatgtaagaacatctaagagctaaatgacagctagagaaaagtgttatttagttgctattaaaaattgcatttatatgtaaattgaattatatttggtgtgatttatatatgcatttgtatgtcaattatttggataaattatgttgaactaaatatataatttgtggatttggataaattatgtggattagttaggattccaaagctttgttacaaattatttgaatgtttaatttgacgaataaaagtaaatgttct

SEQ ID NO: 97806 - DNA, 383 bp, Glycine max
tcgtccaaactgatgcattatgaccggttgtatttatcaattttgtgaactataggttgctccgtagaagcatttatcatgaagcagaagtttatttatggcgtgattacttaaccttaaaagaaaaacatctcaactaaatatgtgtaactcaggtgatgattgaacaatatgtcgattgttatcaatttctatgataagttgaactcatagacctttcaatgaaaacagaacatcccttgaagcatggatggatccactcaagggtctttgagggcagctgcccccactagattgttttttaatattatgtatatgtatggatataaatgagggtcatagtgtaaaatgcacctaaagaagaagtttataacatatatatt

SEQ ID NO: 97807 - DNA, 385 bp, Glycine max
  unsure (1)..(385): unsure at all n locations
tgctctaaatttacattgatgtttgtatttattggttggggnngnatgccatttttgttttaaaggtagcatttcttggtaaaaactaactttcccaaatgtttgccttcgcaagaatggccccgaggaagcttgcctcaaagaggtccaagaaagacaaggcggccgaaggaactagttccgctccggaatacgacagtcaccactttaggagcgctgtacaccagcagcgcttcgaggccatcaagggatggtcgtttctccgggagcgacgcgtccagctcagggacgacgagtatactgatttccaggaggaaatagggcgccggcggtgggcatcactggttactcccatggccaagttcgatccagaaatagtccttga

SEQ ID NO: 97808 - DNA, 359 bp, Glycine max
  unsure (1)..(359): unsure at all n locations
tctcgatttattatgcaccttaatcagacttccgttataaaagntatgaccatttgaatgtctcgagagctaccattgtttaattataagcttctcgatatattatgcacctgaatcagacttccgtttgaaaagttatgaccatttgaatttctcgagagcttctggtgttcaatgtcaagcttctcgatatgttatgcgcctgaattggactttcgtgtgacaagttatgaccatattaattactcgagagcattcgggcttcaatttcgagcgtctcgatatattatgcgcctgaatccgacttgcgtgtgataaggcatgaacatatgaatctctcgagagcttacgccgtttat

SEQ ID NO: 97809 - DNA, 378 bp, Glycine max
ttttgctgcaaaattcctttttgttggtgttttttttttggtttgcgctaaaggtggtcttcgtcattggaagtgcggtagacagactttgtggttgatttatggatggcctttgtggataactgggtggtggggtaaggaggaagtttgttattggctgagtaatgacattgttgggttggtgggaaacttggccgtataggaatggtagtcacagcatgggtttctccctctttctcaccctcttcatttgccccagttttctcagtcgtcctagtaggatgatcaaatttgcctcttttcggatccacttcgatctttttgctggcgaagaccaaatctgtaaaacttgaaggtgtgtaacccaccatttttttt

SEQ ID NO: 97810 - DNA, 390 bp, Glycine max
tgagcatgcctataagtccattcaatatgacccaacgtcaatatctgccgttgatcccaaacaatattcaaggcgttttcgtgacttcatatttaaaatattttctgaagactcttgaaagccaaacacaattatgtggctgttacattccattcataccctcgctactctcaacctcggtagccttgaaatttttcaactattggaaccacaattgaggtccatgtgactttgggtacaaatccatttttttcaactttgatcttaattagcttatttctatgtatatatagggcagtaattatatagtatacatgatgaaatgctgaaagcaagaaaattttgtgctagaatatatttattccatttctcccaaatgggggaagagat

SEQ ID NO: 97811 - DNA, 353 bp, Glycine max
gacgcaatatacgtaatggaactctacttttgtactgctagccagctcaagtcttctacctgcattcatactttctttaacgatgtctaatcgtttctctcataaaataagcaacctaatggctcattctccgcatcattgatcttgatatcttagactaatgacatcttgtgactgattttgtcgaacttctctattaccaacattcgtgaacactttcctgtgttgtacacttatctttaatggctgacttatgacttaatgcgttgtgctctactaatgaatagctgacataagatggtgactacatcagacacaggttcactttacatagagacatcattaattaaccc

SEQ ID NO: 97812 - DNA, 389 bp, Glycine max
tccatcaagtggtaatcagagcacaagagcttcatgtatgtgctccttaaacctccattaattttttgctttaccttctcttccatttttttttcttcatttttctccatgtatctcctcacatgtcttgttctaaatgttgttaacatgattctttagaatttgcaccgattaaacttgctatagaagttagatttgattttctatggttcaaatttcttgttcttgttcttgaaccatgaattgtgttgagtttaggttcctttgagttttgtcttgttattttttatggttgaaacctaaaccataaaattcttacaaaaatattaaagttgaagaaaacctcaaaaatctagagtgacttgttcacctattgtagttttgtcata

SEQ ID NO: 97813 - DNA, 94 bp, Glycine max
agagttagactctgctatctctgacctggactttagaagctgaacctaagtcactttcttttgtgactctggactgagctgactctatatgatc

SEQ ID NO: 97814 - DNA, 267 bp, Glycine max
tagaaactcaagcttttatatgtgtgcaagtaataaaagttctcctagtgtatccgtggatgtatgtacatacattgtatgttgaaccacgttaaactttgggtcttttctctcttccctttatttctttctcttcttttattgctctatactaacactgtaatcttaatgcaattcgtttaggctaagttcgacgaggaatcctagaatgaagtttaaatagaattagtccattcaagcgaggaatcggtgtttggggtatttgct

SEQ ID NO: 97815 - DNA, 53 bp, Glycine max
cctccatcttaatctcatttagtatactttcaaatgaattagtacacattata

SEQ ID NO: 97816 - DNA, 390 bp, Glycine max
  unsure (1)..(390): unsure at all n locations
tgcgcaggaagctaaagtgaggttgaaggataaagtttatatatggtcaatggntgacttgttggaggacaaaacggtaaaaacggatctttcgactagtttggttatttcgcagtggtctaaactggggttagaagaggtggattttggagaggggaaacctttgcatatgggtcctttgactagtgatatttactgcttgtttttaccggttactggtgatgctaatgccgtgagagtgctcgtgtctgtgcccgaaagtatggtggaacgtttccagtatcacatgaatgaaagttggcaaggaaaagaagaaaatgggaatcatcatgatgttcaacatcataacgaaaatggattcttctgaatgccctagtttctttttattta

SEQ ID NO: 97817 - DNA, 457 bp, Glycine max
  unsure (1)..(457): unsure at all n locations
attatgataaataataaattactagcgaactcagctataattattatagatatgtggatattcagttttttaataactanaacatattaattgttaataataaatctttaataagtttacgattttttaagtgtattcgaagaattctttaaacgtaaccttattctttaaaataataagattttttactgatttaatgttatagctctttttttctcaactcatactttgttgtttcatatgccactgactttctttcagnatatatatgtttatttaatatatatagttttataattagatataataaacatgtatgataagaagtattttatatttacttttatgatgatattacctaacccaatnatatatgtcaacaattgcatatttgaatattaatatcttcatcatatacaaaaaataatcctctgaattttttaatgtaaactaaaaa

SEQ ID NO: 97818 - DNA, 392 bp, Glycine max
tgggaaaacactgattgtaactagaagtaaagacttcagtttaagttttctcccctttgatcttaagattgatgtaaaggctttaaattttcttgtatgggaaaaagtgctcaagggattttgttcaattttacgtagttaacaacgggtgctctattgagttcataatatgtgtgtagtgcactatgttcaagcataggaattagtatttacaaaaaaaatgtatgcttgccaaacaggttaggttatgggaattagaaagtgaaaatcgcattggagttggtataggtcacatgggagctgtatgagccattgccttttaaaaaagaaagcaagatttctttgttagtggtagtaagtgagtattgatgtttcagcattggaatcaatat

SEQ ID NO: 97819 - DNA, 217 bp, Glycine max
tatagacttgattctagctgatttgcttatattagaatgacatagactcttactttgtaatacaattttaattgttatgaatgggtattaaatggtatctgttgctctgatggtaatttcaaaagctggatatagcttatgtgttatatgtacaacttgtttgtgtgccagggaagaatagataatcaactcctataatactattcaggactaactc

SEQ ID NO: 97820 - DNA, 379 bp, Glycine max
  unsure (1)..(379): unsure at all n locations
tatagaaactcccgcccgtagcaaatgcatattgcaataacttttactctgttgttcgattgagncccctaatatatcgagattctcgaaactgagaacagaagctctgagcaatttcaaacgacaataactttatactccgatgtccgagtgagtctcgttatatatcgagatgctccaaattgaacacggaagctcgtagcaaattctaacgacaatagctttttactcggatgtccgattgagtccggtaatatatcaagatgctcaatatttataacggaagctcgtagcatatgcataccgcaataacatataactcggatatccgattgactcccgcaaataataagatgctggaaatggaaaacaaaagctc

SEQ ID NO: 97821 - DNA, 138 bp, Glycine max
acacatactttttcgatgcgcgatgcggattatgaagatgtcaatgaacagagctgtaattaacaatactttctgttgctgtgagccgaatatgaactcaatttatcgagtctaaaatgatgcatacttatctggggc

SEQ ID NO: 97822 - DNA, 380 bp, Glycine max
tgcacatgcaagtagaagaatagcacctagtgttttaaccttcaatttgtcttccaaatcccacaaagtttccatgagtttatttcttcttttctattttgagggtgaccaagtgagctcaaaatggtaaggtaggagcgtagtttgttttgatggaatgtatttggtaattaatgtgggataataaaagttaaaaatatgcatggtcatgttgccacttgccatgttggcttggcaagtttcatatgaggtccaccgctggtagaattgttgaaatttgggccccaattaactgtggggtatacttaatattgttaccgattgaattgaaaggtggctcaccgctcaaagattaataaaaagcttctcacatgaattct

SEQ ID NO: 97823 - DNA, 203 bp, Glycine max
ctaataaaactatactgtgatcatacatctggacatacacatgaaattgatcaattctaactgtataaagttcaacatttggcctgaataatactcttggaatcataccaaagaatattgacaacattactatattttggcaaccttctgttaatgaatccttctagcttaagattctgagagattgattctgatctgctgat

SEQ ID NO: 97824 - DNA, 380 bp, Glycine max
tgtagaatggctagacatgatacatgtttggttttgtttggttcaaggataaaagggatgccccacattatttccatgacacaaatgcaaaaaatgatgatttggaaattttatgcaaaactggtcatgcatgcacctatgtggacgctcaagtgtcaaatttttatggtcatgtgatgctagggctcaggattcatttcctctattttaaatcaacccaatgtttccaaaatatgttcttttatcaacttgtgcattcatccgagtccatttcgggcgtccggggaaatttcacagcattcactcttcaggtgtagacacattttccaaaaattggttatgatcaatgaatttttttcaaagaaaagttggaaatcatc

SEQ ID NO: 97825 - DNA, 121 bp, Glycine max
  unsure (1)..(121): unsure at all n locations
atactctctaatggcttcttaataacatgaagagctataaagcacgcttcgattatattntaatcaacaatcatatgaatactttcatcatctctacatccttacagcctgatcttttaac

SEQ ID NO: 97826 - DNA, 379 bp, Glycine max
  unsure (1)..(379): unsure at all n locations
tctcattaaattagagctcaccactttttcaatgcttttgacactttntaattcttttattacattctatcttaaccatttgtaacaatgctctcgttattctcgtcaatttttatttaatgagaataaaaaattaaatttattagtcattacacgaaagtctcaatttttcttatctttacaaattacatattctgtgttgcacttgaaaaataaaatatacaaaagtgggagtccaagaaaatgatggctctcgttgtgcaaacattagttggaaagaatttttccatagatccaatccaagagcctacgcccagaaattttttattgtaataatcacatgaaaatctagacttttgaccacttttttcataaagtc

SEQ ID NO: 97827 - DNA, 314 bp, Glycine max
aaacaatttctaaaacttctcttgttgtgatatcaaaacgaagtatttttttttttgccttcgtccttctccttcttatattcacatgcatgaggagtactacaaattattttaaggtttttactaataaaatgtattatgaatattctaatatctaattatactctggtgttaaataattattctataaataaatgataatactccaggtgtttaaatttattatctataaaacacatgtactttaacttgacctaagacaactctattctctatgatactgtccacacctggcgactgattggacaatacat

SEQ ID NO: 97828 - DNA, 378 bp, Glycine max
tctgttttcaatttcgagcggctcgattttttactgggctctatccgacatccgagttaaaagttattgtcgtgtgattattctaagagcttcccttttcaattacgagaatctcgatatattacgggacacaatcggacacccgagccaaaagctattgtcggttgaattttctcagagcttctattttcaattacgagcgtctcgatatattacgggactcaatcggacatccgagtaaaaagttattgtcgcttgaattttctcagagcttctgttttcaattacgagcgtcctgatatattacgggactcaatcggacatgcgagtcaaaagttattgtcgttggaattggctcagagcttgtgtttgcaatta

SEQ ID NO: 97829 - DNA, 377 bp, Glycine max
tcaggctgctcgattgctccatgttgctgcatggtatggcaaaggtctgtatggtggtcagcagaggagcacaaaccacaaacccttgcaacaagtacagatttctgattcaaggccagctgggttaccaagttaaccaatgcatccagtttgcctttaagcttcttagtctcagatgatgcagctgagtttgtagctacctcatgcactcctctaatgactatggcatcatttctggcactaaaatgctgagagttggaagccatcttctcaataaaatttctggcttcagcaggagtcatgtctccaagggctccaccactggcagcatctatcatacttctctccatattactgagtccttcataaaaatattg

SEQ ID NO: 97830 - DNA, 376 bp, Glycine max
tgttaagcttgacctcggacttttggaccttgttttcaggcatgggttcgtgtgcattttcaagacgctcagatacatacacacgcgatgcctctctccccgtatcttatctatacgcacacagacactctctgacacgtaatgacgcacacacatgctcactcatctctactgctgatgacccactcccactcggtgtcacgcactccttatgaggcacacacacactctctcacacacacatacgcttggaaatacgcacagtcactctgtcagaaactttctctacttgcgcacagaagagctctgacacacacattcagactcgctctttgcacagacacagacagatactctggacacagaaacacactca

SEQ ID NO: 97831 - DNA, 371 bp, Glycine max
tgaatcggacatccgtgtgaaaagttacgagatttttaatttctcaagagcgcccattgggcaatttcgagcatctcgatatattataagcctgaatcggacattcgtgtgaaaagttatgaccatgtgaatttgtcaagagctttcgttgttcaatttcgagcctcttgacatatttatcccccgaatcgaacatccgtgtgaaaagtaatgaccatttgaatttctcgagagcttctgatgtttgatttcgagcgtgtcgatatatgataagccttaatcgaacctcaatgtggaaagttatgaccatttgaatttctcgggagccacccttgttcattttcgagcgtctctatttttatgcgccctaa

SEQ ID NO: 97832 - DNA, 406 bp, Glycine max
  unsure (1)..(406): unsure at all n locations
acactatgagaaactcaagcttatgcgaacttaactaggatttcatggtggaggcttgcatatttgcatatgcanatcaagacggtgatctgcgtttaaagacttatattgtacttcatttaatttgacatattgttaagtattcgaaaataaatattgtaacactaccaaggcactaattgcagcatattttagaatctaaagcttcaagaatagaagtgaattaagagtgtgtatgatttgggttttggttgattgactaatagatgttcttaaatatattattggcatgagactattttgaccatttattgtgtcaaaaagcttgttaatgcaacaatattttggcaatataggtggtcaaagtcaaactcgcacatcaatctatagctagttatttctatgt

SEQ ID NO: 97833 - DNA, 73 bp, Glycine max
atcgccgactacttttttaaaacaatttttacccatggttgttgggcctcttgaccctactaccagttggtta

SEQ ID NO: 97834 - DNA, 387 bp, Glycine max
  unsure (1)..(387): unsure at all n locations
tgcccagagaaggagtccacggaggaaatgcttaccatcttctttactggaaagcggnttctaatgactcctctgcggcttccacataaggcatagaggatgggaagctcaccaagatgtcttcctcgcttgatacgatgaccagatgcccttccactacgaatttcaacttttggtggagtgtagagggaacaactcccactgagtggatccacgggcgccccaaaagacagctgtaggggggggttaatatccattatttggaaagtaacttgacaggtgtgagggcctatctgtactgggagatcgatctctcccctaacctctcggcgggtgccgtcgaaggcacgaaccaccattgaactcggctttaagtgggaggcattg

SEQ ID NO: 97835 - DNA, 376 bp, Glycine max
tcagagtagcttcaacttcagacagagcctcttcatttattcttttagttacaagttctcttgcggcagcaacattttcttccacctaatttgttggattatccccagttacaacagatgattcttattaagtgactaattcatgttacgcaaactgaagttgagaaattcttgcataaatcgagtgcacttaagttaggtctaccaaaatattataggatgattattgttatataatattattggaggattctcttactctttgagtgggtcaatagtcctggattttgtcttcgaaatattgatggttgactctatgtggatggacattggaacttggaaatatgcagggcaacaattgaaagaaatataatgc

SEQ ID NO: 97836 - DNA, 408 bp, Glycine max
ggacacttagaaactaagcttgtcagtcattctatgtacccgtaggggtccacattgtggtttttgcatttttatgctcgattagtttactatttataccccctgttgacgagcttaatccattttacttaactcatttgtcgcttaacttaagaataaagtacatttccaccgaacgtttgaattggattatccatgaacttcggttaaaataaattccgaccgtacgcgcggccgtaaccacgttggaaatcaaaaagagggagaaaaaagagaatataaataatcgaaaaaaaaaacatcttttaattaaataaagcggaaaaccaatcggacgctgtctctttgggatttctcattcttaatcgagctgattaataactcaagtgaaactcaggctaaaatcaa

SEQ ID NO: 97837 - DNA, 219 bp, Glycine max
aggatacctcctgcccgagaaatgctaaaaaggcaactgccacccgacgatgaagatcttatgctacaagttgatgcactgattagcggtgttcatatcgtacttggtaactggaatgtaactccatattgagtgatattttaaaagataataactcattgggttaaatctcatagtaagagtggaggtttctttacacttatagactctgccctttta

SEQ ID NO: 97838 - DNA, 380 bp, Glycine max
cggacaggatgcttcgatggaggaatttatataggtttcagaaacacagagggggggagcacgacattgaatgaatctaagaggtatataaggggaactttgaaatatgtctcacaagactctcattcatcaaaggacaacaagagttacacatgcttctatttatagactacgtagcttccttgagaagctttcttgagaaaacttccttgagaagcttctttgagaaaactttcttgagaagctagagcttatctacacacacccctctcataactaagctcacctcctagagaaacttgcttatgaagatacctaaagaagctagagcttagctacacatacctctctaatagctaagctcacctccttgagatgag

SEQ ID NO: 97839 - DNA, 376 bp, Glycine max
tattactattagggtttcgtttgcaatggttggcttaacaccctggttaagggttcataatgaacaactaatgtaattattttcatatctaattgattttgtttcttgtgttcaattcttctttagtgcttaaattttgtatgctcttagtttgattaaccatttgtgtgcctagttaggtgattttaacattgggaaatgtattgttgccttagaacttgaatgaagtagaattgaaacttattcttacaagagggatctgcggattaagttttggttttacgtatgttgttacaataatgtagtttggtctaggtctagtccaacaagagggatctaaggaaaaagcttaggctaaattcggctaaactttcgt

SEQ ID NO: 97840 - DNA, 365 bp, Glycine max
  unsure (1)..(365): unsure at all n locations
tgttgccattgagggctacgccaacaacttaaatttcttttctcaccgcaccatcatatactctagccctgagtgcaccgcacaaatctgctatcatgaattgcgataccattacccttattgtaaagcttgaacatacaacagcgtgatgacagctagagaaaagtgttatttaaatgctatgaaaaattgcatgcatatgtcaaatgaattatatttcgtgcgagttatatatgcattagggtgtgaattatttggataaaacatgctgaacgacatatattattcgtggacttggatcagatatgtggattagatacgattccanagctccgttacatatcattcgaatgtataagttgacg

SEQ ID NO: 97841 - DNA, 369 bp, Glycine max
tgcactgccgcgtgatgctagtgagggtctcattgtctctataattggccaaatactggagatagaggtttatgccccatgctatgctagcagagatgagcgtgaaactcggctcagtattcccttcacgaatagaaggatgcttgacattggcttgacttggataaacccgttgctcttgactagtgcctgggcatactatctaaatagatcactcagttataaagaaaaaacttcctagtgatgactcttatcctggaccaataggaggatgaccacctgtcaccgctatgtaaagaatgggtgacagtgaaagagaatgatatatggaccgaatcctgtgatgagggctgaccatatatataagat

SEQ ID NO: 97842 - DNA, 368 bp, Glycine max
tgctctaaatttacattgatgtttgtatttatgggaggaggttatatgccatttttgctttaagagtaacgtcccactggtaaaactaactttccaaatgtttgccttcgcaggaatggccccgaggaagcttgcctcaaagaggtccaggaaggacaaggcggccgaaggaactagttccgccccggagtacgacagtcaccgctttatgagcgttgtacaccagcagcgcttcgaagccatcaagggatggtcgtttctccgggagcgacgcgtccagctcagggacgacgagtatactgatttccaggaggaaatatggcgccggcggtgggcaccactggttactcccatggccaagtttgatc

SEQ ID NO: 97843 - DNA, 97 bp, Glycine max
  unsure (1)..(97): unsure at all n locations
tgtaatactatgactataacatagcttgcaagatccctatggaatattngtcatacagtctctgcatgctctctttgtgatgatgcagtatacatgc

SEQ ID NO: 97844 - DNA, 362 bp, Glycine max
ttggtgggacatcttgacttgctttccaatctgtcattcaccacagattctgccttcttctattttcagattgggaatgcctctaaccgcacctttgtccatgattttcttcatgcctcttaagtgcagatgtccaaatctttgatgccatcttctaacttcatcttctttggaggatatacatgtggaggagtagctggtttcttgaggtgtccataggtaacaattgtcctttgatctgctgcccttcatcagaacttcactcttctcatttgtcaccaagcattctgactttgtgaagttcacattgaatccttcatcacacagctgactgatgctgatcaagtttgcagtcagtccct

SEQ ID NO: 97845 - DNA, 331 bp, Glycine max
gctaaaacagaatttctctcctactaataagtggcatgggtggtgtatctactggaatggatatatttgctcccatgcacttaccttgagggcctatcataactgggaaactgagatcactctattatgtgaccaatgtctgaattgtcggtagaactgtgctagtgggtatgcaacactgcatcgacaccactatatttgactgactctacagactcttatccataaacaaccacagagtggggtgcattattgggttaaacttgatatcatctgttcattgtaatgacggtaacttgatatcatggatatccgggtcttgatatctggg

SEQ ID NO: 97846 - DNA, 360 bp, Glycine max
tcttctcttgaggaacggattgcgcacgttcttatttaattgaggcagcttattcagaagtcgaatatagcatcgttgtcgtcttggatgaagaatttgaacaatggggaggagaggtttcggttgattccgataaagaggaccccggaggatcctatggaggtgaggctggttcaaacaaggaggcctaatgagatcaagaaggtgaccaagacacctgatgagagaagaaaggaaattgaagtccgagtggctgctgctatgctgattcacaaaaattcaaagtcgccacaatctgcgaatgagggagatagggatgataagcagttggattcatctgcaggatctggtcacaggatt

SEQ ID NO: 97847 - DNA, 325 bp, Glycine max
  unsure (1)..(325): unsure at all n locations
catcacataataacatttatatgctttctaagcatctatggaatgtaataactggactagattaccacgttacatgactatgcatcgtcaatatatgcgttttacctanattatgccttattttataattggacatatgacatatattatactttaatgaataaatatagttataaatatttgaaaaactatactaatatagatttgcttcatattgacaaatttactttaantaaaaactagtctaatttttgacatattaacaatgtgcatattctagctggctatctaaatagttttacactattttctatatttctgtact

SEQ ID NO: 97848 - DNA, 397 bp, Glycine max
  unsure (1)..(397): unsure at all n locations
ctataaaactaagctttgcacggaaatgtattatgaaattgagatgctcgaanaaacaccttttcctacntaaccatgcattaggtaccatgttcaattattttggttttaaatgaaacgggtttatgatcccaacatggttggctcggggtgcctaacacattaaactatacaatggagtgtgaaatttcacgcttccccctttttgtttttgttttgagaagaaaacgcaaggatgagcaaacatgaaaacaaatggtatgcaattttgccgatcaaaaagttggtggacgcatatgcatgatgatgccatgactcatgcaaaatgtgaggctggaatatgataacggacaaatgcaggatatgtccattatgatgttatgaagagatgcttatg

SEQ ID NO: 97849 - DNA, 107 bp, Glycine max
tgttatatatgtaagcttgagtgtcaagaatccttatttttatcataccatctggtggtcttcatgatgaaaaaatcgtggtaagaaaatatgaatattgcctgtat

SEQ ID NO: 97850 - DNA, 381 bp, Glycine max
  unsure (1)..(381): unsure at all n locations
ctaagacatttancatctgcaagttaccattgatattaaagccttgctccacttatacatttattttctgcctacaaaattcaatattcattctaaaatgacaatagaccctactactcttaagtattcaatattcattctaaaattgaaaattcaatattcaatattcatacctttctgctctaacaaatctgttgttcatctgatagcaatcatcggagaaagaacactatatctgcttggtgaatcttaatcatgaataaaaacaagaattatcctcttacagctctctttgcctatcacatgaataaagaacactgttaatagccaacaagcagtttcacatactttggttgagcataagctgaattagtttgttgc

SEQ ID NO: 97851 - DNA, 290 bp, Glycine max
ataattccatgctattcttattttcttgtatgacgactggttcattacttgttgaaacttattgttcaactattatattatgctacaactaattttctagttatatcaagaactgtgatcaaaagttcaatatgaaacatcatccctctggattacactcattgtagtctgactaaattatgttattttccaaagtcaatctattgaatccagaacttaattttcatgatattgtgtataagttaactgtttaggaaacagccgaactatgctccatactagtatatctc

SEQ ID NO: 97852 - DNA, 384 bp, Glycine max
tcatcagatagaaaagcttgttggattagagctagattaggcactatgttcttggctttggatggggtagttaagctcttcaatttggaggaataggtgcctttactatcaattgaactccctatatgttgctctattggatagtatatagtatatactctacaatgaccctgataatgattatgattttgcttatgtgatctctatatggttggaaatgtagatatcctatcagtaccaataacctctcaaaacataaagctagccgatgtaattattggtagcatacctaagtgtaacatctcatttttcgtaagctaatttaaaaagaattgttatttataaataaataaataaggagatataattattaattaaaataat

SEQ ID NO: 97853 - DNA, 375 bp, Glycine max
  unsure (1)..(375): unsure at all n locations
cgaatcggacatccgngtgaaaagttatggccattttaatttctcgagagtttttgatgtttaatttcgagcgtatcgatatattataagcctgaatcggacatccgtgtgaaaagttatgaccatttaaatttcacgagagcttccgttgttcaatttcgagtgtcactatatgtgatgcgcctaaattggacattcgagttaaatgttatgaccatttgaatttctcaagagcttccgttggtcaattctgagcgtctcgatatgtgatttgttcgaattggacactcgtgtgaaaagctatgaccattttaatttctcaagagcttccggtgttcaattttgagcctcttgatatattatgccgcccgaatc

SEQ ID NO: 97854 - DNA, 387 bp, Glycine max
  unsure (1)..(387): unsure at all n locations
tccatcacgatgagtatactgatttccaggaagatataggttttcggcggtgggcatcactggttacccccatggccaagtttgatccagacatagtcctcgaattttatgccaatgcttggccaacagaggagggtgtgcgtgatatgaggtcctgggtaagggtcagtggatcccgtttgatgcatatgctatcggccaactcctgngatatcctttagtgctggaagagggccaggagtgcgagtatggccagaggaggaaccggtctgatgggttcgatgaggaggccatcgcccagttgctatgtataccggggcaagattttgcccggactgctgccgggagactggtgcggatcatgcgcaccaacatgaccaccctgac

SEQ ID NO: 97855 - DNA, 382 bp, Glycine max
  unsure (1)..(382): unsure at all n locations
tttcctctatgaatctggcagcaaagaattntacttcttcttccttaaccaattttggttgctgaacccatatactttgaatgaatattccttgaattgcattataatgtcttctgaaatttatggatttatgaaagaagcctgtcaatatgtgctagtatctcaattgcaagcctctgcatctcgctcgtctccttttgagccaagttggcttcagccctagctttgtcagctacttcagtagcccttacaacttctttttcggcaatttcatatctttcctgaacttcctcaaattttaaaaagtcggtgttgtacttcttctttagatggttaatctcctgttgaattaccagtacatccttctcatatatacgactgg

SEQ ID NO: 97856 - DNA, 272 bp, Glycine max
cagaaagtcccacctttcatccacttaacatacacattcaagcttctcaattcacctaagcttctccaagtaagtgaggaaattattacaactcactgctaaatccattagagatgatactattttataattattcctttttttcaaagcaaatttttttaataacgtgatatctcatatacttgttcaataaggatttctgcagtactcctttgtgttttatttccacatgcttctttctactaaagcatttatttctagcagtttgcatt

SEQ ID NO: 97857 - DNA, 348 bp, Glycine max
tgaataacccaactgcatggctctgtatcatgctttctgttgtctggaatggaacaaaattaagataactgaccttgcatagaattaataatgaagaaagagaatttaacagttcacaaaagagcatgccacctccacaacacacagaaacaaaaaagaagaaagactccataagaattgaaacataattgtgagcccagggagagtattacaaaaagaaacgagagtcccttagaatggggaatgaagtctttataagtaaacaaatataagcatcagaaaaagaagaaagaggaagagaaagcagatgtggagggcgaaccttctccatattccatggtctcaaat

SEQ ID NO: 97858 - DNA, 380 bp, Glycine max
cgtaaaaatgaagacacggatggaattttataatctaggctcaacggtaggggattctttctatataatctttactcacattaatcataggtgacaacggtaacatcttcccttaaattcgacgacgacagacgacaatgacatccccccggagatccggcgatgacaacaacataaccacggagatctagtgacaatgacaacttctatggcttaagcaactttaacatcacattgtttagccagagtttaagggtgaagtttgtgccatcgtggaggtgatagaggaagacgtggttgatattgtgtgtaacatcctgaaatattcttcttaatttattttgttacactttgcaaagtgacactatgatgagctagac

SEQ ID NO: 97859 - DNA, 173 bp, Glycine max
attctacacgataagtcttgagagagtgggctaactgcacaatgacgaatgaatgttttagttgaccactccacttctcgccgtttgaccgcgaaaatgatcatcgactgtggtagtcgctgtcgtcataatgaaaaattgtaatttaaatcataaaatgtgtccttatttat

SEQ ID NO: 97860 - DNA, 380 bp, Glycine max
tgtcccccattttgttataaatagggggagaagtgtaggggaatttggttcagcccttccggcacttcaatattcacttgaaattcgggagaaaaattggttccgggaaaaaaatccgagccaaggcccttccgtaacgtttccgtggggattatcccgaaaattttcagccgtccttcagagttcttcatcgttcttcggtctttaaccggttagacctctaaaccccacttaccaatccattctatgcacccttagtggccctcatgggccaccattagcttctagcatcattatatttactttccgtacccccttatgacccgctttgaccatctgcttacatcaatttatcacctatatcgcttattctataaatt

SEQ ID NO: 97861 - DNA, 328 bp, Glycine max
accaataacgaatagatttggctatggagatagaccgcaaggattatttgaaacttatgctcggttgtctctgggtgtctcacacacgcacatgtcccacatatttcgagtgctattgtatcaactaggcccctattccatagtatcctatgcttatcagcctcccgatcgttctaactgatactgtgaccgacagctgctaatgatttgctgctgacacacacatggcgacatgaggattcaccatgtgaacatactctcctataaacttaagtgtcctcatgcagagagcatagtttacattcttacaatgctctataaataactt

SEQ ID NO: 97862 - DNA, 375 bp, Glycine max
ttgccaccaaacgggaaggttattgttggggatcttatttcgcccgaagatccacaacctacaaatgattgcaaaacgatttcaattcttgataacatcatgtgtattacacctggcggaagggaaagaactgagaaacaatttgaaagcttgggcccgcgttctggattttctaggatacaagttgtttgtcgggctttctctactatggcagtgatggaattttacaaataagtagatcatgtgagaaataatatggcatttcaatgaaatgcacattaattttcccatgtcttttttacagcgttttatgaatcataagaatatattttgatgctagatcatgccaaaaataatttggcatttcactgaaat

SEQ ID NO: 97863 - DNA, 366 bp, Glycine max
ttgatcaaacaatctgccccttgttggatttgatcttgccaaatccatacgatgtgtggttatgttgcctttcacggaatctggcctactacatgcttgacaaatacgttagtagcaacttttcaattctagattaaatggtacaattgcttatcttcaatcaattagccctcaaaatcatcaatctttctcataacattaaaatctctctccctgttttggcatcacaaagccagaaagagagtgtatcataaagaataccaacaataacagttcatgacagactaaaatataagagaaagatatcgtatcattaattaaaaaagatactaccgattaataaaacagagagtcaaattgacacaa

SEQ ID NO: 97864 - DNA, 101 bp, Glycine max
ctgcacatgtcttttacttacaaatcttctcctaccaattttcactgcctaggaaaaaagtcatgctcctaccatgaaagacaaggctcgagacagcttct

SEQ ID NO: 97865 - DNA, 386 bp, Glycine max
tattcactattacatattaacatgaaggcgcggtattatttacttattaatactggccagcggaaaaaataaaaataaaagacagaaccttattgaacctgaatcataaagcccttgtgtaatatgtgacgaacaccatgaagagcaaatgcaacagcataagcatacctaaaacaatgatacaaaagaaaaacataaaaaaagtcaagttgtgaggttaagaaaggatattattatagataacagaaagaaagcagataaaataacatttgaagcacccatccaaaagcttgatcagtttcaggatctttcttgattgctagagaaacattcatccaagtgggagcaatcttcttgaggaattcctgacatttttttcacaaaaa

SEQ ID NO: 97866 - DNA, 382 bp, Glycine max
  unsure (1)..(382): unsure at all n locations
ntgatctaccaccaccatcgccaccatcatcnnatttttctattatgnnatattattagaactttgatttccagccttgtattttggctatattattatgatatttgaacaatttactatttccttatttgcatggtatgtttgaacaaatattaagtatgttatttgactatgtggatttgatagttaatctattcatgattgttgcttcatggttcttgcttcatgatttggttaatatttttccatgaatgttgtatggatgcttagttatatatgtatgcctcaaatttgttacgcactttggctttttgttgatgccaaagggggagagaaataaggattaaatcaagaactcacatgagtaatcaacttaatttta

SEQ ID NO: 97867 - DNA, 116 bp, Glycine max
atcattgattggaaatctaatctgagactttaaagtgtagcatcattgattaaattgaaaatgaacacaccccagtttattgcaactgctagggtaatatagaaacttgctttcat

SEQ ID NO: 97868 - DNA, 389 bp, Glycine max
tctacttatgtggcagggcgggcttccttcactttcttgccttttctcgagctttgaccactgttcttccttcccgcgatgcttcttttcatgtccgcctgagtgggcttatagcctaaaccatacttcccacgatttccttgggtatttatcaagctagttatgccggcgttgtctttgcctaaacccatcccgggttcataaccgttccccaacataactcgggccatcattaccgctggatgggacagacaaggctgcccaaagagggagtccacggaggaaatgctgaccacctcaaaagactggaaagcagtttctaacgattcttctgcggcttccacataaagcatggaggatgggcagcttaccaagatatcttcctcgcc

SEQ ID NO: 97869 - DNA, 408 bp, Glycine max
  unsure (1)..(408): unsure at all n locations
agggtgtcacatangggatgtgagtccaacgtaatgtatgaatcatacggatcaagttcgtccgtacaaaccatatggatcatactgatcgtatgttaaatatcttacaataagtcatctacaaccataggataacacaactcagtcctcgacgagtaatttgaataccaaatactatgccagcataaatgtgcccagacaccatgatatatatggcttggcatactgctgaagccaaaggtttataaagaattatattatagcctcttgtggttatagttgacctttatacttgtgagataagagggaatatttatctactgtgggttcatgaatatttaacatcgtttttctcttctcactaattaatgaggacatgtggctattatagctactttttttgaatgt

SEQ ID NO: 97870 - DNA, 373 bp, Glycine max
tcttcttccgcgctttgaaatttggttcccttcttctccacatgtattggcatcctccattgactagctttgttcgtttcttccaccatccaggatagtgttctaacctcgtgtcttcatttggaagcgttaatggtcgtatgatagacgacatgaatgatgtgtggtggctgaagttgaagacgaatgtccttccgcgagaaaaacctttttcaacgcatgtgggaggggcagttggatattgaagcagaagaaggagttcttccacgggaacctatggaagaaaggggagaaggttcttccgcgcgttcccgcggaagcattaaaaatattaaagtcaaaaaaacaaggtgttttttgtgttacatgattc

SEQ ID NO: 97871 - DNA, 309 bp, Glycine max
tgtgcattcaatatcctgatgagggtgttccatattttttcaatactgtactgccacattcgctacccaagaatcatggccttgcgggtgaagatccccgtaagcgtattaacgagatgcatattgcttgttccaccatgaaacccaccgatgggcctgaaaatcagatgttgcctaaggcgtctactcattccctaggaggagtggcacaaaatctactatactaccttgctcccgagtctattttcacctgggatgaccttaacacggtgctcttgaagaaacactttccggactctactgaccact

SEQ ID NO: 97872 - DNA, 341 bp, Glycine max
aacatcaaactcagctttgcgggtaagtagaacaacctttttgtttattaccacgccacgcagaatgatgacaccttatgcaatagagtccaactggggagggggaatcaatcgccgactatatggacgggtccactctgaacaacgccagcctgcgattgatttctagaatgacgtttgaccgatcccgcaatatgctactcctttaatacaacagcaccagcaacagtccgcactacaaatactgtaagcagctgacgcatctcctcaagcatgacttgaagagggggtgaggcgaactggcatatataatgtgcgatctcacgacgagatacgagcct

SEQ ID NO: 97873 - DNA, 380 bp, Glycine max
tgcgcatggtcgcattctactaaaatattgagttgttcactgcgttacccgaaaataacaattgcttgaccacaacaacgcttgaggcggtaacggacaatggtcttttaaatagaacccgttgtacatgaacaaagattatatcatgcggaggccgcgtcaaatgaaccaacgaagacatcgcataaatgtgctactatccatattcaatgcacatgagcaaaatgatttccaaacacgtgaccaacacgtatcatgcggtgcccaaaaaaatgcagtgacgggtgacttctaacatgaatgcatgccttgctttgttggtgggacaacgattccagacgtatgcaatctcgtgatgcaatcacatatgccatctccga

SEQ ID NO: 97874 - DNA, 369 bp, Glycine max
  unsure (1)..(369): unsure at all n locations
tcttgcgtagccgctcttggtgctcaaaaaatcctttaaacaaatccctcttattactagctattttgaatttttttagttcctgaatgtacaaccttcaaattgttgcttgttcccctctttattttctgcaaaaaagaaaatcaaaatcaaagaaaacatggatgaaatcacaattaaaaagcacaactacctatctttcagagtcctttggttaatttgtcttgtctccttatgtggtggggttttgtttaataatcttatactttttccttccaaaaaaaacttatcactgatcctcttttcattaatccaattttgtatgttattgtataaaagatcatgggttctncacctacctccactact

SEQ ID NO: 97875 - DNA, 382 bp, Glycine max
  unsure (1)..(382): unsure at all n locations
cctgaaatcaaactttgccactgctaatcgattacttgtttattggncatcgattactaaagagtaaaaactctggttacttataaaattttgtgaaaactcttttgaaaaaaaaattgtgctatgtttgttttttgaaaaatcttttcaatacttcccttgtgaagtcttcttgatttcttctcttggaacttgaattcatcttttcttgaatcttgaaatcaaacttctcttgattcttgaatttgttcttgatttaatcttgaaatcattctttaggctttttgtcaacatctttgtcattatcaaaacttcttgaatcaacttgattcatcatcatgaagcttgcttctacaatctccccctttttgatgatgacaac

SEQ ID NO: 97876 - DNA, 382 bp, Glycine max
  unsure (1)..(382): unsure at all n locations
tttacatgcatgtgcacaccatatttactaaacttttatcaactgatgcagnctatttgattgaaaagataatttatactactcttataatgtagtgtacaactaaaaaaataatataatagaaaatagtgcttaagccattcaagtcaagtcattttgaatctcatcattagtatcatacatctatatgtgtcaaagagaaggagaaacatgcatggtaatgcataacacaacaaaacattataagaaaacatgttttctaaacccaaccaaggtaaaaaaagttttcatatttcatgaaatagcatggcttcctatggcggaacaatgatattaatttggtgagtaagtcttgagaatgtttagttgattgtttttctga

SEQ ID NO: 97877 - DNA, 378 bp, Glycine max
tgcttctactagtcgaaataactgagcgcttcttttgcactgagcgagtctatccatatgtgttgaattcttctacagaattcactgaacatattagtcgcgctaagatcccataacttagtagaattcgagaaaattttactgtgtaataccgctaagcgtggctcagggagagctaagcgcacatcattacggaaaggtttaagcttactgggatctataagcgccaagcgggtataaagttctttgtgaagactcactaagcggtctatattgttttgtaatgaccgcatgatgaatgctgttctgctgagcgacccccatctttcttcaaaaataatattccttccaacgatcatatgacttttttaccgatgg

SEQ ID NO: 97878 - DNA, 376 bp, Glycine max
tctatataagctgaaccattctatcaataaagactatttgagttttattcagaaaattagagtttatctcttttatcttagtgagagtgattctcctaaattcttgagtgattcaagaacaccctggctgtatcaaaggactttcacaacctttgtgtgttgccctcgctggaaagagagattcttttcttcctttcatcttcacccttgttctttcaaaccacaattccagaaaattcacctctgcccacaattatctcgtggccataactcccattttacgcactcaaattaagtgattcttgagcctaaattgaatttcaaaacgagacctttcacctcgctttggaatcacctcatttggagtcctgtagct

SEQ ID NO: 97879 - DNA, 279 bp, Glycine max
  unsure (1)..(279): unsure at all n locations
gctcctatctttctcttgcttcgtgatctcatgggaaataccatgaggactatcnagctaagatcagctcatgagctcacagcagctcatcagtgtatagacacaaacttcagaggctctaacctcatatttttcttacttcctcatgtgntctcatttctcatgattctccagcttgctaagtgtacagatttaagttcaccatactgttaaactaatgatttatgtaattttgttgtctgacatgatggtgagtagccttgattgctgtattttggt

SEQ ID NO: 97880 - DNA, 374 bp, Glycine max
tggcatgatctgtggaaaggatattgaaatcctttctcaagcttttcttagctctaaataaaatggatgagttggaaacaaattcatggtaaactattcttacagcatatgggtcattgagatataccttctacatatgaatttcactaaaactcttctgatggtgtatcatccattaagcaaaaatatgcttcttcatcatacaaagtgtcgcccaagtattgcctagtgcttataagcagctactttgtctttcatcttaaagaaggacctcttgccctttgtattatctagatctacacattcgggcatctcttggtttcttacactcatgacaaatgacaaaacttttgccttttgcctatatctctaga

SEQ ID NO: 97881 - DNA, 395 bp, Glycine max
ctaagcttccataggagctctatcatgtttccctccccattgaaaaggatttgacctcaaataccgaggatcttgaaactctgggcttttttcctcaacacttgtaaaaacaacaaaaacatacatatcagtggtgtttgggaagttgaagtaaggtaaggtctgaaaacccatttcctgggcatattgccatgaaggaacatgattcctcactaacttagtgagtggtgctacaagtatacaaaaatatgggacaaaccttttgtaaaattttgttaagccatgcaagccccataatttccttatacttggtggagtgggccactcagaaatgacctttattctcttagagttcatgggaaccccttgatcactatttaaaaaattaagaaaag

SEQ ID NO: 97882 - DNA, 221 bp, Glycine max
aaaatgtatttaatatgatttgaaagagaatttaataatatagaattatatataatatgtggagaataagttttttatgtgtaaataaaagtgtttaaatatatatatatggaatatgcgaagccacttataactgagtattaacgtcactcttgtcatctttttttcaactttttcggcctactgtaagaatattacggactatgccctcccataattcg

SEQ ID NO: 97883 - DNA, 363 bp, Glycine max
gctatgctgccccgtttacaatataccgtctcaacctttcatttatattaaccacagcagaacaattattacctctgcatcaacagatacaaccctggaggaaggagacaccctaatcttagatgggccagccctcgaggacaacgacagtaacctgctccttacttccgaaatgccgctggacaaacaaaccatacattcctccaccaataccacaacagcgacgtccccagaaacaaccaacagatgaggcccctccacaacctttccttgaagaacttgtgaggcaaatgactatgcttaacatgcagtttcaacgcgagaccagagcttgcattcagagcttgactaaatagatgggac

SEQ ID NO: 97884 - DNA, 390 bp, Glycine max
  unsure (1)..(390): unsure at all n locations
ntatatgctagaatgtatgtgattcatccatcttatgctagtatatgcatttcatttttcctatattgatatcatagtaaaaatccatcgctaagtttaattaaagattgaatctagtcaaaatttgttttaaaaatgcttaagctttcaatcctagaactacttaatcgattatgtaatagattaatcgattaacttgaggcccctatttttggaaatagcaaaggctcacatttaattggttatcttaagtatatagtcaattatttcattctggaggaattaattgttgcacacttaattcattgtatgggtatataatcaattatttgttcttcaagagactagtgatggcaagaacgaattaattgattatctcaagcatataat

SEQ ID NO: 97885 - DNA, 382 bp, Glycine max
  unsure (1)..(382): unsure at all n locations
ntgacaatgtacataaactaaatcatatcatttttctgtcaaagtcttattagcatgaactaaaaagataataacattagctcgtgtacttgtcatatcaatttcctcttcaatttggtcttctattttgtacttgtcatcttggttactcttccaaggtctaccattgatccaagtaagctccttcttcatcttattagtagtggtagcagttacatgcatgcatgagagaagcacttttctactacattattttaaaaagctccaaagaaggacatttacacattattgattaagcttgggttacaactttaaaaccaaaaaagaaaactaattttgcagaaaagtagcttgtttgtattagatccttctggttgtaact

SEQ ID NO: 97886 - DNA, 383 bp, Glycine max
  unsure (1)..(383): unsure at all n locations
tcgntcttggccactttgggctctcgttacttgtttctgtttcccaacctaagaatattcgattgctatcataatacacaatttagtccacaaaatgtaaataatttagtccaattggtaaatctttttcatctccgataaccatcggtaaattttttttacctccggtaatgtttatgacgatgtgacacattaaaaaagacaagttttttccaccttcgttttaacatatatgatgatgtgacacattaaagaagacgtgacacatagtgagagtagaagctatgcacaagataagtatgtgcaaggtatattttatgtcagccgacaatattttggactatatatcagtgaattttcttattttaaattatgattttaaa

SEQ ID NO: 97887 - DNA, 382 bp, Glycine max
tgtcactggttgcgagggtaaaattatcactagcttatatgccttgatgagtatgagctcaagcacatttttagagaaaacaataacagagcatatgtgctatcaaatttgtcgagtttcaataagttggggcaacataaaacattcatacaagacacacttgttacatctagcatagataaatctgatatctttgcaagtcaaattggtagtgactcttggatgaacctgatatggaattatttagtgaatgatcaattactagaggacgaaattaagcccaagaaagtaaagttgaagttgccccattatgcttatcattgatagagagattatcatatagtgaatctatgccccattgctgaaatttttgaatgatgat

SEQ ID NO: 97888 - DNA, 284 bp, Glycine max
tgattacgtaaactgtacatacaaatgatcatcactttaaatatggacgtgaattagtgaactttcaacttttgtacggatcatacacattgtataatacaagagaactttggaaagttgcaaacttggtttaagttgaaactttaactattgatgagcttttatctgactagctgattgactgattgaactgacttattgattgatagtttttgagtgattttatttttgcctgctgctgatactgagtttgatatgatgctgactactttgatactgatact

SEQ ID NO: 97889 - DNA, 384 bp, Glycine max
ttgctgatttagttttcaccgacgaaaggatcaatatttgtatgaaaagaggcaaatttaatcatcctacttggacgactgagaaaactggggcaaatgaagagggtgagaatgagggagaaacccatgttgtgactgccattcctatacagccaagttttccaccaacccaacaatgtcattactcagccaattacaaaccttctccttacccaccacctagttatccacaaaggtcatccctaaatcaaccataaagcctgtctagcgcgcttccaatgacgaacaccacctttagcacaaaccataacaccaaccaagaaatgaattttgcagcgaaaaaggatgtagaattcaccccaattccggtgtcctatgctgact

SEQ ID NO: 97890 - DNA, 381 bp, Glycine max
  unsure (1)..(381): unsure at all n locations
tatgattagtaattntaagtacaataattaaacgtatgttatcatgttcaattttactaaaatgcttatgacaccccattgatggagccaaatggctctggattcagtaggcaacattgaaagtgtaagttcttaagaagttaaaaatcacaacacatgaagttatgacacaaaccattaatccaatatttattaatggtgcgatcatggtttacaaaggatttgaagactttggagatcccaatgagtctttgaatcctctatccgcctcgagtactaagcataatatcgcttgattatatcgaaattcacgggcaaaggtaattcttcatcatacatgctggcaagcaacaatgctcatcccaaaaatgccttctttac

SEQ ID NO: 97891 - DNA, 317 bp, Glycine max
  unsure (1)..(317): unsure at all n locations
tcactgactacgactgcgcgagccatatctcgttgtctcaacaccggtcgcatcaatcttccaagttcccaacattcagtattcgacatcaacacacaacatacagcagatcagggatgaaaactcgcatcacacaatacgttctactagaccagacatactcgtcatggtacgtgacgatcaagttagagcatagctaacctcttacgnggactatcaaatcgactattgctatttccacagcactacttctgcttgaattgtcatacacattgtaggcatcaataatccttcactgcataactcagcaaatgtat

SEQ ID NO: 97892 - DNA, 381 bp, Glycine max
tcaacattcaatttcgagcgtctatatatattacaggactcaatcaaacatccgagtaaaatgttactgtcgtttaaatttgcttggctctccagcattaaatttcgagcgtctcgatatattacgggactatatcagacatccgagtaaaaagttgttgtcgtttgaatttgcttagagattcaacattcatcttcgagtgtctcgttatattacggggctcaattagacatccgagtaaaaagatattgtcgctggaattggctttgagcttcaatattcaattacgagggtctcgatatattacgggactcaatcagacatccgagtaaaaagttattgtcgcttgaattttctcatagcttcatcattcaattttga

SEQ ID NO: 97893 - DNA, 370 bp, Glycine max
taataaaaggtatgccaagagggtggaatttctatagcaattcccttatgttatcaaacataaaaagggaaaaggtaatattgtggctgatgctctttctcgccgtcatgcactactttctatgcttgaaacaaaattgattggtcttgaatgtttgaaaagaatgtatgacagtgatgaaacttttggtgaaatttttaaaaattgtgaaattttttcagaaaatggtttctttagacatgaaggctttcttttcaaagaaaacaaattgtgtgtgcctaaatgttctacaagaaacttgcttgtttgtgaagcacatgaaaaaggattaatggggcattttggggtccccaagactctagaaacatta

SEQ ID NO: 97894 - DNA, 224 bp, Glycine max
agagccatcagggagagtaattacactagtcacaaggattctaagtttacattagcagatgctctctaatcgtgacttatacatctcctgatcatacgtgcaacctaaaaacatggtatgaaaagagttgtgagacccaatgttcaaaatacccacctctagcagaaagtcataacattactcacagttgcacagagctcactttatacacatggaacagcact

SEQ ID NO: 97895 - DNA, 376 bp, Glycine max
ctgtgcgtagatccctcatgtatgactaggctcatctcaagtagcttaagaaaggttagcctaatttaacctaagcttcgtccgcagatccctcatgtaagattaaggttcgatcttgcttcaatcaagttctaaggcaacattacattttcgaatgctaaagacacccaattgtgcatacaaatgggtgatcggaccaaaagcatacaaacatcgagcattgaatgaagcattgaacacagaaaacacaatcaatttgatattatgtatttacatgagctattcattataaatcccaactagggtgtgtagccaggcattacaaagaaaccctaaccataaatgagcttacaaaacctacgtatctctgcaaaag

SEQ ID NO: 97896 - DNA, 161 bp, Glycine max
agcactaacaaaacgtttctaggtgcacacatctcacacacccaacagagctcctctaacagaatcaactaaacacctcataacagaatcataaacacatgaatctacgcacaagactatgggacagagcacactttaaacctttaagaaatcaatggatt

SEQ ID NO: 97897 - DNA, 553 bp, Glycine max
  unsure (1)..(553): unsure at all n locations
cttatactttttatttcctaactcagtcacttttacagtcttgttgaatagtacaaagtgacttgcagcagtttgatgagtaactcaacactgtatataatcagtacaaaaacacctgtgtntgtcaaattttaaaatcatatacatatctatgatgaaattaatgttaatnttaggatgtgccgagtaccatgtactcatttatgaaatgtgcgagattgacccatctgaatttggaagggattacgaaatgcaagattataggaagtctacaaaaaatgactatggatgaagggactttgcacaatcacaaaatttggaagctgaaacttatatatatttgagctcctagatgtaacatcaaactttgttttattttgaatntgtttgtaatttaagtacattgtactatatntaatatatgtaaatnttgtttataactcttggtggatatttgtgggaaaaatgcttgaatgnttcgctataacttcttgtcgactattgtttgtgaaaacatttattgataaataattgatatctaattatacattat

SEQ ID NO: 97898 - DNA, 371 bp, Glycine max
tggatattgatttcattactgcctcgatgctcacctcgggctgaaataatacttggtctataataccgagtctacaccagagcatatggattgagacccatgggatgcacccaacaacatatttggatagctcacaagcacaatgaagatcgtgcgtggctctcatcacactgagaatgtctgtatacctgactatatgatgtgaaacgaataatccatccatgctcattatgcttacatattaatacaagattgtgtgaacacacaagagctcgatttaagaattgttcaagatcaatccttgcctcaaaaagaaaagatttcagtcatccaaagcacatgtaatcgataccaatacatgtttccatacc

SEQ ID NO: 97899 - DNA, 524 bp, Glycine max
  unsure (1)..(524): unsure at all n locations
tctaacttacttgtattatgtttagtacattaggctgtagcatataacataagaacatgattcattagagaaatatcttcgtatgcatcaactcgtttattagaaagacccaatgctttttacctattgttgtctactttttaattacttgcatttattgctttttaacatagcatctagtttacttttgtttatattctcaattatcaatgtttgttcacacaatgccctatttctgaataaaactctgtctaataaacaagttccctaagttcgatactcagattactcccttttaattttaaatgcttgacgacccggtgcgctttccgatatttcatttcccttgaatatactgcttgtaaatatgagagaaaggaactgtgttaaagggtaaataaaattatacacatagcatttatcgcagccgtgccagngaacttaattcattagaagaagtcagttcagttttatgacattgctttatattnttcacctttgatcattgattctttnntgtcata

SEQ ID NO: 97900 - DNA, 298 bp, Glycine max
ttatgtgatactagggcctttatgtcgtcatcaggcacaacctatgaacacaaaaattgaaattgaaaagtcagaaaagaatattttcttcaaaatggatgcgtagatatctcgcaaataataatatatcataatagtacaattacaattatagtaaaaagtaaacacgtatgatgaaaaatatcttagcatacaacacaagattacaagttttaacacccatggtaaattcaacacctcaaaaaacattaacaagttaagaaccaaatgtaaagcgtgagctctttctctacattga

SEQ ID NO: 97901 - DNA, 457 bp, Glycine max
  unsure (1)..(457): unsure at all n locations
tctatatattggtagtagatcatgctcacgtaaccacaagctgcaataatgtgtgaacatggatagtgaagcgcaaaatactttccgcattgacaataatgaccattcaagttaactgcccacttttgtccaccacgttgcgttatatgattgaaggtcttctctacttcaaaccttgtcgagtggatatcatacacgtgaacgatgtgcgaacaagcttgttcttgactttttctaagttctttaacaagcttagaacaatatacttgcccttcatttaataggctttggacttggcggccatgaacaacaaagtacttntgacacctactatattgttgatttgccaacgttgttatcaatatgttgccacaatccttaaaaccttatattatattttgagaggtgggtgcatgtggcaaaccacagcctttctataaaaatatatgactttttc

SEQ ID NO: 97902 - DNA, 310 bp, Glycine max
ttcatttatggaattacaatttttacatttattagattgatccatatttacagtttttttaacacatgtacagaaacagaatgtgtatatacagaaataatgtgtgtatgctatttacttttaccgtttcaattcttacctagtatcttccccaaatttggaacaaatttaccttgataattactcccccaaatttgggacaagtttgcttttaaccaatctttctgaagatgatgttctcctacaacctaagaaaagggagcaagagataacactgtttaggttctaggttcaatcaatctattattta

SEQ ID NO: 97903 - DNA, 407 bp, Glycine max
  unsure (1)..(407): unsure at all n locations
gcacatcgatcgcgtggatgatatccactcgacaaggtttgaagtagaggagaccttcaatcctataacgcaacgtggcggacaaaagagggcagttaacttgaatggccattatngtcaatgcggaaggtattctgcgcttcactatccatgttcacacattattgcagcttgcggttacgtgagcatgaactactaccaatatataaatgctgcttacaccaatgagcacatcttaaaagcatactccgcacagtggagtgctcttgggaatgaagcggcaatttctactcttgatgaggcatggacactaattccttgcccaagtacaattcgtgcgaattgttggtcaaatcatcaatgattaggagtgagatggattgggccgaaccatctgaccaccgaca

SEQ ID NO: 97904 - DNA, 315 bp, Glycine max
  unsure (1)..(315): unsure at all n locations
tccatatggcattgntcagttattgtgtattttcctcaagcatggcttttacccagttctcatcttccattgcattatcaatatgcttgggatctacttctgaaatgagagctatgtaaccttgttgactgtgagatcttcttgcttggactttgggtgatggatctccaatgatttgactctatggatggatcttccttagaatctgtccagtagggtctctttcttcttcttattgtctagatatttgattggacgcctcttttcctatcgactgtacggtcaatggtcctatgccttcgtgcaatcatatat

SEQ ID NO: 97905 - DNA, 304 bp, Glycine max
actgtaccgacattttaatagatgcaactctccatacaggtgttgacttattcaaatgttacttaagttattctaaaagatataactcttgtgtagggtcttcttgaccacacatggagagtctataaaagctaggctttgttttacattgtaacaatcttaaacacttatttcatacaatgctctacaagcctcgaatctatttgaacttctactacttattagtaccacatgctgtttgaagtatactgtgtttccggaccatgaacacttgcgctattcatatattcattctcttctccct

SEQ ID NO: 97906 - DNA, 315 bp, Glycine max
taacaattatgagatttatttttttacaagaagaaaataaatgaggaaaagttgtgacgtgatcagtggctcctaagtcgagtatccattcacttgaacctgtcttacttacactacaagtaatggataagacattacctttgtttgcattgctagaaccagtgattgtaccaatttgattcacatgtttattgttgtgaatttagctctagtgctgcaatagtgccattagcgatgcatattgttgaggagtcaccttcatttcagcattctatacatcttgattttgttctgtagtagaaccgtctccctctt

SEQ ID NO: 97907 - DNA, 320 bp, Glycine max
actccgtaagataatgaacaacgtgtggtcttatgttggtactaactagtaacacgactataacatttgtaataataaaaaccatcataggttatactatgggtagtgactagtgacggaggatggagctcaataagtaacatgttgagtctgataaaaaaaaatagactcatgatagatgttctcgtattgcatacttagaaagaatgaccagttttaagtattcctgtccgactagtacataattgattcaaaggagtagagcttctttatgagcttacatcataatcttatcatgacgaaaactctaattatgataa

SEQ ID NO: 97908 - DNA, 317 bp, Glycine max
tgtctttggtttagatatgatttatacatgatttaggacttgtaggatccaatttgggcaaatttggatgatggtaagggggatttctaaatctgcccaatttgtgcagcaaaaagctgtcaaattttgtgcagcataaaattgtgtttgtgcagaaaatgttgtgtatggctggttgtggaaaggggtgtacatatttggttctggacgttttatagcacatcccaacggtcaaaatgtatacttatgtactagggacctccagtaaaattttagagtcgatccaacggtgaactaattataacgaaaagaatgtt

SEQ ID NO: 97909 - DNA, 341 bp, Glycine max
tgattgaacatacctctgattgtttataaagctggaaaaaaatcgtcgaccatgattcttgctctttatagcatcatgtaatatcaacatagacgactgagcatattttcctatttaacgcgtactatagtagcatatgtttgagagatattgtgaacatctgttaataaatcaattcataataatttctttgtattatgcccgaatgcagttatttactttgttgcacatggctaggtgaatggatcaaggataattattcttattgttagttaacatacatgttaatggaattgctaaagtaatacctctacagctaacaatgcttatggaagattata

SEQ ID NO: 97910 - DNA, 311 bp, Glycine max
tggtagttgttgaaatttttctttactctaacaagtttgcttgtccgtccagaaaacttaaagctgattgcagaatattttcagagaagtgaaactctaggtggtccaacgagagattgggttggtatatatgaagaatgtgcaacgtaagtaatacaaacattatgtttgaagcaacattgcatgttaaagtcttagactcttagtaacctgttttggcttcatttaactactatcattaattacagtgtcattggtattttgcctcaagtaatttatattgtcctgcacatgctactttttaggatttt

SEQ ID NO: 97911 - DNA, 196 bp, Glycine max
taattgaacaatatgaaagccatatagaagtaaacaaaatactattaaataacatccaatgaccttgagatggcgccatatctgctcactatcacacactggaataaatggaccataactaagggtgtacagagttcatggctctaaacacaaagaacattgaagggcggtggtaccaaaatacatcccacattac

SEQ ID NO: 97912 - DNA, 290 bp, Glycine max
gcttggaccagaggggcagttttgttattgttgggagcagaggaatctcggatgatggccacgttgtggtataatttttcagggtgttttctgcgaaggcgaatgtatcggcaacaggactaggaactgctagtggactctgtgtttgcgtttatttcctcaagattacctgcatggattacattcatgctcaatgtattgttctatgtttagttcagggccgagagacttcaggcattgtacctcaagcaccactttggttcccgcaatttgatggacatccatttcta

SEQ ID NO: 97913 - DNA, 486 bp, Glycine max
tctgagcatggaatgtctgcataatcttcttttaagcatgtcctctacctgcgacccaaaaaatctcactcaacttggtaataattatcaagaattaaaatcgccaagataaaatgaatttacttatagcatttaattatagcattttcagtattttgtaatattattgacagttctgtaattgcatttgattcttagttgtgtagttttttactgaacagtgcatgttgtagataaaattcaattagctagtgggtatatgttagctaggtagtttatgggctgtaaactaactactagtaactgtgtactatatatagtgatgcatgtgcaataacatgagtaaaacttattgatcttcataatggatgatcaatatatcattatattacacaattattcattattgacttggataatgtcatgtgctcctctattcctcactcgatgagatgtaaactatatatgattatcgaattgtattat

SEQ ID NO: 97914 - DNA, 318 bp, Glycine max
tataggtattggagggattatattattttctccacaatcaattattcctttcaagtaacgaagaattctttttgtctggttttacatgaggagaggtaggagcctccattaagcgacacacaacttccaccgcatatataatatctggccttgtattggttagataccttaatctccccacaagactcttgatgatcgcggagtctaccttctctccttcattaaactttgataacttcaagccaccttccatatgtgtgttcactggattgcaatcaagcatattaaaattcttcaacacttcttttgtgtaccttt

SEQ ID NO: 97915 - DNA, 389 bp, Glycine max
  unsure (1)..(389): unsure at all n locations
agagtgcaaatctagagtaggttggtaatgtctccccctcctcaatgatcacaggggtcttcaggaatgtgttgagggtgtcttcatcaaattttatcaaatgacctctgaccctcacctgttttggtgatttgtcctctggatcatagaggttagcatataattcttttactatggcaacatcaatgttgccttcatcaaagctagtcagttcttcatcccattttcttctctccaattcctccttgaactcatcaaattcagtgtggtagattacctcatttctctctagcaatagcttcctaggaacaacaatgtcattatatctgtcccaagcttcctgtgaatggaatcttgatctgtcanatctaatgtgggaagaataagaa

SEQ ID NO: 97916 - DNA, 314 bp, Glycine max
tttcaaatgggtaaaaggctcacattcactttcttctacatcatattcaaatttgtccaaataaataataaagtcatctcgactcaaagaaggtcatctaagtctcatacaattaatatagaacttatatcctaatgtcacatcctatcagagcgtggtgttcccgtgtcctctagcatgaggtttttcatagtcattcacctattcatctgttcccccgacacaaagttcaagatcatcacaggatccaaacacaaacagcaaaccgggagtgagttatcacatttctaactactagagagaaacaacaaaac

SEQ ID NO: 97917 - DNA, 264 bp, Glycine max
ccaatggaccatcctgttattattcctttgatagcccttctgagccttgtttccctttccttgctttgaagctcactacaagccttaagtgaaaaaccatgatatcaccatatccttaaggaattttggagctttggaattgttttgggaataactgtgggggggtttttgtttcattggataacttgttttgctggctatacttcttgatggattttgggccatacttgatgtacattgtatcttggttaaatgttggacatg

SEQ ID NO: 97918 - DNA, 311 bp, Glycine max
tgccactcagctcgcccagtcgagcagggttgcttcctccagaagcaacagccttctggaagaatcttctggagggcccaagtgggcctggttgctatttggacccccatttttactaagtacaccccctgcctttttttggtaattcttttttcgtaaagttacggaaacttacgaatttcgtaacgatacttgttttctttccgtaatgttacggaaccttgtggattacataatcatcccctttttgacttacggaatgttacgaaacctcactaatcgtgcaatgatgcttccatttgatttccggt

SEQ ID NO: 97919 - DNA, 445 bp, Glycine max
  unsure (1)..(445): unsure at all n locations
acatcctcgccttcagagggctacacatcatcgccttaagaggactacatgtcgtcgccttcagtgggctacacgctctcgcattcgtagggctacacgccctcaccttcaaaggactattcgtcctcatcttcaaaggactacacgtcctcaccttcagaggacttcgcgccctcgccttcagaggactacacgccctcgccttcagaggactacacgtcttccatttcagaggactacacgtcttcccatttaaaggaccacacagccctaccttcagagggctacacgtncttcccttcagaggactacacgctctcgccttcagaggactacatgtcctcaccttcagacgactgcacgccctcaccttcacaggactacacgtnctcgcctttagaggagtacacatnctccccttgagagggacacgtcctcgcatcat

SEQ ID NO: 97920 - DNA, 208 bp, Glycine max
ctggggctgtaaaaaaggtttcttcgcttgcggtctactttaggctctcttattctctctctcccctcctctctaactttttctcttgactcttagagagccgctcacaactcgtccaagacatcttttacatttaggcgaatggctccagcttttcaaactaccacaaccccgtggcctcttgaataatggaatgcttaatttttca

SEQ ID NO: 97921 - DNA, 364 bp, Glycine max
tacttcacacgtagaaactagctaccacacggcctttgctgctgatgtattatgggtgactatgatcaatctatactaattgcacaactaatcatagattctatgggtaatgtcacagacccctacggagtgcgaacgcatcccatttgttgaggacggagagatacaggactctcagcaagttgtgcatcaatgctatatatcgacatacatccacgctgggcacctttacgattgagcatacctgctctttatcactttatgtggttacgaattaacgaattgctaaccatagtgcgagtgctgaatatgctctaagaagtgcgtgacatggtccagcgactgggctggagggcttctacca

SEQ ID NO: 97922 - DNA, 353 bp, Glycine max
gagaagggattgggggagcacgaaattgatgaggaaaagagggagagaagctgaactttgaagtgtatctcacaagactctattcatcaaagttacaacaagtgttacacatgcttctatttatagcctaggtagcttccttgagaaacttccttgagaagcttccttgagaaacttccttgagaagattctttgataagcttccttgagaagctagagcttagctacacacaccccctataatggctaagctcacccccatgcctaaatacatgaaaatacataaaagttcctactactaacactactcataatgtcctgaaatcaatgctaaaaccctatactactagaat

SEQ ID NO: 97923 - DNA, 280 bp, Glycine max
ggtataatggctaggcaagtttcttgtttcgggcaggtaaggggcttcgcatgataggaaggccctcccataatttcacatgacagaacgtgcacaaaagactgagtttggatactcctatacacgaactgtgttctccgtgcacagaagtggaccctcactggaaaaatatatagggccttgaccccttcattcccaggcgagaatatacatattttcacttcccttctcaaaatgtattatgtatgggccacacatatggtcagtttggtaaaaatcc

SEQ ID NO: 97924 - DNA, 548 bp, Glycine max
  unsure (1)..(548): unsure at all n locations
agagaaccgagtttgtttttgtgacttatacaatattcacactatagagcttatgattcgatgattttcacttcttctcctgtaaactaagccagtttcaacttaattttgttaaataaaatttagaatttaaactttgtaaataaaaaagcatgattaaaattgaaatgagagaatttctaataaagataattaactaaattatttaataaagattagtcattgtaaaaaaaattgataaaattttcatactaatatgataatgtatcctaaaagttaagccagttcaaacaatgctctccaaaatataatttagttgtgtagtaatgcacatactataaatntatagtattttaacatattgattgaccatctcactgacaccatataattcactaatatcaattcaatagaacgccagagaaagagagggagagagagagagagacaattgtgcaatagcactcaatcacatatagagattgacacacaactcantggtaattttcagcaagcagcaaatacgtgtcagcatgagtagtctcttt

SEQ ID NO: 97925 - DNA, 309 bp, Glycine max
tatagtttcctagggttttgtgttagattagaaaaaataaggaaaagaaaatgaagaaacgtacttggaggtgttaaaccgcacttaaaagatgcgaacaaacgatcgacgtcgctcatgttgttgttgctgctgctgctgcttgtggttgatgatgacattttcgttttgtttcgttttctctagtaatcgagagattttgattttccgattggggaatttgaaggttcctactttcctttttcaggcggggatttgaatttcggggagaaataatgaaaatggagggttcagaagcggatcgaaccg

SEQ ID NO: 97926 - DNA, 455 bp, Glycine max
  unsure (1)..(455): unsure at all n locations
agcaactatattgcccaacaactttacaacctcaacattcactttcaactctttattaaacaatggacattatcaacaactttctaatcaagcttttattgtatctcacaccagacattaatcttgtgtgtggatataaatattttaccttcttctcagaagttatgttctgtatctggataaaattttcttattgaggattctcttaatataatgtaaaatgttactatgttaaatttataggagaaagatgtcactgactcaagtttattagatgtttagtgagatttggatgttctatgtcctttatcgaggaagcgttaaagttaactcctatattttcatttcagcaaggaagcaaatgcacaacgtccaacccaggcattatattggacttaanaacatgctttctaagatgaattttctgacaaccgtcttagaaagtccactcacta

SEQ ID NO: 97927 - DNA, 318 bp, Glycine max
  unsure (1)..(318): unsure at all n locations
tctgaacttggaatagaattcttttcttttttggngatagctgtgcaactgaggaaggagtaagcagaacaagaatgattgctgcaggaaacaagtaactgaaacaaagccacaagttcttcatgttgtgatgaagctaaaatacttgtactaagatagggatttttggtttggtttggttagtcacacaacacaacatactctactgcagagtttatagttgaaacatatgaaatgacaaacaacagttaaattgctcaaaagatggtattggcaatggtatggtatgagtttcactgactagagctatacaaaaca

SEQ ID NO: 97928 - DNA, 408 bp, Glycine max
tacatttatccgctgaccacagagtggtacctggagatatgtcgcgggggtcaggagaccttgtggacgtcaggtggggtgctattgcccagaaccaagcttgaccaatctcgacccaacccgggcatagtcagtcagtgagaacctgtgacgtacctaaacaggcgagctcttgacagtcaaccgatataagaacaaataccactcagcaaggaggcttgtgtggtggctggccagctatggatcttgagtaatatttggagtatggcctctggtaatcgattatcaagggtgggtaatcgattacaaagcttaaaaatgaaggcaggaagttaagatggcctctggtaatcgactaccaacgatgtgtaatcgattaccatgcctataaatgggatcagtaacatg

SEQ ID NO: 97929 - DNA, 318 bp, Glycine max
tatcaatttggattcacttttttttggcttatcaatttgtacaaattgtacaagcttttataaattcaggaaacacattgcaaggatactataacacaaggttaaaacaactataaggaaacttaaataagatttaaataatccagcaaacgtatgattctccagacttcattgcattttggatgaaaagttttgtcttgataatctccatcatggttaatagtttagggagattttggagataatacatgtaaaggttgatttcttttaacaattatggttgtattataaggatactgatttgagtattatttccac

SEQ ID NO: 97930 - DNA, 499 bp, Glycine max
  unsure (1)..(499): unsure at all n locations
atgtattntatatataacttgcacatataaaaatatatttgttggagattcttgccttcatatgttgcagctactaccataggtgatattttcaaaagccattatttagaagcaaggccatcatggaagaaagtacctcttacagttagaaagatgtggttcactgagtttctggtatgtgtttatattagtgaatactttaaagtaattattaatgtcaatctatattattatatttttaactcattttattgtgtagagaaagtattttatctgtcgaccttaccatagtagggcaagaagataaattgaaatgtgagatgttgccatattgaacaatcacttaaatgaggctaacacaacaatgaagatgccacattggactgtggaaacgtgtggacaaatatgccacattgggactatgaatcaaggtacaacttgagaactaagactcatggtaaagttactgaaacatacccacaatgatggaggattggag

SEQ ID NO: 97931 - DNA, 318 bp, Glycine max
  unsure (1)..(318): unsure at all n locations
ttatatattaggaagggtatgccctttaatattnnggngtgtatgatgtatatatatactacatacacaatgtgtacagtggaaatcataaaagttttaagattcttatcaaaaagagaatagttagttaggatagttggctggttaaaagttgaagagacaagaaattagcttaaaggagggaagaggatagaagaatggggaatttgttctgttatcatttaggaaattgaaccttagctctactgcagaaaggggaaatcctttgtgaatgggaaaccctttgaaggtgaatctctacttgtttatttgaaattc

SEQ ID NO: 97932 - DNA, 492 bp, Glycine max
  unsure (1)..(492): unsure at all n locations
aagaaggtagtgattagatttaattnttaatagacatatgattgatttctgatctgctcaagtttgagatttctttctttctttcttttttttgcttgaattatgagtaacctacaagcttggtccaatcatgcaactaatttttggctcatcaatctttaagcttgacccttttcagaaacctttgcgaatgattaaccttttggttgctacttttcatccaacctatttgaatgtgacctatatatgtatgcattggaggtntccaactttttaagatagaaatgtatctgaaatctctaaatacatgagctgcagaagaggaaaaatatgctgaaaaatcttgtaattgtgaatacctgactntgtgagaaaatagcatggcagaatctgagctatgattatcatcccgattgatggctttaattgaagcactgaactgaggtggtttggaaaactgcttattanttttaaactgaaatttcttatttc

SEQ ID NO: 97933 - DNA, 316 bp, Glycine max
tatcccaaacaggaccttattttgtcactaattcaaaacgtctacactggttaaatgaccatcccaaatttcaaaacattgatcaaaactcaaactagtttgccttttctaaaacgaactttctcaccgatcagagaagtgtaacttcactgaaaaactatagagctcattgacccctgcattccaagcgaaacaaagacataataacacttccattctcaaattgtattatgtatggccaacacatatgtctagcttgttaaaaatccagggtcactgaaccatcagttaaccctgcaaagatttatggtaagca

SEQ ID NO: 97934 - DNA, 293 bp, Glycine max
gcctactgtagaactatctggatggccagcgggccctatgtactaatagtacaacctgtttactacaaacgtccctttgcctgttttaatgattcttttttccctagatgcggtacaataccaattcgtaaagataattgtcacttttctgacatgatatggcaccttacgccgcacgcattcagacatgtattgactcactcaatgttactgtacctctctatatgtgcaacaatagatatcatgtgtactttcagcatgttacgaaacctctcagattgtgcaacgatgct

SEQ ID NO: 97935 - DNA, 314 bp, Glycine max
tcttgacactcgcggcttatttcctttccaccgggcaaaggacatcaaacatctattgtcctgcagactcgtatgtctgattgaagtacggccctagaacaccataactgagcgtattacatgatggaacgcggtaccctaccaactcctggacaagggctgcggctaattaatagaatgcaacaaactggtgtaacagaaaggaatgtcgtggcaaacaaccaacccatgtatactctccatactgggccacgcagacatcaccatcattctcgtagggatggccggaacccgaagaaccaaattcaacaaac

SEQ ID NO: 97936 - DNA, 482 bp, Glycine max
  unsure (1)..(482): unsure at all n locations
atttacagagtggttagtgtctcttcttttctctgtgttttggtttttgttttgtgagaggatttgggggagaaggaggaggaggagggtgtaagaaaagttaccttatccagggattattgaaattggcgccagctttggagatgttgtgtgtctctacggattttattgcaatttttgcaaatattgttttgttcggtcgtataattacgcttggattgaaaaatgttcgtttcttgcctcttcatatcgtggacatttcgtaatcacactcctggagctgcctccatggattctttgntttgagtgagatattagcaatacgtcttatattaattactgtcttcaaaatactagttattgaatgataaaatatttttcaattctaataaatattaaatttatgttctcttatcggaatcaaataaatattcgcttcatagttatgtgacagattgcaggatcaaattacagtgtatata

SEQ ID NO: 97937 - DNA, 317 bp, Glycine max
ttaaccgatcgtttaagtctttatctcgcctaataaatgataaaatgaatttcaaccgatcatttgcgttgtaatctcgtttaatcaatgttaaagcaaaatctaactgatcgttcacactgtaaccacggttaaaccaaaaaagacaaaataataataaaataatcaaaatctttgaataaaataatcaaaaaaatcaatcggacgtttttatttggaagtttccttgaatgaattgactaataatcaacgtgaaattaaggctaaaatcaactcacaaatcaagctttgtccgcaaaaatcactaaaaaccgttt

SEQ ID NO: 97938 - DNA, 457 bp, Glycine max
  unsure (1)..(457): unsure at all n locations
ttcaagggtaaaagggatgccccacattatttccatgacacaaatgcaaaaatgatgaattggaaactttatgcaaaactggtcatgcatgcacctatgtggacactcaagtgtcaaaattttatggtcatgtgatgctagggctcangattcactctattntagtcaacccaatgttcccaaaatatgttcttttatccatttgtgcattcatccgagtccattntgggcatccggngaaatttcacagcgttcacccttcgggtgtacacacattntttccaaaaaccagctatgatcggcgaatttcccanagaagaagtggaagtcatctctnttcaaaagcatgtcggttnttcagctaaacaacttattntntcttttctttctcctctcttttttcttactggctctctttatccctactggctctcttctttcttatgtggctctcttt

SEQ ID NO: 97939 - DNA, 314 bp, Glycine max
ttcattgatgggatttaagtgtattctttccacttgtagcccttgcggctaagccaagcctgtctccctccttcctaaggcgattctcctcttatcagcgtaacccaaaccaaaattttcgtgattctccatgaactcccctagacttgctatgcctttcccgttttggcccaaacccattccaggctcatactcgtgccccaacatcacctgggccaccatagtttctatctagtttctatccatctatttgaccgtcctactcagctgttcggtcaaacttctcttcgacctttgacaagccttcaatttat

SEQ ID NO: 97940 - DNA, 443 bp, Glycine max
tggaccttgaacaagcaatttactcctctttcagaaccatgctatgtgctcgcgactggtccctttcttcccttcgcaacttgagttcactattgctaccccatacagctccgcgaaatttgttccggccatactcttccttgcgagccctcttggtctcttgttcaagggctcttgcggtaattgcattctcttcccgtaacccggcacactccttccgaacgtgtgtagcagccaacttgaacttctgcttggcgagtattgcctttcctaactcgctcttgagagcttggacttcttcgtcctcttccggtgctatagaattctcttcgctgacgacttttaacttggcgagccaatctataccgtctacgcgaactatcagccattcgtggtacccaccaatgatgccaatacgaatgcctctaagctcttgatctttc

SEQ ID NO: 97941 - DNA, 311 bp, Glycine max
tacaaatttgatgtttgggccctataagggctggcggcccaattacaaaaatacagcccaaaaacgaaataaaaaataaaactggacaacgaataaaattgcctgctctcttcaagtctaagccggttcaactcttccggagccaaacccaattgcttataattctcctgaaattaaattaaaacacataattagtcaagcacgcccaaatgataaaactgcataattaatttgacaatcaaggctaatcaataattaaaatggtggcaaaaaggggtaagaaataagacaaaataatgacacgtcaaatt

SEQ ID NO: 97942 - DNA, 482 bp, Glycine max
  unsure (1)..(482): unsure at all n locations
ggcggncgggcgatggtgcacaacaagttttccacatccacaatgcacgcataaacccaccatcccctgttgcccacctccatctgagctcacgtactcccacgtagcccatatcctcgtttctctcaacaccgggtccccatcaatcctcccaagctttcacaacatccaagcaaaacaacattcaaacagcacaagctatcacagccaagcaaaatagggcaaaggcagaaaactctgctcaacacaccaaccaaaatcacagcttttctcacttaaagaccccagtaacaattccttcgatccaattcgttaaccggtggatcgactccaaaattgtactggaagtctatagtacataagcctacattgtgaccgttgggatctactagcaaacatncagaactcattctgcactagactntccacagccaaccacacacaagcattnttctgcacaaagccaanatcctgtgcaccta

SEQ ID NO: 97943 - DNA, 318 bp, Glycine max
tcattctacacctgaaaaagatgttgatttttttgcacaaaagagaaagcttcctgatcatgagggagctaacaaaaattttcatgcagatggaccttcttctagtaattttgacttgcagcagccttctgtccctcttccatttccacctagagcaatttcaaacaaaaagatggaagaagtggataaggagatcttgaatacctctgctagatggcatgaagcaaattccaagatatgccaaggttctaaaggagttgggcgcccacaaaaagaagctcaaaagcaattggaggattatcatgggcaaaaatgatc

SEQ ID NO: 97944 - DNA, 98 bp, Glycine max
  unsure (1)..(98): unsure at all n locations
gcctatgccgaatggtccattgcacaacttttcctcannttttctctcaatccttttttattaaaactgtgtgaaaacctttcgtnntacaacatcac

SEQ ID NO: 97945 - DNA, 328 bp, Glycine max
  unsure (1)..(328): unsure at all n locations
tactccagcttgatgataaattnaatttatttgtttttgcgggcgcttgccatataactacggaagtggcaccagtgctacagctctgagcaacttgggccgagacaaaaacgctatggtatttaatcggaggcatagaccgcaagcctacgcttgatggggtgcgtccagattttactgattggaccgcgccatacgatttgagccaagcccttaacttcgaggggcagctccctcctcaacgccagctatactgtgcccagataaagatgaaggagatgccaccctaggtgctatgattaccctccaggaaccagctcttaacgac

SEQ ID NO: 97946 - DNA, 310 bp, Glycine max
tgttgaaccgcctgacacggtataacttcacactatgatcgctttcttttaatattaactgaatgcttcactgtcagaattctcatcgaactattgtgaacctctgtgtatatattatgatcgtgacaacatatgatacggtggctaatacctgagctgtaaaaacatgtcgttaatcataggattctcgtgagaaagtagttctatcattcatgactgactaatgtagcatcaacttacttacaatgtattgagaggtctactggtcttgaaatttatcttttcacaatggagtctcgtggtgatgtaa

SEQ ID NO: 97947 - DNA, 469 bp, Glycine max
ttcaagggcactggaatcattaccaaacattgtaatcgattacaaccttttgaaaatatttggaacgttgtaaattcattttgaaaacattttcaaactcattttgctactggtaatcgattacaacaatatggtaatcgattaccagagagtaataactctctggctatagatttggcacaaactaatgagctattcaaagattagaagaactttgtaatacttatcttcactgagaccttactttattctggaattttgagactaggatctggatcttgatacaagagatcattgcaatcttaatcttgattcttgcttgtagacaggattttgaaacttgaaagcttcttgatacttgaactctgtacttgtccttgactcacttgagatgtctatagatcacttgaacttgtcttgatctcttagatgtgcttgaatcattgagctcttgttcatcacttcgggc

SEQ ID NO: 97948 - DNA, 316 bp, Glycine max
tgcccagagaaggagtccattttggaaatgcttaccacctcaaaagactagaaagcggtttctaatgacgcctctgcggcttccacataaggcatagaggatgggcagctcaccaagatgtcttcctcgcctgatacgatgaccagatgcccttccactacgaattttaacttttggtggagtgtagagggaacaactcccactgagtggatccacgggcgccccaacagacagctgttatggggggttaatatctattattcggaaagtaacttgacatgtgtgagggtctatcttgtcttgggagatctaactt

SEQ ID NO: 97949 - DNA, 524 bp, Glycine max
  unsure (1)..(524): unsure at all n locations
tgaagaattgttcttgttacttgtgggtgagagatgcaagagtgagtaatattaagagaagaagaggagatagatatgagacatgttacctgcgtactttccaacaaaggcagacatggntaaagcttattggatatatggcgggaaacagataacacacgacagcacgaaaaacgagcttagccaggccaaagatatatagataaatctcaaaggaatataccgagtggtatctacccaacccatgcaaaggagccacgtgtccagtgattagcctaacgaagggtatcaatcttggataaagcaacgagtgattcttcccttggccaagtggcagctcatccatttcaataacatatattccactcacctcatgatatatataacaagggaaatttgtggaaagctctcacccatcatcctcttggacgttggctcatttccgataccaatccgtacgtacanaataagatatcaaccttatataaatcgttntgcagacaatgctcagccacataattctc

SEQ ID NO: 97950 - DNA, 318 bp, Glycine max
tttcagtagtaactcatttgttttaattgttgaaccattgagtttgcgctaattatggtttatgacttttctatgttatctctactaataaataggttgccaacatcaacttaagccatgcaagaaaagacctgggggattattggaagaaaatgatgaatgacgaacccatgcctgaagcaattaaagatcttattcaagatcaacaggttcaagatgcaacagcagatcattttataaggtacttcgatatgaagcctaatatcattttgtatcacacccatgttgtgtccaagaagcagcagcagcaaaaggctt

SEQ ID NO: 97951 - DNA, 398 bp, Glycine max
  unsure (1)..(398): unsure at all n locations
attcaataagacacaagtcttgcacttgccacattggtacaactccctccatcaatgatcaccatgcaaactgtgccattgatcaaacatctagtgtggaaaatgttttctctttgactctcctccatagacttcaattattggccaagtaaccgcctaatcatcaacaattctccctccagagatttctccacttcctactcatcatcctcactctcttctcccttttcagcttcggactcactaatgtactctccatctctaagaatcatggctttcttgttagggaactcatatgcataatgttccaaagccttggcaccgaaaacacttcacatcctggctcttttntaggattgccatggaatttggaggagtttgatggttatgtgctgcat

SEQ ID NO: 97952 - DNA, 317 bp, Glycine max
tgctgttaatttttctggtttttcctcaccatggaaattctttgtgaggacaagagtggtgagatttttgcactgctgcagtacataaagtgccccagataagttctcaaagctattgtttgacaaagacagagtcaaaagggaagtgaggtttgcatagctctcggggatttggccagttaattcatttttagcaaggcttaacattgtcaattcatggcaataggacaaggaatttggaagggatccattaaaatgattgctaccaagatccaaagtgaaaagattagacaacccagagaaattaagagcaacag

SEQ ID NO: 97953 - DNA, 545 bp, Glycine max
  unsure (1)..(545): unsure at all n locations
gaaagttagttttaccaagaaatgctactcttaaaacaaaaatggcatacaacctcctccaataaacacaaacatcaatgtaaatttagagcaaactcatgcacatacttccttacgaacattcactcgcacaagatattcttctaactaagaaaaatgcacccatgcacaatcaaggcaccttcgttacctagattatttatatgtacttccaaggtgtattcgttacctacatcacattcacttccttggctaaatttacatacatgcatactcaaagcattttggctaccaaaaattgcacacgtgcacattctggtatttctaatacctatgcatatacaaactntgtgatgaatcttggctatctacacaataaggtgctacatttcatgctatattcaagtgttnttgctacctaaagccgcatgcanatcaaatatatnntcttttgtgactaaaatgcatcaaataaaagtatctttgtanggatttctttcatacatgcacatatatatattttggagacattgctacaaaatact

SEQ ID NO: 97954 - DNA, 317 bp, Glycine max
tcaaaaaactatagaagattttgcttcggcggccgcttccaatatagctagggaagtggaaccggtgctacagctcgtagtaacttgggccgagacaaaaacgcgacgggttttaatcggaggtatagtcctcaagcctacccttatggtttgcctccagacttcactccccgcaccgcgccagacgatttgagccaagcccttaccttcgaggggcagctccctcctcacgccggctatcctctgcaagaagatgatgaaggagatgcccatttaggtcctctacttcccctcaaggaaccagcccctaatgagtt

SEQ ID NO: 97955 - DNA, 416 bp, Glycine max
  unsure (1)..(416): unsure at all n locations
cgggtctgggggactattctttagagtttttcttttggtaaggctttgtatattttgttttttttaatttataatacaaggatctttcttcatctgttcctacgtctctacccattctcatccatttgcatgtttacttctttatttctgaaacggcagatccgatgacgagtcccccgaaggtactaatacctgtgacccgcctatcaacttcgagcaagaaacgaatcatacggaagatgaagggaacgaggatgtangacttcccccaaaattagaaaggatggtcgcccatgaagaccaagaaatggggtctcatcaagaagaaacagaactagtagacttgggaattggcagtggaaatagggaagtaaagataggcacaggtattaccgcacctatccgtgaagaataat

SEQ ID NO: 97956 - DNA, 316 bp, Glycine max
tatagagaagaacaatgttgtacattgctggcctttaagaacaatgggttgtaggcagacattccatactttgctagaataagtgaccctaaagaagggacaaataagagcaatcacaccttccactgtaaagtctagtaatagtttcatgccaatagaaaaccaaaaagttttttcaagcattgtgtttttacaaattacaaataaattattagggatgagaggggtattctataatacctgtaaccacttaattttagacactggaagaaaaagatatcacaatcttttccagtgaaagcaaatcattcaatta

SEQ ID NO: 97957 - DNA, 246 bp, Glycine max
gcactggatgtcggttaccgtatattactaactgacgtctcttgtatagtatggatattgacgatgacttggagaaacgctactgcgctatgatagttggcagatgaattcgtgttgcactacggtagtgcaatttcattgatatcttctcctgaatctggaaattatgcttctctctgtgataggagatgacactatctggattgttgacaaaggtgattatttctcttgaaactggaaatgcat

SEQ ID NO: 97958 - DNA, 311 bp, Glycine max
tatgcaggtgcctagagtttttgatagataaaggtccgagtttctccacattttccatatattgctctgctttgaagtgcttaaagcatcgtttggaaaggacgccgttctgagagctttagatgactatgcgatggcttgtgaggatcttgacgtggatcatacatccccgctcattgtgtttccggatttctggccttaaattatctgtgtagcaatggacattacctgggcgtggatacctaacctctgagttggaatttacgtggtaatgctagctgacaatatctcctctatggtttgtacgatat

SEQ ID NO: 97959 - DNA, 303 bp, Glycine max
tggactacgggatcttaccaagtgtctgagtggatcatgacagctattgagatgttcatttctatagtgataaagagcaaaggaagagcaccagaattgcttgtcaatatcttgggaaatcactagattcttgctcatatgtctttcgacccgacaatgtctcggcaactcacaattgctgacatgtcttatgagctgaatggagacgacaacctatagtgatccatctacttatgttaccatcctcactccagtgcgctagagacttgattggctgcgctacacgagtgccataataacatc

SEQ ID NO: 97960 - DNA, 311 bp, Glycine max
tctatgggaaaacaaccttcgtgtgttagagctggcctgcactctcccattttataactttactcccctctttgttatgcttacttgatcagagtcctccagaagctggagactatctcctcacacctttttaataactccgctgacctcctatgaatcagaaactaaaacatgtctacgtgcccactataacatctgatctcacccacccgacgaaatccatgaaatgtcaacatcaagtccctactacccagactactcgtaaagcctttaactacaaggcttaaaccctatactactacaatggccca

SEQ ID NO: 97961 - DNA, 455 bp, Glycine max
cagctgcaattgctgtgcatgccatatacaaacctatacgcgtggcgaacaacatcactaatgtgattgcatcaacacaagattgcccagtaccctcttccatatgtgttcatgtacgaccttttcttctgaatagagagtcacatgtgcttcaatacgtgcatctactactattgcaacattttatgaaggatgatcaatttcctcctatgagacattagccccctccttggatgcattagaattgttatgcggaatccttagtgctcctatgaatcatctgaacttcgctatcacttgtagtagactggcctacactgacatgacattcttgagaaattactgatgtattatgagacattctggctggacaatactgatgacaaacacatcctctatactgcatatccgagactggacctactcatcctaggacacgacacaccttccataca

SEQ ID NO: 97962 - DNA, 316 bp, Glycine max
tggtaccatactttgtaagtttttcggactcctacatttactgagtctcacattctctaaccagattcagggcttgcattcccttaagccttgcatctgcttcatattcatcctcgataaaactgccgatttcataagctgattagatggccattattctattgaaaagtgcttttgagacaacagcaaatcaggaagctcttgctcttggactatctagctgtcctctccttttgacttcatatctgagccattgctggattgggtggttagcggaagaacgtcgtagccttcctcaacagcttcccataaatca

SEQ ID NO: 97963 - DNA, 515 bp, Glycine max
  unsure (1)..(515): unsure at all n locations
aacaaatacccctcatccaaatagaatccatcttgggcctttttcccacaactctcataaatgggagagaaatgttcatctaaagcatacaagtccctaatattatcaaatcctaaaatttgagctcctagggagcaaaacaatgtgtgtctcctagagagggcatcagctaccacatttgtttttccctttttgtatttgataacatatggaaattgctctaggtactctacccattttgcatgcctcttgtttaacttgctttgccctctaatgtacttaagtgattgatgatcactatgaatgacaaattccttggaaacaaggtaatgttcccaaagttggagggctcttattaaggcataaagctctttatcatatgtggngtagttgagggtggcactatgaagttttcactaaataagcaaanggtgccaccttgtaacatcagttcaactccactcagagcatacatctactcaaagttataaagtctgagactaaacagtgcttat

SEQ ID NO: 97964 - DNA, 305 bp, Glycine max
tgccctagtgcataggggactgtgctaagcctaaattcttgcactgagtgcaagaagtggactttggcttagcgcaacaggctcgctaagcgtgatttgcaggttataaatacgtttttagcatgaaaaacacgatttttcactctcctcttctccaaaatgccacccaaaccctaaaacctcattttccaccacccaagaccatcggtggccgccgttgcttgccgttggacccccacaccaagagaaacactttaatcgaagcggaatcctcagaatcctcctcaaagattctgtgaagaaaa

SEQ ID NO: 97965 - DNA, 510 bp, Glycine max
  unsure (1)..(510): unsure at all n locations
atagaaaacaaactttgtcgatgtcagcctaaaaataacaatgactaacgttgatcgaaaacctagcctatttgaacaaaaaaaatatccataaaacgactttggcaaaaatcctagcttgatgtcaaccaaaaaacctagcatatgtcaaccataaaatggcattggcatcgaccaaaaatagccttgaccattgtcgaccgaaaaacatcatcaactgataagttctatcctattttattgcgtacttttttactcttaatgtgttttgtggccagtccaaccatttgaatgatgtgagaatagaccgtgattagaaagtcatgattntatatggaattgaaattggatggatgatgtgttatgacctagggatttgtttaatatattaatatataaacgcttgcttatatgatcaagatttatgattatcttctatggaatgggtaagtcgaaatagaatattttcacaattgtacagaagaatgagttcactgctaaagcactcac

SEQ ID NO: 97966 - DNA, 332 bp, Glycine max
caccgaaatctcagcagcttctaatgcaaagcacaattcttattttaaacgccaacaccgggggataaatgccagaggagttgacccccctatggcctgtactgcaaagtccatctgcgacatattcgagccggataattactcagtaaagggcgctaatgctccactaaaatgacaccgttgttgaaggccctcgaatctagggcaatagtagaaaaaaccgacaaagtgctctaaaacataccacgaccagtcatttcaaacggtctaaaaatccacatgttgactacactatattgcggccaaaattacgcgtttaaccgcctatgtat

SEQ ID NO: 97967 - DNA, 530 bp, Glycine max
  unsure (1)..(530): unsure at all n locations
ctctattcatatgagaaagtntattcttttctcacttcctaaattttgaatttcggtgttgtaaaaaaaaaatcattgatttgattagctcggtgtagaaaagggagggacatagaagaaagtaagaaactattgatgctggaatcacttgctgcaatcttttcataagaatctatacaacaaccaatttgcatttgtagatcccttttatcccaataagcagacactttccttccggtttctaagattcttggatcctttgatttctagaaggttaaaggtaattttttgtccattatgttcntaattttttcgataagttttaaaaattttatnttgatattctatgttnttgacaaattcattttgataacattatagttcacaagtctcattntaatttttatattttaaacatttatttcgatattctttcgtttcattaaaacattaggtcatcatgtttaatttaaaaatatatttaatgtcttattactatttatgttcctcaataaaataatttttagagt

SEQ ID NO: 97968 - DNA, 319 bp, Glycine max
tatgctacaaacatttatattataccccctcatcagcaaaaccaacaacaacagaataattatgatctttcaagcgacagatacaatccaggttggagaaatcatccaaatctgagatgggcaagtcctccacaacaacaacagcctatccctcctttccagaatgctgctggtccaagcaagccatatgttcctcctccaatacagcagcaacaatagcagcagtcacaacaaagacaacaagcaactgaggctcctcctcaaccttccttagaagagttagtgaggcaaatgaccatccaaaatatgcaattttagc

SEQ ID NO: 97969 - DNA, 456 bp, Glycine max
agagaaaggattcttttgcatatggaaggagaacacatggaagtagctgattctaatgggaaatgtgtcttggaagttgctgtgtctatgaacagaacattcaaggtgggtgtgagcaccattgagcagaagcatcttccacatgatttttgggcagaggcagaatccacaactactcacatcttgaatagatgtcctacaaagaggcttgacagcttgacaccagaagaagcttggagtggactcaagcctagtgtgaaacacttcaaggtatttggctcactctgttacaggcatgtgcctgaatagaatagaagaaaactagactcaggggctcaaaccacgatcttggtaggttatcacagtattagagcctatataatattttatgcctcgagcaagaggattgtgataagtatgatgtgttattgatgaacaaacgatgggactagaaca

SEQ ID NO: 97970 - DNA, 317 bp, Glycine max
tatctgatttaaatgtaaacttggaggttgttacaaaaaaaaaattaagcacatgccaagggttcgaaaatacccaaaaaaaaaactcaatgattcacggacagtacacaagattccacctatggatctacggctaattataaaagataccctttatgaaactggcagctacataaggagagggcccgatcacatggcgcataataattgtaactctcatggagctaattgcgtaaacaacaatattaatgggacagaggaattggatatatagggattggattatcggtacgaaagccaaatttccatataaatca

SEQ ID NO: 97971 - DNA, 472 bp, Glycine max
agagtttgcctttttatgttttacaagccaatgatcacatcaactatatcctattacttaaaccccaacctagcctcaaccttcttctcatgcaaattttgcttagactaaaaagagaaagagctcatcgattggaatcactatcaacccttcactagctccatagataggtattggttttgtactctaatattctttttacttgttcttcatttggattgtcattttcatcttacaataaaatgtcaaattgacacaatctacctggaaaatatagtggaggaaacttctccagagtcaccctctttgacattcaagagaaccactagggctgttgctatatagaaattggctgtctctattctctcatgcagctatgcttgactaaaacacaaagagctcatcagtgaatcctatcaccctctctactcataaacagtatgttttgacttaatttttgtactgtcttatt

SEQ ID NO: 97972 - DNA, 316 bp, Glycine max
ttttggtggggaccaataatgttcctgtggatgttcttcaatacgctgacgatacgatattctggtggagggaccttcgaaagatatatcaacggcctgagttcagtattattcagcagcagatggtatggaaggtgggaggaggggaaaaaataaaattctggaaagataattggatgggggaagattataaacttgaacaacaattcaatcagttatttctgattagtgatcagcagaatagtaccatatccaacatgggaaccttctcccaaggcaattggtgttgggacttaaagtggagaaggaatctatt

SEQ ID NO: 97973 - DNA, 488 bp, Glycine max
  unsure (1)..(488): unsure at all n locations
tgcttgtggtcttggctgcgagccctgacccttgttcctcctttccaagatgtttttcctcacatcagcctgtgtgggtttatagcctaacctgaatctctcgtggtttcccttgatgtctactacgccggccatgccatcattattcttgcccaaacccattccgggctcatagtcatgcactaacattacccagaccaccatcattgtcgtgccaaacatgcggagctgcattgggagggattttatggaagcattgcttaccacctcanaggactggaaaatcgtttccaatgactcttccgtggcttccacatatggcatagaggaggggcagctcaccagaacatcttcttcccccgaaacaatgatcaaatgcccttccaccacgaatntcagtntttggtggaatatgaggggacaactcccaccgagtgaatccatggtcgggccaacangcaactatatggctgggtaatatcccgcac

SEQ ID NO: 97974 - DNA, 313 bp, Glycine max
tagctccttgagatgagaagctagagcttagttacacaccccctataatagctaaactcacccccatgacaaaaattcatgaaaatacaaaaaaaaaatccctactacaaagactactcaaaatgccttgaaatacaaggcgaaaaccctatactactataatggccaaaatacaaggcccaaacgaaggaaaaacctattcaaatatatacaaggataagcgggctgaaactgagcccatgggctcaaaatctaccctaagactcatgagaaccctatggccttcccttggatctctggcccaatctacttg

SEQ ID NO: 97975 - DNA, 407 bp, Glycine max
tcctaggagtgtttggatggccatatttaaggttcccaacaaaacactcacaatcctaatggaaaattgcataaaattattacacacaagtggaagtaaggtgacctattggaggctcccaacttacttccaatgaaaggcctttttgttacaaacgttgaaagcaaagaaaattgccaattacaaattacataaaaaaaaagaagaagtcctcaaaacacgtagtgaccaattctcaggaatttacaaagttcgtatgttcaagctgccagcaccagtgagttcaacttagaaatcaagagtagtgtgtatgttgcttaagtcttggatagttacaatttgtgtgtgcttatgctcaattatcttgaataacacaatgtcagagagcttatgactttatttgatta

SEQ ID NO: 97976 - DNA, 317 bp, Glycine max
tcttatccaaggctcatttttttggtgaagctccttcttccatggcttattccctagtggatggcacctcctctcacctcttctcctttgtcttccgctgcatctccatggtggaaaatcaccattaaaggacctcattgaagctcaaagatccagcctctattgaagccccacaagcaagcttccatcagtgtttactttgtgaaggtgcgttgagcggaccacgatccgctaagccgcatgtcttatttttctatttttcaatttgaataacttgtggtctaactaactttttgggttcctttgtgttgcagatg

SEQ ID NO: 97977 - DNA, 492 bp, Glycine max
  unsure (1)..(492): unsure at all n locations
aaagtctatacattttattccactcaattcataacaactctcattcatttcaaacacaaccattcatttcaaacaaaacacaccactgaatgtcaaattcaaccagttcactgttcaaacaagctttttgtgcaagcaaacaacactaaaataactggaatttaaatgactaaaatttaaatactaaaatntaaataactgaaacataaagcataaactaaataaactgatcaaaataaactgttcaaaatgcaagacaagaagataaagatattgtcagtcctcctgcgggtgatcctctgcatgctcattaagatccaacatcggagcagctggtggatcctgcacagtaagctgctctagctccaatgctggtgcanatggctgggaatcctcangaatgggtgctgtggagatatgaactggagaagtangctcctgagctgctgcttnctcatgagcgattggatcaatctcaaagataaatggctc

SEQ ID NO: 97978 - DNA, 317 bp, Glycine max
tctagccaaatggactttccttgatttaattcccttgatagcccttttgagccttgtttccctttccttgttttgaagctcactacaagccttaagtgaaaaaccatgatattaccatatccttaaggaattttggagctttggaattgttttgggaataagtgtgggggggtttttgtttcattggacaacttgttttgttggctatgcttcatgatgtattttgggccatacttgatgtacattgtatattggttaaatgttggacatgctgaatgaaatgttgtttctcaaaggctaaaaaaaaaaaaaaattc

SEQ ID NO: 97979 - DNA, 414 bp, Glycine max
tggtcttcgccattgttaaggatcaatgtgggtccgaaaagaggcaaatttgatcatcctactaggacgactgagaaaactggggcaaataaagagggtgaggatgggggagaaacccatgctgtgactgccattcctgtacggccaagtttcccaccaacccaacaatgtcattactcaaccctcctccttacccaccacccagttatccacaaaggccatccctaaatcaaccacaaagcctgtctaccgcacttgcaatgacgaagaccacctttagcacaaaccaaaaaacaccaacaaaaaggaattttgcagcgagaaagcctgtagaattcaccccaattccagtgtcctatgctgacttgcttccatatctacttgataattcaatggtagccataaccctatcca

SEQ ID NO: 97980 - DNA, 316 bp, Glycine max
tgcaacaatggtattgatttgtcgcaaaaaacaaggttggagaaaaatacttgggtacggtgccaaggtgtcacggtggcaaggtgtcatagtcgcccgctgtcacaaaggcggcagatgttgagatatagtcgcaaacacgaaccttatacggagaagaagaaagcatgataaaaataaggctcacgttctaatatttataaatgtagattcaacatcagttttcaatacaaaaccaatgttaaccaagcgatgtaaacgttaacattggtttttttggaaaaaaaccgatgttaactcatcaaatgttaacatt

SEQ ID NO: 97981 - DNA, 463 bp, Glycine max
ctctatgcattattcattgtcattctcagagttattattttttaatctgacttactgtttattttaaaactttattaaaagatgtaattaattaattttgagactttatctttaaacctttattttatcaataaaattaaaaaataaatattgaaaattacactaacatcaataactaataatcttaaaaagacaaccacttttaaatatatagatcatttgcttgaaaataaattaaaatgtaacacattaatttctgaagaaaaataattagataattcaaaatgaagaacaatattataatctactatgatattataagctaaaatatatataacttagacaatgaatctttcactctccccgctctcagttagacaatctcaatatcttattctttctttgtatactgacggattcttaatctcagctattcctgtctgcatagaaatgcattccgaga

SEQ ID NO: 97982 - DNA, 316 bp, Glycine max
tatcaagcaatttatgataatatatataaataagcctatatcaagcaacttatgacaacaatactcttcatgtcaaggcggttaatgtcacggacattgtcctattttctcccttcacatgagtgatggagaatgagattcattggataatttaactaattttgacaagggattctcatatgctgcgcaaaataaaacaacttaatgtaccccaaaaaaatattctgaaaaactctatcgcattagatcattcctcaatcaaatctcatttttttaaggagaactagagttaatgggcaagccttcaattgaaggg

SEQ ID NO: 97983 - DNA, 462 bp, Glycine max
  unsure (1)..(462): unsure at all n locations
agatgatgcgctccatgagaggttggatcaaatggaaaatagaaatcataatgaagaagaaaggaggagaagagggaatgatggtgttcctagacaaaaccgaattgatggtattaaactcaacattcctccctttaaaggaaagaatgatccggaggcctacttggagtgggagatgaaaatagagcatgttttctcatgcaacaactatgaggagaaccaaaaggtgaagcttgccaccatggagttttccgactatgctcttgtgtggtggaacaagctacaaaaggagagagcaagaaatgaagagccaatggttgatacatgggtggagatgaaaaggatcatgacaaagcggtatgtgccggctagttactcaagggatatgataatcaagcgccaganactaacccaaggcaacaagggggttgaggagtatttcaaggaaatggtgtgctcatg

SEQ ID NO: 97984 - DNA, 318 bp, Glycine max
tggtaaattcactaattgctttacttagtctatagatcagaaaaagaatagtaagcatggaaacaacacaggcacggaaggaaaattttaaaaaaaaaaagaaacataagacgcaacacatttataatgttttgcttataaaaaaaagtaatgatgcatcatataaaattaatctgaaattaaattaagattgaaataatgagacagcattcaagtttcaaaaatgtgtacgagaaagtatagacataaagaaaaagtcagaatgaatctaattgtggtattccaatcaatattggtaaaagaattgaataataaaca

SEQ ID NO: 97985 - DNA, 494 bp, Glycine max
  unsure (1)..(494): unsure at all n locations
gagcaaaagatcatttatcattcaaggtaagctatttggtcaaaagagcttgtgtctatacaattcatggccttcatcatgttctgagttatacaaatcattctagaattcagagatttaagcaaagatcattattcatagttagtcgttcactcacagagtaaggtcacactctcactggtttttggttcaagcttttctttcacaatcagtttgtctagtgactaaccattctattataagttcacactcttgttctttctctgttcaacatgcacatttgctcaaattcatgaaaggaaacacacatttcatcataagcatgcattcaatttaaaacaaggcataaccattttcacaaaataaataaactacttcactgtcgtaccatccaaaagtaagttaaactgttcatgatgctncaagatgagcaactatactactcatgcacaagactaataaaaaagtactaatgtactaacatcaaagttata

SEQ ID NO: 97986 - DNA, 313 bp, Glycine max
tgaagacaagactatacgatgtatcttccttgggtataacaatatctctaagggctaccatgtttacaacttgcaaactaagaaactcgtcatcagtcaagatgttgaagttgatgagtacgcttcttggaattgggatgaagaaaaattggagaagaacgttcttatacccgcttaactaccttaagaagaagctgaggaagaagaccgaggtgaaccaccttcacctccaccacaacaacaagatcaagaactatcatcaccagagtctactccaagacgagtaagatctttggtggacatatatgaaacc

SEQ ID NO: 97987 - DNA, 337 bp, Glycine max
  unsure (1)..(337): unsure at all n locations
tcctcctatgactatggcatcattttcggcgctaaactgctgggagttggaggccatcttcttaataataattctggctttagctagaatcatgttttcaagggctccaccactggcagcatctatcatacttctctccatattactgaggccttcataanaatattggagaagaacctgctcttaaatctgatggtgagggcacctggcacaatatttctttaatccgctccagtactcacacaggctctctctcttggagtttttattaccagacatatatttctctttacgtgttgccctggaagcagggaaaatgttttctaaaatactctct

SEQ ID NO: 97988 - DNA, 313 bp, Glycine max
tgaccgaatgtaagttacattttcttcaacctttgtcattcttgactccatttcattgaaacacatatccacttgcaattctaaagtatcaaacctctcactaacaaaggtttgaagactatcaaacctttccataatcttcgaaagaagggatgaatcttctccttcatgtccttcttcacccaagagccatcatgctcctttatataaccaaaggatgctatgactgaagcgcctataaggaatgatctcttgattggaacataaggtttagaatcaagagggatgttgaaatgttgaaggaaaagggtaa

SEQ ID NO: 97989 - DNA, 360 bp, Glycine max
tcgtagctatatattattcaatgaacatgtagtgaaaaaacaaaaaaccgaaataaagaacgcatactaatgccaaaagatgttaaaagaaaacaccgaagaagacggtgagggaaaacgaacttgtaatctatccaacataccatgatctgtggcttttgtcttgcaaaggaagaacaatactcaaccacggtcaaattagattgaggaacacaaaaaaataatcttttgtacaaacagaacccagaaatcaaaaggagaaatgaaatacatcacaaacctcgtctccaaatgccagagactatttgatgtcttcgttattgttgcggtcacaaagatactcaatgctacagatctgta

SEQ ID NO: 97990 - DNA, 434 bp, Glycine max
  unsure (1)..(434): unsure at all n locations
agtcatggtgctaatggaagccttcatgaggaaactagaaggtcaaaacattcttttcggtcaaagacattcatggtggaaataagttttgctaccaaaataccactacagtccattgttaattatttcccttaaaaaggttgagtcggatgccaattctcaagatgctntgagagtgcttgatacagtattgaggtagcacgtagctaattggtacccatacatcttctaaagatatcttgattattttcttgaatggaatttaaatttaaatcataacctctttggtataaattagttgaaccactttcttttgaatgtgaagtgggtgcttttggtatgngcaatctttttcatgatgactcaagaaatntcaatgatgttggagtaggcgcaaacgaatcgaaggacttatcattagcgacacatgtgac

SEQ ID NO: 97991 - DNA, 320 bp, Glycine max
tttgttattgcttagaaggtgtataatatgatttcatacattgcaatcttttagctgacgggtggcccatttgaaagtgctataggtctatgggaatgataccgcatttagggtgaataacggtcgagcatatggctttatttgttatttggtctggtatgaggtgatagaggccatgtctcgcttcaactataccaatcttcatacgattgttcgtatcctgcaacatacacgaagtggaagaaaatatcaatgcacagttagtggacgacacaagtttggaaatggaaatgatactgaaggtaaacgtgggtatatat

SEQ ID NO: 97992 - DNA, 247 bp, Glycine max
tgccagacagcggcgaccgatttttgttatgccacaacccaagggagggcggcgacacgaaagccaaacaactccccaagggggaaacgaaaagcccccacccctcgaaacggaagggagcggaacgggaaacccccacgacaagagtggcataaaggagaaaaaacagcacagtcatatccagcgaacgaggcaggcaagacggcaggggatatatacagaagcggacccgggggcgcggcagccc

SEQ ID NO: 97993 - DNA, 314 bp, Glycine max
acatacgtgtgtttgacttcacaaagcatgagagagatattctaatagatcttcattgcctcatgttctcttaacaactcttgggccaacacttgcatatctattaagagttcatccagctaacttcaaagtgtattatcatctttaaaagagagtatattctctatgaacttcaaaattgtatcatcactctagaggagagatgtctttctgtttatctcagaaagtcagtcgttttaatagaccgggtgtctctggaattctaagttcctataacacagtggaaagggatctcctctgtgttcacaatttgt

SEQ ID NO: 97994 - DNA, 299 bp, Glycine max
aacagagaacgaggacaaggcctttgataaggccagaacacaagcaggccatgacaagcgctgccacccaaaacaaaaaagagaaaaaagggagggggccaagagccacacacaggacagagagggcaaaggaccaaaaccaactgacaaagcaacaaagccaaaaggaaaggggggaaggcccaaaaaagaagagaaaggaaacacaagggaagaaaacaaaactaacacccaccaaagcggagacacataaaaaagaacgacagacaaatctgcacaaaagaaaaaacaagggagac

SEQ ID NO: 97995 - DNA, 429 bp, Glycine max
acatgattgattctttatttgtggcttgtaggattcaatttgggaaaaattggatgagggaaagtgtgatttcgaaaatctgcactttatgcagaattttgctgtcaaataggtgcagcaaaattttggctctgtgcacaaagtgttgtgtatttgctggttgtggaaagagtagtaaagatttggttctggacgttttctagaagatcccaacggtcataatgtatatttatgtactagagacttccagtaaaattttcgagtcgatccaacggttaacgaattggaacgaagagaatattactgtggtatttgagtgtgaaaagctgtgatgttggtttgtgttttgggcagagttttctgcctctgccctgttttcttgactgtgttagttcatgatgcttggatgtcgaattacttggatgttgt

SEQ ID NO: 97996 - DNA, 317 bp, Glycine max
ggcagagagataccagagctagtagtatatttattcccaactatgcatgaccgatgacacaatccagatgagaccatgtctgggaatcatgagtctctaccttaatcaaatacccggggaacgtaatgaaccacttaggtctggacaatgttcccttgagtgaccaaaaatacattgaccgattagatcaagaacttaatcgagtacattattcctgaaagctctaaaggttttgggaagaaaaaattctacgattgaaatatgagtctaatcgagaacttctttgagatactcgaatacattggcaatttaatcga

SEQ ID NO: 97997 - DNA, 313 bp, Glycine max
tactcggacgtctgattgagtcccgtaatatatcaacacgctcgaaattgaatgttgaagctctgagcacattcagacgacaatatatttttaatcggatgtctaattgagtcctataattaacgagacgctagaagttgaatgttgaagctttgagcaaattcaaacgacagtgactttacactcggatgtgtgatcgagtcccgtaatatatggagacggtcgatattgaatgttgaagctctgatcagattcaaacgacaataacattttactcggatgtgctattgagtccgagaatatatcgagacgc

SEQ ID NO: 97998 - DNA, 315 bp, Glycine max
tgatcattcaactacgagtgtttcgttatattatacgacggaatttaacatccgagtaaaaagttattgtcgtttgaatttgctcagagcttcaacattcaatttcgagcgtatcgatatatgacgggactcaatcagacatctgagtaaaaagatattgtgcgcttaatggcctgagagcttctacattcacatttcagcgtctcagatatatgacgggagctaatcaggcattctggtaaaaagttattgtccgctgaattggctcaaagcttcaacataacaatttcaagcgagtggatgttatgacgggac

SEQ ID NO: 97999 - DNA, 426 bp, Glycine max
tacattgatgtttgtatttattggaggaggttgtatgccattttttttttaagagtagcattccttggtaaaactaactttccaaatgtttgccttcgcaggaaatggccccgaggaagcttgccttaaagaggtccaggaaggataaggcggccgaagggactagttccgctcctgagtatgacagtcaccgctttaggagcgttgtacaccaacagcgcttcgaggccatcaagggatggtcgtttctccgggagcgacgcgtccagctcatggacgacgagtatactgatttccaggaggaaatatggcgccggcggaggacatcactggttacccccatggccaagttcgatccagatatagtccttgagatttatgccaatgcttggccaacagaggacggcgtgcgtgacatgatatcct

SEQ ID NO: 98000 - DNA, 317 bp, Glycine max
ttctttcatgtgaagatttttaagttttggatgaacgagaggatgaaatgaaaaaaaattgtttctcaggattggaaggaaatccatgcgctgaactgcaaaatgagttccatttcttacaaatatccctaagcttagcattttcctggctcaaaacaaaaaacacagaaacatcagctatcaagacttttgtccataaattaatgccttattattaattatttcgaattaagagtggttaattatgataagaacctgattctccatgatgcaacttctctcttccttgcaattttggagccatgttggcatgttta

SEQ ID NO: 98001 - DNA, 376 bp, Glycine max
  unsure (1)..(376): unsure at all n locations
tgaaaaaagtgtattaatagcttttcatccttagagagggcgcccatcttgcggcagtacatcttgagatggtttttgggacaagtcgtccctttatacttgtcgaagtccggtaccttgaacttcggggggataacaacatcgggtactaagcaaagatccgtcatgtctgcgaacggatagtccccaaatccttccacggctctcaatctttcctcgaggagatcaagcttcctcttttcttcagttgccaggggcggtcctttcgtggacaaaactattggttgtgtcgcgatgctgggttgaggcaatgtgctgggtgctggcccttccgngatcgggggatagaactcgacatcccttcgagcatagtctt

SEQ ID NO: 98002 - DNA, 317 bp, Glycine max
ttgagccaaaatcctgacttttcataaaccttgacccagggtgagaatgtcaatccttaccctcggaagcaaaaaaggaaagaaggaaattttccaatcaaagagaaagcaaaaagaaaagaaaggaaattcccaatcaaagagtgggagaaagcaaaaagaagagaaaggaaattcccaatcaaagagtgggggaaagcaaaaagaaaagaaagaaaattcccaaccaaagaatgggagaaagtaaaaaaggaaggaaagaaagatcttgatcaaagaaactagaagaaatgtgcagaaagatctttggaccggac

SEQ ID NO: 98003 - DNA, 314 bp, Glycine max
ttgaaggtgcgtagccctctatttttcatagtagaatgccggtaatgtgtttactatcattgtcatcatttttttcgtcattaaggtgccacttgagctgccaagttctccacctttgggcatattctttgaaagatccgcgccccttttttgcacatattatggagttgcatcctatccgaagccattataccgacactgcctaacgaaagctaccattagggcctcccatgaatggactcgggaaggctccaagttaatgtgccaggtaacaactacccccttaagactttcttggaaggaatggattaacc

SEQ ID NO: 98004 - DNA, 469 bp, Glycine max
  unsure (1)..(469): unsure at all n locations
gaagaatcgattcatgtttcctttgatgagtctaatgctatttctccaagaaaggatattttagatgatagtgcagaatctttagaacaaatgcacattcatggacaagattctaaaggaaagggagaaggaagcaatgaagatcctccagtagaagtcaaagcaaataatgatcttccaagagagtgaaaagcttcaagagatcatcccattgacaacattattggtgatatctcaaaaggggtaacaactagacattctcttaaagaattatgcaataacatggcttttgtatctatgattgaaactaaaaatttaaatgaagccataatagatgaanattggataatagctatgcaggaagaactaaatcaatttgaaagaaataatgtttgggagttagttgagaaacctgaanacgacccaatcattggaacanaatgggtgttagaaataaatagatgaaatg

SEQ ID NO: 98005 - DNA, 315 bp, Glycine max
tagcagccaactcctgttgttcatttctcaggagtgcaaatctggactatgcacaaagtgtttccccctctttcacaacaacgcgggtcttcaaaaatgtgttaagagtatcctcatcaaacttaatcagatgacctctcaccctcacctgcttaggtgatttgtcctcgaggtcatagaggtttgcatagaattattttacaatggcaacatcaatattgccatccacaaagtcagtcaactcctcatcccaatggcgtttctcgagttcctccttgaactcatcaaactctgtatagtaaactaccacattcc

SEQ ID NO: 98006 - DNA, 547 bp, Glycine max
caagttgatttattatgtttatacggatcaacttgatccgtacgtttaatatcaacatacggatcaacttgattcgtatcagtcttacggattaagttgatccatatgatttacagaccacctcactcacgcacacccagcagaaatgtgtagctcgtttgtcgccgacgtcgaaccaatcaccacaacattaaacaccgaccagccccttcactttcaccgaagctcacctattgcaagaaaaaatcacacggaagagagaaatggaagataaaaaagtttcacagcgaatagcactgtgcacccacctttttaaagaagaagatagaagaaggagcatttctggctttcttatttaaatattgggtgcaccaacaataatgttggatgtacctagtatgagccgtcaatcagacacaattggattaattgatagttgaaccaagcagcataataatgaacgaatattgacggacctacaaatgggccagggaaagcacccaaacgacaatgatagcccgtcccaatccccagcagtactgatagc

SEQ ID NO: 98007 - DNA, 310 bp, Glycine max
tgaaggatcttatgtcgcattttatttagaccctagagcagcaaacttatctatctaaacttcttggttatgactatacaatcaaatataagtcaggaccatgcaatgatgttgttgctgatgtcctgtctcggatactgaccacggaggtcagccaactcttcgtgttatccttgccccatttcattttcatggaccggcttcaccactcattaactgctaatgacgcttatgtcggcttgtgccgacaaatcctgcaaaatccagaagctcatcctgacttcaacatccatcgcgatttcattcttta

SEQ ID NO: 98008 - DNA, 383 bp, Glycine max
tcgtgcaccaacaaggaataatggactcacacggttactgtgtatctataccagcagcacaaatacagtttaaccatgaaacccaaccatcatctgctgttgacccttcgtgcgcatatttctaagtgtaaagcaaataagcaagctatacaaaaaggccaacccttaccaactccttcaacattcacgtaagtcctgtatcatcatatcaattgatctcctttccttcacaaagagatcgaaacaatcataacgttaaacaattcaaacaagccctgggagtcatctcccattcacaaaaagagaaatttcttcctttccctttcagattaatacatgcccaagctctatgttatgccaaatcccatgcggtcacacaacac

SEQ ID NO: 98009 - DNA, 299 bp, Glycine max
ttagaaccacatatttttaaattatttgttattagctttttttaaaacaaaaaatatgacatatgttaataaaaaccatttcatacactctgcaaaaccatttcatacagtatttgtagtgtactctcaatggaaatacacttatgagataacctctaatctttttttatcagggaaaaactctataaaaaaaggtaaaaccaaaagatagaaactccaaggaccttataagtccaatcagctgagcccactgagcatcaacagtactccattgatccccctcaataaccaaaacaata

SEQ ID NO: 98010 - DNA, 514 bp, Glycine max
  unsure (1)..(514): unsure at all n locations
ctgcaatgtttcattnggaaagttagtttttaccaagaaatgctacccttaaaacaaaaatggcatacaactccctccaataaatacaaacatcaatgtaaatttagagcaagcttatgcgcatacttcttcacgaacgttcacttacacaagacattcttataactaagaaaaatgcacccatatacaatcaaggcaccttcgttacctagattatttacatgtacttccaaggagtatttgttacctacatcacacacatttcctttgctaaattcacatacatgcatactctaagcactntggctatcaaaaattcacatacatgcatactctatagccgcatgcaaattcaagtatattttcttttgctcactanaattggattcaaattaaaagggatttttgtaatgcattntctntacataacatgcaacatatttatagattnntgtgagacagtttgattaccaaatattatatgtacatacatncaagtattttactaccatac

SEQ ID NO: 98011 - DNA, 319 bp, Glycine max
ttgcggatttggtcttcgccattgaaaggatcgaagtggatctgaaaagaggcaaatttaatcatcctgcttagacgaatgagaaaactggggcaaataaagagggtgaggatgagggagaaacccatgctgtgactgccattcctatacggccaagtttcccaccaaacccaacaatgtcattactcagtcaataacaaaccacctccttacccaccacccagttatccacaaaggccatccctaaatctaccacaaagtctgtctaccgcacttccaatgacgaagaccacctttagcacaaaccaaaaaaaaacac

SEQ ID NO: 98012 - DNA, 467 bp, Glycine max
  unsure (1)..(467): unsure at all n locations
ggtaagaacttgggacctatccatggcagaggtctccacagaggccattgcctccctcgcccaatattatgaccagcctttgaggtgcttcacctttggggacttctagttatcacccacggtggaagagtttgaagaaatcctgngatgccctctgggaggaaggaaaccatacctcttctcgggattctatccctctttagctagaatttctaagatagtcaaaatctcgacgcaggaattagaccgcggaaagcaagtcaaaaatggggtggttggagtaccaaggaaatgtttggaagcaaaagcaagagtctctgcaggtaaaggcgaaagggccccgatcatctagcacttttgatcttcgagggggggggggtcctctttttaatgtggatggtgtaacaaaggatcaagctgaatgtttgatgatgccaatgatacatgaactcatgctctcaacgatt

SEQ ID NO: 98013 - DNA, 319 bp, Glycine max
ttacggaagcgtataagactttattttcttctttttcctcttcccttgcaccaatatcaagcgaaatatgcttactcaaggttttcagaaattttacggaagcattacagaagtcccggaagccctggaagcctttttttaacaaaacgggggaggtggttgccgcccagctcttccaggcgagctcagtttcttcaaccttaagcaaggaaatgcctagaatcctctagaagggccaagatttgataattgctatttgcacccccattttactaaatacacccccttttgggtttttttagttgatttctttccgaaa

SEQ ID NO: 98014 - DNA, 521 bp, Glycine max
  unsure (1)..(521): unsure at all n locations
tttttcacctgctcgctaagccaatctgttggcttagcgagcatccgctaagcgcatcactcatgagctaagcgcgaggaagactctggaagaagatgagctttacaggttcactaagtgcaccgcttcatctcactaagcacaccccttcagttcatccgctaagcgagaaaggcacgcgctaagccaagattcactaatgtgcgctaagcggtcgataattgcgctaagcgcacgagcacgaacaaggccacctatttaagcctgaaatcaaattttagagggggagtttggactgggattcaaagctttgcatgtctagagattctagagagagaaagggccaaattccagagagttttgagagaatttgctgtgtaaagatctgcagagactaaagcttgaagcaggagccaatntgagagctngagatgagnttgtgagtgattgggagatcctagaggtgaaggagacatcctcaccacttggatttntgcaatctttatcttggtcttctcttt

SEQ ID NO: 98015 - DNA, 317 bp, Glycine max
  unsure (1)..(317): unsure at all n locations
tgtccttggtttagacatgnatgatacacgatttgggacttgtaggattcaatttgggaaaaattggatgagggaaagtgtgatttcgaaatctgcactttatgcagaattttgctgttgaaatgtacagcagaattttgcataagtgcagaaaaatgctatgtatttgctggttgtggaaagagtagtacagaatgagttctggatgtctgttacagatcccaacggtcaaaatgtagacttatgtactagagactcccagaaaaattttcgagtcgatccaacggttaacgaattggaacgaaggaaatgttact

SEQ ID NO: 98016 - DNA, 313 bp, Glycine max
tggagggtgatttggaacgcttacttttctctattcggaagtttcaaaatgcttttatttttaagcaagcaaggccagacaatgcagttctgattcaagaggttaaatttctggtctggtcatggctccattcttcagcaaaatggttcaaatcctcctttgtgcagtggtattacgaccctgcagcttctttgtatggaggtgttgcgtaaatctgattccttgtgccttttgtgcaatgctaaaacccatcgaaattaaaatgatcttagatggggttgatagcttttggtatggggccataccttaacag

SEQ ID NO: 98017 - DNA, 484 bp, Glycine max
  unsure (1)..(484): unsure at all n locations
ttgtgagaggatcaataacaatgcttataggttggacctcccataagagtatggagtcagcaccacttttaacatttctgatttaattccttttgcaggtgaagctgatattgaggaggaggaactaacagatttgaggtcaaatccttttcaagggggagtggattttaatagcaaaaaaaagtcaagtcaatttaactcctttntaatagcaaaaaaagtcaattntacatgtaataatacaataaaaattgtctttagctaaattaaaaactaagttaatcttgtatctgtctagcactaaccagctaatgttaagaaccttgaanaacaatcaagtcatttntgtaatccttttcaatagtcatgaagtctaatttccaagtaataaaataataataattgtcttaactaaatggaaactcaataatctggatgttctagcactaacactatagtgaagaatgttaagttgatgatatat

SEQ ID NO: 98018 - DNA, 317 bp, Glycine max
  unsure (1)..(317): unsure at all n locations
tctcaaggaggggagcttatttttttgaagggcgngtgtagttaagctctagtttttcaaggaagttttctcaaagaagcttctcaaggaagttttcttaagaaagcttctcaaggaagctacctagtctataaatagaagcatgtgtaacacttgttataactttgatgaatgagagtcttgtgagacacaactcaaagttcaacttctctcccttttttttcttccttcaatttcatgctcccccctctttcttttcctccattaaagcatcctctccaagcttcttatccaaggctcatcttggtggtgaagct

SEQ ID NO: 98019 - DNA, 184 bp, Glycine max
  unsure (1)..(184): unsure at all n locations
tcagatgacgcagaagggtgcgccgctaccccatgcacgcctctaatgaccatggaataatttctggcgctacactgctgggagtgtggagcgccatcacccacattaatntcgggcattggcatgagtgattctccaaggctccgcactggcagatctaaacacgccttccatatactgaggc

SEQ ID NO: 98020 - DNA, 314 bp, Glycine max
  unsure (1)..(314): unsure at all n locations
tgtagaatgggtagacactatacatgtcaaggntcggctcggctcaaggataaaagggatgccccacattatctgcatgacacaaatgcaaaaatgatgatttggaaacttcatgcaaaactggtcatgcatgcacctatgcggacactcaagcgtcaaatttttatggtcatgtgatgctagggctcatgattcatttcctctattttagtcaacccaatgtttccaaaatatgctcttttatcaatttgtgcattcatcctagtccatttcgggtgtccggggaaatttcacagcattcacccttcatgtgt

SEQ ID NO: 98021 - DNA, 492 bp, Glycine max
tgcgatatataaaccgagttacactcaggctgactcaaagacaccttttgagttattcaagggatggaaaccaagtttgcgacatatacgcgtttggggatgcccgtctgaagtaagaatttatacttcacacgaaaagaaactagaccctaagactattactgggtatgtcattggatatactgaaaggtctaaagggtatatgttctattgtccatcccacaacactaggattgtggaatcaaggaatgcaaagttttctggaagatgacttgatcagtgggagtgatcaatgtcagaacatttcttcttaaagggattactatgaatctgatccttctgggacatgtaatatgctggtagtcatgtccacccctcaagttaaatgggtgttatacaccagtgattgcattcacaagctgtgaaagtgtcatgtatataagttgttgtgatgacatctgatgatttgagcaactgatgagaacaattgac

SEQ ID NO: 98022 - DNA, 423 bp, Glycine max
acactctaaaaaaaattattgataaggatcgaatacacttgaaatgtgcaatactttgatttgcaatatttcttcacaagttgatcaattcatgtttgtaaaatgagtgacttttacatcaactttaatctttagacgtattatagttctattcttctttaagactctcttgaaatgtctttcacaaattctgaacgaatcaagagtctgttaacaagaaaacacataggggtctttataaattttgactattaaaataaatctaatcgattataaaacaagtaatcgactaattcatcaaaatcttctttgcttctccttgtcttcaagagtagggtaatcgattattctaagctgtagaacctttcttcttctaacactggctagagcatttgattaccatatgatgcaatcatatatatt

SEQ ID NO: 98023 - DNA, 315 bp, Glycine max
tgaaatcacatttattaggtagtttggcatttttcttgaataagcctctgcatgcacgagagtttggccttagcttgaagcttttgcttgtttaggaagttctagagagagaaaggtccaggttccaaagagttctgagagattttgttgtgttaagatctgcagagatgagagctcgaagcggaagccattctgagaacttgagatgagtttgtgagtgattgtgagatcctagaggtgaaggagacatcctcaccacttgtatttttgcaatctttcatcttgttcttctctggattgcaaaggagggttccg

SEQ ID NO: 98024 - DNA, 542 bp, Glycine max
  unsure (1)..(542): unsure at all n locations
accgcatttttcatagccggactctatctactttgtcttaataggttttctaatccatgtttgctccattctaccttcttaattacatgaattctctagtaaattggttgctgacataggttattgttattattatttgggtatagcttgagtagccaacaccccaatcaattgtttggggtacaatttttttttagcataggaaaaataacataaaaaactgaccaaatactttataagttcattctgccaactgccaaagtagtattatcgccatagtactatgtggggtacaaatctattattagcacggacagtcaatgtgtggagtgatatgctaaaggaagcacggtctgctatatccttaggtgttgattcatatcctcagaatgtaatcaccacatcacttcaataacatgaggcttanctcagactataagaaagattaagtaaacatgtctatactatgttactcttgacgttaatgagattcttttctttttatgagtacacatgaataattgaggctctgttacttatga

SEQ ID NO: 98025 - DNA, 293 bp, Glycine max
tctaaactttatacaagattgatatttctgataccacttgttggacaagtggcctcagatatcttaagaaggggggggggggttgaattaatatattacaacttatttccccaatttaaattctatttcactttctattcaagttataaattcccttaataatgaatctcttaaatattgattcaaataaaacaatttgaatatgaatataaaacaataatgaataaaggagtttaagggaagagaaaatgcactctcagatttatactgttttggccacacccttttgcctt

SEQ ID NO: 98026 - DNA, 391 bp, Glycine max
ggagagggttaccactactgaaaacccgaatgcaaatgtttatcgaggcaatagatctaaatatctgggaagccatagaaatagggccttatatacccaccacagttgaaagagtttcaatagatggtagttcatcaagtgaaagcataaccatagaaaaacctagagatagatggtctgaagaggatagaatacgagtacaatacaacttaaaagccaaaaacataataacatctgccctaggaatggatgaatatctcagggtttcaaattgtaagagtgctaatgaaatgtggaacactcttcgattaacacatgaaggaactacagatgttaagagatctatgataaatgcactaactcatgagtatgaattatttagaatgaatgc

SEQ ID NO: 98027 - DNA, 321 bp, Glycine max
aaatctcagcttgggccgagaacccacttttggttattaccaaagccaaacagcatcattgtgacggcgtatttaaaactttataattatccgcaaatccctcatttaagactaatgtccaatcctacttcattcacgtgctaaggcgacaatacatttccaattgctacagtcacctatccaggcacacaaatggttgatcacatcaagagcctacagtgtttaagctctgaaagaagcattgaacacaacaaaccctatcaattcgatattaaaggaagtacatcaactattgtttataaatcccccacaagggagttt

SEQ ID NO: 98028 - DNA, 482 bp, Glycine max
  unsure (1)..(482): unsure at all n locations
acagcaataacatcttaacaaatggagttacagggcaattcatgaaattatttaaatttatcaattcatacaaaacttctattttcttaatcacagaattaacaccatgaggttaaatagtgattaaaagtgtagaatgggatgcatcaaccggcaaagtagattcagaacacacacacccaatattttgcatttaaaaaggactgcagctaatgcaaaatcgatatttgtggttntgccacattatgtaccctatcgatcgagcaatcatgtgtgctatttcttcaatgcaaaattaccacactagaaatgctaaaggcaaagtaatttaacataccccaagatatatattttcatatatgcaacaccaggggttctcattcattcctgttcaatgatatacatggaaagctatagcatgtaactggctaacagcagccacttgtaagtatagagaccagctatatcatgcatcgcctatc

SEQ ID NO: 98029 - DNA, 312 bp, Glycine max
tctaaactttattcttgaattaagctctgataccacttgttagacaagtggcctcagatatcttaagaagggggggggattgaattaagatattccaaactacttcccctaatttaaaattctatttcactttttattcaagttatgaattcccttaatgacaatcttcttaaatattaattcaaataaaacaatttgaatatgaatataaagcaataatgaataaaggagattaagggaagagagaatgcaaactcagttttatactggttcggtcacacccttgtgcctacgtccagtccccaagcaacc

SEQ ID NO: 98030 - DNA, 554 bp, Glycine max
  unsure (1)..(554): unsure at all n locations
tttttagtgcctgcataaactgatcattatattaattgttgatgcatatataactgtctcccaatactgaaactgaaagcgacaatggtagaaaagtttggagcttttctgtcatgagctctgattattggtcgttttcagctacttgcagaaataagtttttttctttctatattcgtttgtgcttgcctcaaccacctgccgaaaataatcatgttttcatacaaaacaagactcaacatcaaaattctctataagttgaaataatatagcagttatatacgcatttaattgttaaggctttgttatctaggctcttggctntgttcttcagtctctaatagattaaacttaatntgatttatggagcaatgccttctcaaagtgaacaacactagaagaaagaagaggagagtggagatgcacaaacacataatttccccnaagtcctgtntactatcttattacaactaatttatttctgcacttgttgtctacatgatatggtgctctatattatgctaatggaaagtctactatctggacaaacaaaa

SEQ ID NO: 98031 - DNA, 320 bp, Glycine max
  unsure (1)..(320): unsure at all n locations
agcttctaaggaagctcaccagtttttaaatgtgagcatgngcaacacttgttgtaactttgatgaatgagagtcttgtgagacacaactcaaagctcaacttctctctatatttcttccttcaattttgtgctcccccctctctctttctctccctctttcttttcctccattgaagcatcctctccaagcttcttatccaaggctcatcttggtggtgaagctctctcttccatggcttattccctactggatggcgcctcccttctcctcttctcctttgtctttcgcaacatctccatggtggaaaatcaccatta

SEQ ID NO: 98032 - DNA, 476 bp, Glycine max
  unsure (1)..(476): unsure at all n locations
ccctttggcagtcanctcctttggcaccatcaaaacattcagcttgatcctttgtctacaatctccccctttgtgatgatgacaatcctgaaatcaagacaagctatatacaagatgatagcacgttcacacaacccttactccccctatcttttggcatgtatgcctaacttttcttaatgattaatttctaattgatttctaacccaagttctctccccctttggcaacatcaaaaagaacgaagtacatgggcatcaatatcaaagtataaaggataaccaatcaatctcacaaataagacacaataaaaccagaattcaaaacaatttataaccaaaaccacaaagtatcaaaacacaaaatctgaaatccaaatatgacaagataaataaagtactgaacataatgatctaagttgcatagccaaaatacacagcttanaagagacatataattagaaactataatctaag

SEQ ID NO: 98033 - DNA, 256 bp, Glycine max
  unsure (1)..(256): unsure at all n locations
gaaggagaaaatatgggaaaagggggaagaaggaaaaaaggagagaaaaaagagaaggaggagaagggaggnagggaaagaaggggaaaaaggggggaaaaggagggaaggagggggaagaaggggaaaaagagaggaggggggaaaagaaaagaaagaaggggaagaggaagagggagaagaagaaagggaaaagagagggaaggggagaagggggggaaaggaaggaaaagggagggaaaagagagaaaagaag

SEQ ID NO: 98034 - DNA, 454 bp, Glycine max
ttgagacttccacataaaactaacatgagtatcacaagatacatgtaatgttttcagcttaggctggtatcatgactaagtgctatgcattggcaatctttgagattaataatgaaattagaactaaatattaagcatagatgagttactcaggaatattctagatacataaagaaataaaatagcaataagcacaagtattattccattaactacaaacatatcttcacatacgcaaagttattttcatgaaattcaaagcctatataccttaaacgacgatgttttcaactacaaaattttcacgttccttgaagtcaacgaaaacatcaagtgaaacaaaaacacctcgatctccaaattcgtcagccaagaatagatgaaactgagacaggtatttgtttgcaaacaacataaccacaaacatcgtgaaaaaaacagaagaaaaaaaaca

SEQ ID NO: 98035 - DNA, 317 bp, Glycine max
tgaagaggaagtcgtcctgtgatacttttgatgagtttgtgagtgattgtgaggtcctaaaggtggaggagacatccccactacttgtatttctccaatccttcatttttctcttctcttggttgtaaaggaagctttccagatatggagagttaaatcctctgttggttcttccttgtaggtacttgatgtaaatatctatatatctatttaatgatgttttgtgtgttcactgtgctatcagaacttcattctaccatgcttttgccttgatcacatagatgcatgtgttgttaggatcattcaacaatggaaac

SEQ ID NO: 98036 - DNA, 397 bp, Glycine max
cctccagaagcaacagccttctggaggaatcttctggagggcccaagtgggcctggttgctatttgcacccccatttttactaaatacacccctgcccttttttggtgattctttgttcgtaaagttacggaaatttacgaatttcgtaacgatacttgttttctttccataatgttacggaaccttgcagattacataatcatcccctttttgacttacagaatgttacggaacctcactaattgagcaacgatgctttcttttgatttccggtgtgtcatggaaccttacggattgtgcatcaatattttctattgatttccggcgcgtcacgaaatttcacacattgcctaatgatgggtgccaagcacctcataatgaccaaacacaagttgc

SEQ ID NO: 98037 - DNA, 317 bp, Glycine max
ttgtgtaatcgattacactaatcgtttaattgattaccagtgactgtttctgaaaaatcaaacgatgtaactcttcaaaaaggttttgactttttcaaatgggttttaagtttttcttacagttataactcttctgaatggccttcttgaccagacatgaagagtctataaaagcaaggctttgttttgcattttaaatcaatctttcgaacaacaatctcataaaatcctttacaagccttgaatctctttgaacttcttcttcttctttgtaccaaaagctttctgaagttttctggtgttctaaaccttaaaaa

SEQ ID NO: 98038 - DNA, 518 bp, Glycine max
  unsure (1)..(518): unsure at all n locations
caaagcggcatataaacctcaatgttaacgacggtgggcttacaaaaacgtcattgatattcaaaatttctaagacggtgtttacaaatacaccgtcttagattacctgctccataacctactaagacggtcttcccaatcaacgttgttgaatcagtcatgcgccgtgcacatgacacttaaaaatgtaacatatttacgaaaatgccaccgattatcctactacgacgggttngggtggagcgatgtgaaatgcgcgtcgtaaaatggcttttctttagtagtgccattgtctctagaagtaagaagattggtatgtacgatcatttgtccttaatcaagagcagataaatgagcatttgtattataatattatggataagaaatatgaaagatataagtataaagacaactgtcagtaacattatatatatatctatggagatatagtaagaagactataccactacagagaaaacngatttacggaagtatttagcgtactatggttaactctg

SEQ ID NO: 98039 - DNA, 315 bp, Glycine max
tcatgctggtcaaacgcttctatttgttgtatggaagggcaaaggtctgttttgtggtcactataggagcacttatttcaaacccttgcgacaggtacagatttctgattcaaggccacctgggttaccaatttgaccaacgcatccactttgccttcaagcttcttagtttcacatgatgcatatgggtttgtatctacctcatgccctcctctaatgactatggcatcatttctggcgcttaactgctgggagtaggaggccatcttctcaattaaatatctggcttcaccacgagtcatgtctccgacggct

SEQ ID NO: 98040 - DNA, 370 bp, Glycine max
ctcgggtatttccgcctatatgcgtgactcacaagtcatgatgacagatcttttgagcacggaagatgacgtaaatcaccgcgtgtaaacgggcttgtcggccgcgattgacgaatggcgcacaagacgacgttagtctctgcgtgctatcaggcttttcgacttacagacagcagaaagtttatacggataaccactcaggtatttccgctcgtcagcgtgactcacaagtcagtatgacatatcttgtgagcgcggaagatgacgtcaatctccgcgtgtcaacaggcttgtcgatcgcgattgacgaacggcgcacaagacgacgatagtctctgcgtgctatcatgcttttcatcttacagaatgc

SEQ ID NO: 98041 - DNA, 317 bp, Glycine max
tgatagcacgcagagactttttcatcttctgcgcccttcatcaatcgcggccgacaagcccgttgacacgcggtgatttacgtcatcttccgcgctcacaagatctgtcatactgacttttgagtcacgttgacgggcagaaatacccgagtggttatccgtataaactttttgcattctgtaagacgaaaagcttgatagcacgcagagactaacgtcgtcttctgcgcccttcgtcaatcgcggccgacaagcccgttgacacgcggagatttacgtcatcttccgcgctcacaagatctgtcatactgactttt

SEQ ID NO: 98042 - DNA, 380 bp, Glycine max
  unsure (1)..(380): unsure at all n locations
gaatcctgttccgacatggagactgttggataggataaaatagcttcatatgtctatatcactccattgnttgcttggntaaaattatgtgatttaccacgatacatgtactgtcttaccgtgttgacaaattcaaattcccatttaccttgttgtgatgttgactgataatttatagtatgcataaattattgttttggtggagtcattccatgttaatatgttgctgaatattgacagattgtcatgtaccctcacggtccctgcatttgttatttattttcttgaccttggagtggttcttgcgtattactttgtcatcctatccaaacaacaaaaaatactaggtaactaattagaacttgaattagtgatgtgat

SEQ ID NO: 98043 - DNA, 317 bp, Glycine max
tccttgagaagctagagctttatttttcacacctctctaatagctaagctcacccctatgccaaaatacatgaaaatgcttagctacacacactactttaatagctaagcttacccccattccaaaatacatgaaaatacaaaaaattccctactacaaacactagtcataatgccctgaaatacaaggctaaaactctatactactagaatggccaaaatacaaggcccaaaagaatgaaaacctattctaatatttacaaagaatagtggacccaaccttggctcatgggcttagaaatctaccctgaggttcat

SEQ ID NO: 98044 - DNA, 355 bp, Glycine max
tctaagaaaaatgaatgtatgtcgataataattccaaacagaatgcatagtaaaacatagcacaccgcacacgaaaaaaatgggtgtctatattaaagtaaattttgtggagactaagttgacagagagaaggaaaacattgttttttttatgaaaactaataaaaaaaaacacctctttttgactagaagcagtgtcgagcatatcaagaaccgtcatattagtttcaacatcatactttgtcataatctcatgctctctgaactctaccaaaggagtaagagctgcaataattaacattgacgatataaaatcgggtggagcagataatccatatctaagatataaagaaatg

SEQ ID NO: 98045 - DNA, 305 bp, Glycine max
  unsure (1)..(305): unsure at all n locations
tcactactgccggnattttctctcaaactctccccattcggtccatccttgattcattggcgtaactcattcttctcatgcgatcaccatgttcaagcatgtccaccgtgagccttgcagtttttggacatgggggaggaccatctgcacttatataagccatacctacaaggaaagctagtgcacaacgtaaaaaatagaatatgacctgaccactcgactaagagtctcacccaaggtcacatcttgcatcaatctttcgagactttttttcttccataagaggcatgtaagcctttggacca

SEQ ID NO: 98046 - DNA, 362 bp, Glycine max
gagagatgttgggctttgtatatatacctagctattcttatgaattaaggtaaataaagcatacaagtgcctgtatttcacgtgcggcacaattgattgttgtggggttactattgacgtgaatggttgaagtgatatactgcaacaaaatgttatttgaaaccgggattagagattaatttgtgtataagaaatatagctttaatgcccaaaacacatcttttgcatctgtgcagattattggtgacagttcttactatgttaacgtacgaaggtggaataatcatctcatgtatcaatttcacaaagtaagtactaattgagaaactggacgttgctcctaatccttgacgttttattat

SEQ ID NO: 98047 - DNA, 312 bp, Glycine max
tgtatagcaagtacacttatgttactgttgttgtgaaaggatagataataggacgaggttccaattttgaggaaccttctgatgagcattctgaagtagcattagaatggtcaatgccaagaacaagtacttagagagaagcattcttcatacagatggacttcaaggaatcttttgagttctcaacacttgacagatgttttgagacaacctttctgatcatagttataagtgtttcataatgagagaacatctttgcttcttaatagatataacactaagacacttaagctaaatgctagtaatcacata

SEQ ID NO: 98048 - DNA, 484 bp, Glycine max
  unsure (1)..(484): unsure at all n locations
aacccaaccccaaaatgcgtggaccacaacgacaaagacaaagaccaaaggtcgcacccacacgttgtctaaacaaaccctccacgatagcaacaacgaaccaaatcgttaaccctaatcgccttctgtggagaactttgatggaaacctagtaagcaatagagaaacatgtttatcttctgaagcaatgttgttacgccctttctatatgacacaaacattgtcatttttttaacctatagtgccttcattcaaacgacattgttttctttgtttttntaaaaaataattaatccaatgtgtataaacattaacaccaaagattacacttggcagcatacatgtaatcttacgtctccagttaacggccacgtaggcatataacgatttcgaactaatggcaaggacctaagacnaaaatttataatatatgtgcccaatccgaaggacaattatcanggaccaaacatattaaagttttttt

SEQ ID NO: 98049 - DNA, 314 bp, Glycine max
tcatgatgaatcaagattgttttaaagagttttgatgataacaaagatgatgacaaaaagctcaaaagtcaagaacacttcatgttaacaaagatgatgacttcaagaatcaaagaatgagttcaagattgaatcaagaatcaagtttaaagtttcaagatttaagttccgagaatcaagtttaaagtttcaagattcaagttccaagaatcaagatcaagattcaagactcaagaatcaagagaagattaaatcaagataagtattaaaaagttttttcaaaaactgagtagcaaatgaatttttctcaaaaa

SEQ ID NO: 98050 - DNA, 344 bp, Glycine max
agtgcgggttgaagacttatttgccaagtcgccgcgatatgcgaggatgattacccgaggagatcggatttggtacggccctgtcctcctggtttccgactatgaaattggcgagtggaggaacgcccagacgtttacgcgacaaacatagtgtaaccctatgtagctttaaaactctacggtcgggcctaggctatagagtttccttatgataatgcattatgtcttttgatcttgaagttataatataaagatctttcttcatctgttcctgtgcctctacccattctgattcatttgcatgtttatttctttacgcttaaagacgccaattcaatgacgag

SEQ ID NO: 98051 - DNA, 314 bp, Glycine max
tgtgcaaatcaagtctctcttgcattctatctctagcacgcattgtatgttggtctcgtcctttgtcacgggaagccggaaggtccatatcaccttcttaattgtacacatggggcactgcgcccccaaatgcgcaagtaagaagagataattttccgggctctcgtgtccgtaaaaagcattcatatcatgcatcgcataagcatctcttcataacatcataatggacatatcctgcatttgtccgttatcatattccggcctcacattttgcatgagtcattgcatcatcatatgcgttcaacatacttttt

SEQ ID NO: 98052 - DNA, 492 bp, Glycine max
tcttcctacttttatttgttgaccacaaagtggtacctggagatatgtcgcgagggtctggagaccttgcggacgttaggtggggtgctattgcccaaaaccaagcttgaccattcccgacccaacccgagcatagtcagtcagtgagaacctatgacatacctaagcaggcgagctcctggcagtcaaccaataaaagaacaaagtccacgaagcaaggaggcttgtgtggtggctggccagctatgtatcttgggtggtatatgaaaattaccctctggtaatcgattaccattcgtgggtaatcgattatagggtttaaaaatggagacaggatgttaagtagcttctggtaatcgactaccaactggtgataattgattgcacagtatgatagggcactggtaatcgagtaccactttgtgtaatcgatacatagtgtacctgtactgtaatcgataccattatgtgtatcgatacacacgaacttta

SEQ ID NO: 98053 - DNA, 312 bp, Glycine max
tcctctccaaaaacatttctttcgagaaaatcctattggtccatgatcgtacgtttgatctttgattctataggaaatcgtgtgcaaaataaagtcatggtgcagttatggtgtcggaatagggtgaaacacttgcctgtgtgagttttatacactatgagtgatttattttcagcttatcccgatgtttcccccgcatgttcatttaaaagctaaatgttgacatcctgcccttcattttcggttacaaggaagattacccttggcacaagtatattgtttctctaagatatggtgctctcgcgaatgatt

SEQ ID NO: 98054 - DNA, 433 bp, Glycine max
  unsure (1)..(433): unsure at all n locations
catgattgatacatgatttgggacttgtaggattcgattcgggcaaaattggatgagggaaagagtggttttcgaaatctgcactttatgcagnaatttgctgttgaaatgtgcaacagaattttgcataagtgcagaaaaatgttatgtatttgctggttgtggaaagagtagtacataatgagttctggacgttttctagtagatcccaacggtcaaaatgtagacttatgtactagagacttccagtaaaatcttcgagtcgatccaacggttaacgaattggaacgaagaatatgttactggagtatttgtatgtgaaaagctgtgatctttggtttgtgctctgggcagagttttctgcctttgccctcgtttgcttggtattggtagtatgtgatgatgggatgttgaacttcttggatgtgtggga

SEQ ID NO: 98055 - DNA, 262 bp, Glycine max
ggaatgctatctctggaccggcgctcatctgtggctacaggtcccgatacagcattactccgaatgctaatctggagcgaggcaatctatctaaatttccgggaagccactgccaaaaggactaatctaccgaccgcaacttaaagagcttcattagatggcctaccatctagtaaaagcatatccatagaaaaacgtgtatatagagggtctgaccatagatataaaaggaccgcaatagaaccttaatgccaaaaacatt

SEQ ID NO: 98056 - DNA, 342 bp, Glycine max
  unsure (1)..(342): unsure at all n locations
cttctatcccaaccaatgttgaggccttatctctagagaaggtgcagcaaatggtgctttctgcattatctaccttacgcatccagggttagtctaatgatatattttcaccatggnttgttgattctggagcctccaatcatatgactggtgccttggaacatttaaacaatattcacacttataatggcactcaaaacattcagattgctgatggaatactctatcaatacggctgctgggatatgactccttcctttctagaagtctctcctagactagattctaatgtacatttgcgcggacaataggtggataacacattcaatattaatttctctc

SEQ ID NO: 98057 - DNA, 320 bp, Glycine max
gcacgcgcgcgaaaccgggacaaaatagcggacggagcacagcggaacgagcaaacaggcaagagagacagcccaagcgaggaagaaagagaaacaggccggaaaggaggaaggagacgaaaacggagaaaaccaggccgaacagccacaccaagacggacaaggcaaccaccaaaaagcagaaggcccaaccaaccaaaacaaccccgccgatacacaccaccaaggaccccacaaagccccaaccgaagaagcaacggaacacccccaccacaacaaaaaaagcgaggcaccagccgaagcacaaaccgcgaacacca

SEQ ID NO: 98058 - DNA, 394 bp, Glycine max
  unsure (1)..(394): unsure at all n locations
aaagaaaaatgttgtttacttaaaaccccttgaactacttcacattgacttattgggtccctttagaactgagtttgggtagtgattactatggcttagttatagtagatggttgctcgtgtgtcggtaagtgtaccgatttgcacaagtagtatttaaaacggtaagaccgagtatcatatccacaaggaatttgtttcacctaaactatgtatattcagtatgtaaacattcttcanagcttggaaataaggtaaagattaagtggtgaaataagttttctacaatattaactatntagacaaaagtaaaatatgcaaagttgtaaaatgtgacaaaaatcaagataaaagcattggatagtttcctactggaaattctcttgccatataaa

SEQ ID NO: 98059 - DNA, 315 bp, Glycine max
tgtaccgccattgacaactactgtatacaaggatcccgccattggcaactgcgggactcagcctaaaccgtcagtacgaacggcgggacaggctgagtaggagagagagagactgtaccgctgctggggctagcgggacgaggagagatggagccatgccgccattcctcctggcgggacatgccaacgtggcagtcccgccactgcctcctgcggaacacgttgacgggacgcaagcttttgaaagggctaaggtcacatgcctggcggatcatttttattccagcttagctaggggtaacatgccagaatctt

SEQ ID NO: 98060 - DNA, 425 bp, Glycine max
  unsure (1)..(425): unsure at all n locations
tgagcttcctggcagttctcccttcaccaattaacccacattcgttactgttaatctatgcatgctttgtgttcgattaattgcctctgtgcttatcttacgttcatgcttaatgaacgaagggttaattggtgtaattggtgcctaatcacgtattgacaaccctaagtngattttcacttagtaaattaaaatacggttggattaagttgttaattgctagggacgaattcttcataacgtatgacaagagaatggcttatgaattagaggaaaacaacacgttttactattattaatttcgtattccaattcagttgttctttgattcacacaacaaacaacctccccctccccccattgtactgtactgcaagatatatgaacattggtttatatgctcgtggcaacacctagacacttct

SEQ ID NO: 98061 - DNA, 312 bp, Glycine max
tgcctaattaacctgaaattgttagaaaatgattattaaacacacaaaatggaagtactaagtatttattatctatacttaacagaaaatacttataacactacaaaataaccataaattggaagagtttgatacaatttacacaagctttatacacaaaagttattcgtaatcaccgactaacaactcccccaaatttacagttttgcttgtcctcaagcaaaaagagaacagctcacttgtcctcaagtgacaataacatgcagtgactatgtacaaaggtgtatgcaacaaaagctactgattgcatga

SEQ ID NO: 98062 - DNA, 473 bp, Glycine max
  unsure (1)..(473): unsure at all n locations
ggccacatcatggactcctctaaggacaatagcatcatttcttgcactaaattgttgggagttggaagccatcttctcaatcaaattcctagcctcaacaggagtcatatcaccgagacctccaccactggcagtgtaacaccctgatatatatatctatatattattagtaattatgtttgatgtttgattatttgttgcattattttcacccgtaattatttttaaggaagttaatttagttaatagaggggtgtggatagataatgatctagcttctcaaagaagcctcttgagaaagcttctcaaagaaacccacaggaagcttctagaggaagcctcttaatgaagcttctagagaaagctacatgaagctgcatcggtaaaaatgctgcccagccttcngttaaccgtggatcttctctaaattggtcttccgcttacaagacactttcatgatctaaccgtggatc

SEQ ID NO: 98063 - DNA, 316 bp, Glycine max
tgacgatttgaggagaaatttatagatggaaaggagagagaaatgtgtgttcggggagggggctgaactggatctacataacaggaaagaacattttttcaaatgataatctggtgtaggcaatcttatgatagttccatagatcctacgaccaagatgactatcccattgtgggagacttaattggctctctcgaatagcctacttcctaagagattagtttagagaaattaaggagtattaagtgtaataagcctaaacttcaagggacgttagtgtaatttactttaaaaaagatttgcgacttccttccaac

SEQ ID NO: 98064 - DNA, 421 bp, Glycine max
  unsure (1)..(421): unsure at all n locations
tgtaaagttattttttattatctacaaattcaagtgagattatccaaacttctcaactctctgtcagcttaaagcttctaggactttaacacctagctggcagttgtatttggctgtagtgttttaatacaggttttaatacaggctttacacatatacatgtatatataacaagtagtaacaatgtgctttacctggacttgatataatgaaacaacttccacaacaacaccaatggacaaaccaagttcaactacaacaaactaattcagctttacctggagttgatataatgagtaatgacattagaagaactcanagccaaaccaagttcaagtacaacaaactaattcatctttttctcaaccaaagtatgtcaaactacttgttggctattaaaagtgttacttattcatgtgac

SEQ ID NO: 98065 - DNA, 314 bp, Glycine max
  unsure (1)..(314): unsure at all n locations
tcactagatgcaaaancgtttccgttcttcctatcattgccttctcttcctcctttttttgtgataaccaaatcaaaacgcacactgcgttctcctttgcctcctttgccatcattgactctttctccagggctaccaccagcgccttcaccgctccataggaatgcatggtagccgccgatgaaggaggtggaaggcatgaaaggagttgttgaagaggatgggaaagaagattctgtcgaggagagcaatgactctagggtttgaggaaatgaaaagactgggtggtatgttggttctgaacgagtggacaa

SEQ ID NO: 98066 - DNA, 528 bp, Glycine max
  unsure (1)..(528): unsure at all n locations
tgagtttcttgatttaatccttattttctctccccctttggcatcaacaaaaagccaaagtgcgtaacaaatataaaacaaacacaaatgactaatcatacacaagacattcattgaaaaatctaatccaatcatgaagcataaacatgaataacccaaatataaaccacatagtcatataacataattcataaatgttcagtcaaaaagaaatactaaatgttcaaatgtcataataatctagatcatttggataggtcactagcatctagcagtcctaattctcttctaatgttgtagcaaaaatctntgtttaatggttttgtgaagatgtctgcaagttgattnttagtatctacataatttgaaacaacatcnacctttagaacatgatctctaataaaatgatgcctaacttctatatgcttggttctagagtgaaggactgggattttagatatggttatggcactcgtgttatcacnatttatgggaatgtgatctaataccaattcataatcagatagt

SEQ ID NO: 98067 - DNA, 313 bp, Glycine max
ttacggatttggtcttttctgtgaaagggtcaaagcggatctgaaaagaggcaaatttaatcatcatgcttggatgaatgagaaaattggggcaaatgaagatggtgaggataagggagaaacccatgttgtgactgtcattcctatacggccaagtttcccaccaacccaacaatgtcattacttagccaataacaacccttctccttacctaccacccagttatccaccaaggccatccctaaatcaacaacaaaacccacctaccacacaaccaatgctaaacaccacctttagcacaaaccaaaacacc

SEQ ID NO: 98068 - DNA, 409 bp, Glycine max
agagagaagaggggggcacggaaattgattgataagacggtgacaagttgcactttgaagtgtgtctcacaagtttctcattcatctaaattatgacaagtgttacacatgttattatttatagcttatcacgtaggacgctcttcttgacaaacaaggaaggttgcttcctactgaagctataggaagaaagcttcctttagaagctaaatggggcctattcacacccctccaatagctaagctcacccccatgccataatacatgaaaatacaatgggaagccttcttgagaagcaatgaagacagcttacttgataagctagatgggggctacttacaccctctccgatatactaagttgactgccttccactagacttactctgccataaaaatggcttttacta

SEQ ID NO: 98069 - DNA, 314 bp, Glycine max
  unsure (1)..(314): unsure at all n locations
tgcttaagaagacnccttatgaagttttagcccaactacacatacctctctaatagctaagctcacctccttgagatgagaagctagagctaagctacacaccccctataatagctaagctcaccccatgacaaaatacatgataatacaaaaaagattcctactacaaagggatgcaatccactactcagaatgcctcgaaagacaaggctaaaaccctatactactagaatggccacaatacatggcccaaacgaaggaaaaacctattctaatatttacaaagataagcgggcttatacttaacccatggg

SEQ ID NO: 98070 - DNA, 528 bp, Glycine max
  unsure (1)..(528): unsure at all n locations
agtcctttcgattcttattatcatttctgatttgatggcatgagatgaaatgcaaagattggaccttctgttagttgttatcaatgaatagattaaacacttgtgcttgagtgaaatagtagccatgagactgtggtttgagcaactttccttgatatctgtcttatgattaacttcatctaactgtgtagttcacattttgttctcctctttgtctagctgcatattctgtgtaaacaagtgataggtacactttgcttcatctttctcatcatgccaatcaattaatttgatgcatacacctttgtacataaacactgcatgttttaccacttgaggacaagtgagttgttctcttttgcttgangacaagcaaaacttttaaattgggcgagttgtagtcgggaanacgactaactttgtgatacaactctgtatttgatcnacttctccagctatagtctttattatatataagaccttatgntaatataggnatagataattatccttttgtttgatgttaat

SEQ ID NO: 98071 - DNA, 312 bp, Glycine max
tgagggaaaacttgttgctttggtcaacctagtaactcagcttgccataaatcagaaatctgcatctgcacctgttactgttgcaagagtttgtggtctatattcttctgctgatcaccatacagatctctatccttctttgtagcaatctggagtcaatgagcaacctgaagcctatgctgcaaacatttataatgaaccccctcaacagcaaaaccaacaacagcaaaataactatgatctttcaagcaacagatgtaatccaggttggaggaatcatccaaatctgagatgggcaaatcctccacaaca

SEQ ID NO: 98072 - DNA, 450 bp, Glycine max
agaaacgttctccccctacatgatgacgacacacacctgtcggatagcgaacaacgtcaaagctgaggtgcctaaggatatagcttactcacacttggtgcacagtgatagctgacatgagacaattgaggattcctgatttgtcatatttaataagaagtcgccaacacaaaccataagtttcttactatttatctttatcctttctttccctgtgtgacatcaaaatcgacatgatagagagaaatgagtacccttgtgcactgtatgaaatacgtgtaccacaggcataaacatcattcatttttctgcagaaccgtcttacacatactaactcgtctgtacacaacatcatatttaattaatagtaagtatatccttcttctctccattgtatataagaaatcaatttattacatcaattcaatcaatttaattaaattacttaat

SEQ ID NO: 98073 - DNA, 308 bp, Glycine max
tgcatgccagcaggtcaacgtttatcgatccgggcctacctctacatgaacaggcactatcttgcctacccccgccaccacctggtcaccccgtgggaccttctacgaacgagccataacccagaagcctcccaacagactcacctagcaagacatggcggtttatcccgacggaggcctatataacaagtgcgaggataaagggattcccgaccaccgcggaaagcgtatggttaacggccccagcatcggcgatgacatggtccccatttgtgcggcgcccttgacagaatacggcgctcctttag

SEQ ID NO: 98074 - DNA, 519 bp, Glycine max
  unsure (1)..(519): unsure at all n locations
ctcttatggaagaacggtatgaacttcttgcatttaaacttgcttgattgttagataactattggcagtgtgctccttcaatgctagaagaatattttttggtttcatcattgactttgtcatatcagtaataataatattctcatccttagtcaatggaccaacatatggatgtccaaccaatgacttggccaattcatgattttgactcccacacattaactacattatccatccttcgcctccaaccactagtttcgcacgcagcttaaagggacactcacattntctactcctagtaattgttcttactaaatctttcgtcttggccctatactaaccactcctttcacaaccaaataaacaaatgaggtcttcctctaataccagtattttgttgacctataataccgcacaaaacaatttataagcatagacgagcccatgcaacatatcacggtagcaacactacatgcatcatgctcttagtctaaggacatcttacttcttacacaaaat

SEQ ID NO: 98075 - DNA, 310 bp, Glycine max
tgctgcctcatgaggaatgtcttgcgcttagatagcatgaaaaagccctttgataatatgtatgtatgtaaatatgtagcatgaaatgccttgcaaaatgttgaatgaaatgccttgcaaaatgttgaataaaatgccttgcaaaatgttgaataaaatgccttgcaaaatatgaatatatatagcatgaaaatgccttgcataatatgaatatatatagcatgaagtgccttacaaagtgtttgaatgggtagcgtagaagtgtttttcaaaatatgtgcatttatgagtaggtaggaaaagaagcctt

SEQ ID NO: 98076 - DNA, 244 bp, Glycine max
agcttcatgagagagtcaaagatcaaattgagaggaaaaataaaagctatgctaaacaagccaacaaagggagaaagaaggttgtcttcgaacccggagattgggtttgggtgcacatgagaaaagaaaggtttccggaacaaaggaaatcaaagcttcaaccaaggggagatggaccatttcaagtgcttgaaagaatcaatgacaatgcttacaaagttaacctgcccgtgagtgtaatgtt

SEQ ID NO: 98077 - DNA, 244 bp, Glycine max
agctttatttgcaaatctcacatgtaagactaagcctaaactaaacaacatttttgtaacagcataattaaaaccaaaacgttaccctcagacccctaaagtaagattaagtttcgatcttgcttcaatcaagttctaaggcaacaatacatttgccaatgccaaaaaaaccttattggggcccacaagtgggtgatcatacaacaagcatacaaacattaagcattaaaaggagcatacaatt

SEQ ID NO: 98078 - DNA, 231 bp, Glycine max
agcttgggttaaattagtctaatcttactagggatcgaggtttaatccattatgctttagcctagaacataagaacatgattcattatagaaatatcttcgtatgcatcaactcctttattagaaaaacccaatgctttttacctattgttgtctactttttaattacttgcatttattgctttttaacatggcatctagtttacttttgtttatattctcaattatcaat

SEQ ID NO: 98079 - DNA, 271 bp, Glycine max
ttatgtgatactatttctttgtggacttcatcagttacaacctaagaacacaaatattgaaattgaaaagtctgaaacgaatcttttcttcaaaatggatgcgttagatatcttgcaaataataatatattatagtggtacaattacaattattgtaaaaaggaaacacgtatgatgaaaaatatcttagcatacaacacaagattacaagttttaacacccatggtaaattcaacacctcaaaaaacattaacagtttaataaccaaatg

SEQ ID NO: 98080 - DNA, 237 bp, Glycine max
agcttacattcaagaccatactccccctgagcaacaaacccaggaggttgctccatataaatatcctccttaaggtcaccatggagaaagacattcttaatatcaaactgatggaggggccagtgacggatagcagccatagcaagaaacagacgaacaatggtgagtctggcgacatgagagaaagtgtcacagtaatcaatgccatatacctgtgtgtagcccttagccaccaag

SEQ ID NO: 98081 - DNA, 262 bp, Glycine max
tgaacctaattgatatttattatcaataataaatattttattttattttataagaataaattaaagaaataaaactttgaaaattattaatatgtcacatgtgtgttgcacaggaaaatcatgttaaaaattaaacaaggttaattatttatttgttccctacacttgcccagacttttcaatttttcccttatatcttgaaactctaccttttagttcctatacaagaaatttttgtgttttagtccttggccttagttgc

SEQ ID NO: 98082 - DNA, 141 bp, Glycine max
tactaatctagcctctacgagttttcattatgcttttccaacggtctacagtggatcaactaagggcttgtatactgttctagcttatccccactactgacacctttaaaggagaacttgcttaacaaacgtatggggtac

SEQ ID NO: 98083 - DNA, 240 bp, Glycine max
ttaactttaagaacacggaccaacttatatgtgaatagaaaaacagacgcaggctatcaagaaacaggagaaaaaccgttgataaaagagcccctcaattgaaaatatctccaagggtgaaaaaaaaagggttcaacccccaaaaggtctcggagcaccaaagatgaggagtctagtagaccagggaaaggggttgcatattaaccaagctaaacacaaactgcaaccatgcgatagcaa

SEQ ID NO: 98084 - DNA, 263 bp, Glycine max
taacagtttttaaatttatgccgctgcagggaagagattcatggaggaaaagacagttactagcacacaggacactgactatcgctgtgacattgacactaaccagttttgttaacctcccaatgaaatgaattgaagataacctccactcgcttagctcaaaactgcgagagagattcttggaaagaaatgcggataattgtgaacccaacattttcgcagcaataatgcaatgaagtgaccacattcctgactaaaaaggc

SEQ ID NO: 98085 - DNA, 238 bp, Glycine max
tagctttggatttttcttcattcatctcagtcattcggatcagtcattcggatcggtgaagggaagctttgaatttttcttcatttatctcaatctataggagagcaaaacaaagctttggtttaaattcttttcttcattcatttgtgggtatcatatttttgagtcctctcttatttttaatagcttaaccaaatgtatcttgattgtctcttttttacttgcaggaagctttgga

SEQ ID NO: 98086 - DNA, 263 bp, Glycine max
tgtacgaatataagaaacatcttcttcgaccttggtgattcttgactccatctcattgaagcgcatgtccacttgtaattccaaagtatcaaacctttcaccaacaaaagtttgaagacgatcgaacctatccaaaatcttgggaagaagagaggaatcttgttcagcatgtccttcttcatcaataggtcgagcaccctttttcacccaagagccatcatgctctttttgataatgaaacgatgtaatgacagtcgggccta

SEQ ID NO: 98087 - DNA, 236 bp, Glycine max
agctttgcttcgacaaccgccccctttttgatgacgacaacctttgaaatcaggaggcacacaccctttttactgagagatcactcacataaagtgtgcccctttgtatttgaatttgtgcatattttaaaacaaaatgatgactcatgggagttcttgattttaagcccatttctctgccccttttgcatgaacaaaaagcctaagagcatatcaaactcaaagtctacaaatat

SEQ ID NO: 98088 - DNA, 269 bp, Glycine max
tgacagattattatatgcctgggttaacctgttaaccaaactggccatgaatcaaaaatatgcacatgtagccaaactctgaggtatatgctcactctgccgaccaccacacatacctttgcccttatgtgacaacaatcagaataaattgtacaacatgaaacttaccctgcaaatatctacaataaaacctctcaacctaatcatcaaaatacatccacaacaaaacaatatatgacctatcccacaacacgcacaatattgggtgg

SEQ ID NO: 98089 - DNA, 109 bp, Glycine max
acatataactcttaaactcgggggattttccttttcagtttactatggctgtatatgattgtaggcccatgtgactttctacggagaccttttgcttctaactcatctt

SEQ ID NO: 98090 - DNA, 229 bp, Glycine max
tttgaattctttcatttaccattaagtgtgggaagcctaaccccattacaagcctaaaaagtccttcggattcaattttatgtgttcattgttgtatgatatgagaagaaaagcaaaggtaggaacttgtgttggctgtttatgatggaataagcctaaacacttgagtatgagtgaaacaatgactgtgaggttttggtagaagataccttcttgatttttataatgc

SEQ ID NO: 98091 - DNA, 243 bp, Glycine max
agcttaagttagttctcagtagtgaatttgagatgaaggatatgggagcttttgaaaagattatgggcatggagatcaaaagggattaagtccagcaaaagctctttctatgttagaagaaatacattcaaaaaattgttgaatcattttgggaggacatatgcaaaatcaatatgtactcctctgacaacgtctattcgtctatctgaacttaatactactcagtcaaaatcagagaaggaa

SEQ ID NO: 98092 - DNA, 221 bp, Glycine max
gctttttggcacttttatttatatttctctgcaaacatgctatgtctcgcgactggaccctttactcttctcactgagtacactattgaatcccaatagcttcgcaaattgttcagggaacttttcctggcagccctctggttatttactaggcccttgagaatggttaactatccatacttggtcattcgttgaacggagtgcttgaacttgattctttt

SEQ ID NO: 98093 - DNA, 237 bp, Glycine max
agcttcattataccctacgctcatctctttgcttctttgagtcaaccaataggtaagggaggagtatttgatctcttaatatccatgcttcgatgttatgaagattaacttcatttatgatgtgaatttgaatgtttttgtgtgaatttaatatttagttcctgtgccactatgtatcatgtgtggtatatttgtgtattctatgcacaaaaatgaatttcttgacccccctcacca

SEQ ID NO: 98094 - DNA, 63 bp, Glycine max
aataacataactaagagcagttgttttcatccggcctaccagttatctgcttggtaaaacatt

SEQ ID NO: 98095 - DNA, 238 bp, Glycine max
agctttgattcttttggcccaagtgaaaaatccaacagtggagctggtggtgacaataacgcttctcctgcccttgaattgagtgacgaaactgcaacttcaaggtttgtaattcacatgcttctgctttggatatcaaataacagatctctctctctctctccctatctccctccttgtgtgtgtgaatgtgtgttccctcatgccctttttaatggtgtaagaatgacgtatggtt

SEQ ID NO: 98096 - DNA, 266 bp, Glycine max
tgagatttttaagtttaaactttttgtctttaaaaaactagtggggatagatgacccttccatctataatgataattaaaatgattttcgttggcaaaattaatcttatcaaaagagttaaaatattattgtaaaattcattaaaatatatttcgtgagatgcccataaacgaattggtgatataaaaaaccaatttttttaattttattaaatgatacctgttttgggacaaaccaccaatattatgagatggagaaaaagtttt

SEQ ID NO: 98097 - DNA, 225 bp, Glycine max
aatagaataatcatacctaaattagtgacccggtctgatctaatggcataatatgatggcaaatgacaatatcatcgacatgaaaaaaaatcttttctatgaccaattgaatttttttttagagacaaataaccttagtgaatctatactatttctaagagaccatgaacattctgaatcctactataactacaagtgtatttatgaaaaggatacagattagaa

SEQ ID NO: 98098 - DNA, 244 bp, Glycine max
agcttttttttccttctaaaaaaaattaatctgatgcggtcaacattacttcacatgaagaaagtaattccaaaaacacaaatagctataaaaaataattgaattacgaataatgtatttttaagcaatcatgttagtgttagttgtcacatcctccctgctgtagcctattaagactaatttttagtaattgtgaaagttattaaaaactattaaaaaatcctaagggaattagatacgtatt

SEQ ID NO: 98099 - DNA, 274 bp, Glycine max
tcgattgcgaggaatttgagatctgattgaaactttgtatttataaccctccaattccttgcggataatcggatattatgtgccaacactttttgaatactaaactccttattatatatttcaattttacctttaatgactggagaagacacaaactccaagccaacaaatgaaaattgataaaatgcaactttcttgggtaaataccttttcaacaagatgccctcttaaatgtatgatagttgacttctaaaggatatgaaaaaacagggca

SEQ ID NO: 98100 - DNA, 237 bp, Glycine max
tagcttattcatgtgctgtgttgtagcggattttattaatagtaactaaaaaattaacggataatgctttagttattgggaatgcttattggatgaaaactatttcttgtgtatacaagtcatgttaaaataatgtctatctgtatcttgatagacattaataggttgtttcgtttcccatttgctagtgtttctgtatattgtaatggataagtgtcttgatatgtttggatgaac

SEQ ID NO: 98101 - DNA, 268 bp, Glycine max
ttctgcttctcagttttacttgttctgatacttcttaaatacttcatttcattatgtatacacttctgtatccagatgccaacgtaactttgtaagcatgtgaacttgattgcactccttgtggtgacgggaaagtttagaagattgaacatgatgataacaaaattcaattccaaaaaaaaattgaggaaaacccaagtaatatataatatgttatatatacttaaatctgtataccattaacatacaataaatgataatgagtttt

SEQ ID NO: 98102 - DNA, 148 bp, Glycine max
ttgcttctttttttcacccgacggacattggcccattcactccacatccaagcatgctcatattttaacgtattttatatataactggtacatataataatatagtttgctgcaaataccttgccttcattctgctgcagcttctacc

SEQ ID NO: 98103 - DNA, 235 bp, Glycine max
tagcttgttcttcaacaaccctttcctacctgtttcggggttctcttgccattgttactttctaagtgtgaatggagatcgaaatacaagtctgacacgtctgccatgtagtgattgacattatctctctgctttaccaacatcttgaactatatatatcttggggttattcagaagaaataaaagttgaacaacttcttttgtttagttgcaaactcgtaatgcctttttattt

SEQ ID NO: 98104 - DNA, 262 bp, Glycine max
ttccatggttgaatttcaacctcagtgtgtaacaaaacaacccacagaaccatgtgaaagaacctccacttgagaacaccagtttactatcttccccttctgttccaattcctctatgcagctcagctcctcttttacttccacttgtgacttattttctttttctttaatgacccacaggaaaggacttccacaatctaatagcgcacgtgcaagttcctccatttgcgtcttaggcaacacgcaaaggctaccaaacgag

SEQ ID NO: 98105 - DNA, 225 bp, Glycine max
atggccacacatgatacatgtcagggttcggcttggttcaacggcaaaagggatgccccacattatttccatgacacaaatgcaaaaatgatgatttggaaactttatgcaaaactggtcatgcatgcacctatgtggacactcaagtgtcaaatttttatggtcatgtgatgctagggctcaggattcactctattttaatcaacccaatgttcccaaaatatg

SEQ ID NO: 98106 - DNA, 263 bp, Glycine max
ttcattgatgtgataaaagggaattctttccacttgtagcccttgcggctaagccaagcctgtctccctccttcctaaggcgattctcctcttatcagcgtaacccaaaccaaaattttcgtgattctccatgaactcccctagacttgctatgcctttcccgttttggcccaaacccattccaggctcatactcgtgccccaacatcacctgggccaccatagtttctatctagtttctatccatctatttgaccgtcctac

SEQ ID NO: 98107 - DNA, 197 bp, Glycine max
tagtgacctatagtacactcagcttttgcttttaacattgggacttacccctgcaactgccttacctacaccaattcagttcttgtgatctatcaagcgcatatacgattcactttcgaggaaccattcctatctgagatgggcaacccctccactatagatgaccaacatcagtctgtctctcgctaccagattgt

SEQ ID NO: 98108 - DNA, 243 bp, Glycine max
agctttgggctcattatctccgatcatgtctataccccacatagagaacgaccaaggtgctgccaagacgttcaaaggtatgggtggagcattgacattatcggcgaaggcctggcacttgttagcattttcctcacatggatgcaataatcgttctccatagtgagctattaataccctaccctcagaatcttctgggccatggcatgcccgttggcatgtgttccaaaggatccctcatgc

SEQ ID NO: 98109 - DNA, 242 bp, Glycine max
tgacactctaaaactcaagcttggtttactaattttttctatatcggcgtttaggtcctctatattagtaccgtcacaggactcattgtcggatctgtaccgtttaatcaccgcaaaaataaacatgcagatgaatgataatggatgattgtgcgagatcacttttagaaacatcaaattcatatatatatatgaaagcggaagacaggctcaaatagggataaaaccctaaagcctaagcc

SEQ ID NO: 98110 - DNA, 242 bp, Glycine max
agcttaaattttcaatttcgagcgactcgttatattacgggactcaatcaaacattcgagtaaaaagctattgtcgtatgaattggcttaaagcttaaacattcaatttccagcgcttcgttaaattacgggactcaatcagacatccaagtaaaaaattattgtccaatgatatggcttaaagctataaacattcaactttgaccggctcgatatattacatgactcaatcagacaatcga

SEQ ID NO: 98111 - DNA, 236 bp, Glycine max
ttgagccaataatttccactttaactttgtacccggatgtatcgattgactgtactaataatttgacacgctcgataattgaatgttgtaacctttaagcctattttgacggcaattacgttttgctcaggtgtccgattcatcgacgtaatatatcgggatgctctaaattgaaaggtgaacctctgatccaactcactcgacaaatatgatttactaggatgtcctgattgagt

SEQ ID NO: 98112 - DNA, 62 bp, Glycine max
tttaaggctaaggtacaactttgatgatactacatattggggtattatacacctttggaatg

SEQ ID NO: 98113 - DNA, 269 bp, Glycine max
ttcttgagaagttttagcttttctacatcacccctatcatatctaagcatcacccccattgacaaataaacatgtctaatacaaaataaaatgcttactacatatactactttaaaatgccctgacagtacaaggtctaactcccatttctactagaatggccttatttcgagggcccaattatagtaaaacagacctattctactctttaccaaataagaagtgaccccaacttggtcccaggggttcaataattttactttaagttt

SEQ ID NO: 98114 - DNA, 239 bp, Glycine max
agcttggatgaaatttttatcacaaaactgtaagacttgtagtgttgtattgtatgaaactgagtgttgggtggtaaaaagccactaacaaaataaactcaatgtagcatagatgagaatgttatgttggataagtggacatattagacaagataggattaaaatgaatgcattagaaagaaagttgagaacttgagatagcatctgttgtcgaaaaaaatggtagaatctcaccttag

SEQ ID NO: 98115 - DNA, 266 bp, Glycine max
tttcctttgatttgctctgatagggtttccaagcgttaaagagaatgagaagagattaaagccttcattttgtattgtcttcgtgcaattcacttttctccctccatgaataatattttgcaaatcccaaaggtgaaggtgtacagaattgaattgtgaaccaggtgtctaaatttcacgatgatccaacagttaatgagtccgggatcgtaattttactggacaggttttgagtctttgcgggaaaagagaaagatacaatgcga

SEQ ID NO: 98116 - DNA, 246 bp, Glycine max
agcttctaagttctaacagggtgatggagagtagaatttctgaatgtgaaccacaagtataaagttattataatacactgaagctccattaaaaactgaaccatgagtacataattattatactacattgcagctgcattaaacatgttattgttatttaatttcaggacctaaaggaccccttcccttatttttgagaaaactagcttaatataatctacttctataattaactaaggagttgag

SEQ ID NO: 98117 - DNA, 274 bp, Glycine max
tattatcattctatttttattaagatttaaaccctaattttaaaccatcttcaccatatattcattatataatactatattttcatcaatagcatataactttttgtgttttccttcgcatgacactatgttttaaggtatgttcgtgactaacttaatctattatacaccttaattgtaaagcaaaacttttgacaatggttttttcctttaagtgtgttcattcattttctaatccaagtctacgtcaacgatttaggcctcaaccctcaat

SEQ ID NO: 98118 - DNA, 239 bp, Glycine max
agcttggggcgagagttaaacaaaaacactttttggccaatatggaactctttcctaagaatcctataatcatcctctttactttctccttgtaaatcttggagttctcatattcctctaagcgaatctcctcaagttcttgcgattaaagctttctttccatacctacttcgtcaaatgccatgttacaactcttcacggcccaataagcattgtgctcaatcaccaccagaaggtgg

SEQ ID NO: 98119 - DNA, 268 bp, Glycine max
ttgaatgctctattcaatggagttgacaagaatatcttcagactgatcaacacatgcacagtggccaaggatgcatgggagatcctgaaaaccactcatgaaggaacctccaaagtgaagatgtccagattgcaactattggctacaaaattcgaaaatctgaagatgaaggaggaagagtgtattcatgacttccacatgaacattcttgaaattgccaatgcttgcactgccttgggagaaaggatgacagacgaaaagctggtga

SEQ ID NO: 98120 - DNA, 240 bp, Glycine max
ttgcttttctttgggccatttcctgcgaaggcaaacatttggaaagttagttttaccaagaaatgctactcttaaaacaaaaatggcatacaacctcctccaataaacacaaacatcaatgtaaatttatagcaaactcatgcacatacttccttacgaacattcactcgcacaagatattcttctaactaagaaaaatgcacccatgcacaatcaaggcaccttcgttacctagattat

SEQ ID NO: 98121 - DNA, 266 bp, Glycine max
tcaaaaaactatatatgataatgctacggtggccgcttccaatatagctagggaagtggaaccggtgctacagctcgtaataacttgggccgatacaaaaacgcgacgggttttaatcggaggtatagtcctcaagcctacccttatgggttgcctccagacttcactccccgcaccgtgccagacgatttgagccaagcccttaccttcgaggggcagttccctcctcacgccggctatcctttgcaagaagatgatgaaggaga

SEQ ID NO: 98122 - DNA, 228 bp, Glycine max
cttttcaaatgaaaaggcggtgtttacacgaaacagggacttctcgagtgcaccatacaccatgtactcgtaaaccaacgctctcaagtgtctttcgaagcaaaacccatatagacgaactagattaaaatgatggacttttccaatggtacccacttctgccataaactgctcatcaattctcttgtcaaaactcccacgtagaactttcacggctacgatggttcc

SEQ ID NO: 98123 - DNA, 263 bp, Glycine max
tcttgttctttaatacgcttcaaaattcaagacgacatcgaatgcgtatttagagcatatttttagctcatcaaaaatatgggctaacaataatcctatataatatattggtaggaatcttgagcactttcatacaatcattatttaaattatgtagaaaaaatattatctcttatatgtatcaaatgacaacaagaaatcaaacatattaagaaattgcatcaagcgtgacttgtgcttttgtacctctcatgttttgtcat

SEQ ID NO: 98124 - DNA, 251 bp, Glycine max
gaccggcaggcacgcttgctttgactcagcgacaaagcaagacggaaaccaacaagctagctatcatcgccaaggaccaagaagaggtaggtctagccgcggcccacgagcataggattgcggacgaataagcccaagtatacgcggaaaaagaggctagaggaagggtgatcgactctttacaccaagaggcaaccatgtggacggaacggtttgctcttaccttgaacgggagtcaagaacttccccga

SEQ ID NO: 98125 - DNA, 225 bp, Glycine max
tatgaccattttaatttctcgggagtttccattgttcaataaccaatgtctcgatatattatgcacctgaatcggaaatccaagtgaaaagttatgaccatttgaatttctcgagggattttgttgttcaattttcagtgtctccatatatggtgtgcctgaatcggacctccgtgtgataacttatgaccatttgaatttattgagagattttcttgttgaatt

SEQ ID NO: 98126 - DNA, 195 bp, Glycine max
tgtaggcggcaatttttttcaccgacatctcctttatttcctcttaacataatgaacccttagtcgactaactccccccacgtcgacaaggtccgacatatatctggaaggaggaggccatcgtaagattacaaatcttggagcctacatagctcatgtacaagggaaaaaaaaaaactgaaccacaactagaaa

SEQ ID NO: 98127 - DNA, 264 bp, Glycine max
tcctggtgtatactttattgccaagcgtatgggcagatacattgatgccgactgaggcggatgctatcaaatttaagatctggaatgagggaatttctgggagatttaacgattatgaacaaacacgtatgctgtggctgatcacacactctgttcatgataatttggaaggtgggtccttgactgtgaaagcagggaaggtcattcctatgacaaaattgatgaataaaccctgtatgatcgctgggaaaacactactattct

SEQ ID NO: 98128 - DNA, 258 bp, Glycine max
tgccctattgcataggggactgtgctaagcctaaattcttgcactgagtgcaagaagtggactttggcttaacgcaacaggctcgctaagcgtgatttgcaggttataaatacgtttttagcatgaaaaacacgatttttcactctcctcttctccaaaatgccacccaaaccctaaaacctcattttccaccacccaagaccatcggtggccgccgttgcttgccgttggacccccacaccaagagaaacactttaa

SEQ ID NO: 98129 - DNA, 242 bp, Glycine max
agcttcggttgaaagtgatgaggtacaagccctaaaggcgaagcttgaaagagcccgggtagtcaaagagaagttcaagtccatagccatcaaagtctgaagagagtatgatgaactaagggacgtcaatatggccaccgatgaagccttggaatgagaaaccaagaaggcccgaaaggaagaacacaaccaaaacaagttttaaggggctttatagggcagcaatagtgagctcaagctcc

SEQ ID NO: 98130 - DNA, 267 bp, Glycine max
taggctctaggagagtcattcatccatagaataactttcactttttcattcattccttacccatactcgccctttatttaggcacttagctttcattcattattttgcagcatacacacttattaatttcatttgtacttacagttttttttttgcacacataaaacattatatacataaacagtgtgtgtatactattttctttgaccttttcaattcttacccagtggccctgccatatttggggacaaattgacttgataagaa

SEQ ID NO: 98131 - DNA, 188 bp, Glycine max
agctttctttgaaagagagagaccactcaccatcacagagcatggtgttgaaacaagagttagctgcttgcttaacgtttacaaaaaccttgtcttatcgttaatgcgagacgaacactcgcatgtttgccttcgtccctatgaaccaccaagaattaaatctagccacggcccaatagtacaatgtg

SEQ ID NO: 98132 - DNA, 258 bp, Glycine max
tgggaagaacgaattatattttatgacacaaagtcaaacctttaaacaagaggtacgtgcttagcctcctatttcatgtactgctatattttatagtacaaagaattggcccaaattacacgacaccatctatatttaagatgactgattaggtgaaactaaaatgtgtcatgtctaagatactaaatatatgatatgtatatgaatgtatatatttattaatgtaacgctggtcaatggataaaatataaaaaaatg

SEQ ID NO: 98133 - DNA, 158 bp, Glycine max
ttggtcaccaccgtttacttttctgtctgggcaaaaggcgcgctctacatttttgacaaattggacgctgtaagtggagaaatcgcaaccattgttggtaaagtcatgtacgtcctctggagaagcgcgtttcattggtgccaccaaagtcctttata

SEQ ID NO: 98134 - DNA, 238 bp, Glycine max
agcttatctttatggcaagcctccggacttcaccccccgtgccaccccagaagatttaagccaagcccctacctttgaggggcaactcccgccttatgaccactatcccgggcaagacgatgaggaaggagatacccatcttggccccctgctccacctcaaagatccgtccccacatgaactaccccaaccgaacatagtccgccatatcccggcctcacccacacctgaaaaagaa

SEQ ID NO: 98135 - DNA, 206 bp, Glycine max
tgcttttcctactttttctctcgcataaaaaatgtgtttcatgtttcccagtgaagtgacatgtcactgttgctgattcaagtcttacactttcggatttttctgttgacagttccagtcttaaagaaccagatgccattttggatcagatgatggtttggagaataggacaagttgtgaaccatgttttagttaagtggtaaaca

SEQ ID NO: 98136 - DNA, 247 bp, Glycine max
agcttctaggttagtgtaccagatgaccgctgccccagccaaactatcttgaaagaagagcattaataacttcccgtccctagaatatgcacccatctttcgacagtacatttttaagtgatttttgggacacatcgtccccttgtacctatcgaagtcaggtaccttgaacttcggaggaatgacgacatccggcatcaggcataagtcagtcatgtccacgaaaggataatcgccgaatccttca

SEQ ID NO: 98137 - DNA, 275 bp, Glycine max
tatccaagatattaagttattttcttggttctggttgaagtatttcatgactatagaggttgggacattctcacaatggcagctaaatacacaagttcttttgaaggagtttatgtgaaaaggaggataggtgtggaaataatatatgatgaacatggggtggaagcttatatgcagtttaaaaggggcatgtgccggcatgcaagggtacactctcattttttcatgttggtaccagttgggacaacaaaagttttgtgagacaggtgtggtcc

SEQ ID NO: 98138 - DNA, 142 bp, Glycine max
cgagcagcacttccttaaggagaggcagcccaaggcgaactgaacacccgggaacaaagaagtcagcccaaccccaaaggcgaaagaactacaacaaggacccaaggccccgagaacccgaagaaaacaaaagcccaaggaa

SEQ ID NO: 98139 - DNA, 238 bp, Glycine max
ttactttatgcttcttaaaataaatgaggcaaatatagacaacctattttttttttttcacaagataaacttaaattccagaatcttgtcatcagtgtccttacttaaggaattaaaagttgaaaagttttgttgaaattcatgtaaaaacacatttaaaattttagggaaaacattttttgcattccaataatctttattttttttactttcttaacaggcaccggagtatttacct

SEQ ID NO: 98140 - DNA, 266 bp, Glycine max
ttcataagtgaaatcaggtgcagccatgttctcagtatgaaaattagtagtagaatgcgcaaaatcaccagcaacagaatactcaaaatgctcaaaatgcacaaaatgaccaggatgcacactatgcctaactaatctatgaaaggttctgtctatttcaggatcaaagggttttaaatcacctagattacccctagtcatgcactattatgcataatcatccccgtaatgttacggaacctagattgttttctttccgtaatgtt

SEQ ID NO: 98141 - DNA, 201 bp, Glycine max
accgggccgagacaacacagcggcagcccaactgggaaagcccccatccactaaatataaccgacgcatacatgaggaagggccaataccaggaacgtccgccaagggccaagccaaaagccaacaaatgcttctcgagaacagaaaacaactgctccccttgctcatcaataagggaggcagacataattatcggaaaac

SEQ ID NO: 98142 - DNA, 227 bp, Glycine max
tggagaggatgcttcaatggaggaaaagaaagagggagagaaagacagaggggggagcatgaaattgaaggaagaaaaagggagagaagttgaactttgagttgtgtctcacaagactctcattcatcaaagttacaacaagtgttacacatgcttctatttatagactaggtagcttccttgagaagctttcttaagaaaacttcttgagaatttttttgagaaaa

SEQ ID NO: 98143 - DNA, 190 bp, Glycine max
tactgatcatcacatgtccagtggccaaggttgcatggtacatcctgaaaactcctcatgaaggaacctccaaagtgaatatgttcagattgcaactattggctacaaaatttgaaaatctgaagatgaaggaggaagagtgtattcatgacttccacatgaacattcttgaaattgccaatgcttgcac

SEQ ID NO: 98144 - DNA, 243 bp, Glycine max
  unsure (1)..(243): unsure at all n locations
ttctgaagttttctggtttcccaaaccttgaaaacttgtgctattcatcttttcattctcttctccttttgccaaaaagaattcgccaaggactaatcgcctgaattcttttcgtgtctctcttctcccttttccaaaagaacaaaggactaaccgcctaatttccagataccacccaagatacatagctgaccagccgtctcacaagcctncctgctttgtggaacttgttcttttattggt

SEQ ID NO: 98145 - DNA, 241 bp, Glycine max
tagctttaaaatttgaattaaaacattctgaaactgctggtaatcgattaccatatatgtgtaatcgattacacagggcaaattttgaattaaaattttaatagctgttgtaaatcagttttggccactggtaatcgattacatcctctggtaatcgattaccagagagtaaatttcttgtaaaagacttttaacttaattttcttggccaaaccttttgctacttcaattggaattccct

SEQ ID NO: 98146 - DNA, 268 bp, Glycine max
ttataagcgcaggtttgggtgacgaaggtcaagtggtcgcgatatacgaagatgatgttctgagtacattggatttggtacgaccatgccctcctgatttccagctgggaaattggcgagtggaggaacgccccggaatttatgcaacgagcataatgtaaacctttacggttttaaaagctctatagttgggcctaggctttagagtttttcttttgttaaggctttgtgtcttttgtttgtgaatttataatacaaggatctttct

SEQ ID NO: 98147 - DNA, 230 bp, Glycine max
caagcaactttctaaacaacccaaccggaaacacgcccggaacccaccccgagaaatccccgcccacacacggacacccgaacatcaaccgacacagaaaacgctagaagaacagggggataataccggacagaccactcccaaaaccgccgcttgaccacccacagaagaaaagaccgtacacgttcctgaagcacaaaagctacgggaataatgcccaccacaaagga

SEQ ID NO: 98148 - DNA, 100 bp, Glycine max
ttccgctcctcgaagcattccataaggcagaatctcacctctaatactataagctccaatgtcatatgatagatccactgtgtctcctactataaggtct

SEQ ID NO: 98149 - DNA, 241 bp, Glycine max
agcttgtataacaccaaagatgtaagacaaaattttgaaagaagtgtaaattttgaaacaataagagctaatatacaatcagatacctgaaagtgataatttatgttgctatgatccctaacaatgtataattagtccctgttagattacatttatctttacatgatcttgtatatattattacacaaaaacttatgattctgattgatatgtaattacctaataattagtaattgattga

SEQ ID NO: 98150 - DNA, 258 bp, Glycine max
tcgaacctccgttggagttgtcggttgttgccactccataaccgactccaccttgttcggatccaccgcaaccccgtccttagaaatcacgtgccctaagaactgcactttctccaaccaaaagtcacatttcgacagtttggcgaacaacttcctatccctcagaatatgcaacacaatcctcaagtgcttctcatgctcctccttattcctcgaatacactaggatatcattcatgaacacaaccacgaactgatc

SEQ ID NO: 98151 - DNA, 230 bp, Glycine max
agcttggttttttggcgactcggtgaatatttgattatttgcatcacgtcaggtacctagatttttatctcagatggagcgatctgattcgtcctgagcagaacatccatgatgggaaaggtcaagagactgaagcttctgctttcagaaatgcaaatatttgtgacaataaacttgtagaggggaaaagttgttatggaatagcttttgggagccaaaaacatcttcct

SEQ ID NO: 98152 - DNA, 261 bp, Glycine max
tcaatgtagtatattatgatctggttgtccatgtttgccatatctgatatctccttcataatgcatacaagatggatgaattaacaaagtaccatatcagatttgcagaattggttgattaagatttgaacattctctgacttgtttacagaggagaaaagttgttggattttcttttttaagtagtatatgagctcaattctgtttctacctgttttcatttctttatatatgatatcattggactcttatttgtttaat

SEQ ID NO: 98153 - DNA, 316 bp, Glycine max
gaaaaaaaattgaaacttgaaacctgaattacggtaataatataaaccattcaatcttgaagctaaaaagtttatgttttgtgctgccaacgtgcaatggtcagtgaataattcgaataatgacgttctaagaatcattggaatatagtactaaccatgatcctttatcatcaactagttggggaatatggaaatttgtatgaacctcctccgaataggatgcaaagatacctaaagtaaagcctttcacgttataaaagctttatctaatggtgataagatttataaccaaatttcagcagatggtatgagattt

SEQ ID NO: 98154 - DNA, 245 bp, Glycine max
tacactctttttgtttaaaaaaactaaaatctcatcttgactagaataacccatttataatctaattatctaataatctgcgaaattgtccttatgtatttttttgctagctttatcaattcggtattaaaaaaaatatttttaatgctatataatagtctatagaagaaaatatgtgttaaacatgtgaaatgataccgcgaaatctatgaaattttttacgacctagatataaatatgaaata

SEQ ID NO: 98155 - DNA, 251 bp, Glycine max
tttacttatgtggtttggcgtttttccttcgctttcttgactcaaccgctatcttttaccaccgctcttttcttcccgcgatgcttcatctttatataccctccgagatgggtttatagctctaaaccataacttatcacgatttcgctttggtattaattaagctagttatgccgctcgtatggctttgactaaaatccattccgggtttgtaactgttccccaacattacttgggccatcattactgct

SEQ ID NO: 98156 - DNA, 227 bp, Glycine max
ggacaagggggaccaaaaaagaagacaagggaggaggacagaaaaaagggagacgaaaagagagaaacatggaaaaagagcgcaaaaacccaccaacccctggaggccacctccaactgagctcacatactcccacgaaagcccataacctcggttctctaaacaccggggccccatcaatcctcccaagcttccacaacatccaagcaaaacaacattcaaacagc

SEQ ID NO: 98157 - DNA, 262 bp, Glycine max
tgatagtttacaggtaagatttttgtcttcaatccatgcaagtgtgtctgtatatagtaccctgatttgtgatttttctttatagctagcttatcatggcatttcaaaatatgaataggtagtagaaactatacattcttgttttaaatcactgttgcatgcttgtataagaattcagggcactatattatttataaccagtatatattagtactgatatcatatcagggatatgttttaactaactagtggttgtacaaat

SEQ ID NO: 98158 - DNA, 222 bp, Glycine max
ttgaaggtgcgtattccaccattttccatagtagaatgctggtaatgtgtttactatcattgtcatcatttttttcgtcattaaggtgccacttgagctgccaggttctccacctttgggcatattctttgaaagatccgtgccccttttttgcacatattttgtagttgcatcctatccgaagccattataccgacactgcctaacgaaggcaaccattag

SEQ ID NO: 98159 - DNA, 241 bp, Glycine max
tttcttatataattcataataagagaacaatgcctactgaagaatcttattcatgtttccttagatgagtccaatgcttttttttcacgaaaggatattttagatgaaagtgtataatctttacaacagctgcacattcatggacaagattctctaggaaagggaaaacgaaccactgaacatcctccaaaataagtcaaaccatataatgaacttccattaaagagtaaagctttttgac

SEQ ID NO: 98160 - DNA, 267 bp, Glycine max
tagcagctttcttcttaagatcaggccacaggagtgcaaatctggactatgcacaaagtgtttacccctgttttccatcaacgcggggcttcaaaaaagggttaagagtatcctctttaaacttaatcatatgacctctaaccctcacctggttatgggaaatgtcctcgaggtcatagaggtttgcatacaattattttacaatggcatcatcaatatagccatccacaaagagagtcaactcctcatcccaatggcgtttctcta

SEQ ID NO: 98161 - DNA, 260 bp, Glycine max
tttagattttgaattggtaccgcaacattaagacaaggaaatacaaatatttccatttcgtactatctctacatatactttgtcttctttccctgcaaggagtgatttgacatcgttcgtacctgaaaagagacttcctcatatcattttctagctctcaaaaggacaaatgtgctcatttgagttgctctttttgggtatgggtccggctcgtagccttcacaaacttgcttattgacattacgcaatagtatgtgaaa

SEQ ID NO: 98162 - DNA, 260 bp, Glycine max
gctgcttgattatttttagtaaagtcgataagttgcttataaggacccaccatgtgggagcagagatttactttggtaaaattggattaataattttgaacaacttaagataaatattatagaaaatagtgatattatatttttttgaagcttttgcagcaaggattgaagcggatgagaatcaacataaacctgttttaacaattgctaaatctatataactacaatctagtaataaattacttcaataatttgaaata

SEQ ID NO: 98163 - DNA, 240 bp, Glycine max
agcttcctcggggccattcctgcgaaggcaaacatttggaaagttagtttttaccaagaaatgctacccttaaaacaaaaatggcatacaactccctccaataaatacaaacatcaatgtaaatttagagcaagcttatgcgcatacttcttcacgaacgttcacttacacaagacattcttataactaagaaaaatgcacccatatacaatcaaggcaccttcgttacctagattattt

SEQ ID NO: 98164 - DNA, 270 bp, Glycine max
ttgcggatttggtcttcgccagtgaaaggatcgaagtggatctgaaaagaggcaaatttaatcatcctgcttagacgaatgagaaaactggggcaaataaagagggtgaggatgagggagaaacccatgctgtgactgccattcctatacggccaagtttcccaccaaacccaacaatgtcattactcagtcaataacaaaccacctccttacccaccacccagttatccacaaaggccatccctaaatctaccacaaagtctgtctacc

SEQ ID NO: 98165 - DNA, 239 bp, Glycine max
agcttgcttttgtccatacatggatttaggcaatttgcaaactgacttgtttgggtatcccaacttagtttttagggtgcaccatataaattgttttgtcaatgtcaccattgagaaatgttgtcctgacatccatctgatgaagctcaagatcaaaatgtgcaactagagccatgattgtcctaattagtttttcatataaattggagaaaaagtctctttaaagtcaatcccttcct

SEQ ID NO: 98166 - DNA, 266 bp, Glycine max
ttttggcgccattgtcggggttacttctttctattttgaaagttcagttcactactttaagtgtgtctttatcattctttggttatttatgaatatttgctgccgattcatacttgttttcttcccggataggataaccgctattgttgccagtgttttgtgtgccttgatctcctgcatgttatacagctcatctggaagaattagcacaattcttttattcaacatcatggagatgattatttatatttcaccgataacttgtg

SEQ ID NO: 98167 - DNA, 240 bp, Glycine max
agcttgcttttacaatgtgaatgatgcgttatggttaaatatgtatatgtatttattcatgtatttctatgttgtttagtgaatggatatcgcgaaaaattgaccaccattttcataatcaaattaattgagctttcacttaaaatcgaaatgtcgcatttagagttagtgatatcatagtaatgtggtgggtcgttagacaaatagtcaaaattattaaactaaatagctgggataagt

SEQ ID NO: 98168 - DNA, 253 bp, Glycine max
tagaaaaatcctttttgaaattcttgttaaacccaacatgtcctataaagcttttgatgcctttgacatttgttggtagaggcaatttttcaatgacttccaccttggctttgtcaacctcaatgccatgaatagatattttgtggcccaatacaatgcctttagttcaccataaagtggcatttctccaaattgagaacaatatttgtttcaacacaatgcttcaatacaatgtcaagaattgaaagacata

SEQ ID NO: 98169 - DNA, 245 bp, Glycine max
agctttgatttgcggagaaagcgagagagatgcacgagaccaataaagagcacgagtgaataattaagcttttttttatatatattagactgaatggatttcaaggacaatttttgtggaaaaaccgtctttgaacatttgcatttaatgacagtcatgtaaaaaccttctttgaacacttactttcaaagacgttttttataccaccgtcatcatttttttcttttatttacaaatttgtcact

SEQ ID NO: 98170 - DNA, 273 bp, Glycine max
ttagttcactgctttaagtattgcacgatatgtttccagaggaaaacatgtttcctaaaagttactatcagatgaagaagatactgtgttcgatgggtatggattatcataagattcatgcttgctcgaatgattgcatattgtacagacatgaatttgaagaaatgtccaaatgccctatgtgtggggtatcatggtacaaagtcaacgatgatgaagagtgtattattgatgaaaactcaatgaagggccccccaatgaaggtgttgtggc

SEQ ID NO: 98171 - DNA, 236 bp, Glycine max
ttgctttaactcggatgtccgattcaggcgcataatatatcgggacactggatattgaataacagaagctctcgagaaattcgaatggccataacttttcacacggatgtccgattcaggcgcataatatgacgagacgctcgaaattgaacaacggaagctctcgagaaattccaatggtcataacttttgactcggaggaccgattcacgcgcattatatatcgagacgctcga

SEQ ID NO: 98172 - DNA, 264 bp, Glycine max
tgtagcatatgcaaatggcaataacgttttactctgatgttcgattgagtcacgtagtacatcgaaacgctcgaaattgaaaacagaagctctgtgcaaattcaaacgacaatacatttttactcggatgtccgattgagtctcgcaatatatcgagacactcgaaattgagaataaaagctctgaacaaattcaaacgacaataactttttactcggatgtccgattgagtccagtaatatatctagacactctaaattgaga

SEQ ID NO: 98173 - DNA, 233 bp, Glycine max
agctttctctaccagagtggatcgaagctattataacggccgtatatataggaaactgactacccaccaagggtgtctctaacaccccctttaagaaatctaacgttgggcctccaaattagctacataaacactttaggggatgcccatcagaggtaataatccttgatccacaaaaagataggctagaccctaaaactaatactgggtatcatattggatatactgaaagg

SEQ ID NO: 98174 - DNA, 130 bp, Glycine max
ccgggggaatcaagcgaacaaaaagaggcacggaggcaggaaaaccaagaggggcacgacagaaacaccactgcaaaaggtgcagggacacgacaaagcaacaagagacggggagacgcaacaaggccca

SEQ ID NO: 98175 - DNA, 264 bp, Glycine max
tctcagtccggagttactgagggcgtcattaaccctccgtctcccatttgaccacacatgaattaaaaaagggcgggtgccaataaaactgggcagatgacctatgaggccgcaaaggagatcgatgacaagattgttaagtcatttaccattattaattgtaattatgtttgtttattctgagaataccttggacagatatatgtgttctgtacaggattgttatgaggaccacgcgtaacagggattgtttgtaccctatgg

SEQ ID NO: 98176 - DNA, 260 bp, Glycine max
tgtatttaaaaatgttttaaaaatacttttaattaatatttgaatttttattcctttattaatatatatgtgaggggtatagggtgtcacaagaccacaatagaatatataagtgggagacaaccatcaccctttgagctaacttttggggttgagttaggtccaaattcacattttaaggactaaaaacataaatcataaaaaagtttagggactaaaaaaatagtaaactctagatctaaatatgcacaagtaatcaa

SEQ ID NO: 98177 - DNA, 231 bp, Glycine max
tcacgcttgatcactcattttattttaacaaaaccggaaaaccctcttttaaaactctattaaagggtagacagcagaactgaaaccctgtaatcctatgacttggccagctgaaaatgacgctataccgttcttctggcccgccctagccgtcagagtaaaaaaaatttatattgcactggtcatactagtctaaacacctacacctccacgaggactaatagtaagagc

SEQ ID NO: 98178 - DNA, 271 bp, Glycine max
tgtagcagaagacgttcttttatcgggtcaaaaagttagtgctgatatgggatacttagctcctgaatacatcaccacaggacactttactgagaaaagtgacatatatgcattcggagtaatcattcttcaagttctatctatcgatacgacaataggcggttcaatacggacaacagttgagtctttcagattagatgaatctgttgactcagatcttaagggaagatattctaaatctgaagcatcaacactttcaaagcttgcaata

SEQ ID NO: 98179 - DNA, 239 bp, Glycine max
agcttcctttcggtttctaattatatgggccattagatctatcatatgctgacaatagccgagaagtccgtggatctcctcgggagcagagtaggtgtctgccatcactttggccttagctagcaatcggggaagttcatgactcccgttcaaggtaagagcaaatcggtccatccatattgttacctcttgatgtaacgagtcgatcacccttcctctagcctccttttccgcgtaca

SEQ ID NO: 98180 - DNA, 270 bp, Glycine max
taaagatacagacactagcattctatttatagctgcctaaagataattattccaattatgtgcactacgaaaatgatgaaatccaccaaagcagtgattagaaactagtggcgctaaagctcaagggtgtattggaacttactgatgaaagcttgcttgtggagcttttatggtggctggatctttgagcttcaatgaggtcctttaatggtgattttccacaatggagatgcagcggaagacaaaggagaagaggtgagaggaggcacc

SEQ ID NO: 98181 - DNA, 245 bp, Glycine max
agcttttcttttcacccatatctggcctttacattaaccacacttaacaccttcgacaacaatggtagcgtttagctctactgagctttaaaagattggctaagattttgttaaaacataagcacttagacaatgaaagaaagctggagttgctgcacatgatggccaacgttatgtcaaggaataagatcgggctgcacaatgtacaaggcaagataaaatggcaaatgaagaattgaagttgc

SEQ ID NO: 98182 - DNA, 273 bp, Glycine max
tggactcatgagtgttaagttgtggtctaagaggattggtccttttgttgttactaatgtttttccttatggtacagttgatatcaaaagcgactcctcaaacaaaagcttcaaggtcaatggacaccgacttaagccattcctcacaaacccttctttagtgaacgtagtggtggaagagacttccttactccaccctactcttcctcttccatgacttggggagtttttctatccctatctccttctttacttttattacatttttccgac

SEQ ID NO: 98183 - DNA, 238 bp, Glycine max
agcttgaaaggggaaaatggaagaactagctttcatctcctttatattttgaataccaaacctagcagaatggctataaagactaaaatacattaaataaaattagaagttatgtgtgcattgatattcattttcaaaaaataaaaaatggcgcaatatggaatagaaaattgaaaaagtgcaagctaagagaaaaaggttcatttacatcacattttaatggttttaattatattag

SEQ ID NO: 98184 - DNA, 253 bp, Glycine max
tgactttggtttatacatgattgatacatgatttgggacttgtaggacttgatttgggcaagattggatgagggaaagtgtgattttcgaaatctgcacttatgcagaattttgctgtcaaataggtgcaacaggattttggcttgtgcagaaaaatgcttgtgtgtggttggctgtggaaagagtagtgcagaatgagttctggatgttttctagtagatcccaacgtcacaatgtaggcttatgcactgta

SEQ ID NO: 98185 - DNA, 235 bp, Glycine max
agcttgccgcccagctcccccacgcgagcctgggtgcttcctccacaagcaacatccttttggacgaatcttctggagggcccaagcgggcctgcctgctatttgcacccttttttttactgaatgcacccccatctattacttaggtaatccttttctccggaacattaccactctttgcgaatctctatcgaaccttattttccttccgcaacgctatgaatccttacggatc

SEQ ID NO: 98186 - DNA, 261 bp, Glycine max
ttaatgaaatgggcttcaccacagaacggatcagaatgggtctaaaaagacgcaaatctgatcatcatgctttgataaatgcacaaaaaaaaatctagggcaaatgaagagggtgagaatgaaggaaaggaccatgctgagactgccattcctatacacccaagtttcccaccagcccaacaatgacattactcaaccaataaacgaaccttctgcttacccaccgtccacttatccacaaaggacctccctagaatcaac

SEQ ID NO: 98187 - DNA, 241 bp, Glycine max
agcttgcttctctctcgcatccccccaatatattatagtaacaatgcggatctaagaaaaattaataatagcaataataatttcagacaaaatacatagtaaaacatagcacaccgcacacaaaaaaaatcgttggctaaattaaattaaattttgtaaaaactaagtagaaagagagaaggaaaacaatgttttttttaagaaaactaataaaaaaaaacacctctttttgtcttgaagc

SEQ ID NO: 98188 - DNA, 267 bp, Glycine max
tcactacttccgtgtattcttcccaaactctcctcattctctccatcctttattcattgtcataactcattcttctcattcgatcaccaagtttagtcatctccaccttgagccttgcggtttttggagatggtggagtagcatctccacttttataagccatacctacaaggaaagttagtgcacaagtaaaaaatagaataggacctgaccactcaacttagtgtttcactcaagttcactcttgcatcactctttcaagacttt

SEQ ID NO: 98189 - DNA, 247 bp, Glycine max
attggacggaggcaggttactttccgttcccacaagggggcctcagaaatacaacgagacaccggtgaactaaagagatcgccgcttggcattccacagtcttggacaaagggaagtattgatgaaggaacgaggcgacaaccgtctacccaggactacgagacagtgaccttagagagagaggagccacctggtggattctcctgccaatgagaaagagaaaaggctgagcctaatggcatcatct

SEQ ID NO: 98190 - DNA, 266 bp, Glycine max
tcaccttttggtccttctcataaacgctgcatcagaaaacatgctctattttcatctcccactccaagaaggcctccggatcattcattcctttaaatggaggaatgttgaatttaataccatcaattcggtcttgtctaggaacaccatcattccctcttctcctcctttattcttcattatgatctctcttctccattagatccaacctctaatggatcgcatcatctcgtggattcattaacctctccaaatgtttcatctga

SEQ ID NO: 98191 - DNA, 242 bp, Glycine max
ttttttttactttaacactagaatctttctccaatcacaccaaaccctaaccccaaaaatgcgtggaccacaacgacaaagacaaagaccaaaggtcgcacccacacgttgtctaaacaaaccctccacgatagcaacaacgaaccaaatcgttaaccctaatcgccttctgtggagaactttgatggaaacctagtaagcaatagagaaacatgtttatcttctgaagcaatgttgttacg

SEQ ID NO: 98192 - DNA, 265 bp, Glycine max
tcatgatgaatcaagattgattcaaagagttttgatgataacaaagatgatgacaaaaagctcaaaagtcaagaacacttcatgttaacaaagatgatgacttcaagaatcaaagaatgagttcaagattgaatcaagaatcaagtttaaagtttcaagatttaagttccgagaatcaagtttaaagtttcaagattcaagttccaagaatcaagatcaagattcaagactcaagaatcaagagaagattaaatcaagataagtt

SEQ ID NO: 98193 - DNA, 262 bp, Glycine max
ttattcatgacaaagtaaatcaaagatattcaagatggatgatcaagacagtctctagagtcttagcaatagaatataaataggaagggaattccaattgaagtagcaaaaggtttggccaagaaatttaagttaaaaagtctttttcaagagatttactctctggtaatcgattacgacagctattaaaatttgaattcaaaatttgcattgagtaatcgattacacatatatggtaatcgattaccagcaattattgaac

SEQ ID NO: 98194 - DNA, 238 bp, Glycine max
agcttgtctttggtttagacatgattgatacatgatttgggacttgtaggattcgatttgggcaaaattggatgagggaaagagtggttttcgaaatctgcactttatgcagaattttgctgttgaaatgtgcaacagaattttgcataagtgcagaaaaatgttatgtatttgctggttgtggaaagagtagtacataatgagttctggacgttttctagtagatcccaacggtcaa

SEQ ID NO: 98195 - DNA, 187 bp, Glycine max
tcaagaaaaagattgtctcttttaattcctcatttccataatggaattctataaatagacctccaatctataatggagagggttaccactactggaaaacccgaatgcagaattttatcgaggcaatagatctaaatatatgggaagccatttaaatagggcatttatatacccgtcatagtagtaa

SEQ ID NO: 98196 - DNA, 230 bp, Glycine max
agcttgtttttcttggcaattgctttaaaactagtcacttaaaaaagttgtgacttttgaaaaaatcttcagaaacaagtcacttgaagaattgtgacttttggaaatgtatttttcgaaatcagtccctgggaatcgattacccatcaaggtgtaatcaattacacatcaacagatgtgactcgccttttgaattttgaaaattaaaacgtttaaaacctctggtaatc

SEQ ID NO: 98197 - DNA, 248 bp, Glycine max
tcaaaataaaaaacttaccttttgaagatcaaagaacgacgaataatgaacgaaaaatggcaaataacgtccacggaatcgatcacgcaaacgtctcgaaagcattacagaagcaactcagcttggattttctccttctttcttcttctcttcactaatttcagtgaaaaactcagtgcaaaaaatgctgaacgccttaagcttaacctgcctcccctattatgggccgaaaaaaaaagggttgctgc

SEQ ID NO: 98198 - DNA, 92 bp, Glycine max
agctttcttttttttttccagggggggaaccatgaggacttcgtacttggagaccttaaaatagctcctcgaaatccggttaactttgaaga

SEQ ID NO: 98199 - DNA, 269 bp, Glycine max
cttaaaatctcaacctagcccgacattgtctattttcattggacacgaaatggcggttgaagaacaaaagagcgcaaatgacgattaaagcaacagaggcattccaggaatggcagtatctccactattctggagggggaagccctaaacaaatctaacaatgggcagaaacatgcttgctaaatgctggtggcccaaatggaacatcctttggtggacctaaccatcatctgcagaaccccccgaaacaaatgttgacttatgtacta

SEQ ID NO: 98200 - DNA, 242 bp, Glycine max
agctttataatgaactttctttgcattgctactagcatcaataatagtaacaaacttctcttccaacatagcaagatcataatccaaaacaccgaggtgaaattggacttgctcattttagtcagagaagttaagcccattaaaattggcacagatgatacataagaatccaatgaattcaaaacatgtattacataataaaattcacacaagtgttttgagacataaaatacatgtcatac

SEQ ID NO: 98201 - DNA, 272 bp, Glycine max
tagcaaatggacctgggtgttgcccagtttcatcatatcttccgtaatactcatcacctctatcatatctaataattttcacatttatgtctaattgcccatttatttcattgtagtaaatttctaaggcatccattgcctaagaaatcttgggcagtaagtagacataaccgtaacatgaataatcatcaataatggtgataaagtatctttcctttctgaaagaactaacatcaaaaggtccacaaatatcagtatgcacaatttcaaga

SEQ ID NO: 98202 - DNA, 248 bp, Glycine max
tgtctgctagcttataaagggcccctcctatcccaaagaaataagcaaagccccattctcatccaatggaatagttcctcccaccattcacaataaataaacaccatctacattcaaccaaaagaataataaaactaaacgaaacaattacgtcattaggagtaggcaaaagttggtaggataataaagaataaacaaatcaatagggagagaagtgagagggagtgccctacaccataatctgcagg

SEQ ID NO: 98203 - DNA, 265 bp, Glycine max
tatgacattattttaagtttaattaaaaagtcaaatatcctaattatgatgattatcaaatgaaaaaaatttaatatagttttatttgtcctaatattactactcttgttaattttacttgtcacataccatatcaaaacttataccataactaagaaagcttacgacaaaaggaaagtcatgcatttattaaaccgccggatggcaaccatactgctgagtctaaagtataagtatcaatacaacgggtcattagaccatgggt

SEQ ID NO: 98204 - DNA, 236 bp, Glycine max
agcttttatctaaaaggacacaaaacataattgtcgaaagcatcaattagatgcattatgcaatggatttgtataattgtactgatatgtttattattttgttagcgcctaaaaacatgctttcttgtgataataaatatagttttattatctttttagttccttaacatgtagtatgtaaccttggaatttgctgcaatgacacccttgttgaaatatgtagttccaatcaattt

SEQ ID NO: 98205 - DNA, 256 bp, Glycine max
  unsure (1)..(256): unsure at all n locations
tgtatcttttatgatgaagcagccatgaagtatttttcactaggtgaggctagctgcataaatcaaaagacaccattggtttctatcttcaactaaaccctttgccagtccatttagataaaatataaacataaaaaaaatccaggttttcatgcctactctagtcatgatgatgaggttttgggtaatgaaacacaaataactgttaaattttttgagagaactaaataagaaaaatctaacaataaggngaaaa

SEQ ID NO: 98206 - DNA, 236 bp, Glycine max
agcttgaacgaatgtaaaagttatcaatgaaaactcacaaattcaagtgagattatccaaacttctcaactctctgtcagcttaaagcttctaggactttaacacctagctggcagttgtatttggctgtagtgttttaatacaggttttaatacaggctttacacatatacatgtatatataacaagtagtaacaatgtgctttacctggacttgatataatgaaacaacttcca

SEQ ID NO: 98207 - DNA, 266 bp, Glycine max
tcactagatgcaatttcgctcccgccctccctatcattgccttctcttcctcctttttttgtgataaccaaatcaaaacgcacactgcgttctcctttgcctcctttgccatcattgtctctttctccagggctaccaccagcgccttcaccgctccataggaatgcatggtagccgccgatgaaggaggtggaaggcatgaaaggagttgttgaagaggatgggaaagaagattctgtcgaggagagcaatgactctagggtttg

SEQ ID NO: 98208 - DNA, 243 bp, Glycine max
gcatgttaacttttaacatccggtcatggaaagacttggcaactgccttcattaagcattaccaatacaacatggatatggctcctgatcggaaccaacttcagagcatgaccaagcgagaacatgagtccattaaagaatatgctcaaaggtggagagacctagcagcccaagtcgtcccgcctatgactgaaagggaaatgatcacgattatggtagatacgttgcccacgttctactacg

SEQ ID NO: 98209 - DNA, 267 bp, Glycine max
tgtacttggtttatacatgattgatacatgatttgggtcttgtaggattcaatttgggcaaaattggatgaaggtaagagtggttttcgaaatctgcactttatgcaaaattttgttgttgaaatgtgcagcagaattttgtatatgtgcagaaaaatgcttgtgtatggctggttgtggaaagggtagtacatatggggttctcgacattttctagcagatcccaacggtcaaaatgtagacttatgtactagagacgtccagtaa

SEQ ID NO: 98210 - DNA, 267 bp, Glycine max
tcaagaaaaggcccaaactcccttccaaaatctgatttcaggcttaaataggtggctttgttcatgctcgtgcgcttagcgcaattctgaactgcttagcgcgaattagtgaattttggcttagcgcaggcttttctcgctcagtgaatggactaaagcggtgcgcttagcgggatggcccttcgctcagcacacctgcacagctcatgcttattccaaattcttcctcgcgctcagccgaggagtgttggcttagtgagagggtga

SEQ ID NO: 98211 - DNA, 263 bp, Glycine max
agaggccacctgcctttttgcttacttttaggggcaactgtcaagtctttttatacattgccgatttgatggcctgatatgaactgcaaatactgaaccttctagaatgaggcatacactattactcaaagctcttcggcttctctcaaataatgaccactgctcactgtcggttagagcaactgctcttgatttttcgacctacgagtaacttgatctaactgtgtaattgacatttcgcactcctcttcgtctatctgcat

SEQ ID NO: 98212 - DNA, 265 bp, Glycine max
tttggtaaaacttgatgccctggtcaacataattactgagcttgccctagaatataaatccgcatctgcacctgagactgtcgcaacatattagggcctatatacttgtgctgatcaccatacaaagcactatacgactatgcttcaatctggactcaatgaccaaccagaagcctatgatgcaaacattgataatgaaccaccacggcaccaagaccaacaacttcagattcactatgatactttcaagcacacagatgtaatc

SEQ ID NO: 98213 - DNA, 240 bp, Glycine max
ggcatgcttcctttactttttgaaaaagataaggttgaatactcacaaattcaagagagcattacccatactcttcaactctctgtcagcttaaaacttctaggacctttacacctagctggcagtcgtatttggctgtagtgttctaatacaggttttaatacaggctttacacatatacaagtatatataacaagtagtaacaatgtgctttacctggacttgatataatgaaacagc

SEQ ID NO: 98214 - DNA, 309 bp, Glycine max
  unsure (1)..(309): unsure at all n locations
gacactatantaatactacaagcttcactagtatgcaatttttgctcttctgccactcccataccattagctcattcttcttccatccttttttattgatgactaacacaaattcataatactcatcactgtcgattctccctattgaccttccttatgcccatcatctgttctcatttctacccagggcatacacaccaagtcgcctttcaccgtctaccataatgaatgccatggtcatcccgcccgtatgcaaagtacgtgtgaaggccatgtaaaggtagattgtttgcaataagtatgggtaaa

SEQ ID NO: 98215 - DNA, 363 bp, Glycine max
taagtcaccgccgctgcagctagataaatgagtataataagactatttttaatgagcggacataaacatagcccagttggactaaataccataaatgttgatggtgcttatttcataaccgaacgcctaattgttagatcataacgaaagatatatatctgcttataattcataaatttttaggatacaaaatcttattgcatgttcttagatgtccgcgcctatttttttcaatacaaaacagatttctaaaatcgggtttaattatgccaatatgttctaattcactacgactttcattttacatgattatcgaagtgccttattaggttataagagaacgcattgtgtgagtgacacatg

SEQ ID NO: 98216 - DNA, 367 bp, Glycine max
  unsure (1)..(367): unsure at all n locations
tcaccttctcgctaaaccaatctgttgtcttagcgagcgtcccctaagcgcaacactcatgggctaagcgcgaggaagactctggaagaagatgagctgtacaggtttgctaagtgcaccacttcatctcactaagtgcaccgctttagttcatccgctaagcgagaaaggcacgcactaagccgaaattcactaatgtgcggtaagcggtccataagtgcgctaagcgcacgagcacaaacaaggccacctatttaagcctgaaatcatattttanaagagagtttggacttggattcagagctctgcatgtctaggggttctagagagagaaagggccaagttctagagagttttgagagatttt

SEQ ID NO: 98217 - DNA, 263 bp, Glycine max
ttggtctccacaaccagcatggctacaactgttgtgctataagttgaatttacttgcttgtagatcgagctccctcataggttatattcatacatgcttgatgctcatcatatgatgaatttgctgacattgtgggtctctgtttgtttaaaccctagatttactaagttgaaaatagaaattccttttcgttgctcattgtgcgtgtttttttatacaatgatgatgtatgcatgcttaaacagttactaatctttattaac

SEQ ID NO: 98218 - DNA, 349 bp, Glycine max
  unsure (1)..(349): unsure at all n locations
aacttacaagtactagaaagaacaatttctcatctttgtcttaaaagacacaaactcataaggaccgatgtgatcttcaagcctaattcaataatttcccatgctgctctaactgcaatagttccgntaagcaaaagaaaagtccaaaataaattaattcttttaaaggaaaaatatgttaggttagaaaaaggatgaggtctactagggtttagtgatcttacggcttttatgcggcctacacgtagccaggttagaacctttgattccacgagctaaatctaagngnacacctccactaacaaccacatcaaagcaaccacatttggtcataagatccattgtttcc

SEQ ID NO: 98219 - DNA, 435 bp, Glycine max
gcttgttcgcacatcattcgcatgcatgatatttactttacatggttgaagtataggagaccttctatcctataacgcaacgtggcggacaaaagtggacaattaacttgaatggccattattgtcaatgcggaaagtattatgcgcttcactatccatgttcacacattattgcagcttgtagttacgcgatcatgaactactaccaatatataaatgttgtttacacaaatgagcacatcttaaaagcttactccgcacaatggtggcctcttgggaatgaagcgactattcatccttctaatgacacatggacacttatccctgacccaactacaattcgtgcgagaggtctgtcaaaatcaacaaagataacgaatgagatggattggatcgaatcatctaaataccgacaaaaatgtagtagatgtcgag

SEQ ID NO: 98220 - DNA, 423 bp, Glycine max
  unsure (1)..(423): unsure at all n locations
atagattggcagatagtcaagncgattatatcttattgaaattgatagctactcgtgaaaaagatggtcgtgtatacaatatctcaaatgttcctaaagttgttgcacttatttttggtgattttaatccaagctcaaaaagagatattattgttgaaacttaaaatggagaactacaaagaatccatgaattgcactctagctatctaggcctacagtaccctctactcttcccttatggtgaagaaggatatagagctgacatacttcaccgttctacatcagccaacaaaaaatgatagagaaattgtntgacaatgagacagtggttcgcttataggcttcattccaggtcaaatgaagcacanactttattgcattctangaaactatttcaacaattcattggtgaaggatatacca

SEQ ID NO: 98221 - DNA, 472 bp, Glycine max
  unsure (1)..(472): unsure at all n locations
agctattgaaacataagtgagtatgnctatttattatgtgagttnnggnnaacttaaaacaagcaactttaaaagaagctattttatgaaaagcagataggatttgcttattaaaaaagcaggaaattgtttattttaagtaaaaacagtttatacaaacacattataaaatcataaaactgcttattttatttaaaaaagaatacttattttaaaaaaattagcttaaacaaactagcccttaatctattctcattgtactctcctctaaagaatgaccaacttcatatttaatttctttcttttggattaaattcttttagaacaattatgcgtatctttttacgaccataaagaatgtcttttagtatatatatttagtattcaacatgactaattatacatacagcctttataatttaaacattttcttttagattgtgtggaatatactaccgtctaggctatatat

SEQ ID NO: 98222 - DNA, 424 bp, Glycine max
  unsure (1)..(424): unsure at all n locations
tgatattccaccagaggatatacctggttgttatttttcataaaccaannaaaggatcgcctcatccaatgtacatctaatactatgttactactatataactaatttaatataaattatttttctttttgcaaagattattcgtcttggactatcgttagtttatttggtataattggcaattgctagtttgtttatatacataaatattaaatttattagtagagtggatcgaattccggcacatttttttctttaaaatcatcccatttaccttatatgtctcttacttgatttcgaaattaagagtggaccccactaaattgtttcctttatgccgcttctgaggacctattgaatctgaggagtggtcgtgcgtgttaacttctttggatttggggatgaccatcgcctgggattctac

SEQ ID NO: 98223 - DNA, 412 bp, Glycine max
  unsure (1)..(412): unsure at all n locations
tctgctttcaattntgagcatctcgatatgttacgggacttcttcagtcttccgagtgaaagctattgtcgttcgaatttgctacgagcttcggttttaaagatcgagcgtcttgctatattacgcgactcaatggaacttccgagtgaaaagttattgtcgttagaatttgctacgatcttcgattttaaatttcgagcgtctaattatgttacgagactcaatcagacttccgagtgagaagttattgtcgttcgaatctgctacaagctttcgattctataattcgagcttcacgatatattacgcgactcattcggacttcccagtgaagagttatttgcgttagaatttgctacgatcttcgattttaaatattgagcggctcgatatattacaggactcaatcgga

SEQ ID NO: 98224 - DNA, 467 bp, Glycine max
  unsure (1)..(467): unsure at all n locations
cacctgcagctgcagctgcccttcatataagatcatatttttattgcttacctcttgatatggttgcagtttcaccaagtttattcctcaattgactgtaattctcaataagagctgcctttttactagttaccttgattacaaatataatagaggtttacatttctatacatatagtgacacatatatttttgcctaaggattcaagcaaaagctgtacacatatatttttgcatctttgataagcattgctgaaagaagaaaacattcttcttcgtaccaggaaacaataactctaatctaaacaacaaagttattcaaaaaaataggaaacaaaaaagctntacactaaggcatgtggcatctcaacacacacacacactacatatgtatgtggtaatcataatattatatcatttaaaattaaatcaagttgttacagataaaagaatgcaaattgtttaaca

SEQ ID NO: 98225 - DNA, 287 bp, Glycine max
  unsure (1)..(287): unsure at all n locations
gctcaaactgagatagttctactacaacaatagctatttaaaaagacacttttctattgatgtgtcacacatgattggatgatagtataaaaactatgaaagtgagtcaaagcgtaactcgaaaagcgctatccgatcctcgacaggaatnnnccctatggctacacgcgtatagtattnttctagtcaccaagacaatgactcattgctttgactgcgcatggtttcttgagagagaatggtccgcgctctaaacagttttaaatggtttggtntgtttgcaatgt

SEQ ID NO: 98226 - DNA, 429 bp, Glycine max
  unsure (1)..(429): unsure at all n locations
agctngcttctatagtgaatattgggttattgcgtgttnttctcgctcagcagatggactgaagcggtgcgcttagcangatgacccttcactcagcgagcaagcacagctgatctttcttccagattcttcctcgcgcttagccgaggaatgttgcgctcagcggatggctcgctaagccatcagattggtttagcgagagggtgaaaatcagcacttcacaaacttgcctaattaacctgaaattaagagaaaatgattattaaacacacaaaacagaattactaagtatttattacctatctttaactaanagaacttataacactacaaaataaccataaattggaggagatngatacaatttacacaagttttatacacaaaagttagtcgtattcaccgactaacacttgccgatcaagaaac

SEQ ID NO: 98227 - DNA, 438 bp, Glycine max
  unsure (1)..(438): unsure at all n locations
atgaacttacaagtactagaaagaaaaaatttcatgaactcttgttgaaaagacacaaacttataaggaccaatttcatatttaagcctaaattatttatttcatatcctttaatttatccaaatataccgctaagcaaaagaaaagtccaaaataaattaatttttttaaaggaaaaatatgttaggttagaaaaaggatgaggtctactagggtttagtgatcttatggtttttatgcggcctacacgtagccatgttagaacctttgattccatggagctttcttctaggtgttacacctccactaacaaccacatcaaagcaaccaaatatggtgataagatcctttgtttccacgcttagccatgcttgtgatgtgccacttaatcaacttcaagtgccttgttcaaagggagatgctatngcgatcaaacta

SEQ ID NO: 98228 - DNA, 459 bp, Glycine max
  unsure (1)..(459): unsure at all n locations
agcttagaacaatatactngtccttcattttattgtctttgggcttggcgaccacgatcaacanagtactttcgacacctactgtatgttgatttcaccaacgttgttatcggtatgttgcgacaatccttcaaaaccttatttatacattcggagaggttgtntgtcatgtgaccatatcgacgtccttctctatcataagccatggtccatttttcctttgaaatgcgattaatccacgttgctatggctggactcagttggcgaaatttttctaaattttgatcaaaaatatgcttgcaaggagtatagcctgcatgaaattagctagcaacaacaattttaagtatatgtcaaacttaaattaaggtgagcatgatcaacgaaatgttacccaatntcttcaacatttaatttttgttggcatattgaatttcgattgaattgctcctatgtgtc

SEQ ID NO: 98229 - DNA, 437 bp, Glycine max
  unsure (1)..(437): unsure at all n locations
taataagtccatctatggattgaaacaagcctctcgccagttgtatttaaaatttcatgaggtcatttcttcattcagctntgaagagaatgtcatgaaacactgtatataccagaaggtcagtgggagtaagatttgtttccttgtattatacgtagataatattctacttgcggctaatgaaaagggtatgttatatgaggtgaaacaatttctctcaaagaattttgatatgaaggatataggagaggcatcttatgtcataggcataaagatccatagagaaagatctcgaggcattttaggcttgtctcaagaaacttataacaacaaagttttagagagaattaatatgaaaagttgttcaccaagtgtagctcccattgtgaaaggtgataaacttgatttgggccaatccccaaaaaatgatattgagc

SEQ ID NO: 98230 - DNA, 455 bp, Glycine max
  unsure (1)..(455): unsure at all n locations
agctngtntgagtactggaaaagattttatattttgtgtgctagctgtcctcaccaccagatttctgagcaactccttcttcaatatttctatgagggacttatcaacatggagaggagtatgattgatgctgccagcggtggagctcttgctgatatgatccctgttgaggctaagaatttgattgagaagatggcttctaactcctaacaattagtacaagacatgatgctattgtgcttagaggagttcatgaggtggccaccaattcatcttcatctactggaaataaaaagctagatgccttggtccacctagtaactcagcttgccatgaatataaaatctacaccttttgcaagagtctgtggtctatgtgcttctgcagatcaccatacagaactctgttcttctttatgcaatttatactcaatgagcaacttgaatcttatgcta

SEQ ID NO: 98231 - DNA, 432 bp, Glycine max
cgaaggtgtgtaacccacccttttcatagtagaatattggttatgtgtctaccatcacgattaccatctccctttccatcattgggggtgccacttgggctgtcagatccctccacctttgggtgtattctttgaaagattcatgcccctttttgcacatgttctgtagttgcatcctatctggaaccatcagaattgtactgatactgcctaacgaaggcaaccattaggtccttccaagaatggacttgggaaggttccaagttagtgtaccaggtagcaactacccctataagactttcttggaagaaatgtatcaacaactcctcattttttgtgtatacccccatcttccgacaatacatctttagacagatcttgtggcaagtagtccccttgtacttgtcaaggcccggcacctcgaacttggga

SEQ ID NO: 98232 - DNA, 449 bp, Glycine max
agcttgagattgttggatgtgtcatattgttacatgaaacatagtccttttgaagtgattggaagactcccacaattagaagagctgtgacttgctgatcatagatcaaaatgggatttctacaatgaacatgctgctgaattcttccaagagtttagagatccccaagcattgcataggtatcacatacaattaagaaacatgtttgctggttttcaagaggagttatttaatcgtcacagaaccttatttcttagttatgtggatctatctaatgcagcatttaatgatttggccaacaaggcagaggttttgtgtctatcaaatattgagggaggtgcaaaatatattctcccccacatttttcatataaaagagggatgagtcatttgatcgagctttgatacgtgactctgataaatagaatgtctgatgacactattcttcat

SEQ ID NO: 98233 - DNA, 424 bp, Glycine max
  unsure (1)..(424): unsure at all n locations
ctcttagaaaaactctnttctctctgtttctctctattgttattcattnttcttgcacaaattgtgttgctcttccattggtgatgatcatgaaaggctaaaaacctaatcagtccaaggatctagtccaagcaagaaggaatttaagttctggtttagtatttcaaatcctgtgtgaatattcatcttcttcttcaatcctatttttcattttcatgattatgagggtgcttaagattggaactgaattaggatatggattcatttcctaatttcaaatttaatcacaaattgattggatgatgtttcaatctaatttgatatctcaatgaacttagggattaattccattgaactatctctaatgacattgactcaactttcacaatatgatcatcgcttgtgccactatgataatttgaat

SEQ ID NO: 98234 - DNA, 431 bp, Glycine max
  unsure (1)..(431): unsure at all n locations
agctntaaccgtatcggcgctcactgtctttatatttgggagccaatccaatccttgtgtgcggactctcagccacttatgatagccaccgatgatcccattactgcttcccctaagctctctgtcctttcttcacgccgcatcccatgccttgcanactccttggagtaccctcgcgttgtggtcactaaaaccccatgcgatgaaaggcgtgatgctttcgtctaatggcgctcctctcatggggtagccaagctgtcttatggcgagaacgggattataattaatacaaccccttgttcccatcaagggaacatttggacatcctttgcatgaagatagaatcttgattctttctttcttctagcgagggaaccaaataacagacgcctcctatgctaaccaagagttgtcacaaatcgcctttcttt

SEQ ID NO: 98235 - DNA, 395 bp, Glycine max
  unsure (1)..(395): unsure at all n locations
aactagctcatgctgatatgatgaatcagattgttcttgtggtttgatgataacaaagatgatgacgaagagcccatgagaatgatttcaagattgagtcaagaacaattcatgaatcatgagaaagattcaagacacgtttcaagttttcaagaatcaagaatcaagaatcaagaataatcaagatcaagattcaagactcgagattcaagaatcaagaaaaggctcaatccagataagtacaaaaaagtttttcaaaacattgagtagcacatgaagttttaacaaaagcttttaccacagagttnttactctctggtaatcgattaccagtggcaaggtttggtgtcaaanagctttcaactgaatgtacaacttcccatcaatttcaaatg

SEQ ID NO: 98236 - DNA, 472 bp, Glycine max
agctatacaatgccaaaataaactctatgattaaaagacaataaacaagatatccaacatcatcatcatgaccttgtataatctcacctgcaaggatgacattcggtccaaatacaaacatgacaaatctatggagagtaagatacatcttacatacatttaaatctcaaagaaagcatattgagaaaaaaagatacattataaaataattattatcacaaacacaacatccacttctaataatgaccaaaaccacatttcttttaaataagtacaaataataatataaaagatacaaatcttgcgtagacacatcaccgcattacatgaactaatatgcgtaacatatataactaaaatactagctcacaatcatgaccctcatgttttgaaatacaaagtaatcgtgtgtgtgcctatatatatatacatttatatatatatatatacttatatatatataaatatatat

SEQ ID NO: 98237 - DNA, 431 bp, Glycine max
tccatcagaggttgagctaagcgcgctctgctgcgctgatctcaactctctcactgcctttgagtttttgtagttaggctaagcgtgcttgtgcactaagcctatgggtcattttggtgaggctgagctaagcgcgccctactgcattaagcctaagtcctctgctatttcaaaaattgtagacttaagctaagcccagcatgttgcgctaagcctaatctgtagaaaaatattttttgtgtctttagctaagcacgagtctgctgcgcttagcccatgagtaaaattttataaggcgcgctaagcccagcctactgcgctaagcgcccagttcagtttttagttttattattctgtttttgttgaaactaacctgtgctaatactttgttgtttgatcttatattttcagatggcatctaagaaaataaa

SEQ ID NO: 98238 - DNA, 384 bp, Glycine max
  unsure (1)..(384): unsure at all n locations
aagtttcacgtntgaaatcttgctgaaagaattgcccacttntaatatctngnctcaagtaggattgagtctgggtaaggagctagtttcttataactaggcaaattaagttttgaattctcgatgagaaaggtgccccaaatttaatgtctgacagaaaaggttacaatgttttgaatataggtttgggaaccaaaaaaaggattttttttttcatttgttctcgatacataagatatataagaggacacctgtcttgttttactgtgagtttcaatttttttttctttgaaatgctgagtttcaagatgttgtgattgcggttggtgaatggtttacgctattacagtgtgaaatggagtttactgctatgatttgtttaat

SEQ ID NO: 98239 - DNA, 393 bp, Glycine max
cttgtggaagctactagcccctgttgtagatattaactacttatcgagatcctcattaagacaggctcagcttaaacagcttacgtaagtttagactaatttaacctatacttcgtcctcagatcccttttgttggactaggcttagattaaacaacattatcatcatagcatattaagaaactaaaacttaattcgcggatccctcatttaagactaagtttaaatcctgcttctatcaagttctaaggcaacagtacatttcccaatgctaaagtcacctaactaaacatacaaatgggtgatcagaccaagagcatgcacaaatttagcattgtaagaagcattgaacacagaaaacacaatcaattagatattaaagtaattacatcag

SEQ ID NO: 98240 - DNA, 357 bp, Glycine max
  unsure (1)..(357): unsure at all n locations
aaatgacattgaaaatganaatgataaggacacaactgccaagtcacaagaaggagtccattagtacaccataaagtccaatattattgcacggtggagatgggctgacagcacggtggtgagacagaggatcgagacagcgactttgagagagagcatcangccgtcattcgtacgtaaaaacataaggccaccaatcaccagagtacgaagtaaatgttgagatgaggaatatagaggcaggagaacgacgaggtcatttagagagactaagagagatagtaatgactacccttctttatttcttttatataatatatgactaataatttaaaaataaataaatcattaatatag

SEQ ID NO: 98241 - DNA, 379 bp, Glycine max
tctcgacatattatgcacccgaatcggacatcttgtgaaaagcatgacatttgaattttcggagtttcgatgttaatttcgagcgtatcgatatattataaccttgaatcggacctcagtgtgaacagtgatgaccatttgaatttgacgagagcttccgttgttcaatttcgaatatcactgtatgtgatgcgcctaaattggacattcgagttaaatgttatgaccatttgaatttctcaagagctttcgttgttcaattctgagcgtctcgatatgtgatatgccctgatcggacatccgtgtgaaacggtataaccatctgaatttctcaagagcttccgttgttcaatccgagccttccacatatatgcgcccg

SEQ ID NO: 98242 - DNA, 426 bp, Glycine max
  unsure (1)..(426): unsure at all n locations
agctctacactacattgatgtttgtatntatgggaggatgttatatgccatanttgctntaagagtaatgtcccacanaaactaactttccaaatgtttgccttcgcaggaatggcaccgaggaagcttgcctcaaagaggtccaagaaggacaaggcggccgaaggaactagttccgccccggagtacgacagtcaccgctttatgagcgttgtacatcagcagcgcttcgaagccatcaagggatggtcgtttctccgggagcgacgcgtccagctcatggacgacgagtatactgatttccaggaggaaatatggcgccggcggtgggcaccactggttactcccatggccaagtttgatccacaaatagtccttgagttttacgccaatgctcggccaacagaagaaggcgtgcgtgacatg

SEQ ID NO: 98243 - DNA, 327 bp, Glycine max
  unsure (1)..(327): unsure at all n locations
ctcaagagactgagctgcagctggacgcctaagacatatatattgttatctttattgtgatangngaatatgntacatttagtagagctctaattagaaaataatctctcggtttatattaaccacaaataaaccaaaatctgaatgttgttaatgcacaaatttcataaagtttaaagtttcatttagcggaaacttgcttttgtgtagataaggttgtgggcttaaagtcattggaattggaagggatggggaagcttttgaaatttggtatagaaatattcaattagctctcttttactttggcgggtgtttttttccattatg

SEQ ID NO: 98244 - DNA, 455 bp, Glycine max
  unsure (1)..(455): unsure at all n locations
cactactngaaactctaagctggaggcgactctgcaagggtggggagaaggtctgaggccatttgttgtcaccgttggagctctntatttgctgtgatgattcaggcattgtcacatcgtgtgagttacatgtgggttgtggaagaagatggaaccttgacggtgattgttactttccaaggaatgttgaatgttttcagagaccacctcaaatccatgtgctaacagttactactttactactatattacatgatgatgatgtagacaacaacaactactatgcttaattaccactatgccatggcgttatgtataaccgcttgcgaaaagcgctcttgcgcgttgtgcacgaaatatacttgaggtagaatagcacggatttgtgttatgcacacatcaattttgctttttgtttttctacccgtgactttcttttgcttaaatatggtctcc

SEQ ID NO: 98245 - DNA, 436 bp, Glycine max
  unsure (1)..(436): unsure at all n locations
agcttgaaatgcatcattcttttgagtgattaattgtgttcaagtatatctagaataatcatcaactatgacaagtgcataatagcttccaacaagactcataattctagaaggacgaaacaaatccatatgtaataattgtaaaggttgagtagtagaaacaatgtttttggatttgaatgaaactctagtttgttttcccttttggcatgcatcacacagtcaatcctttctgtgctaagaaaacattgattatcatctagtttttgacttaagtctatcatgtaaacattgttgactctaaaccctatatgctttatattagtatcatggttatgttcaatgacatgtttttgagaatcanatgataccagatagcctttatcacataattgactaacactaagcaggctgtgcttaaggcctttcaacaagt

SEQ ID NO: 98246 - DNA, 425 bp, Glycine max
  unsure (1)..(425): unsure at all n locations
actagatgccttggttaacctgatcacccatctggccatgaataaaaaatctgcacctgtcatcaaactctgtggtttatgctcctctgccgaacaccacacaaacctttgcccttgtatgctgcaacttggagcaattgaacagcctgaagcttatgctgcaaacatctacaatagacctccgcaacctcagcagcaaaatcagccacaacagaacaattatgacctctccagcaataggtacaatcccgggtggaggaatcatcccaacctttgatgggcgagtcctttacaacagcaaccacaacaacaacaaccttatttttagaatgctgctggccaaacagaccatatngtctctcaccaatccaacaacaacaacaaccacaacagcagccacatcaacacaaccccgagaaaccaac

SEQ ID NO: 98247 - DNA, 450 bp, Glycine max
  unsure (1)..(450): unsure at all n locations
caagcttgatgcaacatatggagaggttaattattcatctagatgatgcactccatgagaggttggatcaaatggagaatagagatcataatgaagaagaaaggaggagaagagggaatgatggtgttcctagacaaaaccgaattgatggtattaaactcaacattcctccctttaaaggaaagaatgatccggaggcctacttggagtggaagatgaaaatagagcatgttntctcatgcaacaactatgaggaggaccaaaaggtgaagcttgccgccactaagttttccaactatgctcttgtgtggtggaacaagctacaaaaggagagagcaagaaatgaagagccaatggttgatacatggacggagatgaaaaagatcacgaggaagcggtatgtgccggctagttactcaagggacttgaaatcaagctcaaaaactaacc

SEQ ID NO: 98248 - DNA, 427 bp, Glycine max
tccaacagggtcaaaagcataaacaacaactctgaatctattgtgataatcaaatgagagatgatacatagcagacaactcataaatagtgagtgactgagatatcatgttggttgagagcaactttaattcccttaaaataatttttcagaaaaaagcaacagttgcatcacaaattgtgaagttgaaggagctgatgtggcaaccaattatatgcaaactgttccttttataagattcaggtgcttatcaatgaaaaaggtgaaaagattaaaaaaacagcgtggaagagtgaaaatggtgaaaacacaaaaatagtgtgctagatgtgggataactagtgaaatctattttgtgaacttcttagcatcgtcacatcactggagaggagaattgcttgaatggcacaacaataaatagttgtgtc

SEQ ID NO: 98249 - DNA, 477 bp, Glycine max
  unsure (1)..(477): unsure at all n locations
agtcacctgcggcatgcaagacttgaatgaggctgaagaagctgctgctcatgttcaacaagatccgatggagattaatttatctcgcctcatttgtcacaagatagtgacatggagtttatggtaaatatttgtcacaacaaaagaagtttatctcaacctaatttgttgcagcactccatttttatatattacaattattcatgtttggcatttacatgtaggtccctgcaactattgttccaccaatagcaaggaataagctagccataacaagagccaaaaaaaggaaggttgctgataaagatgatgcagaaaactgaagaagcattttttgttgcattttgaaggttgctgaaggttgctgaagaacccaatttttgtgcgcattntgaaagttgttgagtttgaaggtgctgatgaagaaactgaaaagcattnttgttgcatttgaatacgatgtgtagtgatatttga

SEQ ID NO: 98250 - DNA, 391 bp, Glycine max
  unsure (1)..(391): unsure at all n locations
aacctagaaagggttgtactacatgtactaaaagaaaaactaactcgtttgaattggttcatagtgatgtatgtgatagtaatgacgtgttaatacatggcggtaagagatactctattatgttcattgattatttctccaaatattgctatatatattcaattaattacaaaagagagttgtttgataagttcaaagtatataaaatagaagtagaaaatcaattagaaagaaaaattaaaattctacgttctgatagaggtgaaaaatacacatatttagatatgagtaattnttgtgaaatgcataatattatgcatgaagtgacacctttgtatgctcttgaatctaatggtattgcaaaaagaaagaattgtaccttgctagatat

SEQ ID NO: 98251 - DNA, 465 bp, Glycine max
  unsure (1)..(465): unsure at all n locations
agcttccatcaagtggtatcagagcacatgatcttcaagtaggtgctcctaaacctccattaattnttttgctttaccttctcttccatttggtgttcttcatttctctccatgtatctcctcacatgtcttgtgataaatgttgctaacatgattctttagagctttcaccgattaaacttgctatagaagctagatctgattttctatggttcaaatttcttgttcttgaaccatgaattgtgttgagtttaagttcctttgactttgtgcttgttattttttggggctgaaacctaaaccattaaattcttacaaaaatattaatgtagaagaaaacctcataaatctagagtgacttgttccctattgtagttctgcctanaagtcatgtttagccatgaaacttgtcacatacgaattcttatgttgtgctgacatttatttcttttttcttgctaactc

SEQ ID NO: 98252 - DNA, 434 bp, Glycine max
  unsure (1)..(434): unsure at all n locations
tgttgaaatggccatgtttggatgagttaaacatacccattctgttntanggtttttgggatgatgtttgtgatgtttatatgctgaaattgctgatggaaatctgttagagacgaagggtagaactaacctagggttagaaagtgagaatgtgatgttatgagtggaaaaagagtgagactttgagagttggaaggctaagtctgaattctgtggtaaatggaggttaaagtgagttaatactagcttgaaatgtcatttatgacttgggagaaagcttggactgtgctagagagaagaacaaatgatcaaaatgaacatagagctatttctatggcaaaattgggtgttgaggagtcaaattttgattctgtggaattttaggtgtaaattcagnttgagcaagtttagattgatgttatggacttgtgtga

SEQ ID NO: 98253 - DNA, 361 bp, Glycine max
taagcgacgccgcagcagccactttccgcgtgaattctttatatatatctggatctgcacaaataattattatatatttctttgaagcaaactgacatgattatttttttatcttctacctgcccttgtccattatattctcgtctacaacttataaaataacgctggtatataccccctacttcttatgagattctctaccgaatgtatgtgcatctatttgaggcgatatatgctctgctatggatatgcaggaattcaaaggctgcgttgaatgactattcatagaagattgaatccattgcatccacatcggataatcacgtggtatgtatttatgaattaatatatactgcagaga

SEQ ID NO: 98254 - DNA, 164 bp, Glycine max
  unsure (1)..(164): unsure at all n locations
atcattacgtacgattgtagagatggttatatttgttctctgncgttctatttaatggtgagaaagtctgtaacatttgtttttcgggtccaacccaaaataaaatcaaattaacagctcatccctgctctttcatgggctttttgtccgtagtggtggtgggg

SEQ ID NO: 98255 - DNA, 336 bp, Glycine max
  unsure (1)..(336): unsure at all n locations
ccccacctatatactagagactatatgtatggatcacaagcatatgctctatttaataatctgtttgttgacatgaatcaaatccatcacttgtccacttgggagtttaccttgcttggttattaatatgccaaatgttcctacactttaagtcctttcatacagtgaaggatatatgaagaatgatactgcgtaacattggtcccatctcacatgctttgagatctgaanatacagaaaagcactaccatagcaagttgccaatgggcaccattatgtatatcacgaatacctcgctgataatatatttcatacgagagaaaatagctctacctt

SEQ ID NO: 98256 - DNA, 323 bp, Glycine max
gcagacatagcccttgcgtgttgagtttgaattttctccccttgagaatcctccgactatggtgttgattacaccttgaagccgagttttgggttggggattcttgccctgacattatgtttttgttgccttacaagtcctgttgtgttctaaatgcttctatcttgattcctttcgcattccttattacgtgatgggtctttgacaaacttctacagatgcccctcttggagcaatccctctattttatccttaacgctagtacaatcttcagtggtgtgaccagcaacttgatgatattggtagtacttggacctatcagc

SEQ ID NO: 98257 - DNA, 431 bp, Glycine max
  unsure (1)..(431): unsure at all n locations
tctctgaagctgtggatggaaaaataacttataaaattnttcagccatccactaagcaaatctttgttcatgcgctgagcgagtcacttctcgcgctaagcgcatcaatccctactcattggctgaaagggcctctccgagcgagccctgtgcactaagcccaaaatattttatggaatttcatcttttggaattgggctaagtgagtcatctcgctaagcgcacaactgcatcttgctaagcgcctctatgtgctaagcgcaatttcccctctatttgaacatttatgtgaattgggcccagtgggtcagcccgctaagcccaaatccctctcaggtttggagttgcgctaagcacgagtctctcgctaagtgagccccaccactgtattaggaagcattntattcgctaagccggcccatagcctgcta

SEQ ID NO: 98258 - DNA, 372 bp, Glycine max
  unsure (1)..(372): unsure at all n locations
agcttctcgatgtattatgcgcctgaatctgacttccgtgtgaatggatatgaccattggaatttctcaagagcttccgatgatcaatttcgagcgtctggatatattatatgcctgaatcggacttccgtgtgacaagttatgaccctttgaatntttcgagagcatccgttgttagatttcgagcgtctcgatatattatgcgcctgaatcggactttcgtgtgacaagttatgaccatttgaatttctcgagagctttcattgttcaatttcaagcgtctcgatatattatgcgtctgaatctgacgttcgtgtgaaagggtatgaccatttgaatttctcgagagcctttcgtgttcaatttctagcg

SEQ ID NO: 98259 - DNA, 443 bp, Glycine max
actactgaaactaagcttctcgatatattatgcgcctgattggacatcctgtgactaggtattattatttcgaattctcgagagccatcgtgttcaatttgagcgtctgatatatatgcgcctgaatcggactatcgtgttacaaagtcacgaccatttggcatttctcgagagcattcgcggttcaaattcaaccttctcgatatattatgcgcctcaatcggacctccgtgtgataatttatgaccatttgaatttctcgagagcattcgttgttcaatttcgagcgtctcgatgtattatgcgcccgaatggaacttcggggaaaagtatgaccatatgaatttctcgagagctttcgttgggtaattcgaggtctcgatatatatgcgcctgaatcgacttccggtacaagtatgacatttaatttctcagagctttcg

SEQ ID NO: 98260 - DNA, 436 bp, Glycine max
  unsure (1)..(436): unsure at all n locations
ctgtttatactgnactgagagaagcagaagatcgaagtgttgctccaattccagtctgggagatcccaatatggaaagacatatcaccacgtctaaggaaggttaatgcagctctcaaattcatcaatgatactcttgatgatttgatagcaatatgcaaggtaattttgtcattcgtgggacacaggcttgtattctcaaaataggttcacataagatggtatgcagtatgtgatgccactgcagaaaggcacttgtaaatattgatatgctgtctacattcttgcacctcctatgattataaatttatgttcatcataataaaatcttttcacgatctttggcactatcttctattctaaagtttggtactagagcttgattcctaaacttgtagcactagtcaaattccgaggaatcacttggtgataacatg

SEQ ID NO: 98261 - DNA, 448 bp, Glycine max
  unsure (1)..(448): unsure at all n locations
cttagctatctcattatgttngtataaagagaaatactaagtattcttaatattgataagngctgcggaaagagtgtattagagaatatgttgcagttattttccttgttataaaacacgtttatttttttggtatacaatgggggcaacaaggttagaacctatgacattgtgcagattacccagtctcttccaccactaggctgaccctagtgggtataaaacatatttatttgatatcaagtgaagttattgatgaattgcaacattctttcttaattgttctcctaatgcacctcagtttattacaagcaaggtgttaatgggtttttctgggctggaaaacctgttgttagtcaagtgaaagagtctacgcattcaactgctcttgggtgagtacttgccaccagaatgcaatattctcagtttttatttaatgccctgcatc

SEQ ID NO: 98262 - DNA, 443 bp, Glycine max
  unsure (1)..(443): unsure at all n locations
accatcttttcatttagaatactggtaatgtggcgtactataatatcattntttctccgtcattgaggtgccacttgagctgccangtctctccacctttgggcgtattctttgaaagatccgtgcccccttttttgcacatgttttgtagttgcatcctatccgaagccattataccgaccctgcctaacgaaggaaaccattatgtcctcccaggaatggactcgggaaggttccaagttagtgtaccaggtaacaactaccccagtaagactttcttggaaggaatgtatcaacaattcctcatcttttgcatatgcccccatcttccgacaatacatctttagatgggtcttggggcaagtaatccccttgtacttgtcaaagtccagcaccttgaacttgagaggggtgatgatatnggatactangaacaactcttc

SEQ ID NO: 98263 - DNA, 439 bp, Glycine max
  unsure (1)..(439): unsure at all n locations
ntntattntcagtagatgaagatgaatctgtggtcacctcatgcactcctctaatgacaataacatcatttcttgcattgaattgttgagagttggaagccatcttctcaatcaaattcctagcctcagcaggggtcatatcaccaagagctccaccactggcagcatcaatcatactcctctccatgttgctaagtcccttatagaaatattgaagaaggagttgctcataaatctggtggtgaggacagcttgcacacaatttcttgaatctttcccagtactcatacaagctctctccactaagttgcctaatgcctgaaatgtctctcctgatggcgatagtcctagatgcagggaagaatttctcctataacaccctcttaaggtcatcccagttgaaaatggacctgcgagcaaagtagtacaacaaatcttt

SEQ ID NO: 98264 - DNA, 421 bp, Glycine max
agcttaagtgagccaccataaaatgagtcatttttataaacacatccttgtaatcttactatgtttttttgtataatggaagaatctctatattgaagaattagaattgtatattctcattactaactttaattattaagtatctatcttaactctacgaacccgacaagtcagagtttttctaccataatgctaggcgatgttcaattgactcatatctaataatgataggtttgaaagttataattcgaatttttttcggataaacgaaagttaaaaaaatgcctagtcattgtgaatgcgaatatatgagacgtctttgggatagattcacactggatgatacattttattgtttgtgcaaagcgcaaaagggaattgcctcagacacatttgattccactttttgaattgataaact

SEQ ID NO: 98265 - DNA, 323 bp, Glycine max
acgatacctaagctctctgctgaatggtgctcagattttctgttaatgaagcctatggacccaaagatcaccaacgaaattgagaagaatgcaactctgctgtcacacaatgtctaactgctcgatgccacataaagtaatcaggacatgtgtaaaattccagactaggataatgggaccaataatatgcaactttgtgctaccacgctaatgaatcaaaggacattggctcatgatgtacgatcatatgaaacatctagattctgatcaatgtcacatcctgtcctactgtttaatacatacttgcctagtttttcattatt

SEQ ID NO: 98266 - DNA, 430 bp, Glycine max
  unsure (1)..(430): unsure at all n locations
agcttatagtttttggagggagaataaaacaatccataatcaattgtaccttttaagtaacgaagaattctttntgcggcttttagatgaggagaggtaggagcctccataaagcgacacacaactcccaccgcatatataatatcgggccttgtattggttagataccttaaactccccacaagactcttgaagatcgtggagtctaccttctctccttcatcaaactttgataacttcaagccaccttccataggtgtgttcacgggattgcaatcaagcatattaaatatcttcaacacttcttttgtgtacctctcttgtgagacaaagatatcattctccgtttgcttcacttccattcccaagtaatatgacatgagtcccatatctgtcatatcaaattcacgagacatggactccttgaagt

SEQ ID NO: 98267 - DNA, 443 bp, Glycine max
  unsure (1)..(443): unsure at all n locations
actcaagcttctgattcggcatgtttgttgngatttctagaatccctntataaaaagaatttctctntggtgcatggccaataattatatgacaatcctttgtacatgtaatcaagcctatctccccaattccccattcttttggcaccacaaccacaattgccttgtttggtgctaatatatacttgtttctcctccattcagatccttctttttggaataatgctcatcatttaattttcttctccttaattacccatatatgtcatcaaactgttgaatgtcttctcaatatcatcaaggtccagctgcatctgcacacgaattatgacatcctaagagaagaaaagaacatgaccggaagaatgtttatcagatcatggttgtaacctttttggttaattccaaaagcacatctgcttcatgctttaccaccaaacttg

SEQ ID NO: 98268 - DNA, 452 bp, Glycine max
  unsure (1)..(452): unsure at all n locations
agcttaagctccttcgactgcacaagtctcttaatatttgaagagtatccttgtggaaccttcacccgacgaagacactgacaaaaacttatcttctcctttttggacaaagtatggcaagttgggggcaagtaaattttcttcccatcataccttggatgcaactgtgatcgtatccccatatcagctagatcttgacgggtattcaagtcatccttcctcttgccttgaatgttaaggagcatcccaatcacactgtcacaaacatttttctccacatgcataacatcaatacaatgtctaacgtctaaattagaccagtatggaagatcaaagaanatggacctctgcttccatatgcaactcttacttttatccttcttttgggtctttccaaatacagtattcaggtgttgaacccgctgatatacctgctcaccaatcaacggtac

SEQ ID NO: 98269 - DNA, 429 bp, Glycine max
acccatcacatgtggttctatgtgtctgtcgggcgatggtgcacaacaagtttttccacatccacaatgcgcgcataaacccaccatcccctgtagcccacctccaactgagctcacgtactcccacgtagcccatatcctcgtttctctcaacaccgggtccccatcaatcctcccaagcttccccaacatcaaagtaatacaacattcaaacagcacaaactatcacagccaagaaaacagagcataggcagaaaactctgccaaaacaccaaccaaaatcacagcttttctcacttaaagaccccagtaacaataccttcgttccaattcgttaaccggtggatcgactccaaattttttactggaagtctctagtacataagcctacattttgaccgttgggatctactagcacacatccagaac

SEQ ID NO: 98270 - DNA, 293 bp, Glycine max
  unsure (1)..(293): unsure at all n locations
agcttgagatgaggaagtgttgaagggtgttacttcctgcttttattgttgaccacagagtggtacctggagatatgtcgcggtggtcaggagaccttggggacgtcaggtggggtgctattgcccaaaaccaagcttgaccaatcccgacccaacccgggcatattctgtcagtgagaacctgtgatgtacctaagcaggcgagctcctggcagtcaacagatataaggaaaacaagaccacaaatcaaggaggcttgtggtggctggccagctgtaaanantgattgatat

SEQ ID NO: 98271 - DNA, 468 bp, Glycine max
ttacgtgacacttagatactaagctgaacaagttagggaagtgagggttgtctattttgcttatccaattagcacccagttagtatcaggtaggaaaccttagagtgcaaccgttagaatccctcaaacttaagtgagagttatgagtcaagtataccgaattgaggaagatcgtgttgagggaagagacctacatctgaagataggtaaatcatgtattctcgagagtcatgtttggactacgattggtgagcgttgaagtttcaaaacttatgcctcttttcttgaatggtcccatgttcaaagaagagtcggccatgtggcctatcgggtttccttgtgtttggctgtttgggctacattctcatcagtgtctcctatgatatttcccaactctaaataggatggtattcacagtcctttatcgctgagatgtcactcttgtgagataacttgaattatgagata

SEQ ID NO: 98272 - DNA, 424 bp, Glycine max
  unsure (1)..(424): unsure at all n locations
agctntaacctcatcgtctctcacagtctttatgattgggagccaatccaatccttgtgttcggactcttagccacttatgatagccgccgatgatcccattactgcttcccctaagctctctgtcctttcttcacgccgcatcccatgccttgcgaactccttggagtaccctcgcgttgtggtcactaaaacctcgtgcgatgaaaggcgtgatgctttcgtctgatggcactcctctcatgggacatccttcgcatgaagatagaatcctgattcttccttccttctagcgagggaaccatttaacagacgcccctccatgctagccaagagttggtgcacaacanacaattcttgcgccgctcttttcacatccccggtcgaacgtgtcatacatggccaaaatggcgacgaccgggctt

SEQ ID NO: 98273 - DNA, 435 bp, Glycine max
  unsure (1)..(435): unsure at all n locations
tctcccncagttntctataaataggnggagaagtgaagtgtaatagggttcaaccccttaggcacttctctctctttcgattttgctnggaaaaattgtttccgtgaagaaaatctaagccgaggcgcttccgaaacgtttccgtaaggaatttcgcgaaggtttcgaccgttcttcgacgttcttcattcgttcttcatcgttcttcgatcttcaacgggtaagtacctcgaaccaagctcttcgattcattctatgtacccgtggtggtccacattgtgtttcgtgtatttttattctcgttttatttactttttatacccccttttgacgtgcttaagccattntatttaagtcatttctctgcttaaactaaaataaaataaatttccaccgatcgcttgaattgtattatccgctaacttcggttaaaat

SEQ ID NO: 98274 - DNA, 392 bp, Glycine max
agcttataaaatgtttaccttttcataatatgttgatctattctcaaaaaattgaacaaaatatatacttaatgatcttcacaaattatgtttaacaccatgactattcttccgggtgatagaaattaatgtaattcaccccaatataaacaatctctataaaattacagtttaatccttttaacatttatattaattccaatcaaatggttttttaaggaatctaattcttgttagactttgattaattattgaaacccttagtcaagtttaaaaaattattaactagctcctacgtaattcgtcattgtacatgttgcaaaaatggtccctaatagaaataggaacgcccaatattaaattatgttcttgaaagaaataacttcacacat

SEQ ID NO: 98275 - DNA, 464 bp, Glycine max
  unsure (1)..(464): unsure at all n locations
ctattacgtgacactataaaactaagcttantagctgacgttgatgaaagagtaagcatccaaataagagtgtttgatactagaactggaccatttcaacatgtgttggatcagatcttagcttgcactttgaaggagaatcttttgcctgatgttaaccaaaagggggatattgttaattcaccacgaaagccgaaatcaaaagctgtgctgatgacatccttgagctacggttattttgaaaaggtgagagacatgttttgggaacacccaactgtgacaggagaagttgttggcatttaccaaccaagccatgaagggtatcaacaaacagagaagaagatgcacaaccaaaaagcttgggcagaaatttacctcttgagcttgatggatatgttggtcacgagctcgtggtctactttctgctacgtggcgcacgggcttggagggttgaaaccgcggat

SEQ ID NO: 98276 - DNA, 328 bp, Glycine max
  unsure (1)..(328): unsure at all n locations
agcttctaagtcatcgcccttcggatatgcttaaaactctntaactacttnntttctcccaccagagatatctaacacacaagagacactaagaggaactcatactaattaggataagggcttagaaatcaagattacctcagagaagctctgaaatgaaagattggaggaattttctccatcgaatccttgaggagaattctgaggattccgctccgattaagatgttcctcttggtgtgggggttcgacgacaagcaacgacggctcgtggcggccatcggtggtcgtgggtggtggagaaagaggtgttaagttttgggtggcgt

SEQ ID NO: 98277 - DNA, 432 bp, Glycine max
  unsure (1)..(432): unsure at all n locations
ngaagggtaactagatgcctgggttaacctggttacccagctggccttgaatcaaaaatctatacctgttgcaagagtctatggtttatgctcttttgccgaccaccatacagacctttgcccttctatgcagcaacctggagcaattgagcagcctgaagcttatgctgtaaacatctacaatagacctcctcaacctcagtagcaaaatcagccacaacagaacaattatgacctctccagcaataggtacaatcccgggtggaggaaccatcccaaccttagatggtcgagtccttcacaacagcagcagcaacaacaacaacaaccttatttttagaatgttgctggcccaagcagaccatacgttccttcactaatccagcagaacaacaacagctgcagccgcaagagccccagaaacaacaaaca

SEQ ID NO: 98278 - DNA, 192 bp, Glycine max
agcttgaaatgaggaagtgtatattggtgtatacttctgctttaattcggtgaccacagagtggtacctagagatatgtcgcgggggtcaacagaccatggggacgtcatgtggggtgctattgtccaaaaccaaacttgaccagatccgacccaactccggcatattcaatcactgagaacctgatatgta

SEQ ID NO: 98279 - DNA, 396 bp, Glycine max
  unsure (1)..(396): unsure at all n locations
ataacaaatgacctgaacctattgttaagaattaatttgattttgaactttcaaaatatgctgagacatcattaaagaaactcttaagatagtaagacattgaatatgcttaagtaattactcattagaacttaactcatttgattggtatatatatcctatatattgtgagaatttttataggtattcattgaatatggatctaaattgtcattcctacgttgtttctatcagcagataaataaatatttctaaaaatggggtacacgggtgctctaactcacgtacaaaaaagttgtggagtaaaccaactgaaatgggctctatgacanaaaagttttctcatccgactttagtcctctaatgttnttctattgtctatttgtgctttttaat

SEQ ID NO: 98280 - DNA, 442 bp, Glycine max
  unsure (1)..(442): unsure at all n locations
agcttgtagggtcaagtttggtactggacatcatagaactaaaggtactctggactacatccatgctgatttatggggtccttctcgaactccatctcacttaggtgctaggtattttctttcaatggtagatgactattccaggaagttatggatnttcattttgaagactaaagatgaggtggatgattgttntgaaaactggaaaacattgatagaaaaccaaacaagaaaaaagattaaaagattcaagacagataatggacttngaatttgttcagaatttttcactaactattgtaggaaggctggaatagcaagacacaagacaatagtaaaaacacctcaatagaatggtttggcttatagatttaacagaatcattcttgagagagtgaggtgtatcttactgagtgcttatctgtcaaaatctttctgagct

SEQ ID NO: 98281 - DNA, 362 bp, Glycine max
cctcgtgcaatccattaaaaccacagtggttacgagagatacctgcagacacaaatgcatccacaacgtaaaagagtcatgtgtgttacaatataaaacacaaccttattgcttgtataataacttctttctatggtcattatatactaatttctctcatatgcagctgctactgcaaggagaggagatattctactagcatcaatgccagccgtttcatacatgttcaagtccttccctgcacccccattatgcaaagaccaatcaaattggtgaacaagggttgcttacaccatctcaattataattgtttaaaacttactccaggccaccccttcttcttctaccaatggtgtaagctc

SEQ ID NO: 98282 - DNA, 478 bp, Glycine max
  unsure (1)..(478): unsure at all n locations
agctttcatccaatatatgcattaaatattattgaattntaattatgtgtatgagttatgtaaatgaatcttgcaaaatcaaatatataaatagaaaattacattagacgatgttaattaattctccttcatcatgatcattacgattagcatgaacgtcatcagcttcttcttctccgacaacattacgagtgatttgtgcggtcaaaggactaacataggtgtccatgtatgaatcatcatcttctacattgacaccaattgttttgccctggagaaccacgcaccacctttcatcacaaaatacttgtctagcttgttctgccatgatgaaagggtcattnntggtaaccaagttctttagtctaccaacataaatcctatatcatcggtgcgcacaccggtgttggtggtcaacccattacatttgaaaacacataccagtaaattcacatangttaagctccaaatntcatca

SEQ ID NO: 98283 - DNA, 464 bp, Glycine max
  unsure (1)..(464): unsure at all n locations
tacgcgacacttaaatactcagcttctaaattccgtaggtactctgtgacagtgcctcgctgcgtagcttgataaagcgccgcgngggtcgtcgtagattgatggagcaaaacgagattcaatggcctggagaagagctggccatgaagtgatgaatccattccggaacatccactgaaaccagcttaatgctgcgccgtcgaggtaaaaagaagctaccatgatacgatcctcttccggagtaccatagtaataaaaaaactgtgagattttgaagatccagccaagtggatcatggccgtcgaaccgcgggacatcaagtttaaccggtggtcacggcgcggaaggtggtggcggagcacaaaaggtcatgtgggagaggcgttcacagatggcttcgaacttattagccaaatcggaatgttcngtgagggcggctatggcttcctcgagatggtctgtgg

SEQ ID NO: 98284 - DNA, 451 bp, Glycine max
  unsure (1)..(451): unsure at all n locations
catggatatctgtttctacctcagtgtttgaaaaaatcgaagctttattgctgaaggctcttnttttttccagagaaactgatgtaaaaataaataaaattgcttttatgggtatttgttaactaccttagtgcttgaaaaaatcgaaactttattcctgaaggctcttttttccccagagaaactgctgtgaaaaaattataaattttttttatttattttgattttgtttcattttgcttaaagattgttgacttattaagacntatttgtcaaattgactgaaaaggggtatccttttggcttacttaatctacnagtggtctaaagttaagagattntctagccttaggtcctacattcaaatttatatcatgtcataattcanggtggaactcgacagtaagtctgaattggatttgacataattcaatgtatgctatttctcgtg

SEQ ID NO: 98285 - DNA, 449 bp, Glycine max
  unsure (1)..(449): unsure at all n locations
tgccgttccgttccncgcgccccggacgccctcgctcctccgttctatcgcaacccccctgccgctgcctcgcctctgcctcctccgacgaccgctgttccggcgccaaacgcagcggctgggactccgtgctgcaccagttctccgaggtcgccaagcgagtcgattcctactggaagtccctcgggaacgccgccgctgacgatcgcgtccgcgtcgtcggtggcgacgaggattgggattgggatcgctggcgccggcatttcgaggaaatcgacgagcaagagcgcctcctctcgattttcaaggtacacggatttcaatttgcgtcttctcgcgtgcttttaccgatgtttttgtgaaattctgaatcgatgtcattgcgtntctttattcgtcgaaaaaagaattcaatttattagtggttctgaggagttttcatatgtgga

SEQ ID NO: 98286 - DNA, 429 bp, Glycine max
  unsure (1)..(429): unsure at all n locations
gctctatngtggaaaggtgtgttgctgtataatgtatctagttttgctccaagtacatcgaaggtggtaaatctgccgggcttcctgaaggtcgtcatggtccaaattgaggggggtaagggtacacgaggaaacaatgttgtcacaatgactcggcaggaggtgtcacaagtgcatctctatgtattaaacaacacaacataggtcattccatacatatatgctcacaaaaaagaactcacaacaatgaacccaaaactgaacatgatgagggttttgcaagagcataatataaatttcattaactagtttagagaaagaatattttcttgatgatggtgcttccaaaacattaagattgttagttgttggactaaatctgaatgtatcaactcggaaagggaatgatatctattactattccttcta

SEQ ID NO: 98287 - DNA, 441 bp, Glycine max
  unsure (1)..(441): unsure at all n locations
ngtaagcatatcttatacacatatcaaagcacatggtactgattgaacaattgcaaatggatggcatatagaggaattttggcattgttgtttattctgaaaatggcaaggaatacaactgacaatttggtagcatgaacatgttctgtaagtgggtgccattcttttacccggaaattgatggtgactggaccacaatagaagccaaaaactcaaaaaacataaataaaattaactcactttatttttcttccattgacagagagtatccttgcagggtttttgaaaaacacacaatacatgtctatgtataccaaatgggaaagagggttttcagtttatgtaatacttaaaggtacaaccacaaccaattaaaatgctaacaattaaacacaaaagggcacgagtttaacttattttgtttcaaatccttttcgcata

SEQ ID NO: 98288 - DNA, 431 bp, Glycine max
  unsure (1)..(431): unsure at all n locations
agctatctgaagcatgaatcaagaaccatgctcactntataacttgtttttcaactntaatttcattatgaaaaatgggggagcatttangccaaatatcaatttcagtaaaacctttaagtaaacctgaatcatctaaaatcaaagttgttgatccaaagacccaatttgtggcgagcctacctgaacctgactcgtctgagctcctttttgccacccaggagagctctgatggtgatgtaaaccccaggctcatcctgctcaacccattcattgtcaaagtcactggcattgctgattgaaagatccccagagcgatcagcttccctggatgaactacttcttatggaagcatcagcatccattattgatgagatatctgtctttgcagcagcactaatggtggaagcctttgggggtgagttcacacc

SEQ ID NO: 98289 - DNA, 452 bp, Glycine max
  unsure (1)..(452): unsure at all n locations
actcagcttanactgtnngctttgcataaatatatataattaacatgtatttattgctggacgtgagtattggatgtgtgtccaaacatacagcaagggaagagagtaagtggaatcacacagacaaaaacatgacacatagagtaattggaaacacagacaaaaacatgacatggacaaggctattctaacgagaatttatctttaacaagatatctactcttaaagtttagttcgttaagaaggtgagcatgcacttttaggtaatgattgaccaccttttttcttttcgttcaaactaaactcatttttctgaaagttatttaaaaaatagaatttaatttttatacacatgtaaaaaaaaattatcttgttaactaataaaaaatcatacaaaataaaaaatcatagtttgtatgactatatgactntgaggatagttattagataag

SEQ ID NO: 98290 - DNA, 448 bp, Glycine max
  unsure (1)..(448): unsure at all n locations
acattcgtaagctgcttgagctgagtctagtcttacaagagggatctgtggacgaaacttagtttaagttagtctaaacctaagagggccgtctaaatatggcctagtccaacaagagggatctaatgacgaaacttggattgattctgtctgacgaaggattgaggtttataaatttatgctacaacatagaacataaaagcatgattgattagagaaatatatttatatgcatcaacttgtttgttagaaagacccaacatttctacctactgctatcacttttacttaccttgcatgttatagnttttagcataaaggtttagtttaaattatgtttgaaattatcaatcatacatgttctctcaacaatgcttaacttctgaacttaactcaggctaacattaattcctgtgttcgatactcgaaatcattcggtttaaatttt

SEQ ID NO: 98291 - DNA, 442 bp, Glycine max
  unsure (1)..(442): unsure at all n locations
tactcagcttgactgagtcataagagattataatatgtgcccatggcatgaatntaaaaaatgatctatcatctatctttcaatctatctgtcaatcttctctcaacatcattcaatatcttttaattctttctatagaatctttctgatttatttctcttcatctttctaaaagtttttgttcaaacactttctcttccaagaaaagttctttgttcaaaaacttgtgcaattcaactttttcattctcttctccttttgccaaaagaacgaaggactaaccgcctgaattcttttgtatctctctttccccttacaaaagattcaaaggactaaccgcctgagaattcttttgattcttcccttccccttaagcaaaagatttcaaaggactaaccgcctgagatatattttgtttccccttacaaagattcaaaggact

SEQ ID NO: 98292 - DNA, 400 bp, Glycine max
  unsure (1)..(400): unsure at all n locations
agcttgagagtgaagttctgaacctggtactttataattngngatatattattatggttgtcaacaatagattcttttatcaactgaatttgagatcccaaaatgcattaaccatgtattatcaaaaatcggataatataaatgggatagccagataaaaaattactattgattttgtaggcaaatactcatgagctttaatggacatagcacgtatatatatatatatatatatatatatatatatatatatatatatataggacaagaatttactctgtaaaaataactatgaatatatgtttagcttacttttaaaagtgttgtggcaacgatcatatatataggtgggtttgttaacaaatttcttgaatggatccatcctggactataattattt

SEQ ID NO: 98293 - DNA, 313 bp, Glycine max
ctttagcatactttcctacaattttattcacatgaggtaagggaagttattgttaaaatgtcaccaagccatttaaatttttcacgaataatatacctagtcatattattcttgggaatataacatgatactctgaaacaagcgttccttttggaacctgaattttgtttgtgtttgatgcaatacctcattaaatgtgctgctctgaacattatgtgaaaactgatcaacaatagtacaagctctaccttctttctagtaggcatatgacagaaattcacatttcttttgtcttaacccctcagttcatcat

SEQ ID NO: 98294 - DNA, 365 bp, Glycine max
agctggagcaatgcaaacccaatttctttatctcggatatccgatggagtcccgtaatatatcaagacgctcaaaattgaatacagaagctcttagcaaattagaacgacgatgactttctacacggatgtccgattgggccacgtaagatatctactcgctcgaaactgaatacagaagctgagagcaaattcaaacgacaatgacttgtacctcggatatcccattgagtcccgtaatatatcgagacgttcaaaattgaatacacaatctgggagaaaatgctaacgacgataacttttgactcggattgtcgatagagtcctgtaatatatcgagacgttcgaaatatataacagaagctc

SEQ ID NO: 98295 - DNA, 317 bp, Glycine max
tgaccaatcccgacccaacccgggcatagtctgtcagtgataatctgtgatgtacctaaacaggcgagctcctggcagtcaatagataaaaggaacaaagaccacaaagcaaggaggcttgtgtggtggctggccagctgtgaactttgattgatatgtgggttatggcctctggtaatcgattaccaagggtgggttatcgattaaaaggctaataaatgaagacaggaggctaagatggtctctggtaatcgattaccacggggtgttatcaattaccaggcttgaaatcgaggtcaggaagccatgagggcttc

SEQ ID NO: 98296 - DNA, 373 bp, Glycine max
  unsure (1)..(373): unsure at all n locations
agctcggatntcctatgtgtagggattatattcttcctaagatagagccaaacctagtcaccctcattaagaattagctcttttcttcctctattgcctttagttgaatacacctttgtttggctctctatttggttcttaaccctctcatgcaacttatttacaaactgtgacctatatccctcttctttatgtataaaagaagtgtctactggaaggggaatgaggtctaacggtgttaggggattgaacccatacacaaccttaaaaggggatatcttggtgggtctatgaatcccaccatgccgaagcgaattctacctgatgaagatactcatctctagactaatggtcgactctctaaagagcacat

SEQ ID NO: 98297 - DNA, 436 bp, Glycine max
  unsure (1)..(436): unsure at all n locations
cgctntggaacctccgctatcattgattgactgatatatgtggcaactcgatttctcattgagccagttatatatgcaccataacaccaaatgtgcaccaccggatctctgattttttaagcacacccgtgaccaccctaagtgcagtattggccaatttcaaaagagaagaacagagcacatgcgcatgccttgatagggatttagaaaagttcatgcccgtgaacaatatgcaacattaaccttggtaacagaatgaaggaaaagagaagtatatattatgatgtaatagaaaaaaataaaaggaaatgataaatgttaaccgagtgtgtaaaactgattggtgcaaagcaattaataaatgtaacaattatcatgaagtacataaaagaattgcaccagtatgatggaattgtttatctccatgttatcctat

SEQ ID NO: 98298 - DNA, 394 bp, Glycine max
  unsure (1)..(394): unsure at all n locations
agcttggacttcctgtgtttgngaactctctccttcctcangtgtacccaaacccaatcacctggttcaagcatgactttctttctgcttttgttggctagccttgcatagctcgcatttttcttttcaatttgagccttcacttgctcatgcaacttcttcacatactcagctttatcctgtgcatccttatgcttaaacatagcaatgctaggcataggcgacaaatcaagaggagtcaaacgattaaatccatacactatctcanatggtgaacaattagttgtgctatggacagcccgattataaacaaactcaacatgaggcaaacacgctttccaagagttaagatttctctttataacaaatcctaagcagtgtgcctaaagtccta

SEQ ID NO: 98299 - DNA, 432 bp, Glycine max
  unsure (1)..(432): unsure at all n locations
ggctntgtgagtngattntagttntagtttcactttgattattagtcaattcattcaaggaacctttcaaagaaaaacatccgattgatttttttgattattttattattacttttttttagatattttgattattttattattattttgtttgaagatattttgattatttttttattatttttttgaagatattttgattattttattattattttgattttttttatttaaccgaagttacaacgtgaacgatcggatggattttattttaatagtgattaaacgagattacaacacaaatgatctttaaaattcattttatcaattattaggcgagataacggcttaattaaacggtaaaaagctcgtttaaagcaaaagataaggaaattgaaagtgaacgatatgaagatgaaagcaaacaaaaca

SEQ ID NO: 98300 - DNA, 417 bp, Glycine max
  unsure (1)..(417): unsure at all n locations
agcttctaagtcatcgcccttcggagatgcttaaaactctntaactactttttttctcccaccagagatatctaacacacaagagacactaagaggaactcaaactaattaggataagggcttagaaatcaagattacctcagagaagctttgaaatgaaggattggaggaattttctccatcgaatccttgaggagaattctgaggattccgctccgattaagatgttcctcttggtgtgggggttcgacgacaagcaacgacggctcgtggcggccatcggtggtcgtgggtggtggagaaagaggtgttangttttgggtggcgttctggagaagaagagagtgaaaacttgtatttttaatgctgaggaacgtatntataatctgcatatctcgcttagcgagatcgtctcgc

SEQ ID NO: 98301 - DNA, 405 bp, Glycine max
cctggttacccagctggttcttgatcaaaaatctatacctgttgcaagaagctatggtttatgctcttttggcgaccaccatacagacctttggccttctatggaacaacctggagcaattgagcagcctgaagcttatgctgtaaacatctacaatagaccttcctaaccttcgtagcaaaatcagccacaacagaacaattatgacctcttcagcaataggtacaatcccgggtggaggaaccatcccaaccttagatggtcgagtccttcacaacagcagcagcaacaacaacaacaaccttatttttagaatgttgctggcccaagcagaccatacgttcctccactaatccagcagaacaacaacagctgcagccgcaagagccccagatacaacaaaca

SEQ ID NO: 98302 - DNA, 448 bp, Glycine max
  unsure (1)..(448): unsure at all n locations
agctntgtgtggagcttcatgtataatgatggagaagaaaggcaacgtgagggagagagaaagctgtctganacaaaagtgtgggggctgagtgaggagagagaaaagctcttggtcttaaataaaaagggttttccctttccccttattttattcaagctctgccacatgtccctatttgattggagcaaaatggcccactttctctttttgactgtgacccatactcacgcacaaaagtgagaaaaatctgacctttgagacgcttaaatcctgcctcggtatgcgtgccatttctctggttccaggttttcgcgtttctctgcgttcgtcggggccagctttcgaatctagcgatatattatcaaacgctcttattgaaccccaagcggggttagatgtggcttccgtaattttatgtcctcgccaacgtgacttttactattat

SEQ ID NO: 98303 - DNA, 387 bp, Glycine max
  unsure (1)..(387): unsure at all n locations
tcanaataaagactaactggttgacgaataaagaacgatcgaagaacgatcacagaattgatcatgagaatgttacggaagcgcctcagccttgatttttcttcttctttctccttcttctcactaatttcactcagaatctcttgatttcaggtgctggacccttctcctcagccccctcacgcctatttataagaaatgaggggtgaaggttgcacaacagcttgtccaggcgagctgcttgcttcctccagaagtaacctagctcggccaggcgagctggttacttcatccctaagcttcctagtgggcctaggggctaaaaaatgccccaaaagtgtccctcttgcccttctttgaatattttgcacatttcctttcgaaacg

SEQ ID NO: 98304 - DNA, 407 bp, Glycine max
agcttaaggtttaacttattatattgatgtactagaatgatttataagtccaagtgaactcctcatgctaaagagatatgggcttgaagtgtcaacaaattataagggcccatcatatatgcataagaataggagcataaatgatcaacttattgacaaaatggtcataaaggctataccaataatatacccaaaagcctaaactgtaagatgcaggtttagcataaaaccaaagtattcatggcataactcgcacgtacctttattctgctccgcagagggcggattcaacttcacacatggaaagcagtcaatactattatccttggcccttcataagtctaatgtaaccaaagctacaaaagcagtaatctgtataaagaagtccagtagacccgccaagctat

SEQ ID NO: 98305 - DNA, 446 bp, Glycine max
acacttagaaactcagcttggcaactcatggtgggcacaagatattcactcctgtagataggataaacaccactcgtgcagctgtcttcatccttcctcacaactcaagtccacgcaagtctttttctttttatgctgattggggtcttatcgtcaacctatgatattggcatatgtggacatggatggacgttattaccccaaagctgattgggcaaacaagtaaaaatgggctggcagagtatgagaatccacatgtattttgatgaaggccttaatcatgaagaacaagtccttttcaggactcgagccattggaatgcaagagccttcgtcttcttcataagaaccagaaaggtccatgtcaagtcacgttcacaatgtgcctgaattttgttcatttatcaacaccacttcgtcaacgaagcatgtacttatcaacccatc

SEQ ID NO: 98306 - DNA, 460 bp, Glycine max
  unsure (1)..(460): unsure at all n locations
agctnctgccgcgccattatgcacgttattcatttaactagaatgaaagtagagaaagccattatttatttctaatggagaaaggataattccaatggtttgaaaagttgtgtggtcgtacagtacgttacctttaattctaatctttttgaaaagttgcgcagcgtaagtaggtgtaggtacgtaggattacttttaattataatgttttgaagaggcgtaccaaataagtccttgcatgcagaatgaatattttgaaaattgctatttcgaatctttgtttgttatttccaatcccgcttgcctcctttttccttttaatattattgttgaatattattgaaagattgaaagtttatgccttataattaaattaaagcgaatgttttgaaatattggtggcagaaatatgtatatgtacatattcctttgatgtgttgaagcaaatacaaaaatgtga

SEQ ID NO: 98307 - DNA, 310 bp, Glycine max
ttgtagtgactacttatgacacgaatgtcaaggtactgattgaagagtttataggaggaatgaaaagaagctctttgaaaatgactgattcttggaaaaacgtcacttttctcctggattgcatgtgcaacaagatagaggtgaaggctttgcaactcattagatatttgcacaggaaattcatataaagatcaagatggatgaatgcaagccaattgctacgtcattgaatcactatttgaaatgcccagtgaagatggagcttcaaaagttgatgaaagatggctcacgaacttaaatggatgtctga

SEQ ID NO: 98308 - DNA, 447 bp, Glycine max
  unsure (1)..(447): unsure at all n locations
gcttgcattggaattgcgaaagcccccctccatcattaggatttgttcctgctatctcaaacaaacaaatcaaacgtaacaagacaattatagttgctgtttgaatacctcacccactcaagtgtatcacacaattatggtttttctctaatgaaacactcttgccttttaccactctaattccccttgagttcttaggcaattcaagagattatggccacaacaaagaacaattcaccaatatgtgtaaggtaaggctagagagacaaggaaaaggttaaccaagaaaaaggctaacaatgtttttaggcacaaatgaaggaaataaaattcagaatttatgaattcaagtaacaatccttcatgcaaccaatatattaccttaaagagattttttntttaaagatcttcaagcatgaaccattcagcccaattttatnttttttt

SEQ ID NO: 98309 - DNA, 426 bp, Glycine max
  unsure (1)..(426): unsure at all n locations
cgagcgtctcatatattacgggactcantcagacatncgagntaaaagttatcttcgtttgaattagcactgaggttcagaattcaatttcgagcgtctagatatattacgggactcaatcagacatccgagcaaaaagttattgtcgtttgaattagctcagaacttcataattcaatttcgatcgtctcaatatatttcgggactcaatcagacatctgagtaaaaaagttattgtcgtttgaatttgctgagagcttcaacattcaatttcaagcgtctcgatctattacgggactcaatcagacattcgggtaaaaatttattgtcgtttgagattgctgagagcttcaacattcaatttagagcgtctcgatatattacggtactcaattagacattcgagtaaaaaagtatttgtcgttg

SEQ ID NO: 98310 - DNA, 462 bp, Glycine max
  unsure (1)..(462): unsure at all n locations
ctgcagcttggagtttcaagtgccaattcgttctcttctttagtccagncttcttctggcttcaattcatcagtgggctttccttctgtgtccagcatcttgggatgttcccagcctttgatgacagctttccaggttctgctatccagtgatttgaggaaggccaccattcttgctttccagtattcatagttgcttccatcaagaattggtggtctgttcactggtcctccttctttctccatgttcatcagaatttatctccccagatctcactctgtgatttcgagtgttggctctgataccaattgaaattctgataccaggggacagatgtcgtacaggatgtcacgacatcacgcttcagaacatgcagtttatgtgtgtccgtatgaacagattaaacaagtaaataacacaagagaatttgttacccacttcggtggacctcacctacatctg

SEQ ID NO: 98311 - DNA, 440 bp, Glycine max
  unsure (1)..(440): unsure at all n locations
gggagaggatgcttcaatggagganaagacagagggagagattgagagatggtggagcacgaaattgaaggaagataatgggagagaagttgaactttgagttgtgtctcacaagactctcattcatcaaagttacaacaagtgttacacatgcttctatttacagactaagtagcttccttgagaagctttcttgagaaaacttccttgagaagcttctttgagaaaacttccttgagaagctagagcttatctacacacacccctctaataactaagctcacctccttgagaagcttccttgagaagattcctaaagaagctaaagcttatctacacacaccccctataatagctaagctcacccccatgccaaaatacatgaaaatatataaaaaagtccctattacaaagactactcataatgccctgaaatacaa

SEQ ID NO: 98312 - DNA, 402 bp, Glycine max
  unsure (1)..(402): unsure at all n locations
agcttatccttgtgtagttgcatgtgtggttcattcctatggtgatctcgtatntgacatacgtgggggagaaaatggataggaggtgaccccatgtctttgcagacttcatgaatatagtgtggaccaactaagagtttatctagtttatccatagtgtggtttatgtttatatgcatgttttgaggagatttgagttactatgatgttgtatatatatcatgtgatgatttatgttgatgttgtgcttcaacctttagcctttgaggtgtgaaaagtgtacaaatactttaataaataaattaattgaagattttttaatgaattatagtaaacctctttacttaagatagttcctatgtttatgtaacggcggtgggtcgttacaaagtgcagcggatc

SEQ ID NO: 98313 - DNA, 440 bp, Glycine max
  unsure (1)..(440): unsure at all n locations
tatctcgcacgaccatattctgtantgataactatatntgttatcagtcatctaactaaacacaactcatttataccaaattgattatttgcgggtcatggagaatttttaacagtgtccagaccatgaaattggcccaataaatcccatcattgctaatcctgctacattaactttttcatcgatgtcaccaacagatctctctatatccaagtgcaatcattcccacataccccctttttcgaaactatatgttgctccatttcaattaccatttcttgattaatacagaagtcacgcaggtggatcaatacgcattttgactacaggaagcaagcactatataaacaagtataattgatggacaaaataaataccaaaacaatttatagtaaggaaaaccaacaatatataaacaagcaatggcccatttctgatac

SEQ ID NO: 98314 - DNA, 459 bp, Glycine max
  unsure (1)..(459): unsure at all n locations
agctngcttgtgtggcttctatggaggctgtatctttgagcttcaattaggtcatttaatgttgattttccaccatggagatgcagcggaagacaaaggagaagaggtgagaggaggcgccatccactagggaataagccatggaaaaaggagcttcaccaccaagatgagccttggataagaagcttggaaggatgcttcaatggaggaaaagaaagagggagagaaagagagaggggggagcacacaattgaaggaataaaagagggagagaagttgaacttggagttgtgtctcacaagactctcattcatcaaagttacaacaagtgttacacatgcttctatttatagactaggtagctntcttgagaaaacttccttgagaagcttctntgaganaacttccttgagaagctagagcttagctacacacacncctctcataactaagctcacc

SEQ ID NO: 98315 - DNA, 428 bp, Glycine max
tggacatcgcttcattttggtcgccattgattacttcttcaaatgggttgaagcggcttcatacgccagtgtgactaagagtgtggtggttaagttcatcaagaaaaagataatttgctggtatggtttgcctacgaagattatcactgataatgccaccaatctgaacaataaaatgatgaacgaaatgtgtgaggatttcaagatccaacaccataattctatgccttgcaggcccaagatgaatggggcagttgaggctgctaataagaacatcaagaaaatagttcagaagatgatcgtgtcatacaaggattggcacaagatgctcccttttgcactacatggttattgaacctcgatacgcacatcaactgtggcaaccccgttctctttggtgtatggaatagaggttgtgcttccatttg

SEQ ID NO: 98316 - DNA, 382 bp, Glycine max
tcgagccaaccgcgtgcagggactaatttaacggctgaatggctaggacctcacgcctgatatcagctcgagccctgatatgaagcaccctattaagcgaagaccgctacaaaccggtgatgcgattggccaaggactctaactgagacaggtattctcgaaccggaccttcctgaaccaacatgaagagatgtcctgtcgggttcttataatgagaaagggcaaaacaggcttcgatctgcctgaaaaaacctgcccacatgggaaggtgatggttgacgaccatccatttaaactactctagggcacgtacgtaccatcaaatgaagctacctgtagccgctctgagtcatgcaccccgttgtattcaaaaaatcgtgag

SEQ ID NO: 98317 - DNA, 430 bp, Glycine max
  unsure (1)..(430): unsure at all n locations
ctcacccatattggcttgatattattcaatttaataccgcngacaacagcgtcaacaaattcttgcaccctggatacaaacgcttctttgaaatagtttgtaatgtatcatacataggggcatgcgcttgctgaatagactcttgtccaaggtcacaaatcatatcctccaagcgatctcccatttctacatcaaacggttcggatttctgcccactctgcatgtctgtcatttcaccatgccatatccatgtcatacaattcctcttaattccatcacacaacagatgctctcgtatgtcatccagtatttgtcgtctttcgttcaaacaattgatgcaatgacaataatatcttccatcttcatccggttgacctctttctgaagcaaattgcaagaattgctcgacaccttcctcgtattctgggct

SEQ ID NO: 98318 - DNA, 463 bp, Glycine max
  unsure (1)..(463): unsure at all n locations
agctnggactcaaggagaaacttagattggctctatagtagagtaaaaaaaactataaagaaagactcaacaaacctctagctttggcccatgtttttcacgctaattttcaattgaaatttaggaactaagattggtataaaatatgaaccaattatagaataaattttgagccaaaacaacaagcacacttccctttcaccttttttttcctggatactgatttttcttccaaattgtgtgatttttatcatttttaaattttatccaaatcacttggttctttatttataatctttttccagatgcctagaaaattcagtaaaaatttcagctcacaattcgaagtaactaattctcagtaattgttacaagttcgatgtccaagctgccaccaccagcgaattttggtnttaagcatggtatatagattgccttggcttactttctaccttctatgtat

SEQ ID NO: 98319 - DNA, 429 bp, Glycine max
  unsure (1)..(429): unsure at all n locations
tatggggtacccatcatatgtggttctaggtggcgatcgggcgatggtgcaaatcaactctcccacatccacaaatcaaacatgaacccaccatccccagttgcccaccttcaactgagctcacgtatccccatgtagcctttatcctcgttcctctcagcatcgggtccccatcaacccctccaagcttccacaatatccaagcaattcaatatccaaacatcatgaactatcctaaactaagaaaacagggcagaggcaaaaaactctgcccaaaacacattccaataccacaactttccctactcaaataccccagtaacattctcttcgttccgattcgttaaccgctggatcgactcgaaaggtttactggaggtccctagtanataagtctacattttaccgctgggatctgctagaaaatgt

SEQ ID NO: 98320 - DNA, 437 bp, Glycine max
  unsure (1)..(437): unsure at all n locations
agctntaacctcatcgtctctcacagtctttagatttgggagccaatccaatccttgtgttcggactcttagccacttatgatagccgccgatgatcccattactgcttcccctaagctctctgtcctttcttcacgccgcatcccatgccttgcgaactccttggagtaccctcgcgttgtggtcactaaaacctcgtgcgatgaaaggcgtgatgctttcgtctgatggcactcctctcatgggacatccttcgcatgaagatagaatcctgattcttccttccttctagcgagggaaccatttaacagacgcctctccatgctagccaagagttggtgcacaacaaacaattcttgcgccagctctttcacatcctcggtcgaacgtgtcatacatggccaaaatggcgacgaccgggcttttcttgccatgat

SEQ ID NO: 98321 - DNA, 431 bp, Glycine max
  unsure (1)..(431): unsure at all n locations
ttctccccagttntctataaatagggggagattgaagtgttaagggttcaaccccttaggcacttctctctctttcgattttgcttggaaaaattgtttccgtgaagaaaatctaagccgaggcgcttccgaaacgtttccgtaaggaatttcgcgaaggtttcgaccgttcttcgacgttcttcattcgttcttcatcgttcttcgatcttcaacgggtaagtacctcgaaccaagctcttcgattcattctatgtacccgtggtggtccacattgtgtttcgtgtatttttattctcgntttatttactttttatacccccttttgacgtgcttaagccattttatttaagtcatttctcgcttaaactaaaaataaaataaatttccaccgatcgtttgaattgtattatccgctaacttcggttaaa

SEQ ID NO: 98322 - DNA, 410 bp, Glycine max
  unsure (1)..(410): unsure at all n locations
agcttgttcttgactcatcttctccttgatttggcatctccaatcacctntcctccttctccattttgctgccattgatcttcaagaagcaaatgactccattgatgaagaagatccaaggcctacaagctctacatggaggtatatcatatgccatgctggaccttggagcctcaattaatgtcatgcccacgtcagtttacaaatcactacatcttggtgatttgaaacgtactagtgttttcattcatctagccaataggaatgatgtgcttccacttggagttattgaagatgtgctggtgcgagataataatatgattcttttagcaaatgaatgagtctttcagccatgggtccacattgatcctatggagatcattctcgatgatagtcatgacaaaaattga

SEQ ID NO: 98323 - DNA, 425 bp, Glycine max
tgaagaatgtatccttgtttagcaagctgcttaatggtttggctatcttggagaagtccttgatgaatcttcaatagaaacctacatctccaagaaaacttctgatacccttggcatttactggtggtggtaaattttcaatgacatcaatttttgctttatccacctcaatgccttgggctgaaattttgtggcctaacactatccctttttgaaccatgaagtgacacttctcccaattcggcaccagattggtctcaacacatctccacagcaccaactctagatttgtcaagcggcaatcaaaggaaggcccaaaaattgagaaagacagctagcacttttacgcacttctctaccatgtcagcaaagacagctagcatgcacctctataaagtggcaaatgcattacataacccacatgg

SEQ ID NO: 98324 - DNA, 399 bp, Glycine max
  unsure (1)..(399): unsure at all n locations
agcttataagaacaaaattgcctcaattattttcaaatatgcatgtgaattgggacgcatcaacaagaatcaagccaaggctattgtgcaagcaatcaatggggcaaaacacaccaaatgattatgatgatggatggctcaaattctaacaaaggtaaactcatcactttcaaattgagctttcaaaactatcatgacatgtatagaagaatcaatgatttcaagtcacaaaatgtcaagaacttttattttcaaaacaattacccatttcttgaacatatcctataattcaaagaagaacatgcatagtcgtacgtgcacacacaaatgatcgaaaatattaaactaaanattcgacgaatctaacaacatttaaaaattacacaactaacaaataac

SEQ ID NO: 98325 - DNA, 422 bp, Glycine max
tggagtagaaacatgggaccacctcattttatttcaaaaaatgaagtcatatctagtcaaggtctaagagaccatacaagtttcctaacgatttctaattatgtgggccattaagtctatcatatgctgacaatagccgagaagcccatgaatctcttcgggggtggagtaggtgtctgccatcgccttggccttggctaacaatcggggaagttcttgactcctgttcaaggtaagagcaaaccgatccatccacatggttgcctcttggtgtaaagagtcgatcacccttcctctagcctctttttccgcatatacttgagcatactcatccgcgattctatgctcgtgggccgtggctagacctaactcttcttcgtacttggcgaagatagctaacatgttggtctctgtctcgcata

SEQ ID NO: 98326 - DNA, 394 bp, Glycine max
agcttggattgattccgccttactaaggatctatgcttcaaaatttaggctacgaattaagacacaaaagcatgattgattagagaaacgtatttatatacatcagcctatttgttagaaagacccaacattataacctactgctgtcaatcttacttatttacattttactgcttgtagcatagagtatacgtataaatattgtttgccatcatcaataatttatgtttcttcaacaatgcctcatttctgaagctactctatctaacatcagcttcctatgtttgatactcggattcatccgtcttaatattaaatacttgacgatgcaatgcgatttcttggaaacccctcccttgaaattcccttgtacatatttgcgatacgataattc

SEQ ID NO: 98327 - DNA, 436 bp, Glycine max
tagaaagatatgactcgcctggacatcatgtggtttcatggtggaacagacaatatggaactccttaagatgcttatgaggatcttcacttgcaagaccatgaaacttgggtagcaaatgtattagtccagtcttgagaacatatggaacatcctcatcaagatattgaatgcaaaagctttcataagtgaaatcaggtgcagccatctccctaagagtcctcttatgaggtggaagttgagccatgttctcagtatgaaaattagtagacgaatgctcaaaatcagaatgttcagaatcaccagcaacagaatacgcagaatgctctaaaagctcaaaatgcccaaaatgcatagaatgaccaggatgcatactatgcctaactaatctatgaaaggttctatctatttcacgatcaaagggttgtaaatcacct

SEQ ID NO: 98328 - DNA, 448 bp, Glycine max
  unsure (1)..(448): unsure at all n locations
agcttcttcacagcagcagcacaatcattttgaatttgccttcctttcatcaatgatggctccattgccttcattctctcatttgcactgcacagtataatttaagtataatgtaagactaaagactgaataaaatgtatctcagggcagaattgagctactcaacatgcttatatgtgcggctgtaaaataaacctaaagatgaaataactaactcgataattataaaaaacaggaaaacctgatgacatcatgacatgtatgacaagattcttaaagctacactcacttcctgngcaaatcagaatctttgttgcatctcccagtgttcgtgagacttcctttacccgtaatccaagctctcgagtgagatggngattgttccttacttgctgaatggaaaggtataccctaaccttgatgagctgatcttttagataccgcaccc

SEQ ID NO: 98329 - DNA, 433 bp, Glycine max
  unsure (1)..(433): unsure at all n locations
nttatatgaacaatatggcgaacatgaatgcacgtgttaatctacgaggccaatatatttaaaataataattaaaaaaaaaactctttctcccagcaagacaaaaaagaaaaagaaaactctattttgctaccggaggtcaattcaatggaaacaaatcatttgaccaaaaaagaaggaaacgaatcacaaatattcctagaacatgcttagacacggaatagaccaccaaacccaaccatcagggtacgcagaaaattagaaaataaaaaagggaacggaaaaaaaaatgctaaaacagaaaatgcatatgtggtggttatcctatcaaacaaattgcgcttccaactatatgtgataaaaacctgctataaattatttttatcctttgaatcacccaaccaaaattcctagagagaagcatcaccaactat

SEQ ID NO: 98330 - DNA, 438 bp, Glycine max
  unsure (1)..(438): unsure at all n locations
agtcaactttgaagaccatgtttgattgtnntttggattancttcagctataacctcattagcaatcaacacaccatgaagaatatgccttcctttcagaaaagcagtttgcctttcatcaatgaggtgagggaaaacaagagccagcctattagccagaattttggacactattttataaacacaccctataagagagatgggtctataatcattaagagattgagggttaatgatcttggggataagggctatgaaggaagcattgcttcctttggggtataagccattgatgaagaactcatccaagaaccgaattaagtcagggtttataatctcccaaaacttcttgataaaattatagtttaagccatccgagccatggcttttatctccaccacacgcccacactgttgatttgagtgttacttcagagaa

SEQ ID NO: 98331 - DNA, 386 bp, Glycine max
  unsure (1)..(386): unsure at all n locations
atgaaataaattgttgaagtaaaaatgatatttttttagttttttggtactttttgtgcatttttagactgattgaagntatgaaagttgtattattggtttcattaacatgaaaactatgagaatgaagtattattggaaccaaaatacctgataaacataatcataaaggtgtcaaaagtngncatcatggattgaaactttgaagtaaatgtgatatttctacgtttggaacacttttttaatgcgattttaagccgattggagtcgtgaaanatgnnttgtttgattcatcgatatgaaaactatgggaatgaaanattatagtaaccaatatatttgttacacatantcttatatgcgctaaaagttgcactcatgggata

SEQ ID NO: 98332 - DNA, 442 bp, Glycine max
  unsure (1)..(442): unsure at all n locations
ctcacctaaaatcttaaatnnttatgaagtctgataaaatctatagtttaccaaaaaaagtcattgttcctgattttaatcaatgtggttcctgataatagaggttagtaaaagactttagcccaaggctaaacaagtttaggatagtgttgtttctgcaccaaaaatgtataatcaattttgcacttagtttaagggggcaaaaaaaggagatggtgtgtatgaatatgtatcttttaatcctttttttgtttcatatttttccttttcttttaaagattgtttaccatgattggtccgacagtacccaactcaattatttgatctttaattaatgtgatccaaaaaatggtccttgttatgccatttgtctctttatctccctgtccttcaagttgctatatgagatctctaaatccaatagtttattgcaatgttcatt

SEQ ID NO: 98333 - DNA, 385 bp, Glycine max
  unsure (1)..(385): unsure at all n locations
atgacaatgcgtacaagattgaatngcccagtgagtataatgtgagtactacatttaatgtgtctgacttaaatctttntgatgtagatggagaagccgatttgaggacaaatccttttgaagagggagagagtgatgaggataaggcaaggaataatgacaaggaacctttagaaggacttggaggacctatggcaagggctagaacaaagaaggccaaggaagttcttcaacaagtgttaaccatgctatttgaatttaggcccaagttacaagtggagaagcttcggattgttaattgcaccatgttccaagaaaagtagagggtgccacttttgttgaagtggtttattagcattttggtagttgaaataaaggcccaaac

SEQ ID NO: 98334 - DNA, 428 bp, Glycine max
  unsure (1)..(428): unsure at all n locations
ctggttagattgattatacatgattaagacttgtggatccatattgggcaaaatcggatgagggcaagagtgatttcnaaaatctgcactattatgcaaaattttgctgttgaaatgtgcagcaaaattttgtgcatgtgcaaaaaatgcttatgcatggctggttgtggagagggttgtacatattgggctctggacgttttctagcagatcccaacggtcaaaatgtagaattatgtactagggacctgcagtaaaattttcgagtcgatctaacggtgaacgaattggaacaaagagaatgttactggggtatttgagtaaggaaagctatggtattggtttgtgttttgggcagagttttctgcctctgccctgttttcttggntntgatagttcatgatgtttggatgttgtattgcttggat

SEQ ID NO: 98335 - DNA, 426 bp, Glycine max
ttaagcgacgcggctgcaagcttttatttcagagatgaagatgaatctgtggccacctcatggactcctctaagaacaataacatcatttcttgcactgaattgttgggagttggaagccatcttctcaatcaaattcctagcttcagcaggggtcatatcaccaagagctccaccactggcagcatcaatcatactcctctccatgttgctaagtccctcatagaaatattgaagaaggagttgctcagaaatctggttgtgaggacagcttgcacacaatttcttgaatctttcccagtactcatacaagctctctccactaagttgcctgatgcttgaaatgtcttttctgatggcagtggtcctagatgcagggaagaatttctccaagaacaccctcttaaggtcatcccaactggtaatg

SEQ ID NO: 98336 - DNA, 440 bp, Glycine max
  unsure (1)..(440): unsure at all n locations
actcagcttaaatccaaatctatccaaggaaatgtntcataagtgggattcccttacttgtgccattcgatgttggtgcgacccattcatttatatcttgtttgtgtgtagagaaacttaagctttctatgtcttctttaaataatggtctggtggtagaaaccccaactagtggttgttaacttctaatgtgtgtttgaattgtcctgtggaaatttttggaagaacattcttgattgatcttatttgttttcctttgagccaaattgattgttatttgggtatggactaattatcttccaaccatgtcttgttaaatttttttgataaaactatggtgtttgatgattttggagtgagtaaggataggatgtttatctctgcaaaccaagttattacatcttcaaaagaagatgctcaagtgtacatgatcttgtcta

SEQ ID NO: 98337 - DNA, 464 bp, Glycine max
  unsure (1)..(464): unsure at all n locations
agctgatccttgaatcttgaagtgttcttgtttctatcttgaacatcttgaactcattctttcttgagtctatctttcttgaactcattctttgattgacctttgagctttttgtcgtcacctttgttatcatcaaaacatctttgaatcattcttgatttatcatgaatattttcttctacaatctccccctttttgatgatgacaacttctgaaatcaagaaacagacacacacacactntttcctagtcgatcactcacataaatttccattctccccctttgtttttgaatttatgcttctcttaaaattaagttgattactcatgttagttcttgattaatccctatttctctccccctttggcatcaacaaaaagccaaagtggcgtaaaaatntgaggcatacacatataactaagcatccatacaacattcatggtaaaatatcaaccaaatcatg

SEQ ID NO: 98338 - DNA, 442 bp, Glycine max
  unsure (1)..(442): unsure at all n locations
ctcaagcttcanatgttaattacaccatgttccaagaagagtagagggtgccacttttgttgagtagttttattagcattttgttagctgaaaaaaaggcccaaacttgtgttaaagtggctgtcaattctcttgggatttgcacaacctatgggcttgatttaaattaaagaaattaaggtttaataaggtgaaaactctangattgtggctgcctcttggctgaccaaggagttgcacaattttccatatgtttatgtgtcttaattctaattttaattaggtataatgacaccatcaattgttgttatcaattctagttttacttatgtttaatgacaccatcaattgttgttattggtgatcatttcacttgtgtaaccaacttgatgtcattcctatttataggctgcacattttctaatataaaaaatagaccttg

SEQ ID NO: 98339 - DNA, 471 bp, Glycine max
agcttgacagtattataaatctcattatactttgccaagcgtgagtatggatcttcattgggtaaaccatgaaacaaatcgctctatattagctgatcaatgaacgtgggtaagttaagttttgtatctgaacctttggccatagtacacttgacaaatattgtggcactgaagcacttgagtaatcttccaaggtcactcgacgaggttgctcttcagccatgactatggcttcaaattctgttgtttgagattccttggatgtaggtgaattagaagatgatgactcatagaagtgagcctcttcaacgatcgatgctactgttatgttgagcaaaagctttcttttcctttctgcggtgtctcttctaaaggtggcttcgaattctaaatacaatggaaccaattcacctacagaagatctacgcatgcacactctattaggaacagcaacttaacaattctagaaga

SEQ ID NO: 98340 - DNA, 352 bp, Glycine max
tgtgactttgaaggaccctgtgtatgccttttcatttcacagagactatgaaactcatggtgcatggcctcatatgcttggggaccaaccactttgagcccatggggcggatcatgagctactagagatgaagaggaaaatgaagatggcgaggcttatcttgtagaggtcaccctttacgcttgatgctttcaaatttcagaatataattgtagtacttagatttatttcaagcatggggcagtatatgatagttgttacataatctttagagttgctattagtagatcttttgtggcgttattgatcatgtgatcgaaggttctacgcttcgtcacttgtgcatgtgaat

SEQ ID NO: 98341 - DNA, 436 bp, Glycine max
  unsure (1)..(436): unsure at all n locations
agcttataacttgtttgattgaaatgagactatctagtatgtgtttctttaagccttaaataaatatacatccttacttaaaatttcacatcacatcccttcaaaatacgcataagctatctgtttttgcttcaagcaacttgcatgcgtattttatatattgacgcaaaatcaaacatacagttaacaaatgagtttatctgatagaatgttagtaatatattctgttaattaagcacatattctctaatatgtttttgttatttgttaaaatttatgaaaaatcacaatattatgtaagtctcattttattcaatgaatcttatttataattntaaagtttttattaaaaaataacaaagaaaaaaatgtgtcacanaanaatatctaacttccatatagattgatgttntcgtctttgctagctggttaacgt

SEQ ID NO: 98342 - DNA, 443 bp, Glycine max
  unsure (1)..(443): unsure at all n locations
ggccgacggaattagggacattcagatttccgatcgaactctgctccggtgtcctctgctcgcatcctctntccagggatattagggtgagaaccatgttactattacagctcagctcatgtacaatcttgagctggaacaaagaaactgcttttttaaatatttaaatattaaagaatacaaaacaagtacatgcgcctaaagtgcttacttgtctagttaccttgatgcccatgcatttggctccatctaatgtagtgataatattacctaaaattatgctaacattattattattttttttntttaggggctaccgtctgcctaaaagtttatctcaaagatttttccctttggtttggcctattaaagttgtcttgatttttcatttgaaaatatttcggcttacttttgtatgcatatactgcattgtccctctggaa

SEQ ID NO: 98343 - DNA, 349 bp, Glycine max
agcttgaagattgaagtttatacacatgtttttctattttttattcttaaattaagactctgaagatatttgttaacgttcttctcctctttattgtcctttatatctttttgcatccgaacaatgcattaatagtttttgaagatgggtctgcacgcaacctattagagtaaaaaagcgtgggtgtgaacattatgcacgcaaattatatatttctcaatacgaaattcaatcactgtctttagtttcgtgagtagtgtaagttgtaaagaaccgtcaagtgtattggatggaagtcaacgtacgtagtatatgcttggataaaatcatctcctactgaaaagaatca

SEQ ID NO: 98344 - DNA, 422 bp, Glycine max
  unsure (1)..(422): unsure at all n locations
tatgctnntccaagttgcatattactggattatcctgcctgttgtgatgtgacttcattggtatgacgatttctggtttatgaagcttgctgtaaaaaaattgcggtccatgaagtgaagttcatttgtcctatttttgtgaccatggaagtttaaagcataactatgacttaaatatcattttcttcatctgtgaatctctatcctttttttccccttttctcatgggaggttagctctgcttctgaattgtgtgctttgagtatggcatctgtgctactaaagtgaaaggggatttcatggattttgtcttactttttttgctcttttctgttttatatttcttcaggtcaagaagataatattgcggagtactatcagcagcaggtagaagtgcttgagggctttactgaaatggatgc

SEQ ID NO: 98345 - DNA, 440 bp, Glycine max
  unsure (1)..(440): unsure at all n locations
agctngaactatctgtgattccacaacttcaatgtttcctcgaaaaatagttcatgtcattaataaatatagcaaaaacattgaatttcacccaaaaaaagggacttttcttcaacttaaataggctttgtacatataaaagaaggatttatgagaaattgaatctaaccaccccccgaaatataaagtatcaacactgtaattatattctaattacccaaaatagttgaggacctcaattatttgatctgctaaatcttcagcagaaggaataggatcctcggcacaatttgcagttgctcccaacttcaaaaactcttgtggaagtttcagagggaaaactatatgaataataatattcagttctacatgcaataaaaaatacattcanatcaaccaacttactaacctcatgttcaggaggactgatatgatatatg

SEQ ID NO: 98346 - DNA, 422 bp, Glycine max
tccagctagtaataatttaaggaaaaatagtacttgaactctcatgttatagcaaggcaaggttgaggagggcagattgcaatgccaaggtgcatccctagttaccaaacaggtcatagcctttctagttaggctctcaaattggcaccctagaattatcttcttattagaggtgttcatgttaaacatatttacctacagctgaagatgataggtacatattaaagacatttacctacagttaggagatagaagtagaagttaatgacttttacctacacactatacataataggtaaaaccaatagtgacagacaattagtcgtcattatatgcctcctcaaagttgacgtaagaaacttccgttggacaaagtccatcatacatttcccttcgaatatatttatttatagcgacagttt

SEQ ID NO: 98347 - DNA, 356 bp, Glycine max
agcttaggctaaattagtctaaactttagtatgctatttaagctgagtatagtccaacaagagggatctgagaatgaaacttagtttaagttagtctaaacctaggagggctgtctaaattaagcctagtccaacaagagggatctcagaacacaaaagcatgattgattagagaaacatcttcatatacatcagctggtttgttagaaagaccccaacatctttaccaactgctgtcaatcaatcttacttgcatttttactgtttttagcctagacttaatttaattctgttctaaatcatcctttatcaatgtttctttcaacaatgccttatttttttaattaatcatgtct

SEQ ID NO: 98348 - DNA, 319 bp, Glycine max
aggacattctctctcgtaacatattttgcaaccctaccggcggcaaaaatgagtttcaaacctttgtgttcaatttcacgatgatctaatggctaacgagtttgggattttaattctactgggataggtttgagtgtatactagaaaaaagagtttttgaagagggagaacggaaaatgaatttgacaggaagagacagtgttcaaacatatcataaaatgttaaagctgacctaatatgtctatttatagataggggactcaacctattatttactccctgtttctattttattatctataaaaaaaattcttgtttt

SEQ ID NO: 98349 - DNA, 404 bp, Glycine max
  unsure (1)..(404): unsure at all n locations
agctntagacacatgagcacttgcatatttcttctttcaattaatggattgaggattgaaaagatgaaaggggcacctctgatctatacctgaacatttgtcctatatgctgcctcccccctatggttgaggaggtccaatttcaaggttaataaaaatggggagggtgggggtgttgacattatataagagtacgtgcataagtaatgacaatcaatccagctattgaactgaactttcgatcctagctctatatagcagaccgatggtgataaaatgtgcctcaaacacactatacatactatgccatacattcattctatgacgagtgtcattatatttataaagacgctctcaaacttgcattgacatgagagttgacttgaggacgactataaataaat

SEQ ID NO: 98350 - DNA, 445 bp, Glycine max
  unsure (1)..(445): unsure at all n locations
ctcagcttacatcttcgaccaatcgcagnatctcatccggaccttcttctttttctttttatatgtagatttctttatcgaatttgaaacgatgaatgctagaggcgaggtcggttcaccggattcgttgggttcgtttcctccgttacgggttcggggatcggacggtgcctcagacgattccgagttcgagcggtattgcagcgccaactcggtgatgggaacgcccaacactagcatgagcctctgcagcgccgntacgctcttccaagatttctccgattgcgatttcgcttctgtcgccaccggcgagggtttcgaaaattatactccgggaataggagccgccccggaggtgaatcccggcggcggcgaccggaggaagtttctgtacggttccactggattggagatgtactgcgattgcagtgaggaactatctatt

SEQ ID NO: 98351 - DNA, 428 bp, Glycine max
  unsure (1)..(428): unsure at all n locations
agcttgaccgatcccgaccctctccgggcatagtcagtcagtgagaacctgtgatgtacctaaacaggcgagctcctggcagtcaacagataaaaggaacaaaggccacaaagcaaggaggcttgtgtggtggctggccagctgtgaactttgattgatatatgggatatggcctctggtaatcgattaccaagggtgggtaatcgattacaaggcttaaaaatgaagacaggagactaagatggtctctggtaatcgattaccaagggagtgtaatcgattaccaggctagaaaacgaggtcaggaagctaggagagcttctggtaatcgattaccaaggggtgtaatcgattaccacgcttaaaaatgaangcagcatgttgtggaggcctcttgtaatcgattaccacgctgtgtaatcgattac

SEQ ID NO: 98352 - DNA, 433 bp, Glycine max
  unsure (1)..(433): unsure at all n locations
ccttggaaatgatttctatacaaaagttagtcgtataaagctactaacaaactctcccaaatttacagttttgcttgtcctcangcaaagaaagaacaattcgcttgtcctcaagtgacacagacagtggctaatcaaaagaaaatggtgtttgattcatcaaggacatcaaccatatgaacttaatatcatggaatgcttaaatcaatcacttctcacaagaatgcaacttttcaaagataggagcacaagtattagagtcacagctaaaataagctagtaagcatgacaaaaatcaaggaaggatcaataaccaaaacctcacagtcattgtttcactcaaactaaagtgtttaggcttattccatcataaacaaccaacacaagttccaacctttgcatttcatctcatatcatacagcaatgaacacat

SEQ ID NO: 98353 - DNA, 454 bp, Glycine max
  unsure (1)..(454): unsure at all n locations
tacaaataggtgctatgcccaggattgatcatcgtccccgcatccggctaaagacattaaagaagcactcctagaaggtagcctagtatctctaattntgctctttaaaaatcctccttttacttgtttgttttcttgagttatgtcttgaattcacctaagtttatatgcaactatagaagtttaggaaatgtatacataacaaggaataatccaaatttttgcaaagggttttgcaaaaaaaataaaattagttagctcgcctaggcgagcgtgtctgacgagaattttaaaagatggggggtgaagcaattcttcaccctatttcttccccaacattcaaaatcacccaaaaggttacgggagttctcgaatccagcagccccaagcctccatttgtgcatttttgcttttcattttgcattttntgtcatctcctacaagtaagtactat

SEQ ID NO: 98354 - DNA, 449 bp, Glycine max
  unsure (1)..(449): unsure at all n locations
taagaattgtctcactcagttcaatgcacacacganaatcactcaatgatatgtatttcaagataaaccaagtacataacaactcaagtggaccatacatcacacaaacaacaaggtgaggcccaaaacttatctaactggttcaagctcaagggacttctcatacgtgactttttttgctagtgttttacctctatggaaaagtcttatattgaagtggtaagttcaaaacaaaaagtttcaaaaagtgttttacacaaaatgaattcctaaaaattaacaacaaaccaatgtagagtaaaaaatagaaaatcacataaaggtcataaaaaaatatcatcaagttgtgagtgaagtgacaggtcacgaatgcccactgtattacaacaacccanattgcatgtcctagtgcatacatacaacatatagaatgaaaaataaaacaaagg

SEQ ID NO: 98355 - DNA, 454 bp, Glycine max
  unsure (1)..(454): unsure at all n locations
agcttgtaatcgattacacacatactctaatcgattaccagagcatattttcagaanatattctcaacagtcacatctttttatttggttcttgaatggctatcaaaggcctatatatatgttacttgagacacgaatttgccaagagtttttcagaacaaaaaggtcttatcctcttaaaaagaaaaatcgttttgtcctcttacaaattccttggccaaaacacttgtgattcaaaaaggaattatttgagtgctcaaattgttcaatctatctcttttaagagagatttctttttctcttcttctttattctgaaaagggattaagagaccgagggtctcttgttgtgaaaggattctaaacacaaaggaaggattgtccttgtgtgtttagaacttgtaaaggaatntacaagatagtggaactctcaagcgggtngcttggggactgga

SEQ ID NO: 98356 - DNA, 437 bp, Glycine max
  unsure (1)..(437): unsure at all n locations
gatcatgttaacgggaaagatatgatntgtggagagatgtgggcataaacacacaaagattatgaggatcttcaaaaaagtgaacgtgatctttgtgtagaatgtgaaggttacaacaggtcagcaaaaaccttaaatgaaaaacttttgaagaaagaagatttaaaggatcagcctcaggatgttataaaacattgtgaggcgattgacaccttaaaatctacattgaccacgtttgttagtagaagtgaaagtcttgacaatctaataagatattatagatgtctcatagacagatctagcaatgtgtatgaaggaataatntatgttcacgatgaagatattgttgtatgttacgtttgtggtaaagttgaacatatgacgttcaagttcacgaatcgatccagaaagggtgcatccaatgcatttaaaactac

SEQ ID NO: 98357 - DNA, 375 bp, Glycine max
aaagggaagccaacaagacaataagctcattagctcaatgtagcagcgatgagaatattttgttggataagtgaacatattagacaagataggatcgagaaaaaaatgtattagagaaaaagttggggtagcacctatagtagcaaaaatgatagaatctcctcttatgtggtttggacacatgtggagatgacctaacctgtaaaagaccttgtgcaaaattagatggaaagtatctctattgctagaggtgtagagaaaccaagaaaatctacaagtgaaaaaccattaagaaggatttaaaggttaatggtttgtagatggaaagtagttctattggcgaatccatttctggatacaatagaatctgttgac

SEQ ID NO: 98358 - DNA, 433 bp, Glycine max
  unsure (1)..(433): unsure at all n locations
ctgtgccttgagtaatntccggcgaatagtagtgaacacttcatcacgagacatgagaagatcatctactgcatcaattttagaggatcctgcaatataatctggaaaagaaaaaggcttgcgtccatatgttatctcataaggggttgagcctgtgctgctattccatgaagtattatgagatagttctacccacggtaagaacttcccccacgatgttggcctacgatgaacaaaagctcgtaaataaccttcaattactctgttcatgacttctgtctgtccatcactctgtggatggtaggcagaactcattcgaagatgagtgccactaagcttgaagagctcttgccaaaacccactaatgaacaatggatcacgatcagatactatgcttctggggataccatgaagcttgacaacaatgttaatg

SEQ ID NO: 98359 - DNA, 475 bp, Glycine max
  unsure (1)..(475): unsure at all n locations
agctggtatgtttctcaaacaaaaaactagttattactntcttcatactcaacatgatgtcattatcttcatgtagatgttatgccactaagctctatcttctttgatgcccttgtgcgagttggtctattcgatgtggtatctgcagatgcctcggataaacttcaggaacaatattttcagcatctgagccttccaactcagtggcgagctttaatcagattatgagccacagatttgaaacccagttttaacaccttacaaacacaaattacaagggaagaatcagttccagcacccccaagtaacaaaaagaacaaagaaaggataagcgcatgtttgttnttcagatgtaaacagatgtttggagcacaatgaagtttgtaaaagcatccagacctcttcttttgcaaaactaagttagtgaaccattatatttactttggaattcatgcaccgcattttgaattaaatc

SEQ ID NO: 98360 - DNA, 439 bp, Glycine max
tgtggcatgagctcggataatcgaatcttatccttaataattttattctgagcaaaagtgagcacaatgttctttaaaatttgatatagaagaaggctatgcaaacaaattaactctaagtgtttgtgtggttaccttaaacttcaaatcttcttgttccatttccagagatgttatcctattctttatgtcctgtagggcttcctcagccatagaaggatttacatctgatattggtcttactatttcagccacctgaaaataaagcataaatgacgttttgtttaaccaaactcagactctgtttattgcattggagaggttggaaggcgagaaccataaataatattgtcctaactaacctttagaacattagtggacaatctcagtaattgctgggctaattgtactttctcttcctcgatctcctgtggcatta

SEQ ID NO: 98361 - DNA, 381 bp, Glycine max
  unsure (1)..(381): unsure at all n locations
tgagaagctagtgcttatctacacatacccctctcataacttagctcacctccttgagaagcttccttaagaagattcctaaagaagctagagtttagctacacacacctctctaatagctaagttcacctccttgagatgataagctagagcttanctacacaccccctataatagctgagctcacccatatgcccaaaaacatgaaaatacaaaaaaaaagtgccttggaatctaccctaaggctcatgagaaccctagggccttcccttggatctctagcccaatctacttggagtcttctatccaatgcccttgcggggtaggattgcatcatactcctaaggaccccttggatgagatattaaatgagtggagatc

SEQ ID NO: 98362 - DNA, 415 bp, Glycine max
  unsure (1)..(415): unsure at all n locations
gtaatcgattagatgcttgatgtaatcgattaaagtgttcttgatcacttttgggaacacttttaagaacaaagtaatcgattaggatcacctggtaatcgattaaagcaaagactcttgaaaaaccaatcattgtctcaattgaactatgtgattgattacgggtaactggaaaccgattaaactgatatgaaaatctctctgcgagctacaaacacttgtgtatttgaatatgattagccttgtaattgatcaaaagagagattnttatacactaaagaaagtttctaactttagaaacaatcttcttattcctacatgatgatgcatcatgtacatatgaaaagatagagattatgatgcaacaatcaatacaaatgccactcaagatagttgggcatgtaaaagacaaaac

SEQ ID NO: 98363 - DNA, 473 bp, Glycine max
cgggatccttaagcacctgcagctgcagcttccttttgttattattccttatataacccaacgtctaacaggaagaaaaaatttgcgaaataacttctgtctccttcaggctgcagtcaataacagaatatcgcgttaacaaacccagagccaaagcgaatcgtgctatattgtctccttcaaacccaaagtctcgaaatattgcttgatgttgacaactctgatatctaataaagagaattttgcaaaataacttgtggctccttcagaccctcaccaattctccaacactctcaagtttcatattgcacaagtttgaacaacaccctatctccatccatgggaataatgacgagaagaattcaatgcttaagatcctctatctatatatcttacaacctacatatgagcgaattgatgctaacggatacaggattcctacataaaaatgttgcagatgcttctccatatcc

SEQ ID NO: 98364 - DNA, 425 bp, Glycine max
  unsure (1)..(425): unsure at all n locations
aagcttctagagagttctacactactctagagaactctatgacgttctagaaaatgctatacttttgcagaaagctccagaatattttataacctctcccattaacgagagatcccagcaaatctccccctcccgacttaattggggggtagaagcaaaccggcaccttggataccttatgtcaatgcgcttaggtcatcatgcaaagattgctactcttcttgcatggctcttcttcactccaccaattcataggagttattctcatgcaaggattgcatctctctttgcatgactcttctccattcttcaattgtgtgaacacatacttgaacatgtctncatcatgagcgacgttgtcctatatcttgaactgctcgagctaatgacggctcctgatgaacctgactcttgataccactgtt

SEQ ID NO: 98365 - DNA, 409 bp, Glycine max
  unsure (1)..(409): unsure at all n locations
cgggatctctaagtcacctgcngcatgcaagcttgtcatttcatctccgctctttgtctgtgtggtatctgagcaaatcagccaactcggacctgttctgactatcctcgtggatacccaacttcaaattcttcgaaaaagcatcatagacacttgtgtaatcttccttgttctccgcaatttcattgaacatctcaatgcacttcttcacgagattctttctgatcaccttcaagatcttgttttgttgcagcatctcacgagagatgttgagcggcaagtcatcggagtcaacaacacctttcacaaatacaaggtactcaggaatgagctcctcacaattgtccattataaacaccctcctgacataaagcttgatgttgttcatcttcttcctggtgtcaaacaa

SEQ ID NO: 98366 - DNA, 441 bp, Glycine max
  unsure (1)..(441): unsure at all n locations
nnttggagaacctacttggatacaaccagatcataatgcattctccacaccaggagaaaacgacattcatcactgaagatgctaacttttgctacaaggtcatgccattcgacctcaaaaatgcaggcgcgacataccaacgactaatggaccgagtctttaaacaacagatcaaatgaaacgtcaaagtatgtgtggacgacatagttgtcaagtctcaaagcataccccaacatgtggtggacctagaggaagtattcagggaactatgcaaatacaacatgggcctcaaccctgaaaaatgtacttttgtggtaggtggcagcaagttcctcagcttaatgatcacacgtcggnggattggagccaatcccgaaaaatgcactatcatactggagatacgcaaccctaccaacattcaagaagtccagaagctcaatg

SEQ ID NO: 98367 - DNA, 468 bp, Glycine max
  unsure (1)..(468): unsure at all n locations
agctntntgtatcagtagtagcctatattgttacgagcctatttaatgtaaatttcatagcaaacatatatccatactctggttccctttcaaaatatcaatgtctgattgtggaaccatttgtatggtcctttatgtactattaagtacctctggtactccaattaatatatagattacctttgctaataaaaaaaatggaagcagaagggagattaaaaagcaaaattgtttgtaacaatcagctgttggaagaggcccaacaattatgggacctgcggacaaccatatgcttggaagcagacacatgtcacttgtgtgttattcaaagctttgcagatatggaggccagagacagaaatgaagctatggagttgggagagaggaaaactcanatgaaatatttttcctacaacattagagggctgggcagtggcagtcacaatatatatatacagaatggcagta

SEQ ID NO: 98368 - DNA, 374 bp, Glycine max
tcagagtatttagtgaataggacaaactgatcaaagtttaacggtgttattagagcctctgagagaattgcgcttgcttctcaagagagtgctacgctggggacgtatcctttccttaatgaagagataacaaactcattatgtggcgaacgaaatctttttgctactggaatcgcgcaacgaaactatggttcgaagaagaacctgtgtcttaattgactgaccatccgggagagagtacagagagcctggctagaacctcggtgctgttgtatagttttccacgccccactgcttacaagtgtgattgatattgctgcccatggcaaaattacattgagagcttgatcagatacgatgaggtaggatctatg

SEQ ID NO: 98369 - DNA, 468 bp, Glycine max
  unsure (1)..(468): unsure at all n locations
agcttctagccaaatggacttaccttgaattaattcctttgatatcccttttgagccttgtttccctttccttgttttgaagctcactacaagccttaagtgaaaaaccatgatatcaccatatccttaaggaattttggagctctggaattgttttgggaataagtatggggggtttttgtttcattggacaacttgttttgttggctatgcttcatgatgtattttgggccatacttgatgtacattgtatattggttaaatgttggacatgctaaatgaaatgttgtttctcaaaggctatagagtaaaaaaaaaaatatttgaaaaaaaaaattcgaaaaaagaacaagaaaagcaataaagttgaatgaataagatcttaaatggcacaagaatgatgaaactctcggctctactcttcatggttaaaatntaaatcttacttcttttaatttcttatttttt

SEQ ID NO: 98370 - DNA, 452 bp, Glycine max
tacggacactatgaaactcaagctgtacaacaattgcaacgataatgtatggttggttggtgtggtgggtttaaatacgacgaatgaatataaatctggtgggaaaaacgatggtttatgtgttgaagtgggtgacgtttgaaggacacgtacaacacggtaactgtcttattactctgtcagggttgccgtaaaaatgaatacctgacgcacgccaagaaagagtataggggtgtttgatggatgtgaccaacgcgaaccagaatccaagaaatgatgctccagaatctttttttttttggttgttgttgagttagaaatggtggttgtgttgtgatggtggtaacagtgagggtgacatgtttaattaaaacaatgcagtgtgtgggcaaggttgtgaacaggggaaggcgtggtttgaattgaattgatgaaaagataaaaagggttga

SEQ ID NO: 98371 - DNA, 446 bp, Glycine max
  unsure (1)..(446): unsure at all n locations
agctttcttgagaaaacttccttgagaagtctttttgagaaaacttccttgagaagctagagcttagctacacacaccccctcataactaagctcacctccttgagaaacttccttaagaagattcctaaagcagctagagcttagctacacacacatctctagtagctaagctcacctccttgagatgagaagctagagcttagctacacaccccctataatagctaagctcacccccataacaaaatacatgaaaatacaaaaaattccctactacaaagactactcanaatacctcanaatacaaggcaaaaaccctataatactagaatgaccaanatacaaggcccacacgaaggagaaatctattctaatatttacaaagataagcgggctcatacttagcccatgggctaaaaaatctaccctaaggatcatgagaacc

SEQ ID NO: 98372 - DNA, 418 bp, Glycine max
  unsure (1)..(418): unsure at all n locations
gggctntctcgtcggcgtcacgtttgagctgttcgatgtgtcgacgttttcattcattgtcagattttaagtgagggtagagctgggagcaaaagacctactcgatctgcgaaaagcgatctttggcatcctgaatcgatgcgacgaggatgcactccttgagacccgtgcccaacacgatcacatcgtactcctcatccatgttcgatcgatctcgatctcactgaaaatgttgacggcgtaatataattggcattaattacaaaaatgccatcgcattatgtattacatcggttgaaaggcgcttttgcagtagtgattgatgataataatatggatgatgggtatgaatatttatattcttttgtagaacaaactttataagtgattatgttgagtgtctgtcttctaaagaata

SEQ ID NO: 98373 - DNA, 448 bp, Glycine max
  unsure (1)..(448): unsure at all n locations
agcttttgaanacacaatataaccctcttatgtgttatttttgccacttaacatctatctccaaccttacttctctagcatggtgaggttaaaaggatgaanaggcctaaaacccatacctccaatttttattcacggtcaacttctcccaattcaaccaatggattcctttatttgagttatctttgcttccccaccagaaagagttgttcatcaaatttttaatgtcctctnttaaagtaaatggtaacaaaaaacacttgtacaatataggaaatagattgtgctagtgacttaatgagaattntctttttcgccttggagaggtacttgttagaccagtggttgatacgattccagagtctctctttgaaaaaagccaaagaatgggtttttcctctnccaataaaagatggtaaacccaaatatntccctacttcaatgcttc

SEQ ID NO: 98374 - DNA, 410 bp, Glycine max
  unsure (1)..(410): unsure at all n locations
ntgagagcattgaagggaatagtgaagtcttaagctatcattcgtggaagagctgtgagacgccaagctntgagtactctaaagtgcttagagtcaatagtaagtatccaatcacaagtcttcgcaaggaaatcccaaatggttgaagaaagatgggattgtggtgaacatgaagagatgcaaggttcaagagacaagataataagggtagggataaaatgttacttttgatcattagttatgttctcaccacattataaaaataaagcttcgctgctgatgtcataatctacatgttataatggaagctttgcaactcacctgttttcccttgctcagttagaatttgaaacaagattttcttatttttcagatggactcaaacagtgagagaacgtgggatgacagca

SEQ ID NO: 98375 - DNA, 410 bp, Glycine max
  unsure (1)..(410): unsure at all n locations
agcttcctcggggccattcctgcgaaggcttacatttggaaagttagttntaccagtgggacgttactcttaaagcaaaaatggcatataacctcctcccataaatacaaacatcaatgtaaatttagagcaagcttatgcgcatattttcttacaaacgttctctcgcacaagacattctattaaccgaaaaaaatgcacccatatacaatcaaggcagcttcgttacctagattatttacacgcacttccaaggtgtatttgttacttacatcacacacattttcttggctaaattcacatacatgcatactcaaagcattttgnggtaccacaaaatgcacatgtgcacatcttggtatttctaatacctatacatacacaacactcatgatgaatcttgacaatct

SEQ ID NO: 98376 - DNA, 425 bp, Glycine max
  unsure (1)..(425): unsure at all n locations
tataagaacaaaatngcctanatcattttcaaatatgcatgtgaattangaagcatcaacaagaatcaagccaaggctattgtgcaagcaatcaatggggcaaaacacaccaaaatattatgatgatggatggctcaaattctcacaaaggtaaacttatcactttcaaattgagctttcaaaattatcatgacatgtagaggaaaaacaaggatttcaaatcacaaaatttcaagagacttttattttcagaacaattacccatttcttgaacatatcctataattcaaataaaaatatgcaaagttgtacatgcaaacataattgacctaaaatattaaactataaacccaacataactaacaaaactaacaaatttaacacaaacaaaactagcataaccaaaaccaaagaacaactccccc

SEQ ID NO: 98377 - DNA, 457 bp, Glycine max
  unsure (1)..(457): unsure at all n locations
actgatgattgcttntggattattattataatgattatagnttcagtacattgggttttagtgattttggttaatgtttatatacactattgttttttgttgtgggtagttagtatgcatgtttngaagcatgtggaacaagttaacttgacttggataattatgcacggagaacattttatctttttgtgaaaattggtgttatgaattgattctggattgaatgcatgattgtgatggagcttgtgtttcttttcataagtttgagcaagtatataagttagacaaagaaagaacaagaatgtgaacttacaattagaattgttagtcaatagataggttgattgagaaagaaaaatttgaaccataaccggtgagagtgtgatcttanactgtgagtgaacgactagctntgaataatggtctttgcatcattctctgaaatctagaatgaaat

SEQ ID NO: 98378 - DNA, 437 bp, Glycine max
  unsure (1)..(437): unsure at all n locations
ctatgtcgcanacatctacaacagacctcctcaacctcagcatcataatcagccacaacagaataactatgacctctccagcaataggtacaatcccgaatggaggaatcatcccaaccttatatggtcgaatccttcacaacaacagcaacaacaacagtcttattttcaaaatgttgttggcccaagcagaccatacgttcctccaccaatctagcaacaacaacaacaacaacagccccagaaacagcaaacagttgaggcccctccgcaaccttcccttgaagaacttgtgaggcaaatgactatgcaaaacatgcagtttcagcaagagaccaaagcctccattcagagcttaactaatcagatgggacagttggctacacagttaaatcaacaacagtcccagaatttgatagataccttctaatctgtct

SEQ ID NO: 98379 - DNA, 393 bp, Glycine max
ggggaggaccttctatagctatttcaacagcctcagttcactattattcatcaacagatggtattgaacgtatggggaggggaaaaaattaaattctggatagataaatggtcgggggaagatcatacacttgtacagcaatatagtcacttgttcctgattagtgatcagcaaaacatcaccctctcccacatgggaaatttccttcaagcaatcggtgtcgggacttcacgcgcacaacgaatctatttgactatgagcaacatatacctgtggaatttatggcaaccaataatgctattcaaattcagcctcatatgctggatattaaggtctcgaaagctgatcctaatgcgatatattctactcacccagcctacagactattgatga

SEQ ID NO: 98380 - DNA, 437 bp, Glycine max
  unsure (1)..(437): unsure at all n locations
tgcgaggaaacttccaaccggagatgtgagtgcattgaatgctgaatatgaagacgaggcgctctatgaatatgacctcacttaacctctgactctctttctatctgttgattaataggagtcttgatgaacccatctccattcgaagtgtgaattgaatcgatcagtatatattggtttttgtataaaacaacacttgtgccttgttatacatgtggaatgcaagtcagaggagcatcgttgctcatccataagaattgaacatggtaccaagggatgtacaacatgcgaacattcttctcaatccactgagttaaccacaattttggacatatatcttcttactctaatctaaatccgatgcagtgatgaatatttattactctcatncttggacatatatcttctaattataatttgaggacatctctttctct

SEQ ID NO: 98381 - DNA, 190 bp, Glycine max
ggacatcttgtgctgcccgcttcatacaacttctagcataccctgtcggagattcgtgctacttcttgcacacgttatgaaaccttatgctatccagaacgggactccatctagactactgagagacggctatcctaaacagactatcctggaggagatgaccctatcgttatgtatgactcgcgcatgc

SEQ ID NO: 98382 - DNA, 321 bp, Glycine max
aagaagcccccttgcgtaatttgcccctagacgatgcgccattcacatatggatgtggcaaacacaatgagcaacctatctagaggtatcaaggtgaagtgatggttcttgtaccagacgcaaatccatattttcgctctgggaccgagaatgtgcatagctgatcggacaatctgcggatgagattaacaggctataaatgggagtatgtaaatacacaatcagattttgtctatttgctatccaaaagcattgtggatattaactcgttgaattttttgatggacaagggtggcgatgtagatatacacgcttatcctc

SEQ ID NO: 98383 - DNA, 250 bp, Glycine max
tctcgttcatgcgcatactggttagtgaatacggggcgcagatagtaatgatatataccaccatctctgggacgtgttggcctcgactgagagcacataaactggatggcaaaaaacaggggggccgagtttatacactagttttggatgatggtcaattgagaacgatatatttgggatcacttaggcggcgtcggttttttacataagcagtgctgatacatgtgctgtcatagattgagtggatacc

SEQ ID NO: 98384 - DNA, 229 bp, Glycine max
agcttcaacattcaattctgtgcgtttctatattgacgggactcaatcgaacatgcgagctgtaagaatagtcttttgaatttgctcagaacttctaggttgcatttcgagcgtctcaatatattaccggactcgatccgacatccgagtaaataggttgttgtgccaagaatttgctgatagctcaaacatgctatttcaagcatccgaaaatatttacggactgaag

SEQ ID NO: 98385 - DNA, 297 bp, Glycine max
ctgagcaaattcaaacgacaataaatgtttactctgatgtctgattgagtcccgcaatatatcgagacgctcgaaatggaattctgaagatctgagcaaattcaaacgacaataaattttttactcggatggttgattgagtcccctctttattgaaaagcttggaaaaagactgttgttttctctgagcgaattcaaacgacaataacttgttactcggatgtctgattgagtcccgtaatttatccaaaacctcgaaagtgtatgtcgaagctctgatctaattcaaacgacaat

SEQ ID NO: 98386 - DNA, 425 bp, Glycine max
  unsure (1)..(425): unsure at all n locations
agctntggaagaagttgtgttcaccttctctctaagccaatttgctggcttagcgagcatccgctaagcgcaacactccttggctaagcgtgaggaagaatccagaagaagatgagttgtacaggttcgctaagcgcatcgcttcatctctctaagcgcatcacttcaattcatccactacgcgagaaaggcgcattaagccaaaaatcagtaccgtgcgctaagcacacgagcacgaacaaggccacctatttaagcctgaaatcagattttgtgaagagagttaggactgggatttggagctttgcatgtctggggtttctagagagagaaaggtccaatctccatagagttttgagagattttgctgtgtgataatctgtatagaccagagctggatgcaggagctggtttgagagcttgag

SEQ ID NO: 98387 - DNA, 440 bp, Glycine max
  unsure (1)..(440): unsure at all n locations
ancgcttctctntgacctttgacaagcctntaacttgttctctaatatcataccttcgactctggactagtccctcttagccctttggagcttgagttcgctattgctgccccataaagcccctcggaacttgtttcggccccattcctcttttcgggccctctttgtttctcgttccaatgttgtggctgtagttgtgttgacatccctcagctcgtcacattcctttctgactctgatggctgccgtcttgaacttttccttgactacttgcgttctttccagttccacttttaaggcttgcacctcttcgctttcctcagggacctcagtctcttcctcacttgaaacccctagctttgggaaccaagttatctcttgcgtctgagcctttcaccacatgtgatagccaccaatgaacccattgctgcttctctaac

SEQ ID NO: 98388 - DNA, 418 bp, Glycine max
  unsure (1)..(418): unsure at all n locations
agcttcatgatgatgaatcaagttgatttatttagttntgatgatgacaaagatgatgacaaaaagcccaaagaatgatttcaagattgagtcaacaagttaaagatcaagattaatttcaagtttcatgagaagtaatcaagaagattcaagaattaagagaagtttgatttcaagattcaagagaagatgaattccagattcaagagaagaaatcaagaagacttcacaagggaagtattgaaaagatttttcaaaaaataaacatagcataatttttgttttcaaaagagtttttactctctggtgatcgattaccagtggcgaagtttgatttcaaaagattctaactaaattcgcaatgttccaattgatgttcaaatggtgtaatccattacaagatattgggtatcgatta

SEQ ID NO: 98389 - DNA, 386 bp, Glycine max
  unsure (1)..(386): unsure at all n locations
atgtggtttatacatgatttatgacttgtatgatccaatttgggaaaaattggatgagggcaagagtgatttctaaatctgcccaatttgtgcagcaaaaagctgtcaaattttgtgcagcagaatttgactattgtgcagaaaatgcatatgcattgctggttgtggaaagggtagtacatattgggttctgcatattttgtagcagatcccaacggtcaaaatatagatttatgtactagggacctccagtaaacttttcgagtcgatccaacggttaacgaatcggaacgaagagaatgttactggggtatttgagtatggaaagttgtggtattggaatgtgttttgggcanagntttctttctctgccctgttatcttggc

SEQ ID NO: 98390 - DNA, 435 bp, Glycine max
  unsure (1)..(435): unsure at all n locations
agcttgtaatcgattacacacatactgtaatctattaccagaggagattttcagacaatattctcaattgtcacatcttttcatttggntcttgaatggctatcaaaggctcatatgtatgtgacttgagacacgaattcgccaacagtttttcagaacatagaggtcttatcctcttataagcaaaatcgcttcatcctcttaaaaattccttggccaaaacacttgtgattcaataaggaattatttgagtgctcacattgttcaatctatctctttcaagagagattacttcttctcttcttctttattctgaaaaagaaataagagaccgagggtctttattgtaagaaatctgatcactatgaagggttgccctgtgtggtcagaactgtatacgctttacaaatacggaacttcatcgggtgcttggga

SEQ ID NO: 98391 - DNA, 429 bp, Glycine max
ctaagtgaaaaaccatgatatcaccatatccttaatgaattttggagctttggaattgatctgggaataagtgtgggggtttttgtttcattggataacatgttttgttggtcatgcttcatgatatattttgagccatacttgatgtacattgcatattggttaaatgttggacatgctgaatatgatgttgtttctcaaagactacagagtaaaaaaaaattgaaaaagaaaaagaaaagcaggaaagttgagtgaataagatcttaaatggcaaaagaatgatgagactcttgggtctactctttatgtttaaattatatctttacttccttttattttcttatggtttcttaatatgcacttattccccattgctcctctatttctctgggattcagccacttattccatatttttccatacctt

SEQ ID NO: 98392 - DNA, 302 bp, Glycine max
agcttggtgagcatgaagtatgccttgcgtttagatagcatgaataagcccttcaatcatatgtatatatgtgaatgtgtagcacaaaatgcctctgccaatgttgaataaacgccttgccaatatgaattatatagcatgagaatgccttgcataatatgaatatttatagtatgaagtgccttacaaaaggtgggatggataagcgaaaactgtttttaaaatatgtgtatttgtgagtaggtgacaaaagacgccttccacaaataatgtgtgttatatatatgatgtagcgtgaaaag

SEQ ID NO: 98393 - DNA, 412 bp, Glycine max
tggatgaactcgcataggcatgggtgtagtctacaactctctatggattaagaaccaagatacccaccattgtagaaaagcagaatttcatgcgacctgaaatatttcatgaaatcccttgctctttctttaaagggcacaattattgtccatcaaaaattgtgcatattgattatgctatcttgacactcttacattcaatacttttgaatttacagctaaaaatacacttctttagcgatttaccaacagcacacttcatttcctcgtcgacaattgtctttagagagtgcgcgatgtcacccatggcccatgctaaagatatgtgaggacgtggatcctgttaagagtacttcaagttcaaatactatgagagaaacatggataagacaacatgtatgatacagtggtt

SEQ ID NO: 98394 - DNA, 364 bp, Glycine max
  unsure (1)..(364): unsure at all n locations
agcttgtctaccacacaaccaatgctnnnttccacctttggcaccaaccaaaacaccaaccaagatatgaattttgcagcgaaaagcctgtaggattcaccccacattccggcgtcatatgctaacttgctcccatatctacttgataatgcaatggtagccataacccctgctaggttccctcaaacccccatttttctgaggatatgactcgaacgcaacatgtgcatatcgtggagggccctgtggcattccattgagcactgtatgaccctcaagcgtaatgtgtaaggtctaattgatgcgggccggctgaaatttgaggagaantcgttgtaaatactggcgttgacaagagatgcca

SEQ ID NO: 98395 - DNA, 230 bp, Glycine max
  unsure (1)..(230): unsure at all n locations
ctgaattcattctatgcacccttagggatccattcttgctttgtatgtcttcatcttcattcttctaccgtcggtattctttttctttgttttaagcgagtttcgaccgatcgcttaagccgtaatctcacttaatcaatgatcaaatgaatntcaactgatcatttgcggtggaatctcgtttaatcagctttaaagnnnaatgcaaccgatcattcatgctgtaacct

SEQ ID NO: 98396 - DNA, 390 bp, Glycine max
  unsure (1)..(390): unsure at all n locations
agctntngacggactataccaagctctatgtaccagggacggagaaagatctatatataggcttgctaagggtagagagaggaagactagagatttggatcaagtaaagtgtgttaaggatgaagaaggcaaagtcttagtgcatgaaaaagatatcaaggaaaggtggaagacgtatttccacaacttatctaatgatggatatggatatgactctagcagtctagacacaagagaagaggaccgaaactataagtactatcgtcggattcagaaacaggaagtaaaggaagcattgaaaagaatgagtaatggtaaggcggtggggccagacaacatacctattgaagtgtggaaaattcttggagatagaggtcttgagtggctcac

SEQ ID NO: 98397 - DNA, 427 bp, Glycine max
  unsure (1)..(427): unsure at all n locations
taaaactaanacaatgaaatgattagacataaaaattatacataattttacacttgttaatatatttaattgtaccatgttcatttcctaaactttttggtgagtttcacttccttaattatgatttgtgagtaaatattataaatttaaattttcttccatatattaaattacattaatttaaattataaaataagtaaaaaagtatatgaattaacggtacggtgaatgacttaaaattcaatatattaggtaaacatattattcctatcatacgtgtcatcaattgaatatatcaagctgaattaggagtacaataaatgtgttctattgattctaacggataatctgtattaatggaaaaatgggaaccgttaactgtgtgcataaattgtatatgcaataaatagaattaatgaatacatta

SEQ ID NO: 98398 - DNA, 431 bp, Glycine max
  unsure (1)..(431): unsure at all n locations
ggatcctaagcaccgcggctgcaacttcccgagggcaggttattccttttcctaaaatatctaaaaatctcaccagatgacgatatntttctttcttggaaggtatcatacgatatggtacttccacaccttcattcacaactttttcacttttactcttctttacattcttattatttctttatcttctttattatttttttcattttctcgttctattactacttctttttctttttcttgagccttcaattctttattcttgaccattatatgcgcctctatttcttgattactttcacctctcacctcattttttatgccaccatgacactttcttatcagatatttatcgtttatgcacaacactattctcatcctcagccttcacaaaccatttactacttgtcatcacaaacttgcatttctcc

SEQ ID NO: 98399 - DNA, 443 bp, Glycine max
  unsure (1)..(443): unsure at all n locations
ngacaaaccaacatgtttaagtaataataacaataataattataataataataataataataataataataataataataataaatattattattattaaataaaaaaattaaaactcttcagattcttataaaataataaatagaaaataaaagacattttcagacaatttaaatatttttgtttggctatattagtataaatcatctctaatccatacattctttaatatgatgctctttttttattttcttttgatatacttcgtgtnttaacgacttgaatataatatgattttgcttatcaattatttttgaatttgtacattacttatacgtaattctataagtttcattttttttagttagtatttcactaggtgttaaaataattaattgatcaaagacgtcttttagtaagcttttaaatacgctccacaacta

SEQ ID NO: 98400 - DNA, 475 bp, Glycine max
  unsure (1)..(475): unsure at all n locations
ttaagtcacctgcggcatgcaagctngtttggttttagcttttctctggtttagttataggatactctaacgtactatattggtttcaattaactacacgggtgtggtaaaatcatgcgttgtatatttctgaagggattgtgtgttgaattggaagattttgcagtttgtacacacaagaagctcgagatttgttttggttcttttgacttagaagttttatttatttatttttgataaatggaacttcactatggactgatttcttttggtttcactttcaatggtgatcaatgctattggaaatatgaaaaattagttagttcataaaaaataccagcagagaagcaagtggtcctcttaagcatggctgtttgtattgaaaaccataaagaccctanactttggctcatcgagatgttaccattatatgttgaataattntttaaccaaatacatgacctgatttaacctt

SEQ ID NO: 98401 - DNA, 467 bp, Glycine max
  unsure (1)..(467): unsure at all n locations
tgccatagacaatacaatcaacanagtaggaatgccaaatccaataccccatcctgcattgtcttgaatccaaacaactatgctgcttgatacaatggcacctagatagatagaaaaataataccaattgaaaaacgaccacttcctaatcctttccactggatcagtatcatcaaattgatctgccccanaagatggcacacatgactntataccaccaatcccaagcgcaatcacgtacagaccaaagtagaacacagcatattgtgcaggggtagctggagggcatacagaacccaaacattcatcaggctttaatgcacgtgaagatgcacaaagtgtcaaggtacacattccctgcacacagtagccatatcactatttcaacaactaaaagacaacttaacaacaaagcctatatggtattaagtgagaatttaattttgatacactgtcaatggcgcaca

SEQ ID NO: 98402 - DNA, 455 bp, Glycine max
  unsure (1)..(455): unsure at all n locations
agcttgtgccacttcacgtctagaatatgattgtttcatatanatccaaagacccttatgtgctttgctgatggcttcttaccgttccaagcttcaatcggggtcttgtcttttatagacttagttggacatctgttgattatgtaaatagcagtgtagactgtgtcatcccataatgtgtgaagtagtcccttctccttgagcatcgatctagccatttccataactgtgcgattctttctctcggacactccattttgttgaggagaatatgctactgtaagttgtcctcaatgccttcatcctcacaaatttttcaaactcacgagaggtgtactctttgccgcgatcacttctaagtacttgtatccgttttccactttgaatctcaacgaagggccttgaacttgttgaattctccaacgaactctgattcttcttgtacaaaatatacc

SEQ ID NO: 98403 - DNA, 454 bp, Glycine max
  unsure (1)..(454): unsure at all n locations
ntatcaaatgaatgttaaaagtgcttctctaaatggctttattcatgaagaagtatatgttgaacaacccccacgttttgaaatgtcagataagccaaatcatgtttattgattgaaaaaggctttatatggtttgaaacaagcccctatggcatggtatgaacgtctaagaaaatttcttttagagaaagatttttctagaggaaaaatggataccacactattcataaagagaaagtatgatgatatttcgttggttcaacatatatgttgatgatataatctttggatccactaatgattcattgtgcaagaagttctctcttgatatgaaaagcgaattttatatgtcaatgatgggagaactaaattactttctggggttacaaatcaaaccaactaaagaaggtattttgtcacccaacaaatactgcaaataattatctaaagattt

SEQ ID NO: 98404 - DNA, 481 bp, Glycine max
cgtcccggatcttaagcacctgggctgcagcttcctcaccacctcattgagtatcatattaccatgaaggatatgtctatctttaatgaaagctgatcgtctttcatcaattaagacaggtatgacatgcctcaatctgtttgctagtaactaggctatcaccttgtacatgcagtctatcaaaaagattggtctatattcattgagggactgagggtggtttactttacgaattaaagccaggaaagaagcattgttgcctctagggaagctgccattgacatgaaactcatccacaaatcttctaaactcatgtttcaacactccccaaaattccttaataaaattgaaattaaaaccatcagggccagggcatttgtcaccaccacagctccacacagcctctttgatctcatggtctgagaaaggggtaatgaggtcctccctctgcctctgagtaagtgaggagaattggactcca

SEQ ID NO: 98405 - DNA, 455 bp, Glycine max
tcccacagtaggtgcatcattttcgggtgttgtatcctctgccttttccatcgtaattgggaggtagtccgtgtctcttgtgacaaatgctttcattgtgaccgatacatccacagaattcacaaacacttttgacagcgttaatggaagatccttctttatattcgagattgaaacttgctatatagttattacctgtcaggagtctctcctgctgtgccacgtacgaaaaaatgttcgtatggtgggtattggatccatgagcaacacatgggaacgtatattgctatactgctcgtacaaccctcgcatgaactgcatagcgtgagcttctctctttcgttgagccatggtggtgagtaccaagccagtacatatgacagtgcatctacatatgggatccggtctgaaggtttcgatcccatcccttttgatgcgcagctagctgaagtatt

SEQ ID NO: 98406 - DNA, 390 bp, Glycine max
ctcagttgcaaaaccaacaacaacagaataattatgacctttcaagcaatagatacaatctaggttggaggaatcatccaaatttgagatggacaagtcctccacaacaacaaaagtttgtccctccttttcataatgctgctggtcgaagcaagccatatgttcctcctccaatgcagcaacaacagcaacagccacaacaaagacaacaagcaactgaggctcctccttaaccttccttagaagaattagtgaagcaaatgaccatcaagaatatgcaatttcagcaagagacaagagcctccattcaaagtctgacaaatcatatgggggagatggctacacaaatgaatcaagctcagtcccaaaattctgacaaattgccttcac

SEQ ID NO: 98407 - DNA, 405 bp, Glycine max
gatggtgcactgcgtcttatatcaatgctcgatggctctatgatctatctatgtaagtccaccgatatgatctattctgcgctcaaatatttaaagatgggttaatctctcagcggttacctaaacatgttgatgatgcaataaggtgcataacataatgtatctagatctaccaaatacatgtatatgatcactagtgaccaatcacatgagctttctattggccggacccaccttagcattcatgtaaaaaagagaatgtgctaacgcatgttctatggcgaagtgcttttagaactaagaacgaagcacctttggatagctttattatatccccaaactacggggactagccaatcatgagttgagcataactccctgccctctgcagagtgatctatacat

SEQ ID NO: 98408 - DNA, 456 bp, Glycine max
  unsure (1)..(456): unsure at all n locations
gcatgcaagcttgtgcaactataaaaccattgccatcttcatctnttgngcaattcgattgcatgttgactttggtagcatgaaacatctcatcacataggaaggaatagcttgcaccactaactttattatgccactcatcctgcttttgaaaacatcttatccttccaacctttcatcttattccaaactctatctctagcaaaactaaacacttgagactttgatctccccaaaatggttggaagacccaaataatttacatgtctctccattgcctntacccgaagcaacttatcaaggtcatcaattttggtactaggcacattttggatacaagagagctcagatatctctagattaatcctttggccaaaaaaagcttcataggttttcaagatttcaccaagttgttttctttctcttcattagctcttgcaaaaatgatgctatcac

SEQ ID NO: 98409 - DNA, 364 bp, Glycine max
  unsure (1)..(364): unsure at all n locations
tgcgatactctttacagtccactcctaccagcaccgagatggggaccttgtgtgcaaatagatgctcccacctgtgtaccattatcataaggatgttngcccgtgtactacaattgatccttcttattgacgaaaaaggtgcatctcaaatctgggctgcttgtgcttgcccaatttgaaaggagacgaaacacctacacctcaaaattggttgtgtgacaggtaattcattctatgaaaatgcgtgcagtgaaggaatgagacccacaattttgctattgggagctgaatctttagtccaagatagtgtgaactctattatctaagcaacaccacatcttctgaactaaacacaacatcacta

SEQ ID NO: 98410 - DNA, 455 bp, Glycine max
  unsure (1)..(455): unsure at all n locations
agcttgaaagctattacgggggaaataatttnttctatttgatgttatcagcgagactagcaggattgtgtgttttgtaatccgngtctttccaaagtagccaatggggacatcattatacatttagtacattacccactttttatttggtgtacattcttttaattttaaattgggtccagatgtggataagaacaactaaactaagtcatttaatgtattgcttttatttaatgtatttaaattattagttattgatttgagaaaaaatattatatcttactaacaaatttaatatgtggatagcatagactgccacgttaaaagtttttacattgcaatgatcaattaaaaatattctttcgcatgactttcaaggtagttatcattcaaacaacaaacttatcatatatatatatatatatatatatatatatatatatatatatatatat

SEQ ID NO: 98411 - DNA, 458 bp, Glycine max
agaactatatatgcatgtgtatgtgatatgtgatttactgatgatatctttattgatgatattaatcaatataaggtgacattgatgtttatgataatgttgatagagaatgatgttgttattgaagatgatattgatgattaatgatacgagaccttggtagtgtgtatgataatatggatatgagatgatgttgttattgaagattatgtcgatgagatgatattgttgctgttgagaatgacattgatatgagatgatgttgatgttgagaatgacattaagatgaaatgatgttgatgttgagaatgacactgagatgagatgatgttgataatgtcattgtgatgatgaatgatgtgtatgtgcatggagggagcagagaccatgatggatatttctggtgagggaaataaagtgtgttaagagagaatagcttctctggagggggatgactt

SEQ ID NO: 98412 - DNA, 444 bp, Glycine max
  unsure (1)..(444): unsure at all n locations
agctgggccaaaaggtnggtttgaatccattggtgaaggtttctctttattggactgaatcataagtattttcactggaggcaattttgttcgagctgggtagcacctctatgggaggcaaagttcttccttcaagtatttaacgtagtattatatccatgactcaaatttaaaacctctagttaagctgaaataatcacgatagttaagcaacttttgaaggttatttcataagagtgaaatataaggaatattgcataatagcaatagcactaggtaattcgtatcttaatgaaaacgcgtattcaatctcaaaatatttccccatttggtcgtgctgcaacacttatagaagaaagcttcatttgtatttcacaatcacatttagcaactcagtggatatgctgtggattgatagaacataactaatgtaaaggaaatata

SEQ ID NO: 98413 - DNA, 465 bp, Glycine max
tctcagccaacttgcttcctcactagcagttgctagtgctatcatctcatattccatagaggactgagctaagatagtctgtttctttgacttccaagaaacatccccaccagctatgctaaatatatagccgatggttgctttggaatcatctgaaagagtgttccaatctgcatcgctgtatacttcaagtacaacaagaaaccttttataatgtaatccaaggtttatggttctttcaaggtacctcattaccctttcaatagcgtgccagagctccatactaggtctattggtgaacctgcataataatcccataacataagctatgtcgggtctagtacaatcagtggcatacctaaggctgccaatgatactagtgtactcaaattgtcgtatacctgtaccagtgttgctaaacaatattacacttggatcatatggcgtactagcatgtttactttc

SEQ ID NO: 98414 - DNA, 408 bp, Glycine max
agcttggatcctactgctgactatccataatcctgtgcgcaaggtgataacgtcacccctatccttagcgaatccatcttgaatagtatgatgagggcctatccaacatgaagcggagtagatagaggctgtccccggtggaacagtgggtgatatgacccctgttagagctaggatttccgaccgagaagagggctactgtctcctaggaatgtaagacgtgcctgagactgctattcttctaaaagtgttccatgaggtgtccgcaccattacaatatctgtactggcaaaattttcctgatgcctcggtcgacctagtagcacacctgacctgaagtggttttcccttctttgccaacccagtgtgtgcgtggtgacgtgatccctccgcacactgaaccttttt

SEQ ID NO: 98415 - DNA, 447 bp, Glycine max
ctcagcttgtaagagcgaaccgcctcttctattcaaatcctgtgtgtgcgagcttaccaagaaaaagccttgctttgtgcggcgtcctggggcgaacacacctaagatttgatgttgatgggtcaaatctccccccgttaacacatgctctctaaactcttatgacatggagacgagaaacaaggatttctagtctctaactgtcgacaacttttattttcttaacacaatcccatttcttgagcatctcctattagtcccagaaaaacactccccgtcttacatgctcacggaatagacgcatcatcttatactcaatatccgacgatactcacatcattcaccaattcacacatctaacgaatttgcggaccgacataactatcactaccaaagaacacttcctccccacttcggaggtgagatgatattgggttctacgaacaa

SEQ ID NO: 98416 - DNA, 448 bp, Glycine max
  unsure (1)..(448): unsure at all n locations
agctnaagttatggtgcactgtattgttttctagagcctcagtctatatacaacgcataggacaaacgtctagaatgtcaacatcacatttaaacaagggtcaaggaatcacaatgacaagtgtacatacgacctttcctgaatcagtaagtgatatccatgtcggacagggtggaaagaattccattataattacctaactaatgattttttggctttagggcacattggcaacttgttgtcctatgtccatgggacactataattgtacggatttggtctttgcgtaagacgcctgatgttaacatcaaggctgcaattaacaggttattnttcaaatcataagtccaataagggataccaattatagcatattaacacttcgaatcttatcttatatacattaacactattttcaaactcgggcattgagacaataatcactact

SEQ ID NO: 98417 - DNA, 482 bp, Glycine max
agcgcgaccatgaatactcagctgctttagcaatacttatgttgatgaatacgttctacgagcacgaatactaaactctgcaatatacgagagtcattgtgaaaaaattaaaattcctcagcatgattatatattcgtaaattcatggcctatgagaatcattcatgaagaaggggatttatatggctgtcatatacactacatcatataagtggcacatgaacgactatagaagacatgtatctttgtttatcatactattaacaataaacagtgcatatatactttatctaactaaggagaagtgagcattattactagatatgtgaaaattgtgtgtttaaaatagtgtatcacgaaatatagtattaatatatcacagaatttcaaactgaaagtatgtgtgtataaacactgttcatctcaaatacaaaataatcgtagtgagatcataggaaaaacatgtcccatatttttcacac

SEQ ID NO: 98418 - DNA, 429 bp, Glycine max
  unsure (1)..(429): unsure at all n locations
cgctttatgacggatntgcgagaggccaaactgtctcgaaaccaaattaggctggtatccaaccaggcctaaatagttcgattgaacacctgtacgacaagacaggatctgtggattcaagtaaaatgaccatatttcgttcacttcttcttcattgtctggatcgacaacaggaaaatagtcagtgaaccaggccgggccgacctctcgactaatgaatggagcatgttggggaagaaacttgtcaaagctcataaaaatcttcatgtacttgaggaaaagcttttgtggattctgatcgaaagtcttgggtgttaatcgaagtgctctctggccttctatcgagcgaatggcaacttctttagcataatcttgtgggattattaatcccatctcttgttccaaagtggcgttaagccacaactggag

SEQ ID NO: 98419 - DNA, 266 bp, Glycine max
agctcgtaagaatattgtgaacacatcatatgtcctactaggtggcgggctggcgatgaggcacaacatgctgttcacatgcactctgcgcgcataagcacagcatccactgttgaccgcctgcgactgagctcacgttcttccaggtagtctatatactagtatctctcaacatcgggtaccgattgatcctctcacgctatcacaacatgcgagcaaaacaacatttagacagctcaagctattcacaggcgagcgaaacaagg

SEQ ID NO: 98420 - DNA, 456 bp, Glycine max
tggctcaagaattatattttttgccgacattgtgcaattttcttataattgtcaccaacgccgggcaattattgctttactacgatcaagcaaaatttccttgttgattgtgctcaatgataggtttaccatcgacgtctcctttggtatttcgtgggaactcaaccgccgctgtgtttcggtcgacattggtctgctctggtaaaagatgcagacaaaaatatatcccaccttggctgctaaaaaaaattcctccacaaacttggatcaaaaacaattctagccgacattggtctataaagattactaggtcctgtattctatatagaatcaccggctgaagtctatcaaacattcccttatcgacatcatctcaaaataatgtaaggattgaacagagaaacaataccccataacggtgttgaactacactcgactgaactttgtgcacacacc

SEQ ID NO: 98421 - DNA, 413 bp, Glycine max
agcttctcctctattttgctataaataggtgatgatttgaagaagaaaaacgttcactgccttacgctcttctgtgtttctctcgtgatagcagaggaaaattaattccgtgaagataatacaatccgaggcgcttctgtaacgtgtccgtgagttattacgcgaagacattcgaccgtctttcaagattcatcgttcgatcttcgtattgttctgtctatcaacgggtaagtaccccagaccatgctgttcaatttattctatgtacccgtggtgcgccacattctgggaatgtatgtttgctctcggtttcattcactactcatacgcccgtgtgacgtgcggaggccatttaattaagttattccttcgctgatttgaaaattaaatatattgcatcgatcgttagaatt

SEQ ID NO: 98422 - DNA, 85 bp, Glycine max
ccgagcgtgagcgaccatgtgtgcaccgaaagacaatgggtgcttttcacgatgttcgtctagtgatgtgctaacacgtcgtgaa

SEQ ID NO: 98423 - DNA, 463 bp, Glycine max
  unsure (1)..(463): unsure at all n locations
agctttgacttgagtcatcaagagattatttatatgtgaccatggcatacatttaaaataggaatctatctttcaatcttctctcaacatcattcaatatctttcaactctttctacagaattttctgattcatttctcttcatctttctaaaagtttttgttcaacactttctcttcaaagaaaagttctttgttcaaaaacttgtgctattcatctttttcattctcttctccctttgccaaaagaacaaaaggactaaccgcctgaattctttcgtgtctctcttctcccttacaaaagattcaaaggactaaccgcctgaaaattcttttgattcttcccttacccataaggaagagaattcataggactaaccgcctaagatatcttttgttttcccttacaaagattcanaggactaaccggctgagaattnnttgttccaacacattggacgatta

SEQ ID NO: 98424 - DNA, 307 bp, Glycine max
  unsure (1)..(307): unsure at all n locations
cgtagaatggctagacatgatacatgtcatggtttggtttggttctatgataaacaggatgccccacattattatcatgacacaaatgcaaaaatgatgatttggaaactttatgcagaactgggcatgcatgcgcctatgcggacgctcaagtgttaaatatttatgagtttgtgatgctaaggtncaagattcactttctctaattaaaattaacccattagtttcaaattattttcttattaaaatatagtgcattccttctagtccatttcaggcgtcctgagaaatttttacatgcatttag

SEQ ID NO: 98425 - DNA, 447 bp, Glycine max
  unsure (1)..(447): unsure at all n locations
acctgcggcatgcaagcttgagctntgaattgagtatcatttgttggatcgagtggcctcagaataattatgaaggggggggttgaattaattattcctaaacctttactaattaaaaatttactcttctaaggcttttactatgttgntaagagaataaggagtagaagagaaacttaacctaaagtataagcggaaattaaaatgcacagcggaaagtaaaagagtcgggaagaaggagacaaacacacaagagtttttatactggttcggcaacaacccgtgcctacatccagtccccaagcaacctgcggtccttgagagttcttttcaaccttgtaaaaattctattacaagcaaagatccacaagggatgtaccctcccttgttatctatgaacctaatggatgcgccctccactataactgatccacacgagatgaaccc

SEQ ID NO: 98426 - DNA, 415 bp, Glycine max
cgtacgaatgtaagaaacatcttcttcaaccttggtgattcttgactccatcttattgaatcgcatgtccacttgcgactccaaagtttcataccttgcaccaacaaacgtttgtagaccattgaacctatccaaaatcttttgaataagagaggaatcttctccaccatgtaaatgtccttctttatcaacaggtcgagcacccttttttacccaagagccatcatgctctctttgttaaccaaatgatgcaattacaacagcgcctattataaaggatctcttgattggaacacatggttcacaatcaatacggatgttgaagcgttgaagaaaaagggtcattatgtgtggatatggcaatggatcacttaatcgtcaatccttatgcatgtgatattggactaagtgtgcc

SEQ ID NO: 98427 - DNA, 461 bp, Glycine max
  unsure (1)..(461): unsure at all n locations
agcttcattagtttcatgttgtatagcttataccgcatacactgccagccgccaggtcaatgtttctttggctgccatgttgattaatgtcataatgattatcaagtggcaacattggcaacataatagttaaaagcaataatggggaaatcaaaccccaattatttttcaattaatggatggtgaaatcctgatataaagtacggcggacagaagtgcctataaaaaaataaaaaaaggtgaacataattatgctcacctggaggtttcaaacaattactttcctcgcattagactaaggaaagtaatgctattctcataatttatcttggaaaaatatggtacatattttaatcaaattcaaaactaaaacaatgagaagatgagtatgagtatctaatctttcgtaaattaaacactgtagtgctgagtgctgacagtgaaaatattntgtgatattt

SEQ ID NO: 98428 - DNA, 480 bp, Glycine max
gtgacacttaaaactaagctaacagcctagaccattaaattgaagccaatgcaaagccaaagctagttgatacaagttacagtcacagaacagaagcattagaaatttagaacacaattttatattaattttagcattttaatcacatgccattttcttaaaaggaaaattcacttattttacatatgcattgtgtagtgcaaagtaagcatgctgacctttatcaatgggacaagaggaagttgaacagaagttggataacaaccaggattagcaactagacgagcattctgtatgttctcccttaaaacctctgtcaatccgtatatagcttctttctggatacagataactagatttactcagcattaaaaacaaaattatacaacaagaaaggtggtttcaacttgagattcaagattctcatatatgaacagaaacaaaagctgattagtcaaattcataaatagtgattgcatt

SEQ ID NO: 98429 - DNA, 460 bp, Glycine max
  unsure (1)..(460): unsure at all n locations
agcttgttaagtcatgatttagtttggtttgtaaagactcagtccgtcacacacacaaaaaaagtttgttttttttttcttcagaanaagtgtggttttgtaaagaagattttatttcattatcaacgaaaatactgtgccttacaaaaggccgtcacgcattttgtgtaattttgtaccgttttgaatatatttgtgctttgtaccctttttatctaaacttgatcacaccttttgtcaggtttggttttttaattaatgaaattttttagcttataaaaaatggctaataaaaaaaattagttattagagatattttttagtgacctaaaaaaaatctgttagcataatctttatttaatataaattaaactatattaatacagataataaatgtttaaaaagtataatgcatacctataataacataaaacttaactaatatacacaattcttaaaa

SEQ ID NO: 98430 - DNA, 330 bp, Glycine max
aaagatgtaaacgtagggtttctatacgaattgtagaaaaaaatatgttcaatacgaattcaaattaaaattaagtatttagttgctctaaaaattaaaaatgttcaatatcctttggttcttgaacaaagttcttcttgaatttaaaaagccttgttttctggtgtcgataacattgatgtctgagtggagaggattgcacttgctcccacagaatacttaccaaaatctaacatgatcgccgtcaaatcatcacttgctagtatctgatatacactaacatattaagaagctctgaccatgtactggcaaaataataattatctcatt

SEQ ID NO: 98431 - DNA, 310 bp, Glycine max
caaacaaaaagacaaacatgtcttataaagactcacctaaatcctgatcggaagaccttgcgacacagaagatgactcattttcttgagatcaaaataaacacctctctcagcaaccaaggcctttgcagaaaggattgatcacagcccggtctgcctttactctctgttctcatgcatggtttaatcatctttgtggttctgcatgaatctgataaggcatgctaaaataagtgcttcctagcttcggctaacactaggtgctgcttaatgctcttattcatagaaaatcctagtgttgggagcctaag

SEQ ID NO: 98432 - DNA, 466 bp, Glycine max
  unsure (1)..(466): unsure at all n locations
nggagcactattttgtttatccatttcttttaaggtaataatatttaaacacctcattaatatttcaaatacccctttgacacttttcatntgtttctatttctctcttcttgtcatatcaaatgccttggtcactttttctattatttattttcctttttgaatgttgattagcatagtgtccactaagactatgttctacaagacatttaagttaatttttaacttattttactaacaaaaaaaacttatttgattattctataaataagtttttttagtaacttaagatgttttttgaaatgttacttgaagtaacatgttttaaaatattatcttctaatttttatatttgctccaacttttatcctcaatacatctattcaattttttagttatcattcttaaataaatcataattttattatttttttgcattttaaatttctcaactacttcaaccgtt

SEQ ID NO: 98433 - DNA, 441 bp, Glycine max
agcttaaccaatctgatgggacaattagctacctaattgaatcaacaacagtcccagaattctgacaagctgccttctcaagctgtccaaaatcccaaaaatgtcagtgccatttcattgaggtcgggaaagcagtgtcaaggacctcaacccatagcaccttcctcatctgcaaatgaacctgccaaacttcactctattccagaaaaaggtgatgacaaaaatctacctaacaatttctgtgcaggtgaatcttcttccacaggtaattctgatttgtagaagcagcacattccccctcttccattccctccaagaagcagttccaacaaaaaaaaggaagaggcagagaaagagatctctggaacgtttagaaaagtagaggtaaacatacctctgttggatgcaataaagcaaattccaagatatgccaaattcttg

SEQ ID NO: 98434 - DNA, 477 bp, Glycine max
  unsure (1)..(477): unsure at all n locations
aaatctaagcttcatacttgaganaggaaaataactcaattaaacatatgatcacaaactcattatagcaatcaaacaagacaaacaaataaaattttgttagtcatcatataaacaagttaattgaaaggaaagtttcaaccaacttaatttaaaagataatggttttgatgttacctttntcatgatttaagtgcttagatctttaaagatggaagtcagacttttgctttttgcttaatcttcttgagagatgttctcatcgctctcatagtccttggatagaaggttgatctccttctgtgaaccatcggatgagtcattgtcatcccaagcaatatacgccttcttggatcttctttcttcatcgcttttcttctcattcttttctggccatgattcatttgtggggcagtgtgcctttatgtgactgggtcgattacactatagcatctaagtgttggggaaccttcttga

SEQ ID NO: 98435 - DNA, 440 bp, Glycine max
  unsure (1)..(440): unsure at all n locations
atactctatccgcgagcttccagcatgcaagcttcattcaggacttaacctttctttctcaacgaggctcatagctcatgagcagttatataagggggactctaacttgggttctcttgagttgttaaatgactctgaactcgctttgttggataatgcagaagaactcaccggcctcctcgagtgatacctctttcttgccacaaccctctctccctcggaatgaaccttcatcaaaacatcctcattcagtgcagggatcgcctcgacattttgcccttcgctttccctttagcgtatagcgggctacatcggcacgctagggggtgcgaacactctaccgttgagggttatgccactcagcccggtgatattgtncactctgagcgataacgaccagatatcggaagctttttcctttctaccgccagatgggcata

SEQ ID NO: 98436 - DNA, 441 bp, Glycine max
tcttcagcgtcgactcagagcgtatatcatatgacattgttaccggcataaactgagtccaggaactactccagcttatgagctctatgcaatatcttacgtcctcgtaggattactctgatagaacgcccactctgcggatttgttgaaatgatcgccaaggcgtgtcctgcactgtcctagttaattatagggaccctgctggaagcctgaacattctccttgagtatacccttgtcaatgaagattacccatataatgaagcccttgagtgtttttttcaatgggaatacaatgaccctaacaaaatatgaagatacgccatcaatgttaaagcttatctgatatgtattgaacatggcccagagaacacacaaaacagaggatctaacgtttcataccaatattccttctgcacaatgaagagaataacatcatgaa

SEQ ID NO: 98437 - DNA, 424 bp, Glycine max
gatccttgagtcacctgcggctgcagctgctttacaattaagttttggatatgatcaaatctagggatgattaattaatatataagagaattcccaagtagtttgatcatacaatttggtgtaaaatattctatacctaggattaccaaatatacgcggatgaataccattgtacattctattaagcataggatttattagttctcaaattaataataaaaaacaaggaatataattaattaacataaaacagaggaatttcatttataacagagaaaggggcacaattggacaaatacatcaaaacccctaaactagggtgactagccactcatggttaaagaaaaactagaaagcctattagaaattagaatagacataccacaacgggagaacaatgatcacgatctatcctcatggtatt

SEQ ID NO: 98438 - DNA, 468 bp, Glycine max
tgtaggattatggggtacccatcacatgtggtactaggtggcggtcgggcgatggtgcacaacaagctttccacatccacaatgcgcgcataaacccaccatcccctgttgcccacctccagctgagctcacgtactcccacgtagcccatatcctcgtttctctcaacaccgggtccccatcaatcctctcaaacttccacaacatccaagcaaaacaacattcaaacagcacaagctatcacagccaagcaaaacagagcaagggcagaaaactctgctcaacacatcaaccaaaatcacagcttttctcacttaaagaccacagtaacaattccttcgatccaattcgttaaccgttggatcgactccaaattttactggaagtctatagtgcataagcctacattgtgaccgttgggatctactatcaaacatccagaactcattttacattactctttccaca

SEQ ID NO: 98439 - DNA, 452 bp, Glycine max
agcttatgcgcacacttctttattatcattcacttgcacaagacattcttataactaagaaaaatgcacccatatacaatcaaggcaccttcgttacctagattatttacatgtacttccaaggtgtatttgttacctacatcacacacatttcctttgctaaattcacatacatgcatactctaagcactttggctatcaaaaattgcatacgtgcacatcttggtatttctaatacctatacatacacaaacttcatgatgaatcttgactatctacacaataaagtgctacatttcatgcttgtttcaagtgtatttttttactacctaaagccgcatgcaaattcaagtatatattctttcgctcactaaaattgtattcaaaataacaggtatttttgtaatgtattttcttacataacatgcacatatttatatattttgtgagac

SEQ ID NO: 98440 - DNA, 455 bp, Glycine max
  unsure (1)..(455): unsure at all n locations
cctttcgattcatttatgtacccatggtggtccacatctgtgtttgtgtatttctattctcgtttcatttactttttataccccctcttgacgtgcttaagccattttatttaagtcatttctcgcttaaactaaaaatataataaatttccaccgatcgtttgaattgtattatccgttaacttcggttaaaataaattccgaccgttcggtcgtgtcataaccacgttggaaatcaaaaagaggtgaaaaataatataatagtcaaaacacatcttttagtaaaataaagcggaaaatcaatcggacgttttctctttgggatttctcattcttaattgaattgactaaataactaaagtgaaactaaggctganatcaactcgcctagtcaagctcgtccataaaaaataggttcttgaagtttgtatttcaatttcttactaagtaaaatg

SEQ ID NO: 98441 - DNA, 231 bp, Glycine max
  unsure (1)..(231): unsure at all n locations
gctattacggacctataaaactcagctanacctgacgnctcgtgggactacatatcatgctattcgatcaaccgttcaagagaggaagtctggatagaccttgtgatttatgggcttagtgattacttactaggaacctgtgctcacaacccacatatacttggggcatcaaggccgtcacaatctgaattgctccaaaggtctgaatgataggcgatgagacggagagat

SEQ ID NO: 98442 - DNA, 166 bp, Glycine max
agcttcaccagatgatgccgatcgatcatttcccagacgacatgccccactgattgttcgcgagatggatacaacaagcactggacggtgactggcgctatatggccccgacagaaatatcctgattccggatttgagcaatgttttttttaacagctcgcaggcc

SEQ ID NO: 98443 - DNA, 143 bp, Glycine max
tctctataacctgagccggattattaacttacacaagttgtgtgtcattcacaaaaccaaagtttatgtatgctctgatagagagagatattctcctaaatgcatgaatgacttaataacaccctggtggggcttatcgacct

SEQ ID NO: 98444 - DNA, 415 bp, Glycine max
  unsure (1)..(415): unsure at all n locations
agcttgagatgaggaagtgttgaagggtgtaactttctgctnttattgttgaccacaaagtggtacctggagatatgtcgcgggggtcaggagaccttggggacgtcaggtggggtgctattgcccaaaaccaagcttgaccaatcccgacccaacccgggcatagtcggtcagtgagaacctgtgatgtacctaagcaggcgagctcctggcagtcaacagataaaaggaataaagaccacaaagcaaggaggcttgtggtggctggccagctgtgaactttgattgatatgtgggatatggcctctggtaatcgattaccaagggtgtgtaatcgattacagtgcttataaatgaagacaggagactaacattgtctctggtaatcgcataccaaggtggtgtatctactact

SEQ ID NO: 98445 - DNA, 443 bp, Glycine max
  unsure (1)..(443): unsure at all n locations
cctcagagtcacctgcggcatgcaagctngttaattctatgaatgaatcctgtcacagtttcaccctntccccatatatatctaattgatcccctctaactaattactctagtccccaactaatttttcctttacttctatctaacacaaaactaggctagtcattatagttattgctaataatagtgtttcatatatatatatatatatatatatatatatatatatatatatatatatataagaatttacactactagaaaaatgcgatctagcaatcaaaatagcgactgaacagtttctatcgctacttgcgaccaaatgtaatcgttgtagctaacttgcaccagcgaccgaaataaagagtcgctgaaaaatgtggtcgctctttcatctgctctatatctataaatacaacagaattaaagcaactgaattaactg

SEQ ID NO: 98446 - DNA, 411 bp, Glycine max
tctagtgggagggttacatgaatgaattgaatacacactcgaatgatagagatcccacggctatggaagtatgaaactatacagttgattatgaatgaaaggaattaattagtactacctataccaacaagatgaatctactttttatagcccatcaattaagaactccacaattaagagtgctggctcggagcaattatgaaatgtgtgaccttatgaaaagtttatctaaaagtgcgtgagtgatagacaacacacacttaaacatcttgtgtaggtctgcacggacaatcaacaattctacaaggagtcaagcattgcgaccttaatctccttcttgacactaatatatagaatgtagtctgtgacacaccttatcccgacatacatatttattttatatcgctcctg

SEQ ID NO: 98447 - DNA, 471 bp, Glycine max
atccttgagtcacctgcggcatgcaagcttctttcagctgggcccatgattcctactaagtatcttcaggtagcaggccctgccactgagccaggaccattaactctggcccagagtctgaagtaacccactttgtgttaagaatgacaaggggagtaactacgggttcattatcttctgactgagagggtaagtcagcgacatgcgtggtcaaagtgttggaagggtggaagggcttaaggagtgaacaacgatagacagggtgttttctggactctgggggaagcttaagctgatcagcaactgggccaattttctgtaagacttataatgggccgtaatatcgtttggctagtttagagataacacgtctgacgatagatatttgtcggcgaggtcgtaacttaaccaacaccctatctccttcttggaagttgacactattcggcaatctcttcatagtctattgtg

SEQ ID NO: 98448 - DNA, 425 bp, Glycine max
ggctctaaggatgtgaatctcatttatggacccttaggtgtcccctttattggttgtgcatcttcatctccttcttcgatcatcggagatctttttctttgtttaaagcgagtttcgaccgatcgttcataccgtaatctcgtttaatcaccattaaaataaagattcaaccgatcgtttgtgtgtgtatctcacttaatcactgtttaaatgaatttcagccgatcatttgtgttttaatctcacttaatcactatttaaataagtttcaaccgatcgtttgtgtcgtacactctcttctttaaaaaataagttttaaccggccattaacgtcgcaagttatctctaataaaggattgccgattaatgagccaaaactcaattaaaccaactcatatactgtcttatttcatcaaaaaataaga

SEQ ID NO: 98449 - DNA, 334 bp, Glycine max
gcaagcttcacaacaaagagacacatagacgctggagcttatttccacacacttaatggatagttaaggtcagctacgtgagatggaaaacgaggagcttattgagcaccctctatactagctcaagtctgtctcataacattaaacatgaacatactggatatgctcttctactaagaccacttcaaagaccgtcgtactccacggccaatacccacatctaatatgacggtctagatacatggccctatcgaatgaaaaacctcacttaccaagacaaagataagcgcgttcataatttgccgatggggataaacttactctaacgttcatg

SEQ ID NO: 98450 - DNA, 286 bp, Glycine max
cgcctaggatgcgattgtggtggacatgacacacggtattaaactcataagcgggcgctctgaatggaccgaagatatatggatagaatctgcactctaccttgtgttacgttggacgatagcatccttaatgtacgccaagtggtacccatagttgtgtagataaactgggtgactctcttgataggcttaatatataaaacctacccgaaatgcatcttcgagaaagcttccatgagttgccttagattaactacacatacacttttcatatctaagtttgtct

SEQ ID NO: 98451 - DNA, 462 bp, Glycine max
  unsure (1)..(462): unsure at all n locations
gcaagcttgcaagaactagttcagcagagatcatttatgagtatagagcagttcattgagaaggtggcctggcctggagcccgaccttcttttgtgtgggataatgaaagttttatagcccaagcacctcaacagcatgagccagaaccaaaacgatcactcatctgaagccaccactttggtgctgttgattntaaaaaaaaaagaagattagagacgagatccaatgaggctgctcatcctggaccagtgccagcatcagctgatgcaccatttccaggagtggatccatcttcaccttagcatgtagcagactcttccactcctgtcttagagatacatgagtgctagaccataccagtcctgcctttggacacttctcctccactactccagtatggaatctaacagatgagaaggatgtttagatacaggataatcaagaccagtcacatgaatttt

SEQ ID NO: 98452 - DNA, 458 bp, Glycine max
  unsure (1)..(458): unsure at all n locations
ctcaagctttaactaaattgcaacgttccaattgtttttaaatggtgttatcgattacaatatattggtaatcgattaccagtgtatctgaacgttgaaattcaaattcaattgtgaagagtcacatcttttcataaaatgctttgtgtaatcgattacatggttntggtaattgattaccagtgacaagctttgaataaaaatcaagagatgtaactcttccaatggtgttctcaagattttctcaaggttataactcttccaatggttttcttgaccagacatgaagagtctataatagcaagaccttgacttgcatttngtaacatttgatacaactttttgaacatcttcttgaacttcttcttcttctttttttgccaaaagctttataagttatttggtttccaaccttgttctttcacagaaaacacaagagtgctatatcttttcattct

SEQ ID NO: 98453 - DNA, 369 bp, Glycine max
tcgaaaatggcgattcgatgcaacaaacagtgacctatgtgccgaacgtcgcgaatgctgaaatcacgctggcagcctctaaagatccggtgattgccgacaataactatcttacgacactaacagcaacagtcgctgatacagatggcaatgcgatatccaacactgatgtaacatttactctgtcggaagatgtgaaggcgaacttcacgctgagcgatggcggtaaagtgattactgatgctgaatgcaaagcgaaagtcacgctgaaaggtacaaaagcacgcgctcatactgttacagcatttatgactggcggttatagtgagcacttggtggtgaactttattgctgatacgctcactgcgc

SEQ ID NO: 98454 - DNA, 328 bp, Glycine max
agcttaaacattcaatttcgagcgtcttttatattacgggactcaatcaaacatccgagaacaaagttatcgtcgtttgaattggctcagaggttcaacattcaattgcgagcgtctggatatattacgagactcaatcagacattcgagtaaaaagttatcgtctgttgaattggctgagagcttcaacattcaatttcgagcgtctcgatatgttacgggactcaatcaaacattcgagtaaaaagttattgtcgtttgaattggctcacagattccacattgaatttcgagcagttcgatatgttacgggactcaatcagacatc

SEQ ID NO: 98455 - DNA, 437 bp, Glycine max
  unsure (1)..(437): unsure at all n locations
cgcttgagccaattcaaacaacaataacgttttactcggatgtctgattgagtcccgtaacatatcgagacgctcgaaattgaatgttgaagctctgagccaattcaaacgacaataactnttttctccgatgtctgattgagtcccgtaatatatcgagacgcacgaaattgaatgttgaacttctgaggttattcaaacgacaataactcttttctcggatgtctgattgagtcccgtaacatatcgagacgctcgaaattgaatgttgaacctctgagctaattcaaacgacaataactnttttctcggatgtctgattgagtcccgtaatatatcgagacgctcgaaattgaatgttgaacctctgagctaattcaaacgacaataacttttttctcggatgtctgatagagtccccgtacatattgagacgc

SEQ ID NO: 98456 - DNA, 401 bp, Glycine max
  unsure (1)..(401): unsure at all n locations
agcttcagaccatagcaactcatatatctatgtatctaaaacccctcaatttagtggattttcaaggtttgagaagtgaaaatgagaatggggtaattttggagcaaactctcatctcaaacaagtctataacattaatctaaactcgctcaaactggttttacgacgaaaactctaccgaatcaaaatttgactcctcaatacccaatttaccctagaaatggctattgccttcactttggtcactcattntcctcctttgcacaacccaagctttcccacagtcctaaatgacatttcaaactaggattaactcactntaacctccaattaccactaaatccaaatttagctgttcaatcctcaagcatcacactttccactcatacactacattttac

SEQ ID NO: 98457 - DNA, 464 bp, Glycine max
  unsure (1)..(464): unsure at all n locations
ntcaatgttcttaagcaaaagctaactaatgccctcatacttgagtgtgatgcttcaaatgttgggattggtgctatgttgatgcaagaaggccatccaattgcttattttagtgaaaagttaagtagtcctacccttaactattcaacttatgacaaggagttgtatgccttagtacgggctttgaaaacatggcaacactacctttatcccaaggaatttgtcattcatagtgaccatgagtcccttaaatatatcaagggacaaggtaatcttaacaaaatgcatgccaagtgggtgaaattcctatagcaattcccttatgttatcaaacataaaaaggaaaaaggtaatattgtagccgatgctctttcttagcttcatgcattactttctatgcttgaaacaaaattgattggtcttgaatgtttgaaaagcatgtatgaaaatgatgcaacttttgg

SEQ ID NO: 98458 - DNA, 345 bp, Glycine max
agcttctcgcgatgaagagccactattatttctcacttccactagcgtcgcattataaagaaagccacagagactgacttaactatgaatcatggagaaagatggaaaaggccctcctccggtcttgaattatgatacaaacattgtaaaagatagcctatttattatgaaatatagagaggagcaattgctaccccatcatctagccttataaccatttaatccgtgttaaatatactcatataataacttactgaattatcagagatttgtgtaatgatgatgagttgggtgagtgaaatagaaccatatgcctcacatgtgacaagacgaagattcatgctc

SEQ ID NO: 98459 - DNA, 449 bp, Glycine max
  unsure (1)..(449): unsure at all n locations
tgtaggagtagggcggtgccaccacatggngacctctgttgtctagcctctataagcgcactcataattccaatcacatcaaggatgcgcactaactcaccgaaacttatatcacgcctactcatgcacggacatactggggaggaacgcatatacccgcttcttgaacaccgaggtcccatgaatcctaccatgcttgtcgacattgaatcagaacaacatttatatagcacatactaccacggtctggataacatggctcatgcaaaaaactctggttgaacacctaccaacaatcacagatgttctcacttaaagacaccagtgacgactccttcgatcctgtgcgataacccgtggatcgacgcccaaatcttaactgaagtctctagcacattaacctacatctagacctgggggatcgactatcagacattcacaacttattc

SEQ ID NO: 98460 - DNA, 308 bp, Glycine max
  unsure (1)..(308): unsure at all n locations
agcttgcatcactaaactacatatttacctaacattactctcancgtatgcttatgtgcaaggtatcaagctaatcttaacgaatctcacttatcaattgtcaattggatcattaaccaccttaatggcacaaccaatgttggtgtgttggatcccaaagggaccctcttaagtttaattggcttttcatattctaactctgctggaggctcgctacatacaagcagcacaatcgagacatgtcatctcttacgaagtacaccttgtcttgcgaattgtatcaatcaatcttgggttcattattcact

SEQ ID NO: 98461 - DNA, 459 bp, Glycine max
tcttaagttcagatgatgcagatgggtttgtatctacctcatgaactcctctaatgactatggcatcatttctggcgctaaattgctgggagttggaggccatcttctcaattaaatttctggcttcagcacgagtcatgtctctaatggctccaccactggcagcatctatcatacttctctccatattactgagtcctacataaaactatcggagaagaagctgttctgatatctgatggtgggggcaactggcacatagtttcttaaatctctcccagtactcatatacgctctctccactgagttgtctaatacctgagatatccttcctaatggctgtggtcctggaagcatggataattttttctaaaaatactctcttaatgtcatcccacctcgtgatggaccttggagcaaggtaatacagccagtctttgccactccctcttatgaatg

SEQ ID NO: 98462 - DNA, 443 bp, Glycine max
  unsure (1)..(443): unsure at all n locations
ngctctatatttacattgatgtttgtatttgtgggaggaggctgtatgcccattttgttttaagagtagtgtcccactggtaaaactaactttccaaatgtttgccttcgcaggacatggccccgaggaagcttgcctcaaagaggtccaggatagacaaggcagccgaatgaactaattccgctctggagtatgacagtcaccgctttaggagcgctgtacaccatcagcgctttcaggccatcaaaggatggtcgtttctgcgggagcgacgcgtccagctcatggacgacgagtatactgatttccacgatgaaattnggcgccggcggtgggcatcactgggtactcccatggccgagtacgatccacaaataatccttgagttttatgccaatgcttggccaacagaagagggcgtgcgtgacatgagatcctgtgtt

SEQ ID NO: 98463 - DNA, 64 bp, Glycine max
tgtccttatggcctgcctccagacttcacttcccgctctcttctggaagacacaaaccgagccc

SEQ ID NO: 98464 - DNA, 256 bp, Glycine max
taaacattcaactttgagcgtctcgatatattacgggactcaatcttacatcctagtaaaaagttattgtcgctagaattgtctcatacgttcaataaacatatttctagcgaggtgttctatttcaggacataatcacacatacgagtaaaaagtaattgtcccttgagttgactcaaatgttcgacattctattgttagcgatccgagatattaccgtactcgaacggacattcgagtgatatgttattggccc

SEQ ID NO: 98465 - DNA, 449 bp, Glycine max
  unsure (1)..(449): unsure at all n locations
agcttgaatgtaaaaggtttacacagtttcatgttagaagntactgacatcctgctgctaatagacattagacgtagctttactcttagtaagaatattagaacaacacagcaaacaaaacactttctatgcattgagcaaatgtattcaaaaaataattatggattagaactaagttttcacaaatcttaagcaagcatcagtaacatctttacctgcagcactagaaagaacccaattgtcatcataaggaacttgccacacagcatagccaagtaacttattttcccttgcataagagacctttattgtgacaaccttaacatcatcataacctatccaagtcgatccattggagaagtaattaactacataagttgcattgtacttgacatggcctccatattgatgaatataagccttgatgtacttatagttcataggtccac

SEQ ID NO: 98466 - DNA, 444 bp, Glycine max
gtgacacttaaaactaagctaaggctgaagtaaatagctcgcctgggcgagcaaggttacttctataggaagcaagcagctcgcttgggcaagctattgtgcaacctccacccttcatttcatataaataggcatgagggggctgaggagaagggtccaatatcatatattaagaggtgttcactgaaattaatgagaagaaggagaaagaagaagaaaaatcaatgccgaggcgattccgtaacgcttccttaacatttccgtgatcgattctgtggacgatcttcatcggtcttctttcttcgaccgtttagtttttatttttgaagttgtgaattcattctattagtgattctcacatcttgtgtttcacatcttcatcttcattcttctactatcagtgatttcatttccttgtgttaagcgacgttcgaccgatttatt

SEQ ID NO: 98467 - DNA, 457 bp, Glycine max
ctcagcttaggctgttcaatggcttcagattgttgcacagaagggtatatgtctgtgttgtggtcgatagaggagcataaaccacagagtctggcgacaggtgcagattttttattcatggccagttgggttaccacgttaaccaaggcatctagtttaccttcaagcttcttagtatcggctgatgaagatgaattcgtggctacttcatgcactcctctaatgataatagcatcacttctggcactaaattgttgggagtatgaagccatctcctcaattaaatttctggctttagcaagggtcatgtctccaagggctccaccactggcagcatctatcatacttctctccatgtgattgagtccttcataaaaatattggagaagaagctgctcataaatcttgtggtgaggacaattggcacatagattctaaatctctccacgattcatat

SEQ ID NO: 98468 - DNA, 370 bp, Glycine max
agcttctatataagcttaaccattttatctatatacacaagttgagttttattcagaaaattagagtttatctcttttatcttagagagagtgattcttctagattcttgagtgattcaagaacaccctggctgcatcaaaggactttcacaacctttgtgtgttgccctcgccggaaagagtgaatctttccttcctttcatcttcaaccttgttctgtcaaaccacaatttcagataattcacttctgcccagaattatctggtggccataactccaattgtacgcactcaaattaagtgattcttgagcctcaattgaatttcaaaacagacctttctccccgtttggaatcactccattggagccc

SEQ ID NO: 98469 - DNA, 410 bp, Glycine max
tcttagtctcagatgatgcagctgagtgtgtagctacctcatgttctcctctaatgactatggcatcatttatggcgctaaactgctgagagttggaagccatcttctcaattaaatttctggcttcagcatgagtcatgtctccaagggctccaccactatcagcatctatcatacttctctccatattactgagtccttcataaaaatatctgagaagaagctgctctcgaatctgatggtgagggcaactggcacatagttttattaatcactcccagtactcatacaggctctctccactgagattgttaatacttgcgatatcttttctgattgttgtggacctggaaacatggaaatatatttctaagaatactctctttaagtcatcccatctccctgaatga

SEQ ID NO: 98470 - DNA, 471 bp, Glycine max
  unsure (1)..(471): unsure at all n locations
acctgcggcatgcaagctntacgttgctcagttgctccagaatgctgcataaaagggcaaaggtgtgtatggtggtcggcagaggagcataaaccacagactcttgcgacaggtacagatttctgattcaaggccggttgggttactaggttaaccaaggcatctagtttaccttcaagcttcttagtttcagctgatgaagatgaattcgtggctacttcatgcactcctctaatgacaatagcatcatttctggcactaaattactgggagttggaaaccatcttctcaattaaattcctggctttagcaggggtcatgtctccaagggctcctccactggttgcatcaatcatacttctctccttgttactcagtccttcataaaaatattaaagaagaagttgctcaacaatctagtgatgaaggcagctggcgcataatattttgaatctttcccagtattcatat

SEQ ID NO: 98471 - DNA, 469 bp, Glycine max
tgtcccagcaattgagcaagactgaaggaaatatatgggctcatcatcaatgattacaaataaaagctagacctagcagcaactcttgagaaaaagctagaggacgagtaagccaatgtatcagtcttgcaagcggacagggaagcaaggaaaagggtgatcgattcattgcatagagaagcaatgatgtggatggacaaattctcctttactctgaatgagagtcaagatattccccaactgctagctaatgccaaggcaatggcagatgtattctcagccccttgggaaattcatgggctccttaattattgcccacataattaggagccactatggcaattgtatcatcgccttgattttggctagataaatctctttgttctctaataaaatgaagtggatttaatcatgtgtgaatccaatgcttcaacaacttatctttaccatccttcattgtataattttt

SEQ ID NO: 98472 - DNA, 463 bp, Glycine max
  unsure (1)..(463): unsure at all n locations
ntcatatatcaacaacaacaacaacaaatgatgatggcttctcaacaataattcgcaaatccttttggaaatccttatggagccgctgttatccatccctatgacttaggtatgcctattgaatcatattatccatatacaggtctcatcttgtcattttatgtggaaaacaaatccttaataagctcaagggaaaaaataaatgggtaatttgattactctcaactttcgattttgagattgataaacatgaagaagaatagccttgtatcatatgttgtgtgtgtgccatagttagctcgagtgaaattatttttgaataattagcacataacgggtgggggggattatatgatttnttatgtacaaggtaaattgactatgagttcttattcaaaccacttagttctatttgcccaattgagatacctcaacgcgttagcagaaaatatgtctttgatta

SEQ ID NO: 98473 - DNA, 434 bp, Glycine max
tatcatgaactactttctaacacgtccattctttctaatgcttttgaaaacatgcaaaaaggttttaagaagttgtctaaagatcataaagagctggaataatctcttgaagctaaagtagatagtccattggcggattccacttaaatgtgtgatgcttttgaaaccttgaaaatcaaaataggctaatctccaccttgagaaagagaagatatccacgaaaaatgtactttactttagaaattttaagagttagaaaacaaacctaaggctttacaagatgaaatgaaagaactcaatgagcttaatgatcatataaaaaaagaaagatatgatctatgaagagagtgtgcacaaacacagagattatgaagaccttgaaaagagtaaacataatctttgggtggaatttgtagaacacaagatatctgtga

SEQ ID NO: 98474 - DNA, 466 bp, Glycine max
  unsure (1)..(466): unsure at all n locations
tccatcaagtggtaatcagagcacaagagcttcaagtatgtgctccttaaacctccattaattnttttttctttaccttctcttccattgttgtttcttcatttttttctccatgtatctcctcacatgtcttgtgcaaaatgtttttaacatgattctttagagtttccaccgattaaacttgctatataagctagaattgattttctatggttcaaatttcttggtcttattcttgttcttgaaccatgaattatgttgagtttaggttcctttgaattttgtctttttattttttgtggctgaaacctaaaccataaaattcttacaaaaatattaaagtagaagaaaacctcacaaatctagagtgacttgttcacctattgtagctttgtcatagaagtcatgtttagtcatgaaactcgtcacataagattncttatgttgtgctgaattttattttctt

SEQ ID NO: 98475 - DNA, 407 bp, Glycine max
tgtctcagcggcatgatggataactctgaagccaattgcttctctagcatctcagccaagaactacatacccgcttgagtcatattacaagcgctctatataccataacatactcttaaggaattttctactatcatcgataaagattgccacactgtttaccaataaccgacgaaatagcacacgaataaaggtcgattttataattatatggctattcatgattggatgacacgctgcactacttgatagcactgttgcttgttatgagaaaaaagagtaaaccaccatttgagtgagtatcgtaatactgacatctcgtcgctaactaaaatctgaaactaaggaaatgttacaaatgtggctgaacatacatatcttggtatgacattataccataaatatga

SEQ ID NO: 98476 - DNA, 394 bp, Glycine max
  unsure (1)..(394): unsure at all n locations
agcttgccattcaagncgcttatgaccttttaacatgctgcgtangtcgggggtaagttgtgaaagccctgagtgagaaggatagctgcttcttcaagctggtcaatggtggactgacaaatatggcgttctggcatggtgaagtacaggagaaagaggcacgccgtaccaactgttacgaactaactactctatgctatgctaactacactaaacaaaggatttcataaatcttctcttcaattccattcattcagggcctatttatacatataattgtgtgtctgctagtgagaataatatcacgcctaacaatattgcactattgcataacaaaattgttcttactagacttgtatgacctatgctaggtgtgctgaaatgcatatatgtt

SEQ ID NO: 98477 - DNA, 446 bp, Glycine max
  unsure (1)..(446): unsure at all n locations
tgttgaaatatctntgactggatttcttatatctaaaacatatatgcaatcngtggattatgctcaatgagttttgtatatttaacatgtgaatcaagattctaatatataatttagattattattattatattatatcttgtataatatatggtgattacagtgaaaataaaaataatatacattgatcactgtgtgatattagatttgatgtacatgtgatgtattgagatatatattctctttattatatattgaatatataatagtagattaatttttttcacgtgttaaaaggttatacaaatatagatcaaatatgtgaattataagatgttaaggtaatctttattagatgtagcatcttttcagtagctttgaagatgataactattatcttcaatattgctatataatttgatgactttaatataattgagtatatc

SEQ ID NO: 98478 - DNA, 454 bp, Glycine max
  unsure (1)..(454): unsure at all n locations
tgatacatcataccaacacaaaatacttcattaatcacatattctattgaaaatccccaattatcaaagttaggatttcataaacccatcttcccaaagttccatatnttcaaactctttgaactaagttaggacttgataaacccatttttcccaatgttccctcttttcaaactttntgaaattaaggttagaactttgagcattcttaatattttcttataatcaacaatgaactttcaataagagaagacaatcaacatcatcatatctcctcaaagtccatatcttcattcaaaagcaaatcttcaaaatttgaaaactccaacaacctagaacacatttatatttttatcaatctttgcaagcatctacaatcatcatcataccatataacaaaatgagcattcaataaagcttcccttacctattgaactagaaggtagctctttgg

SEQ ID NO: 98479 - DNA, 408 bp, Glycine max
agcttcgagctagaagagttgttgccactatatagtctctttagtttggttgatacaatcaagtaggaaaagatgcagaaatatttgatattccttctttgcttccgcggcaagcagtaatcacattctgtttacttcccctttttttatcttttacaaatcaaaatagattctgggtgtatatgaataagttaagcacttaattcataaaaaggttatgaaataaaatttgcgtatgatcttaaatgagaaatttactgaattaaaatcaaaagttctgatgttctgcatttattttgttctcactggttattatattactatgcagtgttacagcatctctggctgcagtgttacatgagttgtttaatttaagtttatttataaactaatcgattctttctatct

SEQ ID NO: 98480 - DNA, 459 bp, Glycine max
  unsure (1)..(459): unsure at all n locations
agctntagcatggcctccgtgatagaagctattttatcttttaaggccgataggtcggctttcatctgttcttgcactccctcttcattatccatttttctggatcgagtgttataggggtgcctttgcgctttcttagttatggtgagttccctaaagaaacaaacaatggtgagtatgccaccaaaacatgaatatgctaatgaatgatcagagcacttggatccacctcaaggccttttttagataacgtgatgagtttcagaacttctctttttataaaaagggacaaagcttttatctagccaagatcatacaaaagtgttacaacagaacctaacggtttctaattatatgggccatcaaatctatcatgtgttgacagtaattgattagcccgtgaatttcctcggtggctgtacacacttcagcgatggcctttgctttggctagtagtcg

SEQ ID NO: 98481 - DNA, 421 bp, Glycine max
  unsure (1)..(421): unsure at all n locations
ggcttctacaatcatagtcacttcattctatgttgtcggcgctgctcttggtgtggtaccaatggatgtacaaaaatggtcatattcactctnggcctcaatttcttcaagccttagagactcatttcgctcctacgatgtttgacaatcccgagggcaagctttttaaattcacttaatcattaactattgccacttgagtgattttgaggcctcggctaatcgtatgggggagggagggttaaactcatccttcttgctcagtggttgtattttaagactaaagctggggatctatcatgaagtgcttgcacatcatccaagaactctctcctaatcttgtaggatagcttatttgctagaggagatattacaggatttggttaattatatctctattgaactatgttctatttctttt

SEQ ID NO: 98482 - DNA, 376 bp, Glycine max
  unsure (1)..(376): unsure at all n locations
agctagcttctacagataaccgttgatnttgttagtatattatatgcatagatctcccacagaaaatttagttcctctgcacttacaaattgaagctacattgagaaggaacagggccgagaggagaaggaaacttcttgaagacagaacagttgcatccattcttgaggaaaaaactctttgtttctgattcattatcacctgattcaccatcatcaagggaatctgctactcaagtgcttgaaacagccagcatggaagatgaccagcactagaagatcacccttgaggattattcaagcagctcagtaccgcaattctttactagcattgcacgtcctgaagtgcatgctcacaacatcaactacccacattc

SEQ ID NO: 98483 - DNA, 438 bp, Glycine max
tgtgttgcacgcttagcgagtacataatattgtgtgttaatatgtatgtatttctgggttttcgttcattgtctctttaatcttcatcaacattcatacagatcttgaattttccaaaatctattgctcgctaagcgcacatactcgctaagagagacttgtatgtttatattccagtactttggcttagcacctcctacgtgttaagcccacccgccatttcaatcttacgttaaggcttttcatttctagatgcacgggcttagcactagctacatgcttagccccaatgtgtgttgggatttgtgatcaagcttatcacgcgtcggtgataagctagaacgtataataaatgttgtacacccaagctttgtgccctcactagcaataagcctctgaacccataggacatatcgtcgttcattgcctgggctaagc

SEQ ID NO: 98484 - DNA, 446 bp, Glycine max
agcttgtactccaatcattcataaacctatttcaaacatttaacataaatattgttaatggtatattgttatgaacattatttatcagttaataaattaaacacctactaaaccaaatttacttacatcatccaaaactatagaatggatatgttcaaacatttgtcacctaaaattatctcagttacatctgtgtgtgtgatgaaaatgtcatctttgacattaggtatcccaaatttcaccccatcccacgacaactaaattggcttttggtaaacatcaaacaatctcttaaccaattctcccaatggatcaactgcagccactgcattatccatttcagcagatgtaatcggtttgggctcacgcctttgtgaatcatgcatggttaatgaaaaatatcaatacgctaaagttatttacccatgtcactgaaaataatattc

SEQ ID NO: 98485 - DNA, 457 bp, Glycine max
  unsure (1)..(457): unsure at all n locations
ctgcttgtgggcttctatggaggctggatctttgagcttcaatggggtcctttaatggtgattttccaccatggagatgcagcggaagacaaaggaaaggaggtgagaggaggcgccatccattaatgaataagccatggaagaaggagcttcaccaccaagatgagccttggataagaagcttggagaggatgcttcaatggaggaaaagaaagagggagagaaagatggagggggagcacgaaattgaatgaagaaaaagggagagaagttgaactttgagttgtgtctcacaagactctcattcatcaaagttacaacaagtgttacacatgcttctanttatagactaggtagcttccttgagaagctttcttgagaaaactttcttgagaagcttctttgagaaaacttccttgagaagctagagcttatctacacacacccctctcataac

SEQ ID NO: 98486 - DNA, 466 bp, Glycine max
agtcacctgcggcatgcaagcttgttgaaattgccatgtttggatgagttaatcatacccattctgttttagggtttttgtgatgatgtttgtgatgtttatatgctgaaattgctgatggagtctgttagagatgaagggtagaactaacctaaggttataaagtgagaatgtgatgttatgagtggaaaaagagtgagactttgagagttggaaggctaagtctgaattctgtggtaaatggaggttaaagtgagttaatactagcttgaaatgtcatttaggacatgtgagaaaggttaggctgagctacagagaaaaaaaatgaccaaagtgaacaaagagccatttctatggcaagattgggtgttgaagagtcatatttgattcggtgagatattatgtgtaaatccacgttgaacaagtctaaacacatgttatggactggtgtgaggtgagagtttgc

SEQ ID NO: 98487 - DNA, 477 bp, Glycine max
  unsure (1)..(477): unsure at all n locations
tcatgatgatgaatcaagttgattcaagtagttntgatgataacaaagatgatgacaaagaagcccaagagaatgatttcaagaacaagattcaagaatcaagagaagtttgatttcaagattcaagagaagaagaattcaaggttcaagaaaagaaatcaagaagacttcacaagggaagtattgaaaagattttcaaaaaacaaacatagcacagttttggtttttcaaaagagtttttctcaaaattttctaagttaccagagtttttactctctggtaatcgattaccaatttcctgtaatcgattaccaatggaaaagnttgatttccaaagcttttaactgaatttgcaacgttccaattgatttcaaaatggtgtaatcgattacaagatattggtaatcgattactagtgtatctgaacgttgaaattcanaatcaattgtgaagagtcatatcttttcataaaatgct

SEQ ID NO: 98488 - DNA, 416 bp, Glycine max
  unsure (1)..(416): unsure at all n locations
agcttgtgaacctaaatatgcgtactatttcaaactataagttatcctttctacgtngaagggatacaagaatcctttgtgtggtactatatataggtttgacccatcttgtggcatgatggcttcccacttcttaacatgtctaatgccaaatacatgatccaccagatattttacaacaataagtcactgtatgtgttcaatgtcgtgtttttaagttcaaacactaagaatttgtcttccatgtacacaaaatcacactcttttaggtatggggttggctcttgctcccaacccaagtgagatattcttgttgttgggatgtgacttgcacaaaggggtggtgaatgtgacagtggaagatgaagagtgttggatctgagatggacgttaaaacctttgtaaggttctgggaa

SEQ ID NO: 98489 - DNA, 467 bp, Glycine max
  unsure (1)..(467): unsure at all n locations
ngacaactctttccgaagagttgagcacgtttttttccctgacaactttgtactttgtgttcgccttctctacaacataccaatatttgttatctttgctttacttgattgaacacgtatccaaaaccattcttcttatcaaatgaagtatagaattttctaactctttcaatagactcaaactccatcccaacacaagtccgatattcaattcttcaccaactattgaagaatctggtggtgtaacctcttcaaaggaagtccatgtatccgtgggcatggtttcaatttcttgtcttgcacaattatcgaaagtatctattgtcactgaacaagacaggtgctatagaaagctaaactatttcaataataagaatttgagaaaaaaaataaagctcttgtgttttaagctatctacaaaatattaaaataaacagagcgtgtcgtaatcatattatattaaacat

SEQ ID NO: 98490 - DNA, 434 bp, Glycine max
  unsure (1)..(434): unsure at all n locations
agcttgaagttagatatatattattattataatacatgtctatctatttgttaagcatattttgtagttagttaattgagacttaggggtgtatatcaatgtttatacttactattttgattaggttagtgcgtgtatactacatagggttattggtcgagaccgtacccgaatcaaataaacattaaaaatacagtatctaggaagtgatcctaggtcatttcccaacgagcaatgatcaaccaaacattcataacagataatagtgaaacagtaacgaattgggggggggtgtttgtttttgtattttacacagcangttatttgaattaaagaaataacataactaatgcgtgttgtgtcccttgattcataagcaagtctcttatcctatgatatgggaattaatccctaatcagttcacccacttattt

SEQ ID NO: 98491 - DNA, 466 bp, Glycine max
  unsure (1)..(466): unsure at all n locations
ngaagtgagaaagtgtggaagagtcagtcttcctacttttattcgttgaccacagagtggtacctgaagatatgtcgcgggggtcaagagaccttggggacgtcaggtggggtgctattgcccaaaaccaagcttgaccaatcccgacccaacctgggcatagtcagtcagtgagaacctgtgacgtacctaaacaggcgagctcctggcagtctaccgataaaagaacaaagaccacaaagcaaggaggcttgtgtggtggctggccagctctggatcttgagtgatatttggaatatggcctctggtaatcgattacaaagggtgtgtaatcgattacaacgcttaaaaatggggtcaggaagttgagatggcctctggtaatcgatttccaaggggtgttatcgaataccaggcttacaaatagagacagtatgttgaggacgcctctggtaatcgattacca

SEQ ID NO: 98492 - DNA, 445 bp, Glycine max
agctgtactagtcatatatatgttacaaaacaacgaaagcaaaaaattgaatcgattattgcagatacagaaatacttaaacaaacctggcaattaggggttttgcggctttttgcaaattccgcccatgtttctggatcaaggccatacttgactgtaggatcagatatttgctgaccttcattgtcagcaaagacaaattttgaagtcaatgaagacttaaattgcctccatcttgctgcaactgttgacatcacctttttttgtgcattttcaccttcaaggatatcaaatttgggctgcacaacaaaaggagttatgtaacagtatgtaaatgaatcctttaatagtaacttaacaacacaatcatgaatacaagtgtatttagaattacttaccaaaatatctttccatattaagctctttagatgcgtcgggacaacat

SEQ ID NO: 98493 - DNA, 489 bp, Glycine max
  unsure (1)..(489): unsure at all n locations
tgctttacggacctataaaactaagcttgtaaggattatatgaataattgttcaagatacttgatatgcaaaacanatccttgcttttatagactcttcatgtctggttgagacaaccatttgaagagttatgacttttagaaaaacttaaaaaccaatttgaaaaagtcaaaaactatttgaagagttacatcttttgatgttattcagaaacaatcactggtgatcgattaccaaattagtgtaatcgattacacaaagcttttatctgaaagggtgtgactcttcacttttgaatttgaatttcaatgttcaaaggtactggtaatcgattaccaaaacattgtaatcgattacaactttntgaaattaattggaacgttgtaaattcaatttgaaaactatttcaaaacaattttgctattggtaatcgattacaacaatctggtaatcaatttacgtgagagtaaaaactctctggtaaacatg

SEQ ID NO: 98494 - DNA, 382 bp, Glycine max
  unsure (1)..(382): unsure at all n locations
agcttgagcatcattctagatatttctccttctcttctttcttctagaacttagattattgtcttattcganaatattgggtggagcgaagcatccaagtctaatagaacctttccacattaaacgcatacgcttgaaacaaaacacattgaaatttaaatatcactatgatcaatcaatggcttgagagtccacaatcttattaacaaagaatacccagtatctcaactcttttttgtatcttttaccaagccaattgccattgttgacattagccctatactaacatattgtgaggctatatgattatttttctcttttctagggtagagaccacaaatatctctcaattcattgaactatagactaattccatccacat

SEQ ID NO: 98495 - DNA, 466 bp, Glycine max
tctaagtagaagaaaaaatcatcagttgaacaactagtgttttaattagatctatttaagattattgcatctgatggaattcgtttaattgttttgcataaactccattataaagctaattagaagattgctttagaagtttcaccttcagcttatatagatttagccattttttgcagtttctcgaaactatcatacaaactttgtgatcatatattcagtttttcttgtaaccacatgcaaactttttgcaaattgaaagttatacaaattcttctggttcattaaatttacagggagatagtacctgttatatatatagaccgagattgctaataaacttgaactctctaagtgataaattttcctacaaaatgacaattaaacagtaaaatagtttacctataaaaagtgctattagataaactataataactgatgttattaagacaagaacttagaatgc

SEQ ID NO: 98496 - DNA, 456 bp, Glycine max
agcttataagaacaaaatagccttcatcatttccaaatatgcatgtgaattgggacgcatcaacaagaatcaagccaaggctattgtgcaagcaatcaatggggcaaaacacaccaaatgattatgatgatggatggctcacattcttacaaaggttaactcatcactttcaaattgagctttcaaaactatcatgacatgtagagaagaatcaatgatttcaagtcacacaatgtcaagaacttttattttctaaacaattacccatttcttgaacatatcctataattcaaagaaaaacatgcatagtcgtacgtgcacacaaaattgatcgaagatattaaactaaaaatccgacgaaactaacaacattataaaattaacacaactatacaattaacaaaacccactaaactagctaaaccaaagaacactccctcccatacttaaacaaca

SEQ ID NO: 98497 - DNA, 468 bp, Glycine max
  unsure (1)..(468): unsure at all n locations
tnttggagtagaaacatgggaccacctcattntatttcataaaaggaagtcatatctagtcaaggtctaagagaccatacaagtttcctaacgatttctaattatgtgggccattaagtctatcatatgctgacaatagccgagaagcccatgaatctcttcgggggtggagtaggtgtctgccatcgccttggccttggctaacaatcggggaagttcttgactcctgttcagggaagagcaaaccgatccatccacatggttgcctcttggtgtaaagagtcgatcacccttcctctagcctctttttccgcatatacttgagcatactcatccgcgattctatgctcgtgggccgtggctagacctaactcttcttcgtacttggcgatgatagctaacatgttggtctctgtctcgcataaacgctgagacaagcttcttttggaccttgaacaagccatctat

SEQ ID NO: 98498 - DNA, 401 bp, Glycine max
agcttcagggttcagtggtatgtttcttcttgtgggaatttatttgtaattcaataatgttatcattaggaatcataaagcacacatgattaatatgtggattcaatgcgagacgactaaggattcacttcttgtgggaatagaaaacgatagaccgaaaatgtgagcgaccgacttaaaatgatttattttattattgttattatgtgtctaaactacttttaatctcatatatatatatatatatatatatatatatatatatatatatatatatagggagaggaatttttattccgaaacaaatagacactatgctcttgctcctttaagtaactaaattacacagaaaaacacatacacacaaaaaaaacagtgtatactttccatcttgagattca

SEQ ID NO: 98499 - DNA, 450 bp, Glycine max
tgttcgcacatcgttcgcttgtatgatatccgctccacaagctctgaagtagaggagaccttcaatcctattacgcaacgtggcggataaaagtgggcaattaacttgaatggtcattattgtcaatgcggaaggtattctgcgcttcactatccatgttcacacattattgcagcttatggttacgtgagcatgaactactaccaatatatagatgttgtttacacaaatgagcacattttaaaagcttactccacacaatggtggcctcttgggaatgaaacggctatttctccttccaatgacgcatggacacttatccctgacccaactacaatttgtgcgattggtcggccaaaatcaacaaggatacggaatgagatggattgggtcgaaccatctgagcaccgacacaaatgtagtagatgtggagcccaaaggcataacata

SEQ ID NO: 98500 - DNA, 370 bp, Glycine max
agcttcatgatgttgaatcaagattgattcaaggagtcttgatgataacaaagatgatgacaaaatacccaagagaatgagttcaagattgaatcaagaacacttccagaatcaagaggaaatttgatttccagattcaagaatcaagtttcgagacttaagtttcaagaatcaagaatcaagaataatccagttaaagattcaagaatcaataaaagactcaatcaagataagtactaaaaagtttttcataacattgagtagcacatgaatttttcacaaaagcttgtaccaaagagttattactctctggtaatcgagtaccagtttattgtaatcgattaccagtagcaaagattgttttgaaaaa

SEQ ID NO: 98501 - DNA, 445 bp, Glycine max
  unsure (1)..(445): unsure at all n locations
ntaaaggttngagtctagcctacgattaattnttgagatctgagcctgacctatagcctatcaaagacttttattttggttcaatctggcccttntaaaagtctagcctggcctagtagcatatttaaaagtctatttaaaagttttcttcacattaaatctttaatattcctagttgcttttacaaaaaaaaaaaaaataacgcaccttctataataggataaacatagaatgttaattacctctatcaaaaagcttgaagtgaaaatgatatgatttttgtttggttaagaacataataggaaaaaaagtaaacctgatagaaaaaggatatgatttttgtataggaacttaataggatatgataggatatgatttttgtataggaacgtaatagcatatgatacgatatgaatttttgttggttaggaacgtaatacgaaaa

SEQ ID NO: 98502 - DNA, 327 bp, Glycine max
  unsure (1)..(327): unsure at all n locations
agctntatttcatcctngattcgatatttatgcaatgnttatatagactgcgagttctgctacatgcacgttcaatagctacaagatattacaagtgatataggcttttacggatataacaaccctcaacagctaactaactcgttacggtccctactaactccacggtgcctagttactaatctgcacgtgcctataacgtgtctgttgaattatgatacgtcatcatgcatgtatatgggttttggtgaaacccttctaggcctatcgggatcaggttcctgtggtttgctatcaccactcccgaccccaaacaccatcttgtac

SEQ ID NO: 98503 - DNA, 372 bp, Glycine max
gtgaggcgtgtgtgggtggcgtttacttgtgtaaagattgactggggagacggaaagatagagagatgggaacaccgctgcgaaaaaaggatcaattttgaaagatgaattgaagatcttttccgaccagaatcaggttctttggtaaatgaaataaaaacatctacctttgttaattacaaaaatatctatcaccataaatcaactcttccatcgtgccatacttctttcacttctgcgcgctactatttgtcttcaaaacccccaaatcaaaaattcttgagatacctttgtcacagcaatgaacatcgatgacttggaagctctagcaactctttgatcgatgtgtccaaatcggataacctcatctta

SEQ ID NO: 98504 - DNA, 450 bp, Glycine max
agcttgaaattgaacaagggaagctctcgtgaaactcaaatgatcataacttatcacacagaggttcgattcaggcgcataacatttagagacgctcgaaattgaacaacgaatgctctcgagaaattcaaatggtcataacttgccacacggatgtccgattcaggcgcatcatataacgagacgctcgaaagtgaacaacgaatgctctcgagaaattcatatggtcataacttgccacacggaagtccgattcaggtgcataatatatcaagacgctctgaattgaacaacgaatgctgttgagaaattcaaatggtcataacttgtcacacggatgtccgattcaagccataatatatcaagacgctcgagattgaacaacgaatgctcttgagaaatcaaatggtcataacttcgcacaccgatggctgattcttgcgcattata

SEQ ID NO: 98505 - DNA, 374 bp, Glycine max
  unsure (1)..(374): unsure at all n locations
tctatatagctgaaccatnttatcaataaacacaagttgagttttattcagaaaattagagtttatctcttttatcttggtgagagtgattctcctaaattcttgagtgattcaagaacaccctggctgtatcaaaggactttcacaacctttgtgtgttgccctctctggaaagagtgaatctttccttcctatcatcttcacccttgntctctcaaaccacatttacagataaatcatccttgcccaaaattatctccggatcataacttccattttacacactcacatttattgattcttgagccttaaattaattttcaaacaagacctttcacctcgctttgggattacctcatttggagccccgttgc

SEQ ID NO: 98506 - DNA, 340 bp, Glycine max
agcttgtatgtgtaaacaacgatgatgaggttcttattgttaccagggctgctggcgcaacccacattgattgcgttattgtcccagacgccatgtgcagggcggacataacttgtggcctcacacatgtctggctattccgcgacggtatgtaatctcaaccatcttggtttagccgtgcgtgccaagagttaataatcactgaatcaaaagctatatatgcttaagaaattttaacccttcccacagagacttttgctgtgcctacttttatgattggctactggccatctatcgactttgacaacaatggtctctggccccatcccgtggagaaaag

SEQ ID NO: 98507 - DNA, 368 bp, Glycine max
gatggtcgcagtgaatcttgtatgagaccgtgtcatgaccgaatatggtctcgacctaggatgaacactgatgccggacagatgaaacatagcatgtctctcatgtgggagccataaaatggacaagactggtctcttaccgagtgatatgcgctccaataaccaacgataactagtggtcacttctgtcacacattgagagcaaactgctgcgtttgataaccattgtgcatgcttggtcgataatcagtgcatgaataaaccgtccatctacactatctctttcttgcaatatatgtttatggataagttatgctcctcttgccagcttggatataggaaggctcgtatatgagatcttacgcata

SEQ ID NO: 98508 - DNA, 377 bp, Glycine max
  unsure (1)..(377): unsure at all n locations
aagtcaccgcagctgcagcttactcttctcnaaanattggtatgttaacatttntctaggatacagagaaagaatcttccaattttctgccacagattataatttctttcaatattaccaatcaccaccaatgtgcaaagaaactcgatctcgcattcgaggtctcgacgctcctctcaggatactgatcaaaatgtacgtctcaatttgctctttaggttttcttcttatcccctctcttttaatttttattaaaaaaaattaattgagactgaacgtttgacggaccatctcgtgttaactagaaaaaatcattgagaaggaaattgccaggaatttggagagggaaagatactttcacaaattattcgatgatt

SEQ ID NO: 98509 - DNA, 405 bp, Glycine max
  unsure (1)..(405): unsure at all n locations
ggacacttaaaactaagcttggacgtagacagggagctcttcatagataatacttcttgttatatacgtggatgataatgatcccaaatgtatcatcatcgcatcacttgcaactctcaagatttgtctgcaatgaatgagaaagtattacatgatacatgatcgtatactttctagcaatttgtacctgacatgcatctgagtattattcattttattttgacaactgaaaatcatggctgcatgttgtggtaaaacatggggtggtgtaagactatgttataatgtccaggaatgaacactgccggtgacacatggatntaattcagtgaccaattgacgagcccggttattattcatgcacgttcgcgtggatgtaagttcacaagggtttagatatgtaaa

SEQ ID NO: 98510 - DNA, 425 bp, Glycine max
agcttgttcataaaaaattacattaacattcctataatacttgaacttttatatgatatacctacattttttaggccaagcataaaataagttttgatttattgataatgtaatttgcttttttattgggtgtcacattctgattgaacactaattaaatatttgagattgagaaatataacaattaaattatttaatcttactacgccaaaattcgagatatatagcgcctcacatacaacgcttattataaaagcgctgtatataaaaatgcgaaaactatatactgttgcttttacaataagtgatgtaaatgttggacacatatacaacatttttttataaaccacgctgtacatacttaaaaaaattaaattaaattaaaaaagtagctaacgttgctaaaacaacgatgtataatacca

SEQ ID NO: 98511 - DNA, 472 bp, Glycine max
  unsure (1)..(472): unsure at all n locations
cttntatgaaaggatgtgactcttcacaattgaatntgaattccatcattcagatgcactggtaatcgattaccaatatcttgtaatcgattacaccattttgaaatcaattggaacgttataaattcagttaaaagcttttgaaatcaaactttgccactggtaatcgattacaggaaactggtaatcgattaccggagagtaaaaactctggtaacttagaaaattttgtgaaaactcttttgaaaaaaaaaacaaaattgtgctatgttgttntttgaaaaatcttttcaatacttcccttgtgaagtcttcttgatttcttctcttgaaacttgaattcatcttttcttgaatcttgaaatcaaacttctcttgattcttgaatttgntcttgatttaatcttgaaatcattctttgggctttttgtcaacatctttgtcattatcaaaacttcttgaatcaacttga

SEQ ID NO: 98512 - DNA, 434 bp, Glycine max
  unsure (1)..(434): unsure at all n locations
agcttttaccaaagaggaatgtgttggtctactatacagagtttgatgagttcaaggaggaactcgagagatgccactatgatgaggagttgactgattttgctgacggcaacatcgatgttgctattgtgaaggaattctttctaaacctctatgaccccaaggacaaatcacctaagcaggtgagggtgagaggtcatcagattaagtttgatgaggatactctcaacacattcttgaagacccttgttgttgtggaagaaggggaaacactntgtgcatattccagatttgcactcttgaggcctgacccttatgagttagctgctaagctctgtatcctanggaggggattcgagcttaatgctgatggttatccgttgaaaatattgatgaagaacatgaccaccctagctaagacatggagtggtctt

SEQ ID NO: 98513 - DNA, 466 bp, Glycine max
ggagaaacattaatagaattatatgtgactatatttcatttacacatttaacatttttttctctaaaattaaacttaatgggcttctagagcaaaagagagtttttcaacttcaaccaaataaagaaacttcaaagcattgttctttgtttgtggtaactctaattacaaagcatacacatatataattaattttcaattaagaaaaatcaaattacctcttcaaacaatgtaacataaaagataaaacaaaccacaaaaaataatcatgaaaggaagagataaatttatttccaaccacacatatcaaatattcatttaatgaatgtgaaattacaaaactacccctaatacaaaaactagtctatgtgccctaaaatacaagggctgaaaaatcctacatttctagggtaccttacctatattatggatccctaaatataaggcccaaaaataatgaaacctta

SEQ ID NO: 98514 - DNA, 452 bp, Glycine max
  unsure (1)..(452): unsure at all n locations
agtcttgcacacaaaantttccttgtctgttacttcaaaaccttcgtggtgggtcatataaatgtcttcctctaaatccccatgcaagaatgtagttttaacatctaattgctccaagtgaagattctctgcagctacaatactcagaataactctgatggtagtaatctttacaactggacagaagatctccgcgaaatcaattccttgtttctgttgaaaccctttcaccacaagactcgtcttgtatcttcttctaccgtcaaatacttcctttagcctatcgacccacttatttggtaacgctttctttccttaaagaccacgtcttattcttctgaagggatgtcatctcatctctcattgctagctcccactcaatagagacatttcccttgcgtagcctcactgaaacattctggctcaccaccatccaataacaacaaataatg

SEQ ID NO: 98515 - DNA, 230 bp, Glycine max
ccaatgaactggatatcagagttatgaagccctccctattctctcatgcaccactgtcttcgaccctttagccggagctttgtgaatcacttccaccccataatctctagagacaaggtgtagctagctgtggaactccttccactttttaagggtggcttccacataatcacttccaccgttgcggaatttccgtgatactctctccctgctgtcaatccataaccaac

SEQ ID NO: 98516 - DNA, 323 bp, Glycine max
agcttgtaaagctcttggtgggtaatgatattgagactcaacttggataccaaccttgtgctacaataattgcagcaagacccactatccacaatgggagaacaatttttgtttaaaaccttgcatcttatatgaaaaatgttctctctttcggtttaggttaggtcacaagattgactcccaaggagccttctcaccattagaagatcaccttcttcataggggtaaaccttttcaatatgctcatcacccttggcttcacccccactttcactctagaaaggagaagaagtagcctcctcttggctactatagatgtcttg

SEQ ID NO: 98517 - DNA, 454 bp, Glycine max
  unsure (1)..(454): unsure at all n locations
cgaaggtgtgtagcccaccatctcttcatagtatattactggtaatgtgtttactatcattgtcatcatnttttttcgtcattgaggtgccacttgagctgccaggtctctccacctttgggcgtattctttggaaagatctgtgccctctttttgcacatgttctgttgttgcatcctatccgaagccattatattgacacaacctaacgaaggcaacctttaggtccttctcagaatggactcgggaaggttcctagttagtgtaccaggcaacagctaccccaataagactttcttggaaggaatgtatcagcaattcctcatttcttatgtatgcccccatcttccgacaatacatcgttagatggttcttgtggcaagtagtccccttgtactcagtaaagtctagcaccttgaacttgggaagggtgatgatattgtggtctaggaac

SEQ ID NO: 98518 - DNA, 453 bp, Glycine max
  unsure (1)..(453): unsure at all n locations
agcttatccagtctcccattaatagggccttcataaaataatattgcatgtcaaggcaggcaaagcagtaaggtcaggcacaacagtagcaagaggaggaccagtagcaaccagctgcagatgcaccgccgccacctctacagtagccaccatctctagagtccatctctgctcacctgcgaaggatagagctccagatgcacggacatatgcagcatgtgaccgaccagcaagcggctaatcataggggtcagatgcagctaaatgaaagcttttaccaatacaccctacatcagcagcgccaagaccccagtccttacccatggcctactcccaagcagttcggggccatggtcgcatggcctggatacaagcccaattttcaggcaagggcaggacccacagggacccccnaagatgaagatggaactcacgaggatgatgttatggctg

SEQ ID NO: 98519 - DNA, 463 bp, Glycine max
tctagccaaatggacttaccttgaattaattcctttgatatcccctttgagcctattttcccctttctttgttttgaagctcattacaagccttaagtgaaaaccatgatatctccttacccttaaggaattttggagctttggaattgttttgggaataagctgggaataagtgtgggggggtatgtttcattggaagatatgattattggccatgcttaatgttttattttggccatgcttgatgtatatatatattgcttagttctttctttaatcttcaatttcatactgttcaataaataaaataaaaaaaaatgaagaatgaaaaaaatagaatagaaaagaagtgaagttgaataaataaggtcttgatatgagaacttgatttgggagccttggttgatattgttgatattagagggtgtgggtttactacttgtgcttaatttccacttattcc

SEQ ID NO: 98520 - DNA, 446 bp, Glycine max
tgtatctaattacttcaggaatattgtaaaaaattatttcatgaattaccatagaatgacttgttaaaatttaaaatcaatcattgtcagaatataaaaaataaatcatctcagtcaacgtgattttttcctcccgttctttcaagacgtaaaacggtgcgttcttatattatagtgaagaatactttagctggtcttgacttatgttcttcttcccctatatttttttaagtgtactggattactatctggaaaaataatacgaatgatgcatttggtaaagcgttgttcgggccaaattaattatttctgtatttttttataccgcgattactggtcggtttgatatttatttaatacaaaaagtgttttttgaaaaagcatgagacgcttccaaaattccacagttcacagttgttctccaacaaaaaccaatatcaaagcat

SEQ ID NO: 98521 - DNA, 442 bp, Glycine max
  unsure (1)..(442): unsure at all n locations
agcttgtaaagtcctttacaagctaagatccacaagggatgtaccctcccttattctctttgaacaacctagtggatgtatcctccactagaactaatccacaagagatgtatcctctcttgttctcagtcacaacaacccaagtagatgtaccctctacttgtaccacaaaggatgtatcctctaatgtgttaagacaaagttctcaggcgggtagtccttcgaaactntgtgaaaggggaaacaaaagaaatctcaggcggttagtcctttaaaatctcttgtttatgggagagggaagaatcacaagaattctcatactgtgtcattttgaattctttgacacgggagaaaggagacacacaagaattcaggcgggtagtcttttattctttngtgagagggagaagagagacaccaaaagaattctcgcggtagtcct

SEQ ID NO: 98522 - DNA, 432 bp, Glycine max
  unsure (1)..(432): unsure at all n locations
taggctacaatagtctaaacttntgttagctacttatgctgagtctagnccaacaagagggatctgaggatgaaacttagtttaagttagtctaaacccaggagggctgtctaaattgagcctagtccaacaagagggatctgacgatgaagcttggattgattcatcctaatcagggatcgaggtttagtagtttaggctacagcatataacacacaatcatgattgattagagaaacatctttatatacatcagctagtttgttagaaagacccaacacctttacctactgctgtcaatcttacttacttgcaatctttactatttttagcctatacttattttaattctgttttaaaccatcaattatcaatgtttctttcaacaatgccgtattcctgaatttaactctgtctaatacttattccctg

SEQ ID NO: 98523 - DNA, 393 bp, Glycine max
agcttagtagcaattgcagatgtcaatgtttgtgccaatgactataatcattacgatcttacctatttccgattatggccatggatagagcggctagattgacaacagactcctatatacgcaatatctttattgcgagcgtaacagctgttccaacacccaatgtttatgcgcaaccaagtgtcacgaattctatattaccaattctgctatctgccaacgcagaatcataaatatgctctctcatatggcattactctcattgtctaaacctatttcgtggatacaaacatctaacaacttttcttactagatttaaaatcagttttctgtttcttacccgtactcactctatcttacctttttaagatgcgaagtccacatgcatcatat

SEQ ID NO: 98524 - DNA, 312 bp, Glycine max
  unsure (1)..(312): unsure at all n locations
nggaagcgatgcctactccatgcttgatattcttatactagggtggtgagctctactacttattctacttctgaggtcatcaacggaggctagaccactgccctttcatcactccgcacctgtgcctaacacttctgctatgattaataccaatgggcttcataagccaatcattttatactttcctgataaaggaaaacacatctgagaatgaatggaccatatgctggatactccaataaagggagaaagaaaacgaatatcaaactcggtgaacgggtgtggattcattacatgaacaataggtttact

SEQ ID NO: 98525 - DNA, 456 bp, Glycine max
  unsure (1)..(456): unsure at all n locations
ctcagagtcacctgcggcatgcaagcttgcacttcttcgctatcctcagggactatatcttctttcctacttaggcctnttagctttgggagccaaaatatcccttgtgtcctagacttcaaccacttttgattgccgccgatgactccattgctactttccctaagctctttatctttcctttccactatattccatgctttacaaattctctaaagtatctttgcattggattcattgaaacctcatgcgatgaaaggcacgatgatatccttcgacggtgcacctctcatagggtagcctatttgtctcatggccagcatgggaatctttcacacgagcataacactcctgcccctctttctttctctctggtactcagataaaggtatggctttcttcctcctagcgggcattctaagatcccttcgaactcttctatggtgcggtccactg

SEQ ID NO: 98526 - DNA, 420 bp, Glycine max
  unsure (1)..(420): unsure at all n locations
tttcgtgaccttaaaactaagctcttaagtttggatctctntccaatcaccctcaatagtttacatatgaaaaattattaattctatagtaagcactgaatgctgtgaattcccccaatctattccctgacaacatttacgtatcctgaccatcatgatccaaaggaggaaaaaatgcaactatcctctattgtatttcatgacgcttaatatattgtgtgacctccatattctattcaccatcagcaccaaccaattgattgacagtaatgttaccacactactctggaatcatggtatccaaattatccagctccaagtctagacaagcctatgtatcaatctaaagatttatagaagtaccattgatgcaattctacccctccagggcattggattgaagactccaaaaagatttgg

SEQ ID NO: 98527 - DNA, 409 bp, Glycine max
tcagagtcgaccgcggcatgcagcttcataagaagattcctaaagaagttagagcttatctacacatacctctctaatagctaagctcacctccttgagatgagaagctagagcttagctacacaccccttataatagcgaagctcacccccatgacaaaaaacatgaaaatacaaaaaaaaaagtccttactacaaagactactcaaaatgccccaaaatacaaggctaaaaaaaaccctatactactagaatggccaaaatacaaggcccaaaggaaggaaaaacctattctaatatttacaaagataagcgggctcatacttagcccatgggctcggaatctaccctaaggctcatgagaaccctagggccttcctttggatctctagcccaatctacttggagtc

SEQ ID NO: 98528 - DNA, 462 bp, Glycine max
tctggtttatcagttgcgaaattcttgtcttcaattgaagcggtttcgacaaaagaaatatgagctgtgtagaaaagaaaagccaacccccgaaatgaaaaacaaaaccaaatgatgaaaaaacgttaaataaaattactcttcaaaaaagaaaaacaagttgaagaatttacttaaaaattcgttttggtcattataatcattttgtgcattatttatattcaattattttaaatatccttcacttttaatacaatttctaaaattgtgacactaaattttagtttatgaattttttttctttaatagtttacacaaattagtttcctatattttttctttatattatttctgtagagagtatacattaataactaaactcgcttgatcgctttgtcttatcaataatatgtaggtattcgtttgttaattttgttattggaagagatttaacccactatc

SEQ ID NO: 98529 - DNA, 392 bp, Glycine max
agcttcacttcacttctttaggtggtgcaagatatgcttccatatgaaaacacgttaccaaaaagttattatcaagagaagaatatattgtatatgattggtatggagtacctgaaggttcatgcatgccctaatgattgcatactgcacaaaaatgagtttgaagaaatgcaaaactgccccatgtgtggggtatcacagtacaaagtaaaggatgtgttgaacaagtggcctcaataacttaagaggggggtgaattaagtttaaaaaatttttcaatcaacaatttgagactgtaagatattcatccatacctaatgcagaagtaattatattattggcctttaaattatattgcaccattcttctttccacttcattccattgtccct

SEQ ID NO: 98530 - DNA, 436 bp, Glycine max
  unsure (1)..(436): unsure at all n locations
ntttggagtagaaacatgggaccaactcattgtatntcataaaggaagtcgcatctagtcaaggtcttagagaccatacaagttccctaacgattcctaattatgtgggccattaagtctatcatatgctgacaatagccgagaagcccatgaatctcttcgggggcggagtaggtgtctgccatcgccttggccttggctaactatcagggaagatcttgactcccgctcaatgtaatagcaaaccgatccatccacattgttgcctcttggtgtaaagagtcgatcacccttcctctagcctctgttaccgcgtatacttgggcatattcgttcgacaatctatgctcgtgggccgaggcatgacctaactcttcttggtactaggagatgatagctatcatgttggtctccgactcgcattaacgctgagaca

SEQ ID NO: 98531 - DNA, 458 bp, Glycine max
  unsure (1)..(458): unsure at all n locations
agctngcacttcatagtgtctaatctagaatttataacaaaaatatacccaaacccacatgactttacctaagaggcagtttggataaacttctcaacaagtactaatagaaaaagaaaataaaatgaattaaaataaatcaaacttatcatgtaaattaaaatcggcaaagttctgtcatttaacttctctaaaagcacataatagtttatttttgccttttcggtaagttggagcatctccaatgatacatttaaagtgaaggttcttaactcacttttagagtatcctacatgctagatcagattaaagaaatttaacaacttactactccgatggtgcaatcatttaagaacttataataagtctcacatactatgtcaggaaatgaatttttaataatatggtgcaatcatttaagaacattttatacccaaatgtcagcatccttgttagtt

SEQ ID NO: 98532 - DNA, 456 bp, Glycine max
  unsure (1)..(456): unsure at all n locations
cctggntatgtttgggcctgtatggatagccatgcacgttggcaacgtgataatccttcacgtgaaatggtgcggacctgactcgtgctggtctgagtcgtgactgggccgagtcactaacactatccgatcatgaattttgggactcatattttgtcacggaaagccacgccgccaggagatgagagtgcgttgttagtgacagtgtattcaactgcatgcatgtgttgcatgtactgcagataggaatactaagaaacaaagtgcataggattgggtccattcggcgcttgctttatgtagaaaacgtataagatccttcctttcaagtttccacgactgccattaatgtttgaaacattgaatgcttggttgttccggttggtacgtaactcaatattgaattttcagaaaactggagtgtctatggtcaagtcattttctagagatgacaaa

SEQ ID NO: 98533 - DNA, 426 bp, Glycine max
  unsure (1)..(426): unsure at all n locations
agcttctgccttctccttaagcacttccttggtatccctatcaccccatccctatcttccttcactcggtctagctcttgttctaagatcttgaccacttttgctattctttccatagaagcatagaatctagcaaggaggtatggctgccttccccctaatgggcatcctaagattccttcaaactcttctatggttggtgccaactaaaggtccccaaaagtgaagcatctaattgattggtcgtagtattgagcgagggatgcgatggcttcaacgaatacttctatcatcgccagatcccagatcttcccatatgccttgctgaaggcttgacatcgaacttgatccatttgctgccctagntagtcgaagctggctagttctagactcttgactttacatgaacagaacctcttttaagga

SEQ ID NO: 98534 - DNA, 471 bp, Glycine max
  unsure (1)..(471): unsure at all n locations
tcatgcttaactatgtatggcaaaactntcattactggtgttcatgacatacaagtgagcttgtaacaaatcttctacacttggagtgatcacctgcagtcctcttgaacccttaccacccactgtgtcatcatgccgagactcatgaagcccaacaggtttagccttctctaagtattttgaacaaaattcaatggcttcttctgcaatgtacctctcaacaataaatgcttctggacgatatagattctttgtatacccttttaagatcttcatgtatcgctcaactgggtacatccaccatagataaacaggaccacaacatttgatttctctgaccagatgcacaatcaagtgaatcatgatatcaaagaaagcatggggaaaatacatctccaactggcacagtataattgcggcctcattttccaactcatcaaacatgactgaatcaatgacttngctacatat

SEQ ID NO: 98535 - DNA, 453 bp, Glycine max
  unsure (1)..(453): unsure at all n locations
agcttgtaggattatggngtacccatcacatgtggtactaggtggcggtcgggcgatggtgcacaacaagtttccacatccacaatgcgcgcataaacccaccatcccctgttgcccacctccaactgagctcacgtatacccacgtagcccatatcctcgtttctctcaacaccgggtccccatcaatcctcccaagcttccacaacatccaagcaaaacaacattcaaacagcacaagctatcacagccaagcaaaacagggcaaaggcagaaaactctgctcaacacaccaaccaaaaatcacagcttttctcacttaaagaccccagtaacaattcctttgatccaattcgttaaccgttggatcgacttcaaaattntactggaagtctatagtgcataaggctacattgtgaccgttgggatctactagaanacatccagaactcat

SEQ ID NO: 98536 - DNA, 464 bp, Glycine max
tcccaggagcaatttcagccttgaattgaatagtagcactctgttgtcctggttgaaaattcttctttagcacctttttatcatggtaagttttaaccctctctttatacagccttgaagattcatatgcagtcaatctcatttcttccaactccaatagttgtagcctcctttgctctctagatgcggcttcatcaaagttcaaaaatattaaggcccaataagctttatgttccatctccataggtaagtgacaagacatgccataaaccatttgaaacgacaataagcctatcggagtcttaaatgcagttctatatgcccataaagcatcatccaatttgagggaccaatccttcctattagaggccatagtcttttctaaaatcttcttcaattccctatatgatacttccgcttggccattggtctgagggtgatagggtgatgctatcttgtgtgta

SEQ ID NO: 98537 - DNA, 88 bp, Glycine max
agcttctaaactttaaacaagaatgaagctctgataccacttgttagacaagtggcctcacatatcttaagaggggggggggtggttc

SEQ ID NO: 98538 - DNA, 463 bp, Glycine max
  unsure (1)..(463): unsure at all n locations
ngagtgtcgcctcttaaatcctaggtggcaaaaacatcattgacaggtagacaattagtttttcaaaataccattttggtaaaaaaaatcctttagtggacctattaagctttgctcccaatgatgtgaatgcaaacattatactttacacctaaatatgctattgataaattttttgtatcaggtgatttgtaatcaaatagaagatcttcaagcactatggtgatctctccaaaagtggaaattgtaattttttatcagcacaataaagatgatatttgagagttgtattatatctgtgttatcgtatttttcttggtaccacatattcgctttacgatgttgacatcacatgagcttatcaccgatatgaaaatatctaattagtatgaaatcaaaattttcaaataatatacaacactntataaatattttttcacaaaaaaacaatactttgatgatt

SEQ ID NO: 98539 - DNA, 437 bp, Glycine max
agcttcctcggggccattcctgcgaaggcaaacatttggaaagttagttttaccagtgggacgttactctttaaagcaaaaatggcatataacctcctcccataaatacaaacatcaatgtaaatttagagtaagcttatgcgcatacttccttacaaatgttctcttgcacaagacattctattaaccgaaaaaatgcacccatatacaatcaaggcagctccgttacctagattatatacacgtacttccaatgtgtatttgttacttacatcacacacatctccttggctaaattcacatacatgcatacccaaagcattttggggtaccaaaaattgcacatgtacacctcttggtatttctaatacctatacatacacaaactttatgatgaatcttgactatctacacaataaggtgctacatttcatgct

SEQ ID NO: 98540 - DNA, 461 bp, Glycine max
tctagaaagagcctatcctctttcaaggtcacctcttttattgacacgcgtatggatctcctcaagaacaacaacttctgcgtctcctatggcacaatctaagttgttgccttcatcgtcgtcctcgccagtgaacacttcaagctccacttcaatgccctcctccctgccatcatcgattgccttgacaacaccaagcaacccatcctcaacgtggccttctgctcactctcatgaaggtagtacaccttcctctaactcgatagtgatagtaatgagtgttgtgctaactaactggtattggtaacgagctgctttggaattattgctaggataataatgactttgatttattgaacagaaaccgtgcggcgacaaattcagatatatatgccatttggctcttgtaggatttgtctagtggatctgaagaactaagattagaataatatctcaagatc

SEQ ID NO: 98541 - DNA, 356 bp, Glycine max
  unsure (1)..(356): unsure at all n locations
tcaagcttgaacttncaccgccgacgctactattatgctgtgacctcgagccgagatagaattgccctgagcggcaggcatacacatcggctatattaattcacgattgcaacagtttcctgtttacctagctacacgagaagtttggacggtgatcaactaagtgatttgaccatagtggagggataattcatctatgcctgtgttgttactctatggcctcatggaaggtgcttcttgcacatgatgtgactagatcagtacatgaacattgatcgatgattacattattgaatcgagcgcactttcctttatgttgatccaaggtgtagagactcgtatttaccaataattca

SEQ ID NO: 98542 - DNA, 256 bp, Glycine max
ggacacttcaaactcagctaatcaatgcgcgtacgttgtgaaacattcttttgacctccttctaagagatgtcacctcgatagtggcggacggtccgtctcctaataagagcatcactgtcacatcatctaagtcttcccgtgaatatgatggatgacaagtgctttaaacatgaatccacccatccctagattcaaaatgacatctacaaaactcgaaccatagatgtgcacgagcactggatgatctattaata

SEQ ID NO: 98543 - DNA, 447 bp, Glycine max
  unsure (1)..(447): unsure at all n locations
agcttnttgttttgctatgtaaacacaacttaaatcaactacaaaggctaactagttatgtgctaaaaaaacaaactcttctcaaccttgcattntgtaatggaataaaacaaattaaaatctgcaatggtaaagaaaaagttaccttcaatactataatagaagaaaggaggtcatcatggtaattgtggtaaagtagtggtgtttctactcttatttcttagcataggaagccattccattcatgagaccatttgtgtatttcgagtaataatgtcaaattcagaaaaacaatcaactaaacattctcagacttactcaccacattaatatcattgttccgccatacgaagccatgctatttcatgaaatatgaaaactttttaccttggttgggtcagaaagcatgtttacttataatgttttgttgtgttatgcattaccatg

SEQ ID NO: 98544 - DNA, 461 bp, Glycine max
  unsure (1)..(461): unsure at all n locations
tgacaggtntgaaatatatctctgatgtcttatatgtgtctgacattgatcaaaatctacttagtgttgctcagcttgtagagaaaggattcaaagttatatttgaagaaaattggtgcttgatcaaagatgcaaatggaaaagacgtattcagggtgaaaatgagggctaaaagctatgctctaaatctaatggaggagaagcaaatagctntttcaagcatgaccaccaatgttgaactatggcacaaaagtctcggacacttccatcttgctggacttttatacatgcaaaaacatgcttggtgaaaggtgtgtcaatgcttgaagacaagttagccgattgtgtggcttgccaatatggtaagctagtcagaaaaccatttcctcaattaacttggagagcaactcanaagctacaattagttcacacagatgttgggggacctcagagagtatcat

SEQ ID NO: 98545 - DNA, 415 bp, Glycine max
  unsure (1)..(415): unsure at all n locations
agctntaagtttggagttcaaaaaaaagttatcactcagtaacataacactaacttgcatttcttagtgttgttcatcatgtgcaaccttattaacgatcatctcgtttggaggaccacttactcactgtctagggaggtggcaaggctgcaatgaggaaatgttgagggctcttcaaccctaagtaaagccttctctacccctctcttttactttttttgttaattttgctttattagtttagttatttagtatatgtgtggtagtttaggaatatgttcactattatgaagataagataacacaggtgattaagaagaaccaccattttcttgcaaacccaccataaaataaaacaaaatattgtgcttaaaacattccttgtgtggctgaactcacatgcttaaagtgaaaa

SEQ ID NO: 98546 - DNA, 304 bp, Glycine max
  unsure (1)..(304): unsure at all n locations
gtttcgtcttacagacagcaaanaagaatgtttatacggattaccacttgggtatttccgctcgtcagcgtgactcaaatgtgagtatgacagatcttgtgatcgcggaagatgacgtaaatctccgcgtgtcaacaggcttgtcgacccgaatggccaatggcgccgaataccaccgtagtctctgcctgcctttatggttctccgctttcagaccgccaaattaatagtgtatacagggaacccctctcgtattttcgctcctctccgcgactcatatgtgattatgacacatctcttgagc

SEQ ID NO: 98547 - DNA, 416 bp, Glycine max
  unsure (1)..(416): unsure at all n locations
agcttcagaaaatgcagtaacagatgtaattgattcttcctctatgggtttgattgttgtcagggaagataatcttgaatatcatgattggggtagaacaactgatgcctgtagctcaggattagtaagccaagctactggtgttcagcatgatgacaattcagtgtcagcatttccaaatcatgggagttttatttcaaatgatagtattgaagaccagccgaataatgtaagcagtgtctcaaatacggaaacaacagttaaggatccagagtcatcctttgatgagaaacatgatatggagaactcttgtgttgatggactggatgctttggtaactatcaacacttctacaattgaagaatcanaaatagaaggggaaaactgttgtcagaaggatactggtgtggtggatg

SEQ ID NO: 98548 - DNA, 354 bp, Glycine max
catatcaagcttcgacctagtgtagcactgaaagaataaagttagaatctcttctgtttcctgttgattatgtggatagaagcatgaagaaagaaaggtacgagtgttctttgttgtgttttctgtgaggtggagcaacaagtctgtggtttttgctagagagctaaatattttgacacagctgcaaagtcagacagattgtatattcctatccattaatcaatggttcaatatgtggcaccaacaactctataatcatcttaatgagtttcatgaatcatgaatatacacgttctgataagtattgtactcctgcacttttggagtggaggacgaggaatcagactatgtttg

SEQ ID NO: 98549 - DNA, 453 bp, Glycine max
  unsure (1)..(453): unsure at all n locations
cctaaatcattnccaaatatgcatgtgtattaacgagctatcaatggggcataacacaccaaactattatgatgatagatagctcgacttctcacaaaaggtaaacttatcactttcaaattgagcttccacaactatcatgacatgtaaaggaaaaacaacgatttcaagatacataatgtctagaaacttttattttcataacaattacccagtacttgaacatatactataattaaaagacaaacatgcaaatttatcacaacaaaacttacaaaattaaactttatcccatcaaaactaacaaaattaaactattttaactctactaacaaaaccgaaaccatagaacacactcccccccatactttaacaacacatttgtcctccatgtggcacaatataaagatgtaaagcaatctagccatccaataatatcggaccaatgttatt

SEQ ID NO: 98550 - DNA, 457 bp, Glycine max
agcttgcatgaatatacattctcccctttctcaagcaaattcttaattcttcttgacatcatcaaaatcttcatgatttacattctccccctttttgatgatgacaaccacctgtaggttaggagcaacaacaaagaaaaaatatctatttgcatatagtttactcccccttggttttgcaataattgcttatatgagacatttgaagatttcatatttttcatatgtaaacaaattgtctcataaacaatagataatttttcttactattttatcttttatctttctctccccctgtgtcaacatcaaaaacaaatcatgaatagagaggagaaagatgttaccacttggtgcaatgtatgagaatcaagtgataccaaaaggcattaaaacaatcattcaatattaatcaaaccaaaacaagtactataacacatcattcaaacacaatcaatca

SEQ ID NO: 98551 - DNA, 433 bp, Glycine max
cgcctcccataataggacctttatagaaaaatattgcatgccaaggtaggcatagcagcaggagaaggaccaccagcagccagccacagatacgccgccgccacctctatggtagccaccatctctggagtccatctctgctcacttgcgaaggatggagctccaaatggatgcatatatgcagcatgtgaccgatcagcaggcgactaatcataggggtcatgtgcagctgaataagagcttctaccagtacaccctgcatcagcagagccaagatcctagccctctcccgtggcctaccctagagcagtttggggccacatgtgcatggccgggagataagcccgattttaaggcaagggcaggacctccatgggcccctggggatgaagatggagctcacgaagatgatgacatggccgatgtgatggaa

SEQ ID NO: 98552 - DNA, 446 bp, Glycine max
  unsure (1)..(446): unsure at all n locations
aataaatattctaccaagtgatcatcttatatgctattaatatgtgtagtatgttaccattattatncaatttatctacttaatggaataacatttatcaccaaaaagacggtgtaaagaactcgagaatcactaaagggagaaaaatgaatgtgtgttaactagttgcttacattccctttccatanggcacatgtaatacatcttgcccttgatttttctcctatctttagagtatttacattggtattcaaagattggtattataggacttagtggtcatgatcctttggtggcacgctaagcacttgtcgtttttatcatgttatgagtgaataatgttgtcagctataagactaattgagaccctcaataatctcgattatataaaaataattactcaatttaagggtgtgtcttatattgtttgactcataatctagact

SEQ ID NO: 98553 - DNA, 432 bp, Glycine max
  unsure (1)..(432): unsure at all n locations
agcttatgtncattcaatgactctaaattattaattattagtaaatcaataattgacctgcanggatacgttagaatctaatatgcgcaagtcttgccgaacaactatcacaaatatacgatgattactgacgctctataacttaaaagagcaattaaatttgattgatgggttgtaaacttgtcacaattgcatttagcattactataatttattttctttatgtgccaataattgaataaccaagtcggatcacgtatcacatgtgattatgaatacaaacaccaatgccccattgtgtttggttccccaatgaaccctcgttcaatgggaatgtctcacttctcatgacaatgagaaatatatacgtagctggtattcccacactgtatgacatgtcttgcatcataagaagactgctccgagacttct

SEQ ID NO: 98554 - DNA, 459 bp, Glycine max
tcaagctgtagtattcttggaattcgctcattgtataaagtaattatgtttatcaagagatatttttaattaagtacaaataaatcgtatgagatgcatataccgatcaaaactgtgttgagaatttctagttaacaaaaaatgaaaagtgagattttctctcttaaaatttaagacatttgatttatagcactatcttcaatattttgaaaaattatctgttctttattacaggacacctcttacaatagcctcgcttatactttttatttaaaacctatttacaatcctttaatatagaatataaatgttatgtagcattcctctctctctcttattaataatattcatcatattctcaatccacaccttaattatttaaaataaaataattgtgtgcggagaactgttactactctaataattttaggctaatttgtaagtattcccattttatat

SEQ ID NO: 98555 - DNA, 380 bp, Glycine max
  unsure (1)..(380): unsure at all n locations
agcttgccaattatgtagagctaaatccttatttggttcttcctacggngtacttgatgtaaatactcttatatctatctaatgacgttgcatgtgttctctgtgctattagtacttcattttagtatgcttttgccttgatcacgtagatgcatgcttagttagggncattcaacattggaaaatgggttgatccttagaacttgataggacgcggctagtttatcgtattttcacgagggatcgggatacggacacctagntggtggtatgtttgttttaatgcacttctggtccagtatagaccaacaagaaggatctgatgattacgcttggctaggattatgctaaacatgcccgagactttgtggttaagcatt

SEQ ID NO: 98556 - DNA, 352 bp, Glycine max
agaatctcaaccttcttaggaatcttcttaaagaagcttctcaacgaggttatcttatttatgagaggggtgtgtgtagctgagctctagcttctcaaggaagttttcttaatttatcttctcttggaagttttctcaagatagcttctcaatgaagctacctcgtctataaatagaagcatgtgtgacacttattgtaacttcgatgaatgagagtcttgtgagatatacatcaaagttccacttctcttcctctttttttccttcaatatcatgactccccctctctctatttgtccctctttattttcctccattgaagcattcttctcaagctccttattcaatgcta

SEQ ID NO: 98557 - DNA, 194 bp, Glycine max
gaatgaacgtgatcttctttattacaagggcccaatatcttagagcggggggttgattaagagattcaaactatttccctatataaaattataagtgataaatacccttataatgaactgcttaaatattgatccaatagaacaatatgaatgtgaattttaaaaaatatttatataatgtatgtttatggaag

SEQ ID NO: 98558 - DNA, 380 bp, Glycine max
  unsure (1)..(380): unsure at all n locations
agcttgataaagaaatattgatcaaagactttgagaccaaactattacaataaaaaatgagattcttttaacaatttaactaagttcttatttgtgattttcttgatcttgtttgntgacttgaaacaatgtgcgctttcatcaagtaaattcttttggcatcatgaaaacctgcatgagtcacaccctggacaatacataagcaccctaagtgtatacaaaggatcaagcttaatgttttgatgatgccaaaggatcacatgtttctcacagctttattcaagacaaagaacataacgatattcacgatggatgatcaagacagtctctagagtcttatgaagggtatattaaataggaagggaattcctaattgaagt

SEQ ID NO: 98559 - DNA, 454 bp, Glycine max
cggactcttgagtggtaagatgaggtctcagtggatatgttcttttgttgttactaatgtttttccttatggtacagttgagatcaaaagagactccacaaacaagagcttcaatgtcaatggacaccgacttcagccattcctcacaaacccctctttagtggacgtagtggtggaagagacttacttactccaccctactcttactccaccatgacttacggagtttttctttttcctatctccttctttactcttattacatttgtctgattctatttgatggtttaattgcttctaatcttttaattgtgctacatcgatgacaatgtggcgattaagtatggggtattagagggttagggattactgcttgtacttaatctccactcattccccatagctcctctactcctttaggatttagctgctcattccatattttcttccctac

SEQ ID NO: 98560 - DNA, 448 bp, Glycine max
  unsure (1)..(448): unsure at all n locations
tgacataggctcgagggcgnagccacactattatgtatttctagccgagccttaaagaaagcgcctatgacaggtaaagagttaagctcaagccttacgtattcaactcaagccgagcgtcaagcctaataaagcataacttggctagactcatttacacccctacatataatatagctgccaccaaattattctggttaagagacaattattgtagtccgtgcagcacttgactaagtcattatatctttaacttcaatgaataacatggttgttgataaaatgcatgccacgtctcaatcaacacaagatacattggaaacatattatgaggctgagcgatcggaataatgtatcttacttatagcatgaaagatttgtatgactgtctactcatgtgacacaccgctgaacccacagtcagaaagacttttgatataaaagattc

SEQ ID NO: 98561 - DNA, 431 bp, Glycine max
agcttaatgcttcattaattccataaattagattcaaaacatccaattagctgaatgagcccaaataataaaactgcctaattaacctgacaattaagacacatcattaattaaaatggtgcaaaaagggttaagaaaatgggatataataatgacacatcaaagatcttacctctatttgcagttagtaaaagaaagaagattgctaacaactggtctgatttatcaaaaaaggaatcatggatcgtaacgaagctcaattcattgaaccggaatctccaattgcatcattgagaacaataaccaacgaattgaagctgatgaccactgatttggagaaatcgtctaacaaacaaactgaggtgattgcgaagttgtcgaaacagtatgatgacattgaagatttgtttaagacaatgaagatgctcttg

SEQ ID NO: 98562 - DNA, 465 bp, Glycine max
  unsure (1)..(465): unsure at all n locations
ntaggttgctcattaactcctgattgctgcatagaaggacaaagatctgtatggtgatttgcagaagaacatagaccacagactcttgcaacaggtgcagatgcatatttctaattcatggcaagctgagttactaagttgaccaaggcatcaagttttccctcaagctttttattttcagcaaatgaagatgaattcgtggccacctcatggactcctctaaggacaataacataatttcttgcactgaattgttgggagttggaagccatcttctcaatcaaattcctagcctcaacaagagtcatatcaccaagggctccaccactagcagcatcaatcatactcatctccatgttgctaagtcactcatagaaatattgcagaaggagttgctcagatatctggtggtgaagacatcttgcacataaattcttgaatctgtcccagtactcgtacaagctc

SEQ ID NO: 98563 - DNA, 418 bp, Glycine max
agctcggcggattatgtcttctgtcctgatatgatcgaacaggaactgaacatacgctaatatcattctcctgcttagacgaacgagaaaactcgggcaaataatcagggtgaggacgatggagaaacccatgctgtgactgccattactatacggcctagttttccaccatacccaacgatgtgattactcaagcgttaacaaaccacctccttacccaccacccaattatccacatatgccattcctaaatcaaccacacagcctgtctaccgcacttgtaatgacgaagaccaccttttgcacaggcctgaaaaaaacactcaccaagaaatgaattttgcagcgaacagcctgtaagattcaccccagattccggcgtatatgctaactagctcccatatctacttgataacgc

SEQ ID NO: 98564 - DNA, 426 bp, Glycine max
tcttatctatagtcgtatggatggtcttgggttatatcttacaccgatcattgattaattagaactatgacgttgcccattataagttccatggaatgagtctaccaagagtatgtcttgggttcatgtttagataacgcttggtttcagagaggctcaccaagggtgaaccttgtgcttgtcgagccattataggttcgaccagactcactcaaggcagaccttgggtttggcaagtctttggagattcgacacgactcaccaacggaggacttctggtttgacgagcctgtgctgattccaccaggaacgcattctccctgagtttggtgagtctatgctgacaaacactcggtttgacaagcctctgtgagatcgacgcgtacacgacgaaaattatgatactgaagggagagataagtttat

SEQ ID NO: 98565 - DNA, 416 bp, Glycine max
  unsure (1)..(416): unsure at all n locations
agcttctagccaaattgacttacctngaattaattcctttgatagccctcttgagccttgattcccttcccttggtttgaagctcactacaagccttaaatgaaaaaccatgatatcaccatatctttaatgaattctggagctttggaattgttttgggaataagtgtggggggttttttgtttcataggataacttgttgtgttggctatgcttcgtgatgtattttgggccatacttgatgtacattgaatatatggttaaaagttggacatgataaatgaaatgttgtttctcacaggctatatagtaattgaaaaaggtgtgctattgacgaagactaaattgattagctttatagctgatggaatatgatctttattgcgcaccgatgacgaaactctcggcccacactt

SEQ ID NO: 98566 - DNA, 452 bp, Glycine max
  unsure (1)..(452): unsure at all n locations
nntatgaagtttatgggtgtctaaaccttgataacttgtgctattcatccttttcattctcttctccctttgccaaaaagaattcgccaaggactaaccgcctgaattctttntgtgtctctcttctcccttttccaaaagaacaaaggactaaccgcctgaattcttttgtgtctcccttctcccttgtcaaagaattcaaaacgacacagtctgagaattcttttgattcttcccattccctaatacaaaagcgttcaaaggtttaaccgcctgagaattcttttgtatccccattcacaaagtatcaaaggtttaacagcctgagatctttgtcttaacacattggagggtacatcctttgtggtacaagtagagggtacatctacttaggtttgactgagaacaagagagggtacatctctcgtggatcagttctagtggagggtaca

SEQ ID NO: 98567 - DNA, 433 bp, Glycine max
  unsure (1)..(433): unsure at all n locations
agcttcaggtaacttattcttataaactatattgaagaanttctttaaactaaactaaatacatatatgttatatattaacatggcttaagatacttttataagttctttcaacattctcacaagtaagaatatggcattggtttgactgacattaaattcgaactctttaaataaaatatgaagtttaaatcttgtaaaccgaaaaaaaatgtaattcattaaatgatcaattaagttctcttgataaaggctatccatattttaaaccaatatttgcataataaaaaaaatctcattaagtacttacaacaaattcacataaattgtttataagatctttcaaataagccttagttttatagagattgatttaacttttgctaagttattttaactatgaaagaagataattaattcagatactttctatt

SEQ ID NO: 98568 - DNA, 424 bp, Glycine max
gtatgtggagatgacctatagaagtattagtacgcgagtttacctggtggagtggtaacctgatacaggcccaaataagcctgttatgttcgaagtgtatctgagtatggcctaagggagaaaggagtgactaactatgtagtagtagtgtgcggaaatacgggggataagcgggaaaagtgtgattacacaataccgcgtataagtggacagaggtgggatgaggttggttatgatccttggtagagttatgcctctcaaagtgcctaatgaaagtttctcttattgttgtcttccccgtttatgtatactgcaaacacgaatatgtcttaagatctgcgcctaattccaacctgatttgtaataataagacactctccgccttattctatttgtactgatcctataaactcaacgctattgg

SEQ ID NO: 98569 - DNA, 467 bp, Glycine max
  unsure (1)..(467): unsure at all n locations
taagtcacctgcgggcatgcaagctntanccaaatggacttaccttgaattaatggctctgatagcccctttgagcctattatcccctttctttgtgtngaaactcattacaagccttaagtgaaaaccatgatatctccttacccttaaagaattttggagctttggaattgttttgggaataaactgggaataagtgtgggggggtatgtttcattggaagatatgatatttggccatgcttaatgttttattttggccatgcttgatgtatatatatattgcttagttctttctttaatcttcaatttcatactggtcaataacaaaaatttaaaaaaatgaataatgaaaaataaagacgagaaaagaagtgaagttgaataaataggtcttgatatgagaacttgattagggagcctcggttgattttgtagatattagagggattgggttactacttgagc

SEQ ID NO: 98570 - DNA, 403 bp, Glycine max
aaagtgtttttattatggtcgaccccttcttgaggcgtaggagtgtactatgatagccacgcatcatacatgcgtagatctttataatgcacatacaatattgagcccatgacgacggcaatataataaaatgtctaatcgttggattattatacaacaaatcacatggcaaagtccagcacccataatacggaatgtccaagctttatataggtccacatatttctttaattggcattaagcacatgcattgctgcatcctacctatatgtgcgagaggccactactttgcctgaagaagacaagttgttgagccaacaactctacctgcggaaaatgaccatgctcgataaacacaaacctggatagtatgcgaacaaacaaaataactctattgaaggag

SEQ ID NO: 98571 - DNA, 441 bp, Glycine max
  unsure (1)..(441): unsure at all n locations
tctgagtcacctgcacgctgcaagcttatcttncacatttgccttcttaagagtgctctctnagcaacatatttacttaatgatatacttgaggagcgacataaaactcgctctcaataacagcctggctaagatcttcctcacgcatgaactccaagggaaaggaaacaagatgtcccttcacagacttcaacctatctatagggtctatttttttgatatcttcattctcatgacagaccaacttatctggggctattcccatatctatggtggtatgaccaagtttttctttccagtgaaccatgctttgccgaagtgcagctctgcttattattgtaaagttgtacattattagacaggataaacttgaagtctcaagagataatcagacaattgtgaacaatccacacccttgagtgatttgattggtgggaatgc

SEQ ID NO: 98572 - DNA, 433 bp, Glycine max
  unsure (1)..(433): unsure at all n locations
agcttcttatccaaagctcatcttggtggtgaagcttcttcttccatggcttattccttaatggatggcgcctcctctcacctcctttcctttgtcttccgctgcatctccatggaggaaaatcaccattaaaggaccccattgaagctcaaagatccagccttcatagaagccccacaagcaagcttccatcaactagtacccaaggtgccacccttatgataaagcaagagatctactcatcgagagggctggtcatcccaaatccacaatatttggacatttgatgtaagaaatttatgcagttaacatgatccttagggatgcacatgcatgcaaccttagtcgtgcaacttgttaaatgcggacttcatattaaacactgcgatgtggtgtgaaacaagtacaatgttcatgagantaatcccctggt

SEQ ID NO: 98573 - DNA, 447 bp, Glycine max
ggatcttaagtgaccgcggctgcagctgggccaaaggtggtttattctcttgggaagatctctcttttatggtctgaatcataagtattttcactggaggcaattttgttcgagccgggtagcacctctatgggaggcaaagttcttccttcaagtatttaaccgtatattatatccatgactcaaatttaaaacctcttagttaactgaattaatcaagttagttaagcaacctttgaagtttatttcctaagagtgaattataaggaatattgcataatatgcataacactaagttatctgtagcctaatgaaaacgtctattcaatctcagaatatttccccatttggtcttgctgcaacacttatttaagagagcttcatttatttatccaatcacattaacaactcattggataggttggggattgattaaacatatataat

SEQ ID NO: 98574 - DNA, 89 bp, Glycine max
  unsure (1)..(89): unsure at all n locations
agctntgcaagcgtcgtagcctgtggaatgtgagataggttgcagggccaaaacctcgcgtctggtctccggtgtgagccttgaaataa

SEQ ID NO: 98575 - DNA, 405 bp, Glycine max
  unsure (1)..(405): unsure at all n locations
agctcatgttatggagtcggcgcttgcttttttatctatttactagatatcgcgctcccgtttcacgctcatacttcttatccttcgggngaaccctattttggtagttcaatagtcgcttatggaccccacgctattgtaagatttgtccagtacatttttgtaccgcatggacttactatcttgatgagatcttactactctttcctttgatataatagctaattaataagttgctgtctcttgtacatgatcaaaatcaacaaatggtgccccacatgctgggattaacctccaccataaatgcattaccagttgatcttgctgaatatgggcgcatttatgtcaatgctcaacaatatcatggtatactgagaacgcgactgtcacgatcaaagcttgaac

SEQ ID NO: 98576 - DNA, 450 bp, Glycine max
  unsure (1)..(450): unsure at all n locations
agcttaagctccttcaactgcacaaggctcttaatatttgaagagtatccttgtggaaccttcacccgacgaagacactgacaaaaacttatcttctcctttttggaaaaagtatgacaagctgggggcaagtaaattttcttcccatcagaccttggatgcaactgtgatcgtatccccatctcagctagatcttgacgggtattcaagccattcttcaccttgccttgaatgttaaggagcattccaatcacactgtcacatacatttttctccacatgcataacatcaatacaatgtctaatgtctatatcagaccagtacaaaagatcaaagaaaatggacctcttcttccatatgcaagtcttacttttatccttggtttgggttnttccaaatacagtattcaggtgttgaacccactggtatacctgctcaccagtcaacggg

SEQ ID NO: 98577 - DNA, 399 bp, Glycine max
  unsure (1)..(399): unsure at all n locations
agcttggaattctcataagcttgaaatctcaattcctgaaattcatgaagttggagcttcctgtgttccctagctacattgagatcaaaatttagaaacttcaatgcccagtaagctntgtgctccaactcaacaggtaagtgacaagattttccatagaccaattggaagggagtgagtcctataggagctctgtatgctatttcatatgcccacagagctccatctaatgaccgagcaactgttttctctaggatcttcttgacttccttgttagaaacttcaacttgcccattggtctgggaatggtaaggtgaggctatcatgcgtctgacactatagtgttggagaacattcttgtagtggacattacagaaatgagatccttcgtcatttatc

SEQ ID NO: 98578 - DNA, 439 bp, Glycine max
  unsure (1)..(439): unsure at all n locations
agcttctctcccatcttgctataaataggttggatactgtttaatataagggttcagccccttatgcacttctctctctctctcaattactgaggaaaattagttccgtgaagaaaatacaagccgaggcgcttgcgtcacgtttccgtgagtaattacgcgaagattctcgaccgttcttcaagattcatcgttcgttctttgttttcttcagtcttcaacgggtaagtacctcaaaccaagcttttgaattcattctatgtacccgcggaggtccacattttgtttcatgtatttttattctcgttttcattgactttttatacccccttttgacgtgcttaagccatttatttaagtcatttatcgcttaatctaaaaataaaataaatttccaccgatcgttngaattgtatcatccgtttattttggtaaaatg

SEQ ID NO: 98579 - DNA, 351 bp, Glycine max
cataaataacttttgttcctggaagtgaacatacgccaatgtcgacccaacatcgctatgaaattcgaactttcggcgcagacccacatttagtagttcacgtaactggacatccccagatgatctacggggaagggagaaccaaaaaagcaaccttctgaaagaactggcagtcgcagcttccaaagcagagcctagaaaaaagagaaaccctacctgctatgtagccttgcaaattacataatcgggattaaatcctgatatgatccatcgggaaagatccacactacaagacacctgtgaataatattttacacatgggtaataatccagcctagaaagctggcactg

SEQ ID NO: 98580 - DNA, 398 bp, Glycine max
agcttctagccaaatggacttaccttgaattaatttctttgatagcccttttgagccttgtgtccctttccttgtattgaagctgactacaagccttaagtgaaaaaccatgatattaccatatcttgggccatacttgatgtacattgtatattggttaaatgttggacatgctgaatgaaatgttgtttctcaaaggctaaagagtctaaaataaaataacatttaataaggtcttcgaataaagaaaaagaaaagcaataaagttgagtgaataaaatcttaaatggcacaagaatgatgaaactcttggttctactcttcatgttaaatattatctttacttctttttatttgtctcttaatatgcacttattcccctctgctcctctattcct

SEQ ID NO: 98581 - DNA, 439 bp, Glycine max
  unsure (1)..(439): unsure at all n locations
agcttgcgcctgngacaagtgacatctgatgatggtttgcctatggtagctgcaagttactcttctagacttccaaggccattgaccaccattggcaggaggaatggtgatagaaatgggaggtcaagaatttctagtgaaagatatcgatcattggctgagagtggtctgcatgatcgtttttcctctgaagtatctttgccagtatatcaaggaactctatttttgtgtcagtattaatggaaggatatatctgtgtaacttctggaatctgaacacctgttttcctttttttgattgtaaaccatagttaaccaaaatagggatgctctgtntatttgcaaaatctaagcaaattacttacaatatattcttttgaactaattgcgctgttcattaaaacatcaaattgttctttttggcatactaccactggctg

SEQ ID NO: 98582 - DNA, 367 bp, Glycine max
  unsure (1)..(367): unsure at all n locations
agcttatgaatannnnnnnaggttgttgtgtctttatcaataaagaataccaagtggcactccggcaatcatccgcgaaacgttaattcctgtgataatcactatcatttgtgagtagcaaattgtgtctcgatggttgatacttcacaagaaccggtgattgctgacccgttgactgtgtaagagactgccgggctaaaaaagggattactagtgatggatacacacggctcaggcaatatttacattgatgaattactagcaggggggcatgcacctaggtcgtgcaattccctaatcatatgtccaagctcttattgaggctgtgagtattactaatacttcagcttttagctcaaatctctat

SEQ ID NO: 98583 - DNA, 451 bp, Glycine max
  unsure (1)..(451): unsure at all n locations
agcttctatagaaggttcattcctaatttctctacaattgcatcacctctcaatgagctggtaaagaagaatgtggcagttacctgaggtgaaaaacaaaagcaagcctttgctttgctcaaagaaaggcttactaaggcacctgttctagctcttcttgacttctctaaaacntttgagctagaatgtgatgcctctagagtgggagttggagctgtattgttacaaggtggcaccctattgcttattttagtgaaaaacttcatagtgccaccctcaactaccccacctatgataaagagctttatgccttaataagagccctccaaacttgggaacattactcttattccaaggaattcgtcattcatagtgatcatcaatcacttaagtacattatagggcaaagcaagttaaacaagaggcatgcaaaatgggtagagtacctgct

SEQ ID NO: 98584 - DNA, 448 bp, Glycine max
  unsure (1)..(448): unsure at all n locations
agcttctatttctgctgcttcactgagttttctcttattgttctcttctccaaacaaagagttgataatgcacttactcttccagtcccaggagccatcttcatctatcacaacatctctgctaataaagatcttgtgagttaacggatcatacaacctataggcaccacttggatgatatccaaccaatatcataggtacattcttgtactgaagctattttctcctctcatcaggcacatgcttgaaacacaatgacccaaacactctcaaatgcttcactgtaggcttccttcatgtacacacttcttcaggaactctatcttttagcttctctgtggaacacttattcaaaatgtatgctacaatggacactgcttctccccaaaaatctgatggcaagagctttnctttcaacatacaccttgcattttcatcactgtcttgt

SEQ ID NO: 98585 - DNA, 440 bp, Glycine max
  unsure (1)..(440): unsure at all n locations
agcttatgcgcacacttctttacgaacatttacttgcgcaagacattcttataactaagaaaaatgcacccatatacaatcaaggcaccttccttacctagattatttacatgtacttccaaggtgtatttgttacctacatcacacacatttcctttgctaaattcacatacatgcatactctaagcactttggctatcaaaaattgcatacgtgcacatcttggtatttctaatacctatacatacacaaacttcatgatgaatcttgactatctacacaataaagtgctacatttcatgctgttttcaagtgtttttttttactacctaaagccgcatgcaaattcaagtatattttcttatgctcactaanaatggattcacaataaaaggtatttttgtaatgtattttcttacataacatgcaacatatttata

SEQ ID NO: 98586 - DNA, 430 bp, Glycine max
  unsure (1)..(430): unsure at all n locations
agcttgacatgaattaatgtgtgcccatgttattcanctgttaacatgagatgaaaatntattgaacttatctcgaatttatgtagttaattagatatgtcggtgcgtattccgaatatggaaaagtggcgataatttgttttatataagagaaatgattgaaggtgcagcgtggaaaagtatatctcacagcgtatatgtaatggcgtgtaatatcgaaacagaaagatgaatgagtttaagccgaagagtttaggtgagtgtgaaaaagaaccaggggccattctctgattttattctaattcaatatcagaaaatgaccctcgntgggcccttatattgtatccataagcaaagtcaactgaggaactcttacggggttgcacagctttaactactttgtgataccaacacagactacactcgtatt

SEQ ID NO: 98587 - DNA, 429 bp, Glycine max
agcttgagccgttgttgatgagtactttgaccataacgtgttccatgcatttgactgacacatgtaaagccctgttatgtcctcttccctcgacggggatttcctcttcagcaaatgtgaggtagttgttggctgtgatgttattgacgatcccccccaaagccttctacggagatgtcttggactacgtgagcttcattcaagacctttaccagcaaagctcgatgaggctcagagctcatgagcagctccagaagggagactctagctagggtcttgttgagttgttcaatgactttgaactcgctttgttggataatgcggaggaactccctcctcgagtgatacctctttcttgccacagctctctcttcccatggaaagatccttcgtcggaacatcctcgtccggtgcagggatcaccttgac

SEQ ID NO: 98588 - DNA, 449 bp, Glycine max
  unsure (1)..(449): unsure at all n locations
agcttctagccaaatagacttaccttgacttaattcctttgatagcccttntgagccttgtttccctttccttgttttgaagctcactacaagccttaagtgaaaaaccatgatatcaccatatccttaaggaattttggagctttggaattgttttgggaataagtgtgggggtttttgtttcattggataacatgttttgttggccatgcttcatgatatattttgagccatacttgatgtacattccatattggttaaatgttggacatgctaaatatgatgttgtttctcanaggctacagagtacaaaaaaaaattattattaaaaaaaaatcgaaaaagaataagaaaagcagtaaagttgagtgaataagatcttaaatgacacaataatgataagactctttggtctactctttatgattaaatttatctctacttccttt

SEQ ID NO: 98589 - DNA, 456 bp, Glycine max
  unsure (1)..(456): unsure at all n locations
agctntcataagtgaaatcaggtgcagccatctccctaagagtcctctcaaaaggtggaggttgagccatgttctcagtatgaaaattagtagtcgaatgctcaaattcagaatgttcagaatcaccatcaacataatactcagaatgcttaaaatgctcaaaatgcacagaatgatcaggatgcacactatgcctaagtaatccatgaaaggttctatctatttcaggaagggttctaaatcacctggattgcccctagtcatgcattatatgcagcaaatcatgtgtttctcaaacaagcaccaggggagggttaaaactacaactatagtcaaatgatatccaaatgagctgaaattttatgagtaacaccctacaatcatgaaaagatagaacaaaaatttgcagacaaaaattcactaactatgaaaactgactaaggaaaagttagaaaa

SEQ ID NO: 98590 - DNA, 453 bp, Glycine max
  unsure (1)..(453): unsure at all n locations
ttaagtcacctgcagctgcagctgactcgttatttaacaagtctattcttattcttgattttggcttattaaataaagttgagcttgacttatataactcatttataatataactttattacattattgataatgtttttacttagagatttctaatactttcttatacttacgtgtaaaaaacatactttattttaatatcatctccttttaactgtcacagcagaaaaaactctattaattgtgtactaacataatgtataaaagaaaattgtcattagaaagaccttataaaatggtttcatacaaagagctgtatctatataattataatcttttcatgatcatatatgtatatgcgtgtgttcgcacatgtgtgggcatgcacgtgtgccccatgaaatattaacgagctgttaatttctagctgaatagncacaaatagctacacat

SEQ ID NO: 98591 - DNA, 470 bp, Glycine max
  unsure (1)..(470): unsure at all n locations
cctctaagtcacctgacgcatgcaagcttgcatgatttacatctccncctttcttaagctaattcttcttgatatcatcaaaatcttcatgatttacattctccccctttttgatgatgacaaccacctgtaggtttggagcaacaacaaagaaaatatctatttgcatatagttttactcccccttggttgtacatagattgcttttatgagacaaatgaagatatcatatttttcatatatgaaaagctgtctcataaaacaatagataatattgcgtactatattatcttttatctttctctccccctttgtaacatcaaaacaaatcatgaatagagaggagaaagatgtaccacttgttgcaatgtatgagaattaagtgataccagaaggcattaatgcaattattcaatattaatctagcacaaacaagtcaataacgctctgtcaaacgcattaattcatca

SEQ ID NO: 98592 - DNA, 364 bp, Glycine max
attcctaacatgacctgacatctggcccatgtcaaaatgggacttctcaccttgcttaccatgataatatactttcatgaggtcatgaacaacactatgatcaagagctcccacttgacttgagttggaaagataggcgccaccactttacagataggatattatagaagtgacatgagattccttttgtaagacaaaccatacctgaagctgtgctcgtgaatcaccctctagttgggaatagatatcacgttcctccatagagaaatcaactatcttcagctctatatacttatgccggcaggaaataataggttccacgtcatgaagtgtacctacagagattgatcatcacatgtgttca

SEQ ID NO: 98593 - DNA, 429 bp, Glycine max
gatccttaagtcgactgcggcatgcagcttgttgaaatactcatcaaccttgctttttttgccttcacttgctgggagagttcactgctacatttctgagcacacttgcattccctttgaagagaaacagattggaaaaaagggatcagctcttcttgccagtaaagtcctttgttctccttctttagggtaacaaatgggttgctggctttgctgtgccatatgtaaggcaattctgttcttacccccattcctggatgatcactcatcacctacataattaacataagatgcttccatttggcttacttgagtgatgagcggctgatttttctcatcaatactactagaccatcttcacccatcagaaacatcctgtgtctttcttcgctaatgataaagctttttaaaataaaatatgtcatatgt

SEQ ID NO: 98594 - DNA, 399 bp, Glycine max
agcttcaccggatgacgccgatcgtacatttttcttaccgacggcctgcaaatttcgttcacggattgaattgaaaactcgttaggcgacatctgtcgtgaagaatcgaccgatttttttcagccgacattgctcaattctttttaaaataacctcgctggtcgataatggtctttttaccgcagagtaagctttcttgttttggtgttgcataaaacagttacaatgtacttcggctagggttttcgtgcgagttcaaccgacattttgtttcggccacgaaaacattatcccacctctgccataaaaatatttgctaaccgtcttcatgcatatttcattcaacgattggatataaaactcaatagccgacaacggtcgtgaatagtcccgctgata

SEQ ID NO: 98595 - DNA, 426 bp, Glycine max
  unsure (1)..(426): unsure at all n locations
cacctgcggcatgcaagcttgtacttggtttagacatgattgattcatgatttgggacttgtacgattcaatttgggcaaaattggatgagggaaagtgtgatttccaaaatctgcacttatgcagaattttgctgtcaactacgtgcagcagaatttggctctgtgcagaaaatgatatgaaattgctggttgtggaaagagtatcaccgattgggttctggacgttttctagcagatcccaacggtcaaaatgtatatntatgtactagagacttccagtatatattttgagtctatccaacggctaacgaattggaacgaaaagaatgttactggggtatttgaatgtgaaaagctgtgatattggtttgtgctttgggcagagacttctgcctttgccctgtttacttggctgtgttacgtt

SEQ ID NO: 98596 - DNA, 418 bp, Glycine max
agcttttcgattcattttatgcactctatggtggtccacattgtgtttcgtgcattattattctcgtttcgtttactttctataccccctgttgacgtgcttaagccattttacttaagtcatttctcgcttaactaaaaaataaaataaatttccaccgaacgtttgaattgtattatccattaacttcggttaaaataaattccgaccgttcggtcgtgccgtaaccacgttggaaatcaaaaagaggtaaaagaaataatataataatcaaaaaaacatcttttagtaaaataaagcggaaaatcaatcggacgttttctctttgggagttctcattcttaatcgaatcgattaataactaaagtgaaaactaaggctaaaatcaactcgcctagtcaagctcgtctcacaaaat

SEQ ID NO: 98597 - DNA, 382 bp, Glycine max
  unsure (1)..(382): unsure at all n locations
agcttgcctcanagaggtccaggaatgataaagcggccaaaggaaccagttccgctcccgagtatgacagccaccgctttatgagcgctgaacaccaacagcgcttcgaggccatcaaggggtggtcatttctccgggagcgacgcgtccacctcatggacgatgagtataccgatttctacgaggagatagttcgttggcagtgggcatcactggttacccccatggccaagttcgacccacacatagtcctcgaattttatgccaatgcttggcctacggaggagggcgtgcgagatatgagatcctgtgtgaggggtcagaggatcccgttcgatgcggatgctatcagccagttcctgggatatcctttagtgctaaa

SEQ ID NO: 98598 - DNA, 299 bp, Glycine max
agcttgagtgttgaagtgaccacatcttatatgccatatcgcatgaatcatcaatggtcactctcatggcaatgccagtattattactatacttaacgcttattggaaaaaacttatattaccattctccattgtaactgtggcaatctcatagacttctgttatttttatcatatataaagcgcgtatcttcttcaggtgaagatcatagcctatctccatcattgagccaatgctacacagatgttctttatgatttggaactagtaagacattctattctgagcttttaccattgt

SEQ ID NO: 98599 - DNA, 220 bp, Glycine max
  unsure (1)..(220): unsure at all n locations
agctttaatccaattcatactacaataactttatacttggttgactgactcaggcccgaaatataatcgaaacacatcgaaantgaatgtttaagatttctgaacaccaacatcacttttaagtcttttagggggtgtcatatttatctggagcgacacgtcccaacttctggaagatgaatgttcccgcttccgagtggagataacctgtttggctttg

SEQ ID NO: 98600 - DNA, 419 bp, Glycine max
tcaagcttaagccaatgccagactcttgtgctttcttagacttctcaaaaacaaatgccaaactcctccaaaaaatctgatttcaagcttaaataggtgagttggtccgtgctcgcgcgcttagtgcaaatttgaattgcttagcgcgcataagtagattttggcttagcgtgcttctctcacttagcggatgagctaaaacggggcgcttgatgacctggagcggtgttctcaatgaacctgacaactcatcttcttctggattcttcctcgagcttagccactgagtgtcgcgcttaacgaatgctcgctaagccagcatataggcttaacaagaaggtgaaaacaacacttttgtcgattttcctaattaacctgaaattgagagaaattgattattaaacacacacaacaaaagt

SEQ ID NO: 98601 - DNA, 352 bp, Glycine max
atccactaaccttcaattataagaactgtatacccttaacctacggaattaaaataacttaatggctgattgcaactgaaattatggtaaccataaatcacccccaatagtcattaagtcagcctctattgggtctcccaaaaggctgatgcctaggttgccaattacgcccttattacaatttgaactcaacctaactaaagctcctttaagttgattaaccataaactatattgttggtcatactacatttaaaagattgggccatttattaaacaaactaatcactttaaaatagacactaagtggtgacatttaatactccttcatttgcccatgatacaactcacaa

SEQ ID NO: 98602 - DNA, 451 bp, Glycine max
  unsure (1)..(451): unsure at all n locations
agctttgacaagaaggttcgtcctcgtgtatttatagaaggagatcttgtgctcaagaaggttttatctttccaacccgattctaggggcaagtggacgcctaattacgaaggcccatatgtcgtcaagagaaccttctctggtggtgcactgactcttacgactatggatggagatgagctccctcgtcctgtgaatgcggatgcagtcaaaaaatactttgtctaaaaataaaagaacagctcggtaagtcgaaaacccgaaagggcggcttatgcaaaaatgagcgtctcggtgggtcgaaaacccgaaagggcggcccacgcaaaaattagagacatcaaacagaagaataatcagcctgataggtcgaaaacccgaaagggcgatctatgcaaaagttaaggatcanaagacaaagtaactgcatcgagctgatcttcgtcatttg

SEQ ID NO: 98603 - DNA, 443 bp, Glycine max
agcttatccttaaataagaaaaagtatcctcttccatcaaatccaaagtttgataaaaaaaagaaaagaaaaaacattgctgtttcaatagcaatatccttacaatatctctgcggataagctcctgaagtttaaacataatgcgttgaccagtggtgataggagtatttttccatgaaggaaaagcttgcttggctgcactaactgcagctttaaactcttcatatatagttaaatgaacttgagatacaacttcttgcgttgcctgagtaaagataaatattcaaattactttttacataaaccatcacaatgctaagaaaatttcaagcaaatatcattgaataacatatcaacttacgggatttataacatcaatgattacagaaccctgagaatctacaaatttccgcccaataaaatgtgagaccttcagctacata

SEQ ID NO: 98604 - DNA, 375 bp, Glycine max
  unsure (1)..(375): unsure at all n locations
ctttttataaaatgagaagntttggtactattacgttatctaaaaatcttggggtggatccaagtgctccgatcatccatttgcatactcatgtttcgggggcatactcaccgttgtttatttctttaggaatttcatcataactaagaaaacaccaaggcacccctataacactctatccagataaatggataatgaagagggcgtgcaggaacagatgaaggccgatctatcggccttaaaagatcaaatggcttccatctcggaggtcatgttaaaacttcagaacaccatagaggataaagccaccgcaaccgcctccagtacagttatggaagcggagccggtgctgcaacccgccttgaatcccggcct

SEQ ID NO: 98605 - DNA, 429 bp, Glycine max
agtcacctgagctgcagctttgtgcacctcccctatggttatgtttgtgaataaaggtggtgtattccttaatgggtcttggaggcatggcgaatactacacttgcaaaggtggtgttcaatgatattaggattgatgaacttttccaattaaagatgtgggtgtgtgtctctgaagactttgacattaggcggataattattaaaagcatcaactgtgcttcagcttctacctcagcttcattcattgctattgctctccatgaaagccttaccaacttatatattgagcagctgcaaagttagcgtagacacaaactatctggactgacgtattgctggtcttggatgacatatggaatgatgaacgtgccacatggatcaaattatatgatgttctaacactttgtgccctgggaggcaatttttt

SEQ ID NO: 98606 - DNA, 132 bp, Glycine max
  unsure (1)..(132): unsure at all n locations
tcctctaagtcacctgccgcatgcaagcctctactctntatacaagaatcaagctctgatatcactcgttagacaaatggcctcctcatacttaagaggggggggggggggattcattcctacatacatttt

SEQ ID NO: 98607 - DNA, 437 bp, Glycine max
ccgacctgtggcatgcatcttgcggattggtcttcgcttttattatatcgaagtgggtctaataaaaggcaaatctgatcatcatgctgtgatacatgcaaaaaactggggcaaatgaagagggtgagaatgagggagaaacccatgttgtgactactatttctatacagccaagttttccaccaacccaacaatgtctttactcagccaataacaacccatcttcttacccaccacctagttattcacataggccatccctatatcaaaccacaaaacccaccttccacacgaccaatactaaacaccacctttatcacaaaccaaaacaccaaccaagaaatgagttttgcagcgtataaaaaaaacctgtataattcacctcaatttcggtgacttatgctgacttgcttctatctcaactcgataatgcaatg

SEQ ID NO: 98608 - DNA, 394 bp, Glycine max
actggtgttccagctgttatacctcctgaacttcatgtcaaagaatatcctgacttcatggagaagcctgacaaacccacatacaaatcgcataacgtgataagaaagctctttagggaagtgaaagaaatatcaacaagtgccggctcaattacatccttcacaaagttggttgcgagagactcttacgaccatgaaatggaagtagatggcttcatggattatgttgatgatgctttctatcacaaaaccaattatgactacaagttgggaaatctgatggactactatgggatcaaaactgaagctgaaatcctcggtgggaatattatgaacatgtcaaaatctttcaacaaaaggagggatgcagaagcaatcaatatggctgtgatgt

SEQ ID NO: 98609 - DNA, 311 bp, Glycine max
  unsure (1)..(311): unsure at all n locations
agcttataagctgtatgatccatattgttttatatcaataatgagnagatatgtgatcattgatgtgaccaaatggtggaatccacatgaatttaagccagtgtggagatgagattaattaaggactatatgactgaacctgaatcaataagagttgttcaatctggaagatcttaaaaatataggcaacaacattaaaggttgaatgattgggagatgtttcctaacaatcttgtgatagaaaatagtgatttggtccacctaaccttgttcatagatgcagaaactgtgacccttgatgaggaaaatta

SEQ ID NO: 98610 - DNA, 342 bp, Glycine max
  unsure (1)..(342): unsure at all n locations
agccttgcttgaagctncaatggataatgttgaagataaaagctacgtgagagagggagagaaaaggcttctgaatttctgctttggctgagtgaggagagagaaaagctttttggttttaaataaaaaggggtttccctttatccattatattattcaagctctgccacatgtccctatttgattggagcaaaaagggcccactttctctctttgactgtgacccatactcagtcaccaaagagagaaaaatctgacctttgaaacgctacaattctgcctcgcgttgcgtgccgtttctctgactccagactctcgcgtttctctgcgttcgtcggggcc

SEQ ID NO: 98611 - DNA, 315 bp, Glycine max
agcttgcttcaaccctgaaagtgccaacattattctggttgcttttggatccccactctcgtagtattctaaaacctttggtcggtaaacaagcttataatctttggtctgcatgtgcaaactaacacatgaaaatagaggaaggacaacgattacaaggagaaattatttgtagcataattattaattaacaccattattttataatggcgttaattaataattgtgctaaatatttaatttattaattatgctgacatgtccccctatctaaagtaggatagaataaacccactagggtcagcctaatggggg

SEQ ID NO: 98612 - DNA, 412 bp, Glycine max
  unsure (1)..(412): unsure at all n locations
agcttgagaatgatcttttttntaacacatcgttggttagcatttagttaatctcaattgtattttcacaagacaaagtttagagacattataagaaaaaagtctttgtttacgatgatcaagttagttatatcagggagagagtctttatgatttcttcaagaattgacaaccaaatttgtgagtgcaatgacttccctaaaggtatggtggagaagaatcgcatcaacaaatactattagaaaatacactttcaacatcggttatttagaacattctacattggttttaaaaccgatgttgaaagtgttgatgttgaatgtatcaatgttaacatcagttctctaaatacccgatgttgaatacaatgaacaacagcaaaaatagtgtacacataatgaacgttgacatc

SEQ ID NO: 98613 - DNA, 434 bp, Glycine max
  unsure (1)..(434): unsure at all n locations
agcttctntgagaaaatttccttgggaagctagagcttatctacacacacccctctcataactaagctcacctccttgagaagcctccttgagaagattcctaaagaagctagagcttatctatacacacctttctaatagctaagctcacctccttgagataagaagctagagcttagctacacaccccctataatagctaggctcaccccatgacaaaatacatgaaaatacaaaaaagtcccttgatgtgtcattattttctcctatttcttaacctttttgtcaccaatttaattaccgattaactctaattgtcaaatttattattcagttttatcaattgggtccacttgacataattggtggtnttaattcaatntcaggataattataagcaattggcctgagccaaattggacttgaagagagca

SEQ ID NO: 98614 - DNA, 455 bp, Glycine max
  unsure (1)..(455): unsure at all n locations
agcttaatcccttgaaatggagggtaggatatttaccctatattcagctaaggactactttccttagcacccttatgttcaatatgttggataaataaaaatagtgttttttttttgcaatatgcatgagagntttaatgctagttgtcacacaaatgtattacacaaaagtacctatcacataaagagtggctatgcaatttagaatgcatcaagaagttttagattgtgtggctacattctttggaaccaaaggcattgcatggaaaaattactacatacccatatctaatgagaatttctattttcctgcttggcttttatgagggagatgtcaccacacgttatgcaagatggtggaagcagccaatactgtatcatcatcgtgaatttgcaaagaatatttctcggtgaaagagcagtctatgcaatgatgctggtgtttccacctgaat

SEQ ID NO: 98615 - DNA, 397 bp, Glycine max
  unsure (1)..(397): unsure at all n locations
agcttgagatgaggaagtgttgaagggtgatacttcctgctnttattggtgaccacagagtggtacctggagatatgtcgcgggggtcaagagaccttgtggacgtcaagtggggtgctattgcccaaaaccaagcttgaccaatcccgacccaacccgggcatagtcggtcagtgagaacctgtgatgtacctaaacaggcgagctcctagcagtcaacagataaaaggaacaaataccacaaagcaaggaggcttgtggtggctggccagctgtgaattttgtgtgatatgtggattatggcctctggtaatcgattaccaagggtgggtaatcgattacaaggcttaaaaatgaagacaggaggctaagatggtctctggttatcgattaccac

SEQ ID NO: 98616 - DNA, 441 bp, Glycine max
  unsure (1)..(441): unsure at all n locations
agctngccacttactggtagaaatgaaacataaggcatactgggctttgaaattcttgaattttgatgaggctctatcaggggaaaagaggaagtcgcaactcttggagctggaagagatgagattgaatgcttatgagtcttcaagactgtacaaagaaaaagtgaaggcttatcacaacaagaagctactaaagaaggactttaggccaggccaacaagttctgctatttaactcaagattaaagttgtttccaggtaagttaaagtctaaatggtatggaccattcaccatcaaggaagtcaagcgatatggagcagtggaattatttgaccctcaatcagaaacttcgaatagaacatggatagtaaatggtcagagattgaagctataccatgatgggaacattgagagactgaccaccattctacaattacaaga

SEQ ID NO: 98617 - DNA, 447 bp, Glycine max
  unsure (1)..(447): unsure at all n locations
agctngacccattactctactcgaatcatctgtttgtttcactatcccatttgactccatttctgctactcctctaagggtcatgatgttgcttcccaagaatccatctggttaggctgagatgaaaccaggatcagaaggaacaacaacacatgcaagagctggaggagcatgttgaggttgggcatgagaccagatgtggaaaatcaaggactttgaatgattacaacttacaagggcctgagccttgaggcttcaaaatattaattgctatgaataaaatagatttgttgtgagtaaaaaaggtggcatataataaataaataaaaggtcacattttgctcatgtattttaaagagtttggagacaaatgtgtttcgatgggtggctatgttggaacaggaacgataccagcaaagacatgaaccagctgtgggcggtcccatg

SEQ ID NO: 98618 - DNA, 436 bp, Glycine max
  unsure (1)..(436): unsure at all n locations
agcttatgatgttntccattattgtcacctccagtactcatcttttctatttccatgctgattgcgacctgttttttcgttcacaagggagacatacgggatgaaactgatgaatatgtttacgttcaaaagaagtgagtaaatttacattgaattttaattaatactgcgtttatgttttcccccaaataaattgataacaattgacaaattccatgcatcatttttcttatttttagcattagaattaacctgtaaagtttctctgtttgagatattgtcaactatgatacttatctttgaggaaaaccaattccagttagataattatatgcttattatcatattgtaacccaagttccattctattggctttcttactaatnttgtatgggagaaaaaagaacatatctatttagatgaatatgcattttat

SEQ ID NO: 98619 - DNA, 410 bp, Glycine max
  unsure (1)..(410): unsure at all n locations
tgcaagctgattcanatataattgcgacttgcgtagtatgtacgttttttatgttcatattatcctacttttgtgttattcgttattttaatttgtaattttatttacttatttgaattacaggcgtgatcagagaagatccatcaataaaaatttctttgattcaagaaaggataaatagtgaattttcctataaggtttcatacagaaaagcatggatggccaaacaaaaagcgattgcaattgaatatggcgattgggaagagtcgtatgcgaaactctcatcatggctaacacacatgcaaaatcattctcctggctcttactttcaaatactacatgacgatnttattgttggtaatagggtgagtcgcgaacatcgtcaatttcatagagtattttggacattt

SEQ ID NO: 98620 - DNA, 438 bp, Glycine max
  unsure (1)..(438): unsure at all n locations
tgcaagcttgaatctctcccatgtctcacagatatgttcatcaaatccttgggaaaatgtcgcgatggcaaatnttgcactgataaatcttgaaggaggaaagaaccttgctatgaatntgtcctccacctcttcccaagtgttgaggcttttatttggatgtgattagagccatctttttgccttatttgctaatgaaaatggaaaagctctgaggtagacaacttcagcatcctcgtcagaggctcccatagtactgcatagttccatgaaggtagacaaatgtgtgtatggatcatcatgatccatttccagcaaaagggatgttagccaattaaactaagcagtgttggctataattccaagaccttattgctgaaaggagaaatgactatgctattgtaatggttggcgccttgttgataagcatagtcacct

SEQ ID NO: 98621 - DNA, 374 bp, Glycine max
agcttatccagtctcccattaatatggccttcataaaaaaatattgcatgtcaaggcaggcaaagcagtaaggtcaggcacaacagtagcaagaggaggaccagtagcaaccagctgcagatgcaccgccgccacctctacagtagccaccatctctagagtccatctctgctcacctgcgaaggatagagctccagatgcacggacatatgcagcatgtgaccgaccagcaagcggctaatcataggggtcagatgcagctaaatgaaagcttttaccaatacaccctacattagcagcgccaagaccccagtccttacccatggcctactcccaagcaagtcggggccatggtcgcatgggctgtatacaaa

SEQ ID NO: 98622 - DNA, 443 bp, Glycine max
  unsure (1)..(443): unsure at all n locations
agcttcaacattacccgcacagatttattttgaatcctgatcagnggttgggtagatattgcatgatagggttgtaacctcatttggcttcattattaaaaattgctcctgaaccatgtttactagcaaacatgaaaaaacataatacaatacctatgaaagtatagaacaaaaaggggcaaaaaacaaacctctagcatatgttttagcataatacctccatcacggtgatatccttggagcaattaaactacaagacaacacaatatagcaaagctcaaactacagcttgttggaccctaaggaaaattactgcactgcaagcctcaaatatatttgaacctaattttgttaccataataataaaactaaagcctcacgagtagcatgcctctggttaattcctattcatgtcatgccagtcattcactaactagagatat

SEQ ID NO: 98623 - DNA, 397 bp, Glycine max
agcttgtgcattcaatatcctgatgaaggtgttccatatgttctcaggactggactaatacatttgctgcccaagtttcatggtcttgcaggtgaagatcctcttaagcatcttaacgagttccatattgtatgttccaccatgaaacccccagatgtccaagaggatcacaatattctgaaggcttttcctcattctttaaagggaatggcaaaggactggctatattaccttgctccaatgtccatcacgagctgggatgacctccagagagtattcttagaataaaatttccctgcttccaggaccacaaccatcataaaagatatttcatgaattacgcaactcagtggagagagcttatttgaatactgcgagagatttagaaactatgtgc

SEQ ID NO: 98624 - DNA, 283 bp, Glycine max
  unsure (1)..(283): unsure at all n locations
agctngcaagaaggacccgagagattccatacacaaaataaaggaaagattccaagaattccttacacaacccaccagagggtacacttgttttagactccaaagaagccttaatacttggttacccacgtgtcataaaaaaaatcccaccaatctgcttaaagacaacccgcactccccacttatgaagctaacaagctttaacaactaccaaaaccaagtgtatgccattccccttaaagtgtggctgtcatgcatactttcccacaaacaccctttacac

SEQ ID NO: 98625 - DNA, 429 bp, Glycine max
  unsure (1)..(429): unsure at all n locations
agtctgtaacatgagaaaaacaaatgcatatttaattttatgttgtcattcaatcataaatcattaattcatcatgtatgataaatctgttgacttntataataataatttgattaacttataattttaaatatatgattttgatcctcttatttctaaattgacacatttaatatctctatttatcataatcaattttgattttttcatcaattgaccatttaaagtcaaatattgattttaagttaccatattggtatgagtgaccttattctttttatctttctttgtaatatttcgcattttttctataactaaattatattaaacatttccttatttgtataacggtgctaaggtctattttattattggaatgtgcaactactgcgggtttatttttctagtgttccttatcttcctctaaac

SEQ ID NO: 98626 - DNA, 442 bp, Glycine max
  unsure (1)..(442): unsure at all n locations
tgcaagcttgactntgagtcatcaagagattatttattgtgaccatgacatgagtttcaatcaattatctctttcaatctctttcaactctttctacagaatttctgattcatttctcttcatctctctaaaagtttttgctcaacactttctcttccaagaaaagttctttgataaaaaacttgtgttattcaactttttcattctcttttccctttgccaaaaagaattcaacaaggactaatcgcctgaattcttttgtgtctctcttctcccttttgtagaagcaagcttcatgatgttgaatccagattgattcaagttgttttgatgataacaaagatgatgacaaaaatcccaagagattgatttctagattgagtcaagaacaattcaagaatcaaagagaaatttgatttcaagattcaaggaaagatgaatt

SEQ ID NO: 98627 - DNA, 363 bp, Glycine max
ggctgcagcttctacattgaagattgagacactcatgagagatcaagccaaagtctccatcactacccatccattcccaacctgtgataaatgtgaggttgtgcatgggtaaagagaatgcactattgatgacaagttaggtacaaccatggatgatatcaactttgttggggcagaaaataattcttacaatcaatatcccaacaatttaatcaaggacaaggcttcacgaaagtcaagggatgtataagccttcaaccatgcaaaattcaaggcctttacaagagaaaagaaaacctactcttcaagagaccatgcttcaatatatggcccaaaatgatcagagaatgaagctggtggagt

SEQ ID NO: 98628 - DNA, 178 bp, Glycine max
cttaaaaaaagtagttaatgtttaaccacactttagcacttggagtacggaatttctggggggaggaacgaaaatgtttcttatataggagacaggcattcaagggctggggagtggaaggaagagacggcaagaaccaagactggacttcaaaggcctggaccggggggacaaagga

SEQ ID NO: 98629 - DNA, 379 bp, Glycine max
  unsure (1)..(379): unsure at all n locations
agcttgacatangacacaaagctttttgttttcatattgacgaggcgtggaaacatactgggttggctgtttttataacccttcgcgatgttgtaaggccatctatcgataatccctctcgaggcatggaagacttctcgtctcgggatttgacaatcagcaaaacgtggtatggaaaggccaacctttggcctcaaatatgacaggtttattgatatccaccctatccttcccagagacgaaagatctattatatctttcatgaagcacattccaggggattctttcattgatgttggtacacctgaatgtttccattgctgcataaatgggtaggtaggtggactgaaacgcgactgacatgaaaaaccttttgaaa

SEQ ID NO: 98630 - DNA, 415 bp, Glycine max
  unsure (1)..(415): unsure at all n locations
gcttgagaattgtatgccaatgctttgtttctttcttacatgcttttaaataagtcttgtttccttctaagtagtaacggcaaatcattactatcattaagtcgaaaggacttacaacttgtttgttaaaacataaaaaaaaaataatgtaaagatatttaataattaaataatattcgaagataaatgtttaatttcgattctattaattattcaattagtattataattatagtattatctatttaactattaaaataatcattatatattttaaattattataaaanaataatcacataattatataattaataatttcatatattatatataataataaaatcattgataaatgtataattatattattagtaattacgtacatgcataagccaggcaaggagtgatatat

SEQ ID NO: 98631 - DNA, 450 bp, Glycine max
agcttctcccctattttgctataaatagggggagaagtgaagaaaagggttcagccccttaggcacttctctctctctcgaaatagctgaggaaaattagttccgtgaagaaaatccaagccgaggcgcttccgtaacgtttccgtgagtaattacgcgaagattctcgaccgttcttcaagattcatcgttcgttcttcgttttcttcagtcttcaacgggtaagtacctcaaaccaagcttttcaattcattctatgtacccgtggtggtccacattttggttcatgtatttttgttctcgttttcattcactttttatacctccttttgacgtgcttaagccatttatttaagtcatttctcgcttaatctaaaaataaaataaatttccaccgatcgtttgaattgcatcatccgtttaatttggttaaaatgaattccgaccgtt

SEQ ID NO: 98632 - DNA, 398 bp, Glycine max
agcttcttatccaagacactctcttggtggtgaagcttcttcttccatggcttattccctagtggatggcgcctcctctcacctttctcctttatcttccgctgcaactccatggctgaaaatcaacattaaaggacctcattgaagctcaaagatccagtctccatagaagcttctcaagcaagcttccatcatatggtatgaatgtctttgatttaccaaaatggaagagacaaaacatcacagaggtttaccacaactggaagaatctagtatgtgatgcactttggcgtatttttcaagcagtatcgcatgtgaatgataagtacttttattatatgcaagattagttacaaatattatttcatcaataaaactaattgaatgacaattactac

SEQ ID NO: 98633 - DNA, 448 bp, Glycine max
ttaagtcacctgcagcatgcagctttgatcattcccaccggcgccccattatcttagacttatattttaatattaacgccttgatatttaaccttgcatttatgctataataatacactatttgaaccatttactatttccctttttgcatggtaaggttggaccaattattaagtatgtcttttacactttgtggagtttataaattatctatgcatggttgtttgcttcatggtttatgggacttgcttcttgctcatgaattggctgagattattattaacattgttttgatgttaaaataaattatttgatgcgcaccttgcgtttctgtgatgccaaaggggagagaaccggattaaaaccaaaatttccctgacttattaatctatattacgataagcctacattctaagaccaaaggtggaccctttattagaatagactc

SEQ ID NO: 98634 - DNA, 428 bp, Glycine max
gatgtcagactttgttttgctatgtaaacacaacttagatcaactacaaaggctaactagttatgtgctaaaaaaacaaactcttctcaaccttgcattttgtaatggaataaaacaaattaaaatctgcaatggtaaagaaaaagttaccttcaatactataatataagaaaggaggtcatcatggtaattgtggtaaagtaatggtgtctctactcttatttcttagcataggaagccattccattcatgagaccatttgtgtatttcgagtaataatcttcaattcagaaaaacaatcaacttaacatttttctgacttacttcccaaattaatatcattgtttcgccatatgaagccatgctattccatgaaatatgaaaacttttctaccttggttgggttaaaaagcatgttttcctatatg

SEQ ID NO: 98635 - DNA, 352 bp, Glycine max
  unsure (1)..(352): unsure at all n locations
agnctgtgctgatctcacatggatagaacattcttacaaaacaccgcgaccccgactggtttccccatgattttacctaataagagtgacctgacttgctagagtatggattgtcttattatgtactcctaagcgcccgacgaggtttttcactgacatagtaccacattgcatataagatagagtcttaatgtagatgttgcctaatgcttgcgtattgatccatttagattgacattggtgatattgtgttttgatccttgaggactagaaagtgttgaacaagaatgaaatgtgctgagttgtgttgtatgttaggcacaacaatggtgaaatgatgctagctatattt

SEQ ID NO: 98636 - DNA, 400 bp, Glycine max
agcttgccacccagctcgcccaggcgagatatgttgcttcctccaaaaggcaccaccttctggaggaacttcctggaaggcccaagtgggcctggttgctatttgcaccccctatttactaaatacacccctgcctttcttttgttgattctttttccgtaacattacggaactttacgaatttcgtaacgaaacttgttttcctttcgtgattttatggaaccttacggattacgtaatcatcccttttttggcttttggaatattatgaaaccttacggattgtgtaaaaatgcttccttttgatttccggcatgttaccgaacttcacgaatcgtgcaacaatgctctcttttgacttcttgcacgttagggaacttcacatattgtgcaacaatgg

SEQ ID NO: 98637 - DNA, 438 bp, Glycine max
  unsure (1)..(438): unsure at all n locations
agcttgtccttggtttaaacatgatttatacatgatttangacttgtaggattcaatttgggaaacattggatgagggcaagtgtggtttccaaaatctgcaatttatgcacaattttgctgtcaaatatgtgcagcagaattttggctttgtgcagaaaatgttgagtatttgctggttgtggaaagagtattacagatggggttctggaaattctctagttgatcccaatggtcaaatagtagacttatgcactagggacttccagtaaatcttcgagtcgatccaacggtgaacaaattggaacgaaggaaatgttactggggtctttacatgagaaaagatgtgatattggtttgtgttgggctgagtttttgcctctgccttgttttctctgtttgatagtcatgaagccgcgatgtgaattgcttggatgtg

SEQ ID NO: 98638 - DNA, 446 bp, Glycine max
  unsure (1)..(446): unsure at all n locations
ttaagtcacctgcacgcatgcaagctaatcncactatgctaataaaagttcaatgctacctaaaagactaaaactaataatgttagatgcaatttcttatcgataaaccaaaacgcgatagttattcactttctctgtggttgactattcctagccgtaactgggtaaagcatgcttntttttttgtcatcagctagaggctaaagttgctcttcaattcattgaatagattaatttcactcgagatgcttaattacaccgatcaaggaaattttgcacatgataaagatcaaattctccgctaaaaagattatttccacttgatagacgcaacaaatacttacactagtgcccttacacggttgagtaaaacatgatttaattaattacttaattcatttacttttgcaaatgtactgttactatcgacatggagggaatactct

SEQ ID NO: 98639 - DNA, 441 bp, Glycine max
  unsure (1)..(441): unsure at all n locations
gcttctccccaatnttctataaatagggggagatgtgaagtgaaaaagggttcagccccttaggcacttctctctctttcgaatttgcttggaaaaattgtttccgtgaagaaaatccaagccgaggcacttccgaaacatttccgtgaggaatttcgcgaaagtttcgaccgttcttcgacgttcttccttcgttcttcatcgntcttcgatcttcaacgggtaagtacctcgaaccaagcttttcgattcattctatgtacccgtggtggtccacattgtgtttcgtgtatttttattcttcgttcatttngcttttatacccccttttgacgtgcttaagccattttatttaagtcatttctcgcttaacctaaaaataaaataaatttccaccgatcgattgaattgtattatccgttaacttcggttaaaatgaat

SEQ ID NO: 98640 - DNA, 396 bp, Glycine max
  unsure (1)..(396): unsure at all n locations
ctcgacccggatcttaagcacctgcggctgcagcttgcatanaaggagatacataactgtccttgagcgatctaccgagaccgtgttctaaatggtcactaaatccaaccaagatggtgaatatttttcctgaaagcaccctacctctcacaaagagacagtcaacctctatgtgtttaggccgtccttggaagagcgaatttgaatcagtgagaatagcgtattgttagacccatattagacccggatcttgagtggcttccaaactaagctgctggagaagagtccccagccatgtgatctcacatccagctgctggcctagccgggtaatatcttcaccacttgatctaacaactgtcttttgccttttgctgctaccacggagcaagttact

SEQ ID NO: 98641 - DNA, 448 bp, Glycine max
  unsure (1)..(448): unsure at all n locations
agctngcctantaacctgaaattgagagataatgattattaaacacacataatggaagtactaagtatttattacctatacttaataaaaaatacttataaaactacaaaataaccataaattggaagggtttgatacaatttatacaagttttatacacaaaggttagtcatattcaccgactaacaactcccccaaatataaagttttgcttgtcctcaagcaaaaagagaacaactcacttgtcctcaagtgacaataacatgtagtgactatgtacaaaggtgtatgcaacataagttattgattgcatgataagagaaatggagtaaatgccctcatcacttgtctttcacaaggtaagcagttatttaaagagaagaataaaatgtaacctgaataattagatggagctaatcataagacatatattaatgaaagtagctta

SEQ ID NO: 98642 - DNA, 416 bp, Glycine max
  unsure (1)..(416): unsure at all n locations
agcttgataaagaaatatngataaaagactttgagaccaaactattacaataaaaaatgagattcttttaacaatttaactaagttcttatttgtgattttcttgatcttgtttggtgacttgaaacaatgtgtgctttcatcaagtaaattcttttggcatcatgaaaacctgcatgagtcacaccctggacaatacataagcaccctaagtgtagacaaaggatcaagcttaatgttttgatgatgccaaaggatcacatgtttctcaaagctttattcaagacaaagaaattaaagatattcaagatggatgatcaagacagtctctagagtcttaggaagggtatattaaataagaagggaattcctaattgaagtagaaaaagggttggccaagacatttaagttaaaaat

SEQ ID NO: 98643 - DNA, 457 bp, Glycine max
agcttaatgcttgattaattccaataattttattaataacatcaaattagctgaatgagcccaaataataaaactgcctaattaacttgacaattaagacaaatcagtaattaaaatggcgcaaaaagggttaagaaaatgggataaaataatgacacatcaaagttctacctctatttgcagttagtaaagtaaagaagattgctaacaactggtctgatttatcaaagaaggaatcatggatcgtaacgaggctcaattcagtgaaccggaatctccaattgcatcattgaaaacaataaccaacgaattgaagctgatgaccactgagttgtagaaatcgtctaataaacaaacggaggtgattgcgaagttgtcgaaacagtatgatgacattgaagaattgcttaagacaatgaagatgctcatgaaagcacgacaacttagccctgtacta

SEQ ID NO: 98644 - DNA, 448 bp, Glycine max
  unsure (1)..(448): unsure at all n locations
agctnttaccatagagattttactctctgtttatcaattaccagtccactgtaatcgattaccactggcacgttttgttttcaaaaagctttcaactgaatttgcaacgtttcaatccatttcaaaatggtgtgatcgattacaatatattggtaatcgattaccagtgtgtttgaacattgaaattcaaattcaaatgtggagagtcacatcttttcacaaaaatgttgtgtaatcgattacaatgatttggtaatccattactagtgataagttttgaataaaaatcaaaagatgtaactattccaatggttttcaagtctttctaaaagttatcactcttctaatggtattcttgaccacacatgaagagtctatagaagtaagatcttaactcgccttttacatacatagtatacattgatttcaatcccttacaacccttgag

SEQ ID NO: 98645 - DNA, 435 bp, Glycine max
  unsure (1)..(435): unsure at all n locations
tgcaagcttaatatnggatcattattatgttttactgatagtatacacttgacatgaacagaatgtcattgaaatgctcaaaattgtatcttgctcaatttcgatatacttcacttgatcttttggcgagtggagatggtaaaaagaaagctaccattgttggtgatgtatatattcatccatctgccaaagttcatccatctgcaaaggtagttccgtagctttcacacgaatgttaatacttttttaaacaaaagttaaattggcactagtatcttgatgcattatctgctgtaaactactaaagcctcaacggtaattacctgctgaagtgctgaagacatagatagcatacattttctctanaaggaaaaaacttgactagaattatacaatattctcaatactttttttatgggtgcattgttccgtata

SEQ ID NO: 98646 - DNA, 441 bp, Glycine max
  unsure (1)..(441): unsure at all n locations
catgcagcgttataatactaccataaatttggttaatcattcgcctatncttagaatgtcggaatgaaactatgttctggtctctcagaccgaatttacttcatgaatccggacagagacaaactttttcagtaatagagggataaaaaaaaacattcctcattgtaatcttttctactacacataaaataaattcattctctggcgctggtgtgtatgtatggagattaagatacatctgagaagaaattaaatgtacttgtaagcatataccgtccagtttcaatctagaaaaaacttcgaattctttcaacacgaaagagatagagagggagagaaacacatttaagtagtctctgattgaaagtatgtttttacccaactcttagtcgttattatctttataaaaatattgttaacgttaatatcatcccatattat

SEQ ID NO: 98647 - DNA, 353 bp, Glycine max
ccatctctgtctgaacctataacgctacttgcatcctcccaatcaaacacaacccctgtatcaaagcctcataactcttttccattggaatcaaagcaaagttagcgactgcacacctcacagactgcacagatatccgaaccctacccttatcacaaagcaacctaatcattacgtcgagggtcgatgcatcaggccttaaatcactcctagccatatccttataaacaagaacagccgagtcaacattcccaatattacaataccccttcacaagatgctcataagttgaagcatgggtgccaacaccaaccacagccatttccctgagaaatttctcagcccttccaaca

SEQ ID NO: 98648 - DNA, 379 bp, Glycine max
tgaggtgacatactttaaggagctagagctactaggttaatgaacatgttatcttgtggacttgataatggatctcggaaccactcaagttaactttctccttgcttctttaatattacatgccacgtttctctctctcattctcttccttcattgaagcttcctgtaacaacccgcctcgtcgctacgatatcaccatcctataccgcgataaattcaatttttttaaaagaaactccccttaatttttgttgcctatgaaaataaagataatttttgtctggacattcattcaccaaactatacacatttacttaggtgaatatacatacatacatacatacatatatatatatatatatatatatatatatatata

SEQ ID NO: 98649 - DNA, 438 bp, Glycine max
  unsure (1)..(438): unsure at all n locations
tcctcgatccctctcgatggactaggcttaatttagactgctctcgtatgttaagactaactaaaactgagcttcgtgctcagatccctcttgctggactaggctcagctaaaatagcttgcggaagnttagactaatttaacctaagctttgtccttagatccctcttattggactagactcagaccanacaacattattataacagtatatttaaaaccaaaacttattccgtagatcccttattttagactaagtttcaatcctacttccatcaagttctaaggcagcagtacaagagcatgcaatctttaagcattgaaagaagcattgaacacagaaaacacaatcaattagatataaagtaattacattagttgttccttagaaatccccaataagggtatttagccagccattacagaaaaaccctaacaa

SEQ ID NO: 98650 - DNA, 345 bp, Glycine max
  unsure (1)..(345): unsure at all n locations
aagcaccgcngctgcagcttataanttctggttcaaactgtaactggctatctctttcatctcttctcctttgccaaaaaatattcccaaggacctaccccctggattctttttgtgtctctcttcttccttttccctacagaacaaaagactacccgcctgaatttttttggtctccttcttcctgtcaaaaaattataatacatagtctgagaattcttttgattcttccctttcccttatacaacagtggtcaaaggactaaccgcctgagaattcttttgtatccccattcacaaagtatcaaaggtttaacagcctgagatctttgtgctaacacattgg

SEQ ID NO: 98651 - DNA, 435 bp, Glycine max
tcttctccatcacccacaaccaccagtagcctccacaaaccgttattgttcttcgttgaaaccccacaccgagaagaacccttcaagcgaagcggaatcttccaaacttgcctcgcggtttcggttgagaacgaagcccgatctgaccttcatggttttccttgaggtaaccatggttctacgcttgattctttttagattcatcttacctttgcatcatttctgagtttggaaatcttcattgcatgttttacacttcctctgaaaaaccctagagcaaagagactttgtaaacgttatcttttcatgatatgggtgttattttcgtgaccttcactgaaccccggtcacattggcgtgattgtaatttcaaaatgatgtccctttgtaaaacccgaaatgctctcagcacttttatgtagtgacccacagcat

SEQ ID NO: 98652 - DNA, 298 bp, Glycine max
  unsure (1)..(298): unsure at all n locations
gcatataaactcgcttcaactcaaagggagaccatgacagcctaacagacattctgtgcttcgaaaggatgaaatggagatgcttaaggtcctctcttangcaatcatgaaacacagctcccaactcaaaagtggaggacacatgaacagccctaagcaataacattcatgtggctccggaaaaggacgagaatggaggaatgccttgagggtcctctcttangcaatcatggaacacaacttcaaactcaaaagtggaggatacatgaacaaccctaagcaataacattcatgttgc

SEQ ID NO: 98653 - DNA, 439 bp, Glycine max
tcatccgcagatccctcatgtaaaactaggcttaaactaaacatcactattgtaacaacataatcaaaaccaaaacttaacccacagatccctcatgtaaggctaagtttcaatcctacttcaatcaagttcgaaggcaacagtacatttttgaatgccaaagtcacctaacaatgcacacaaatgggtgatcaaaccaaaagcatacaaacattaagcattgaaggaagcattgaacacaaaaaacataatcaattagatattaggtatttacatcaactattcattagaaatccccaactagggtgtttagccagccattacaaagaaaccctaacaataaatgagattaaaagtagagaatgatagttccttacacaagaaggaggattcctcctcctcttctcagcatctcacactcactctctactcaataatc

SEQ ID NO: 98654 - DNA, 362 bp, Glycine max
  unsure (1)..(362): unsure at all n locations
agcttctctactaagtttctntctctcttactatngngtatggtcttgttcancgngtgttcaactgaaccttaacaccctttatatagagaagagttacataacaagacaaaaccccttcagtcaagaacagtaacattaccggtcctttactctgtcaccagggtgtcctttacagatacttctattacagataagctcaatgtctaatcttatgcaatagtaaagattcctgccccttttctttttttttataaaaaaacatttttctttgggcaggatacatntgtcatcaactcttgcttgcttttgtaatcgcaacatcttcttcatcttggatatttccacaacagaaaatgtca

SEQ ID NO: 98655 - DNA, 431 bp, Glycine max
  unsure (1)..(431): unsure at all n locations
ggagtacaaacctgagaccaactcattntatttcagattggaagttatatctagtcaaggtctgagagaccatacaagtttcctaacgatatctaattatgtgggccattaaggctatcatatgctgacaataaccgagaagcccatgaatctcttctggggcggagtaggtgtctgccatcgccttggccttggctaacaatcggggaaggtctttgactccgttcaaggtaagagcaaatcggtccgtccacattgttgcctcttagtgccatgaatcaattaccctctcccttgcttcgctttctgctgatatcttggcgtactcatcctctaacctttgctcatgagtcgccgctagatttagcttctctttgcactcatcgatgacggcccacatattcccttcagtctcgcttaactgttgggac

SEQ ID NO: 98656 - DNA, 418 bp, Glycine max
  unsure (1)..(418): unsure at all n locations
ttttttttgtgagaaaaaatactaaagagtaattactttatcaatgcacttgtgtgtncatgtgatttgatccgtgctcaaattatcggcatatatcatagttaacttgctaggcttgtaccattgttcaccatgaacctctccctcggattaatgtttggtgtctacgaacggctttgggtggtattaagaattgatgaggtgctctttcttcttgcttacgtgaaaattcttatttttagcagaagatgagtagctcaatagtgcttcgtgcaagaatcaatcatagacctctttatactattaatgagtcagatgatgatgcagatattntgcctccgtaaaaacggaaaccttatgaaaatattgatagaagtgagattgcaagtttctatcctttttgtgtaacaaatttaat

SEQ ID NO: 98657 - DNA, 383 bp, Glycine max
  unsure (1)..(383): unsure at all n locations
tcatgtgtgaaatgaaagaatataacggaataaaaggattganaaggatattactcatgggtcattttcgccaacgagaagaagcacatgatgtntgttgtacttttattctttctttttcgaaccaaaagcatgacacagtgcactgcctccagctatgagacaacaatcatatcacaggctagcactaatctcataacagatacttttcataagtctataaaaggtaattcgatatcttatattcaataatggaacattctaagagaaaacgagcaaaagcatgtgaagcgaaatttgtcaagtcattgaatgatacattctgcacttaattagttcatcctttgcccaacaaagntattctttgtattcgagtttaattg

SEQ ID NO: 98658 - DNA, 404 bp, Glycine max
  unsure (1)..(404): unsure at all n locations
ggaagtcanaacctctgcacttgaataattgggccttgttttgtggtattagttaaaatagatgggcctaatcagggccatacatcacttctaaattatcactctatatattagtgttttttagttagntagctacttcatattgtaaaatacacaaatagttacttattgtgcaagactccctttttctctccttttctctcaattgagcttcattcttcttcatctcttcacttccgctcttccattttcttgcacaacatatcatgtcttttcattggtgatgatcatggagggctaaacaattaatcaatccaaggatccactccaagcaaggctgaattntgagttctggtntagtatctttactctttgagaatggtcatctttctcttcaatcctat

SEQ ID NO: 98659 - DNA, 437 bp, Glycine max
  unsure (1)..(437): unsure at all n locations
tctattgacagccactcatgacacatgtcctcatgcttcccttctttgtgagttattgtngcaatgacatgtcggcatggcatccctacatcaaagttgtaaaatcagcacacatgtaggttaggaatgaaaaaaaaactataaagaacacaacctgttagttgccatactccacaagtgcatgtccattcacctaaattgacctcaaccttattcccccacatgtggacctcatatctcaagcccatgttatcaccacatcaaatgggagtccattgattagcaaaatgaaattatttttctagtcttttatactacactggacataatggtccaggctttccagaaagtttaaccttgcgggcagccatggttctcatgatataacttctaatttcttcaagcattgtgataataggcttgcatctatactgcag

SEQ ID NO: 98660 - DNA, 373 bp, Glycine max
catcgaagtatatgcatgtcaaggaacaaaagtgaggcattccctttttatcactgaaccactggcctaagcaaagaccccgacatacaacatgtgctgcctcagtaaagactctttgggccaaaacctcaatccttcgaccactaacacttatccagggtacggatttgtacccttatccttaaataatgacatagaggatctaacaaaacgacaggaagaaaagctccattacctgtaaataataagtgcctcaaagaaaagaaaagaaaagaaaactcccatcaagatcaataaagccacaaaaattacacatagctttggccacaaaagctgctaagtctgaatctcacaactaaaaatccaacataga

SEQ ID NO: 98661 - DNA, 427 bp, Glycine max
tcctcgtggcttctttgagaagctctctcaagatgcttcttttataagctacatccttatctatccacccctctattaactaaattaacttccttaaaaataattatggatgaaaataacgcaacaaataatcaaacatcaaacataattactaataatatatagatatatatatcagggtgttacacatacaatgctcaatggaatgacccagggctcctccatgatatcacatgttgcgttcaagtcgtatcctcggaaaaatggaggttgaggaaacctaataggggttatggctaccattgaattatcgagtagatatgagagcaagtatagcatatgacaccggaatttggggtgaattctacacgttttttttttcgctgcaaaactcatttcttggttggtgtttaggattgtgctaaaa

SEQ ID NO: 98662 - DNA, 449 bp, Glycine max
  unsure (1)..(449): unsure at all n locations
agcttatcccatgcttcttnggccgtcgntgcgtnggatatcttctcaaatgtatcttcatccaccgattgataaatgagaaagagagctttcttgtctctctttcttgactccttcaacgtctcctttacaccttggcttagcgaggcttcatcttgctcctcgaagccattctctacgatatcccacacatcttgagctcctagtagcgccttcatcttgatactccaattatcataattgttctttgtgagcatcggcatttggaaaggaaaacctccattcgccatcttttgaggatcttgaagctctgataccaatttgttggaaataaggctttctatgtttaggaaaagtggttangaatattggagactttgaatagaaacttgataggaaggagaattctttatggaggagacaacatttgtattttgctcgatacacat

SEQ ID NO: 98663 - DNA, 431 bp, Glycine max
cgaatataatgaaacttgctaacttaacaaagctaagattctcttatttctcgcaagtttccttcatccattaaagttgatagcgctacacatggccgttactgtgaaaagagagatagtgggaactctaaacactttttgtagcatatcttcatagaactacaacttgccagtgtcgtcttgcgctcaaagttgacttttagtgtacaaatcaaatataacggtaacagcataagacaaaaggaattaagaatattaagacaagacaatttaaatcttcccttttgtgcgttgtggcacgagttgcttattgaacctatggacgctactttctgatgattgctttttgtacttaaggatagagtaattgtttcattgcctttgtactatgagcgaagtgtcaaagcacttttcttctgaagactggatgt

SEQ ID NO: 98664 - DNA, 451 bp, Glycine max
  unsure (1)..(451): unsure at all n locations
agctttcgattcattctatgtactccgagtgtgccacattgtgtttcgagcattattattctcgttttgtttactttttataccccctcttgacgtgcttaagccattttacttaaatcatttctcgcttaacttaaaaataaaataaatntccaccgaacgtttgaattgtattatccgttaacttcggttaaaatgaattccgaccggtcggtcgtgccgtaaccacgttggaaatcaaaaaagaggtaaaaaataatataataataaaaaaaaaaacatcttttagtaaaataaagcgaanaatcaatcggacgttttctctttgggatttctcattcttaatcgaattgattaataactaaagtgaaactaaggctaatatcaactcgcctagtcaagctcgtccatanaaataggctttngaaggttgtcatttcattttctcact

SEQ ID NO: 98665 - DNA, 362 bp, Glycine max
  unsure (1)..(362): unsure at all n locations
ttgcttgctgagacctacagatgaccctttactccaatcccatagtctgtctaaaagagagtgtgagaaatgtagggatatactcataccattggggcgagagataacaaccatcataatggaagtacaatatcaccatgaatttgtgagatttactaattatgaaaaattatatgaagttggattgcatgtttagatataggttgacatatgttatatcttcttggaagcatgagctccaatggagatcctataatgactagcaactggaatcgaaaaaggaaggaaggagatgggaaatataggtgcgagagaagtggtgaaggctanaggatgagaagttaaaagaagataagtttgga

SEQ ID NO: 98666 - DNA, 442 bp, Glycine max
  unsure (1)..(442): unsure at all n locations
agctngacattatgatgtgagtgaaggacatcgacaccgacagaaccttaataaggatggtataggtctcctgacattttacgagacacgcatgacagtgaaattcaaagaacacagaggtatctttgtcaaatcgactaacactcatcaacttcttcgaaaatgaaggaacatgtagtcacttgtggagtataaaggctatgccgacatctctatgagatataaatgatgaaaaatcattgttaaaaatacctagaccttcaccattgcctatgaatatctaatcatggccatcaaagagggtgaatctgttaatagtttgtgagtcttcaatcacatgaanactgtgtctagagtctanaatgacaggggtaccagcttgaccatgtccttgagagcgagaactagcgagcatgacacttggttgactatgactatgacc

SEQ ID NO: 98667 - DNA, 391 bp, Glycine max
aaactacaaagactctaactactgtgcccattgatgactatcaagcccaatacaattcacaagttgagccccgctcagtccagactccgtaagcccattcattgtattatacagccagcggattgccgcggtgctaatataaataggtgccttaatagtaatatactttttagaacatattgtgtattattaggttcgaatgcataacaatgatgaaattgagaatgaaatgtattaacttaacaatatattctatgctatgagtgaattgcagttattaaaaatatatattagataatttgttaataacattgatgatatctcaataaaagaagttatatactctgaatacaccactacaagcctttccagttgctcatgctgtattata

SEQ ID NO: 98668 - DNA, 424 bp, Glycine max
  unsure (1)..(424): unsure at all n locations
agtattatatatatatatatgaccctaatagcccaaaaagaaaaagccaattaaccacttattttttggaaccagggtgcttcaaaaccaagcttgaattggttgcattaatgcccaatgggaatcaaaagatatgcctaattccatgggagttactcgacattcaattttagagttggatctggcactactaatctgaataaatcagtgtatctaagcaatttcaattttcacaaacgaagccttcagttaggcaaattgtatctaagcaaatcagtggtgtgcctttgatggatcccaaaaaggtggatactggtccaccagacccaatcagtgtctttataagtctggatatattacatctattaaatccaacattntttcctaataaataacagtgccacaacattggtgaacctaacaa

SEQ ID NO: 98669 - DNA, 451 bp, Glycine max
ctcagcttctcaaagagttgtgtaattgattacaaatagtctgataatctattaatatgaagagtttaatgcactgaataagtttctaactttagaaacaatcttcctacctttacatgatgatgcatgatttacatatggaaagataaagactaagatgcaacaatcaatacaaatgtcatcaatgagttgggcatgtaaaaagacaaaacttctttaagcttcaaagcttaatcttcatgtagcttcctcaatctctaacacaaacttgtgtgcttaagtgtgttaggatatgcgcaagataatacaagttaaatagcttaagagagaagtagaaacactaaatattatactggttcagtcaatctgagcaacatctagttctatttcccaatcatatgaaggattctactaatgaaaactcactcctagaagatgatgaataacaacc

SEQ ID NO: 98670 - DNA, 398 bp, Glycine max
tgaactaataacctctcaaagatatctattttttctcttcactacttccttttgctgaagggaattaggacctgatggttgatgaagaatacccaccaaattcattaaaatgggccactcatttttggtagattcccctccattatcaaaccctaactatctttattggaggattaaaattgtgtgcttatcattttggaaaacttgaaaaccctacacacatcacttttgcgtttaaaaggtataaccaagtcattcttgtatagtcatccacaaatgtcacaaaccatcgcattccattatgtgtggaaagaggggcacgtccccacacattagttagaataatagagaaaggagcatcagctctattgttattataggaaaattaacacgatgac

SEQ ID NO: 98671 - DNA, 448 bp, Glycine max
  unsure (1)..(448): unsure at all n locations
ctaagcttcggcgtgttgcaagcacttcactgcctatgattnggaccaatggaaggttctcgatcngcttgtcttcgatgctcgtgtaagtgtgttttttaattttgataaacttggtgttgcttactctcaaacactgttttaggtttattgaacataattggcttaattacgaatgtagtgtaaaattattttaaatgatttaatttgatttctaaatttttaaatttgagagattttacttagatcttcaattttttaaaaataaattaatttagtttttaagtttttaaaagattcgattttatcttaaaaataaatcaatttaatttttaaaaaattcaatttgtttctttttgaattcttaaaatttgagaatcaactaaatttatttttaagaatttgagaattaattaaatattttataaattaaaactaaattaattta

SEQ ID NO: 98672 - DNA, 440 bp, Glycine max
  unsure (1)..(440): unsure at all n locations
gcttcccaacatccaaacanaacgacattcanaaccgtacaagctatcacagtctagcaaaacagagcataggcagaaaattctgccaaaacaccaaccaaatcacagcttttctcacttaaagaccccagtaacaattccttcgttccggttcattaaccgttggatcgactcgaaaattttactggaagtctctgatacttaagcctacatattgaccgttgggatctactagcaaacatccagaactcattctgcactaccctttccacagccaaccacacacaagcatttttctgcacaagccaaaattctgctgcacctattttgacagcagaattctgcataagtgcagatttcgaaaatcacactttctctcatccaatcttgcccaaatcaattcctacaagtcccaaatcatgtatcaatcatgtctaaac

SEQ ID NO: 98673 - DNA, 448 bp, Glycine max
  unsure (1)..(448): unsure at all n locations
ctcaagctntcttgagcaaacttccttgagaagctntcttgaganaactttcttgagaagcttctttaagaaaacttccttgagaagctagaacttagctacacacacccctctaataactaagctcacctccttgagaagattcctaaagaagctagagcttagctacacacacctttctaatagctaagctcacctccttgagatgagaagctagagcttagctacacaccccatataatagctaagctcacccccatgacaaaatacatgaaaatacaaaatagtccctactacaaagactactcaaaatgcctcaaaatacaagactaaaaccctatactactagaatggccaaaatacagggcccaaatgaagaaaaaacctattctaatatttacaaagataagcaggcttatacttaacccatgggctcaaaatctatcct

SEQ ID NO: 98674 - DNA, 439 bp, Glycine max
  unsure (1)..(439): unsure at all n locations
gcagcttctaaggaggttgtctcaagaaagcttctcaaggatactacctagnctataaatagaaacatgtgtaacacttgttgtaactttgatgaatgagagtcttgtgagacacaactcaaagttgaacttctcttcctttttcttccttcaattacgtgctcccccctctttcttgctcttcctttttcttttcctccattgaagcatcctcttcaagcttctattcaaagtcattttggtggtgaagctattcttcatggctattccttatggatggagcctctctccctcttctctttgcttctgtacatctcatgggggaaatcccattaaggacctattgagctaaagatcaccttctaaagcccccaagaagtttcatcagtggaatagagcagaagcttaaganggctcctaacctcataattttgcttac

SEQ ID NO: 98675 - DNA, 441 bp, Glycine max
  unsure (1)..(441): unsure at all n locations
actcaagctngtgagctggacatggtgaggacccgaagactaagaaccttgttgtgagtaactggtctttatttattttttttgactaaaatccaaaacggaccaaaaaatataacatatcaacacaaacagaactctgactttcctttgcttgattgcacatttcatctatgattactaactcaatggacctaccatgtataatacatggaagaaaatgtacactatttattcaagtttgttcacactgtacagtcacaaagacagagagatatgaaaggcatttcatatcatcctttgcaaatntgaaaactaatataatctcaatgtttcaacatcaagatgatatgtaaatgatttagactcatcttccatgtgatcagagagatatgaaaggcatttaaaaacaagttctatatgcaagtgtgaattgtcttctac

SEQ ID NO: 98676 - DNA, 448 bp, Glycine max
  unsure (1)..(448): unsure at all n locations
agctntcttggcctggcgccgtattctgctatgtgagttctctagttagtatttgcatttgtntgaattgtagacttanaatctaattcagagaacaaattatggtttgtttggattgtaggcttggaacctaattgagagaactatataatggaaattagtgttaaggtccacgaatgaatatgcattgtcttctgtcgaaataaacttctaactttaaggttaaattgcatatgtagggattagttntatggttatacctggtgcccattcaagagcaaggaaacaagtgagtgttatctttctttcgaatgccatgttatangtttttagtttcaagcagntccccttagtaaatattcttaacctaaattgatactataaacaagcttacacaattgaattggagcacaaagtcttgcgttttgaagaggaaaatgaaaagttg

SEQ ID NO: 98677 - DNA, 429 bp, Glycine max
  unsure (1)..(429): unsure at all n locations
tgaagctcaagggaaaagttgaagaagttntagattaagttttggcttttacatgctcaactcctttgagtggcatttgtattggttgttaacttgattgttacatcttagtacatttgatatttgtgttgcattgtgcatcatcatagtgtgagtgaagaaaattttctaagttagaaaaatttcttcagaggcaaaaactctttgttttaattgattacagagttgtcataatcgattgcaacaagttgtctgaagcttagagttaagtctcatatcagtttaattgactacggtagtattttaatcgattacattgttgtttgagacaatgactgatttttcaagagtctctgctttaatcgattaccagatggattaatcgattatttctctctcgttctagtttttcaaaggtgaacaagaaca

SEQ ID NO: 98678 - DNA, 492 bp, Glycine max
  unsure (1)..(492): unsure at all n locations
cgaccgggacttctaagtcacctgcngctgcagcttgagggtaggatgcattttcagtgatagataagcctttcctgctgattccctgggatgacaactgcatactggctaaccactgggacacccttctgtttatcgctcccaccgagaacgtctgcccagtcttcaaccaactgatcctgaacgaatatgaagaagctcacgtcaccaggattttcaattctcgggtcaagctggcaaaagtgtaatcttagcaagtaggtgaagcctgaatcaacgggaagttgccatgtgaggttgaaccccatgttgacggtgccattacttcccatattccttanggatcggtacactgtgtctggtgccgtgtagttaggagtctttgtgaatctcaaattaattccagagtcaatatctagagatagtacactttgagtcggtacatatttggtatccatatccccagctctgagcatacccgtgtcctgtgag

SEQ ID NO: 98679 - DNA, 435 bp, Glycine max
tgtcagagttagttgagttgagttcagataatttaatattgtcaccgcccactttatgaccagacagaacagaaccttttaagggtacgtgtcctgaaattccatcttttatttgggataaaagagtctgcctactagtatgccattaaccaatgttataaaaatcatcccatcataaatctgatctaaacattggatcagaggtccatatgatgaatagcttattatatattaaaaaaatatattataatataactagtaaaatgggattaattcatatttcttactctaatagtatagaattttttaacaatatagtataaatattatttttgtcatcaattacctaataatatacactggtctagtggcaagttaacattttagtaacttaagggacctttctagacaaaaatctcacttttgtttttaaaa

SEQ ID NO: 98680 - DNA, 458 bp, Glycine max
  unsure (1)..(458): unsure at all n locations
agcttgtagaatggctagacatgatacatgtcatggtttggnttggntcaaggataaaagggatgccccacattatttccatgacacaaatgcaaaaatgatgatttggaaactttatgcaaaactggtcatgcatgcacctatgtggacactcaagtgtcaaattattatggtcatgtgattctagggctcaggattcatttcctctattttaatcaacccaacgtttccaaaatatgttcttttatcaatttgtgcattcatctgagtccattttgggcgtctgggaaaatcttcacagcattcacccttcaggtgtatacacattttttcaaaaactagttatgatcagtgagattttttcaaagaaaagttggaagtcatctcttttcaaaagcatgttggttnttcagctggacaacttatnntccttttttctcctttnttttcattatcat

SEQ ID NO: 98681 - DNA, 428 bp, Glycine max
  unsure (1)..(428): unsure at all n locations
tctcaagtcttcctccaaccaatgagtcgacttatcgacaatctntgagtcacttcaaatctccattgagcaagccaggctcatcctcgagactttcaccttgattttgcactccgactcaaaacctctcattgtcgccaagcttagagaaatcgattatgtcgaccctgatatagttttgttcctctacattcaatcctacaagagtttcctcctacgcacgcacaagaactctgtcgttgtcgctgatgtatggccttccatcttcaccttcgacgactacttgctgctctctcgttgcttcaggtgaattcttttttcgagctggtgttcattgctattttttttgttcgatatgattcttttttgatttctatattaaattgttggcgagttcattttgagtgattttgttgatttgatacaaa

SEQ ID NO: 98682 - DNA, 422 bp, Glycine max
  unsure (1)..(422): unsure at all n locations
agctnnnttgaaaccatattgctactggtaatctattacaataatctggtaatcgattaccagagagtaaaaactctttggtaaaaggttttgagaaaaattcatctgctactcaatttttgaataaactttttaatacttatcttgattaagtcttctcttaattcttgaatcttgagtcttgaatcttgatcttgattcttggaactcgaatcttgaaacttgattcttgattcttgaaatcaaatttccttttgaaccttgaagtgttcttgattcaatcttgaactcattctttgattcttgagatcatcatctttgttatcatgaagagttcttgactttngagctttttgtcatcaccttttgtatcatcaaaacttctttgaatcaatcttgattcatcatgaagcttgcttcta

SEQ ID NO: 98683 - DNA, 431 bp, Glycine max
  unsure (1)..(431): unsure at all n locations
tcatctttctcctctggagtntgcatttcccttgagacaatgtctattatcttcccaccaaatttttgctgcatcaattatcttacatccaacaatggtgacagcaaataactagatacatgctgatagaaattttagtaactgtgtgtatgagaggtacaggaagaaggaggtagtaaaagaagcatacaagcaatatacttgatgtggctgncatcaatagagccactataccaatcattaattttccagcctcaggttttgcctgcaatgtcaaacgaaaaaaagaagcaactttaatgatcacaaaaacatggcagcaattcatccaaagaaacaccggccacttacaagtgaaaggactcgatagaatcccacatttttcgcctgtatggacatgacttaaatgatgtatggacaatgatcaccgg

SEQ ID NO: 98684 - DNA, 432 bp, Glycine max
  unsure (1)..(432): unsure at all n locations
ctgcagctttaaggagctttaaagaacttctcagaagctcctagctataatagagcatgtgaacaacttgtgtaactctgatgaataagaaacttgtgagacacaactcaaagntcaacttctttccctcttttactccctcaatatcatgctctcccctctctctttctctctctctttcttttctccattgaagcatcctcttcaagcttcttatccaaggtacattcttggtggcgaagctccttcttcgatggcttattccctagtggatggcgcctcctctcacctcttctgctttgtttttcgctgcatctacatggaggaaaatcaccattgaaggacctaattgaagctcanagattcatcctccatagaagcttcacaagcaagcttctgtcaagtggtattaaagcacaagagcttcaagta

SEQ ID NO: 98685 - DNA, 424 bp, Glycine max
  unsure (1)..(424): unsure at all n locations
ntacatctaaagcgaacacacaattgacatgctcctgagattcactagtcgatctcgcaagcaactcgattagactagcgattgtttaccacatttcagcgtaaacaggtgtcaatgttggcggagttgtgttgtcaatgttgcggcggcatgatagaactagatcagaacaggggaaatcattttattcgaattagaatgctacaacttaaggactacacactctcatggatttaagggttcatcaccctcctattctctccaattttttgtccaacccctgactaacccctcccaaagctatttatagcctcttatctaactacaattggttataactaactaactaactgttagttataactaactaacatatatcttaactgtcctacaactaagagctctctaactctttcaaggatat

SEQ ID NO: 98686 - DNA, 450 bp, Glycine max
  unsure (1)..(450): unsure at all n locations
agctntgtagagtataggatagccataccatgaacaccgagatgaaggtgaaaccaagagagtgttaaacgataaaccagcgcactatatttacagaaaacaacacaggaacgaaatcctcattcagtatggatcaaattctatctcatttccagttatcattataaaattaacactattttcgacgtttgtataaaaataatactatttttattatatattaagctttgtaactacaacatatatgtcatcataataaatattgtatatgtttttataaaatgatcaaactacctaactgttatgattcatattatacttaatggtcacataatttattatttaaatttacatgcacgccaaagaggagatactaatattagactgtaatatgtttactcataatctatgtataagaatgtgatatatactataccgcatttatatatt

SEQ ID NO: 98687 - DNA, 332 bp, Glycine max
tgatgatgagtcacacatgactgatcttgaattggacttgttgaaatagagggggccactctgggcgtagggaagagtggatttctaaagatgctctttgtgcagatttccctgtaaaattgtgctgccaaagtctggacacgtgcataaaacttcatgtcttcgctggttgaggaaaaagaaaagtataacgagtctggctgtacgctaatagatcccaaccgtcaataacgtgagcttatgctctatagactttcaggacaatcttggaggagatccaaccgtttacgaattggatctaaagaattgttactgggggctttgactgggaa

SEQ ID NO: 98688 - DNA, 461 bp, Glycine max
  unsure (1)..(461): unsure at all n locations
gtgacactacgaaactcagcttacacggccccgaggaagccaaaagacagatcctctcacggtcgaaggctccgcaacacgttggagaaattntagatcccgccctaaaacgcccattntcctagagtttcgaagtgatcctcattctcaccgcaacctttttaagccgaaagaaagtcgggcaagaatcgcattggtagtacgaagggggagcagaatcgtatctggcagtggttcttcggatcgatcacagattctcggccccgtcatttggcttccactccagttgacctctcttgttctccccccccccccccttacacaaccgggtggaggactcatgtaaacttattcctttaggtccccgttcaggaaggcattttgaatatctaattggaacagaggtcaatcttgattcgcagcaataaagagtaggagacgaacgtacttcatcttggcta

SEQ ID NO: 98689 - DNA, 470 bp, Glycine max
tgcagctaaactcctgcccaattataaaactttaagcattctcttgtcaagagatatatgagatttgcattcccgattaacattaaaaaaagggcacaaacacaaagtttcccaaaaccaaactcacctcttacttgatgagctggctttagcagaaccatcctaatttggacaaaatatccacatctattcttttcacaaagcttattcaaattcttgaactgctgagaataattgctgcctccatccttttcagcataattcccaacactgcatatcagacaccacattcaaaccccatttcagagtgagcacacaattcaacacaacgaaaaacccaatctgcaagactctaaaattttgggcatatcacttactataaaaagcatccaaaccccaaattaataaataaaacacaattcaacccaactaagaaaactagtttccaaataccaaaacttgaaatataa

SEQ ID NO: 98690 - DNA, 447 bp, Glycine max
  unsure (1)..(447): unsure at all n locations
acacttagctagcatgacttaatcctgacttgttaaaatgtacattatatgttgatgtttcctatgncaaataagcggcacgaactacatatttttcctacaattngagagggacaacagagttttacatctaatgcttggaatgcaaggtttacttggcattatcaaggctggttatttggttaatttgggtatgatgatacttttccattttcttccatctnttttatagaagatatattttcttttactttcattcgggcacaatcttttaatcaacttctaatcaataagagaaagacgaggaattattaagtaatcctgaactagcatttatttatagttttgactaatctccatggtcagacatgtatttaagttatttaatttactataaaagaataataacatttgattgagtgttacatagagattggttgagattaa

SEQ ID NO: 98691 - DNA, 323 bp, Glycine max
tgcctcattattccagttgcaacggtctctttgaagaggcacttataaacttgggagggaacataaacctaagattacgaacttccattaacccaaaacgcgtcttcgggcctaaataaaactaatttattttttaccacggaccctctccccatctctttccgtattttcaaacctagtttcttcgacacacttttctaatactggaaaatttaaccttcatcccccccaaattaggactcaattaatgaaatggaatgataattctatgaagggctgggctgtcttcgggtaagatgctaagctgtatggggctctgctgc

SEQ ID NO: 98692 - DNA, 434 bp, Glycine max
taagaagaatttgcgaagaagacaacctatattgtaataccttgcgctggtagaatggcgacacgatgatgatgacgagttcggacgtcgatcaacctgaagagcaggggagaaaatcaagagatgatgttagaaaaggaatgcagaactagacgaaaaaaacctaaaccctttctcaacactaaaactatattttagtgagagtagaagtccagaaatcaccaatcgtgaatcaacactgtagaagctgaaacgttgttgttacctttgtctcgactacgagcacgaaaatggtagagttcctactttgaattggaagctacagaggttttggttgaaagttgttgcaatacaaggtgctgctatgccaatgcgcacacaaatatttgattacaatttgtaatgataaaaatatttttattttgtatagaaaa

SEQ ID NO: 98693 - DNA, 431 bp, Glycine max
  unsure (1)..(431): unsure at all n locations
tgaaactctctggaacttggacctttctctctntagaagtctctaaacatgcaaaagncttgataatttgccaaactcccctccaaaatctgatntcaggcttaaataggtggctttgtttgtgctagcacgcttagtgcaactatggaccgctcagcgtgcattagtggatttcggcttagcgcgtgcgtntctcacttattggatggactgaagtggtgcgcttatcgggatgacccttcgctcagcgcatatgcacaactcatccttcttccagattcttcctcgtaaccggggagtgttgtgctcagtggatggctcactaagccagaagattggcttagcgagcggatgaaaatcaacacttcacaaactttctaaattaacctaaaattaagaggaaatggttatttaacacacacaatgggagt

SEQ ID NO: 98694 - DNA, 377 bp, Glycine max
  unsure (1)..(377): unsure at all n locations
cataagctacttgatctaagtctagtcctaaatgaaggatctgccgatgaaactcaatttaagttaatctaaacctaagaaggttgtatacatcgggcctaatccaacaagaaggatctaaagatgaaacttggattaaatcantctgacgagggatcgagggtttaataatttatgctacaacatagaacacacgaacacgaatgattagagaaatatatttctatgcattcagcttgtttgtagaaagacccaacatttctatgtattggtgtcattttatttaccttgcattntatagtttttagcataaaacgttagcttaaattctatttgaaattatcactcatacatgttntctcacaatgctttgattc

SEQ ID NO: 98695 - DNA, 433 bp, Glycine max
  unsure (1)..(433): unsure at all n locations
gctctttcaactgcacaaggctcttaatatttgaagagtatccttgtggaaccttcacccgatgaagacactgacaaaaacttatcttctcctttttggacaaagtatgacaagttgggggcaagtaaattatcttcccatcagaccttggatgcaactgtgatcgtatccacatctctgctagattttgacgagtattcaagccatccttcgtcttgccctaaatgttaaggagcgtcccaatcacactgtcacatacatttttctcgacatgcataacatcaatacaatgtctaacatctagatcagaccactaccgaagatcaaagaaagttgacctcttcttccatatgcaagtctgacttttatccttctnttgggtctttccaaatacagtattcaagtgttgaacccgcttgtatacctgctcact

SEQ ID NO: 98696 - DNA, 463 bp, Glycine max
  unsure (1)..(463): unsure at all n locations
ncaagctggaatgatgcttcaatgtatgaanagatagagggagagaaagagagaggggggagcacgaatatgaacgaatataagagggagagaagtggaactctgaagtttgtctcacaagactctcattcatcaaaagatacaataagtgttatttatagactatgtagcttccttgagaagctttcttgagaaaactttcttgagaagcttctttgagaaaacttccctgagaagctagagcttagctacacacacccctctcataactaagctcacctccttgagaagccttcttaagaagattccgaaagaagctagagcttaactacacatacctctctaatagctaagctcacctccttgagatgagaagctacaacttaactacacactccctataataacctccatgactaaaaacatgataatacagaaaagagtccttactacaaagactact

SEQ ID NO: 98697 - DNA, 428 bp, Glycine max
attggtctttgctggagaaaagaacttttgggtttattaagaggcaaatctgatcatcatgctttgataattgcaaaaaaaaaaaaaactgtggcaagtgaagagggtgagaatgagggagaaacccatgctgtgactgccattcctatacagccaagtttcccaccaacccaacaatgtcattactcagccaataacgaacctttttcttacccaccacccagttatccccaaagtccatccctaaatcaaccaccaagcctgtctaccgcacttccaatgacgaacaccacctttagctcaaaccataacaccaacccagaaatgaattttgcagcgaaaaagcctgttgaattcaccccaattccagtattctgtgctgactcgcttcccatatctacttgataattcaatggtagccatcaccc

SEQ ID NO: 98698 - DNA, 315 bp, Glycine max
gccgtgccttaaacgttgaacaataagagacaaccggatattgatggctatgagccttatggtcaacagccatatgatattccggcgatatataacttagagagggttgctttagttatccttcaagacctgatgaactgatattcaatggagtttcaatttcgataccaagtggcactacagcagctttggtagggcaaagtgggagtgggaaatcaacagttattaagtttattgagagatttatgatcaacaagctggtgaagttctcattgacggaatcaatctcagagaattcaattgaaatgatcagac

SEQ ID NO: 98699 - DNA, 390 bp, Glycine max
taagcagatagaacttgctgattgtgaaatatattcttcttgtgaaccttgccccatgtgccttggtgcaatccacctttctcgaattaaggttggaatgccttgctattcctatgagtatcttttataccatgtttatcctgttttgagctaacttattacattgttctttttctaacagaggttggtttatggagcgaaggccgaggcagcaattgctattgggtttgatgatttcattgccgatgcattgcgaggtactggattctatcaaaaagcaacattggaaattaagagagctgatggttatgaagccatcattgctgaagaggttttgagaaacaaatgaaaaatccaaatgattagatctgggattctttaatatctgat

SEQ ID NO: 98700 - DNA, 458 bp, Glycine max
  unsure (1)..(458): unsure at all n locations
agcttgtaagaacaaaattgccttaatcatttttcaatatgcangngaattaggacgcatcaacaagaatcaagccaagactattgcgcaagcaatcaatggggcataacacaccaaatgattataatgatggatggctcaaattctcacaaaggtaaaatcatcactttcaaattgagctttcaaaactatcatgacatgtagagaagaatcaaggatttcaagtcacanaatgtcaagaacttttattttcaaaacaattacccattttcttgaacatatcctataattcaaagaaaaacatgcaaagtcgtacgtgcacacgaaattgacccataatattaaactgaatatctgacgaaactaacaacattaacaaattaacacaactaacatattaacaaaaccaacaaaactagcaaaaccaaagaacactcccctncatacttaaacaacac

SEQ ID NO: 98701 - DNA, 370 bp, Glycine max
acacatagactactcaagccttctagcttttcattggtgtatgttgatctccttttggtgctctaaattgtgggaatgtgctcaaacatgtggggcaattatggtttgttttcttgcctgattggtttgaattgggggtttgtatgagatggccctaggcctataatgcattttgaagcaatgggacatgccacattgtccccgttcttttgctattgatgcctaaacgcgcgcacgccaagtgttcgtgtacataccttaatggcattatcgcgttatttttgtttggaaacaatctattggacaattatgtctgcacatgttttctatttttggggacatgtatttcgtttcattaaggctagaataa

SEQ ID NO: 98702 - DNA, 459 bp, Glycine max
  unsure (1)..(459): unsure at all n locations
agcttgcctcatagaggtccattattgacatatgcggccgaagaactagttccgctccggagtacgacagtcaccgctttatgagcgctgtacaccagcagcgcttcgaagccatcaagggatggtcgtttctccgagagcgacgcgtccagctcagggacgacgagtatactgattntcatgaggaaataaggcgccggcggtgggcaccactggttactcctatggccaagtttgatccagaaatagtccttgagttttattgccatgcttggccaacagaggagggcgtgcgtgacatgagatcctcgggtatgggtcagtggatcccgttcgatgccgacgctatcatccagctcctgtgatatccgatggtgttggaagagggccaggaatgctagtatggccagaggaggaaccggtctgatgggttcgatgaggaggccatcgtccaactgc

SEQ ID NO: 98703 - DNA, 428 bp, Glycine max
  unsure (1)..(428): unsure at all n locations
ntnggaaggatcaaaaagtgccttatgaatcctctcgtgcttatgccactagtacctggaaggcctctcattttgtacatgacaatcttggacgagtcaatggggtgtatgctggggcaacatgacgaattcgggaagaaagagcgcgctgtttactacctaagtaagaagttcacgacctgtgagatgaattactccttgctcgaaagaacgtgttgtgctttattatgggcatcccatcgcctaatgcagtacatgctgagccatactacctggttgatatccaaaatggaccctgttaagtacatttttgaaaagccagctttcacgggacgaatcgcccggtggcaagtcttgctttccgagtttgatatagtctgcgtcacccataacgcgataaaatgaaacgccttatcagattatttggc

SEQ ID NO: 98704 - DNA, 309 bp, Glycine max
  unsure (1)..(309): unsure at all n locations
atgtctctagaggttacttcctcgttgacatcttttgtcttgaatggaattgccatgacaagtntgttgttactgtctttgatatttggtagagatattgtgttgtgggaggtaattccgactggattaacctaccattcttcacttgcaattntgtatgacatttgttggtggaatacctatgatgtcttgtttccaagggtagtctatatcctttctgatggcatatgcctgaaaccaattcaagagaacgacatgaattttgactctttcgacaaattcagagaacattgcttggatttgtattct

SEQ ID NO: 98705 - DNA, 362 bp, Glycine max
  unsure (1)..(362): unsure at all n locations
gaatgctctatgcaatggagttgacaagaatatctttgtctgatcatcacatgcacagnggccaaggatgctngggagatcctgaaaaccactcatgatggaacctccacagtgaagatgtccagattgctactattggccacaaaattcgaaaatctgaagatgaaggaggaagagtgtattcatgactttcacatgaacatttttaaattgccaatgcttgcactgccttgggagaaagaatgacagatgaaaagctggtgagaaagatcctcagatccttgcttaagagatttgacatgaaagtcactgcaatataggaggccccagacatttgcaacatgagagtagatgaacttatt

SEQ ID NO: 98706 - DNA, 450 bp, Glycine max
  unsure (1)..(450): unsure at all n locations
agcttatncatttattcatcattttatattattattctagctatgtgtagctaaaatcacccctattagggtttaatgtacgtagacatttactcatgtatatacattgaagttctaaactatatttattgatcattattagtactcttattttatacttaatgctcacacttgtttgatctcgtttcacttgatttatggcttgaatgttgttagaaaatgcttttaaagatagaactcaagaagaataactaatagtttttgtatgtaggaatgtagcaaaacttagctattagtcgtcattaaaacccacttgttcttacaacaagttgtttagctaaattactcaagggattgatagtntagttaagatactaagactctcattattataggaattaacgtttgagttttcttgtgggttgatggtaataagtaaactctaaactt

SEQ ID NO: 98707 - DNA, 425 bp, Glycine max
  unsure (1)..(425): unsure at all n locations
cgccanagcaattatgggcagaagctttcaacacaacaacttacttaatcaatcaaggtccatcagtaccatcggatcaaaaaataccaaaagaggtatggagcgaaaaagaggtaaaactctcacatcttagagtctttggttatgtagcatatctgcacattagtgatcaacgtaggaataagcttgatcctaaatcaaacaagtgcactttcatcgaatgtggtgaagatgagtttggctaccgcatatgagataatggaaataaatagatgatccatagtagagatgtcatcttaaatgaaagagtaacctacaatgatagggacaacaaatacacttgcaactcaaaacagaaagggctattgtacacatacgtggatgatgtccccgaaacccctatgaatgagactactattttagta

SEQ ID NO: 98708 - DNA, 456 bp, Glycine max
  unsure (1)..(456): unsure at all n locations
agcttcctcggggccatttcctgcgagaacaaacatttaaaagttagttntacaagataatgcttatcttaacgcaaaaaatgtcatgctaacctctctgattttagaacgaactgacccctcacccagaaacagctgaaacacgtatgtgtggaatatcctactatttatatcaacatagaggccatccaacacattctaattgtcatacatatatgcaattgaaaagaacatacattctcacgcccaaggcattgcgtcaaaactcacacttaatttatatcctaaacatttgctatntagaaactacctacatatgtttgaaatatatatcatacaaatttttattgtttcactcgcatttattcatattggcaagctatttacattatgcacacacttgcattcaaaagggaatttcgtgctatcatacattcatttaggaagacaatcatt

SEQ ID NO: 98709 - DNA, 388 bp, Glycine max
aactaagctcgcctggttagacatgattggacatgattgtgactatttggattcaatttgggcaaaataggatgagggaaagagtggttttcgaaatctgcactttatgcagaatattgttgttgaaatgtgcagcaagaatttgcataagtgtagaaaaatgctatgtatctgctggttgtggaaagagtagtacagaatgagttctggatgtttgctagtagatcccaacggttaatgaattggaacgaaggaaatgttactggggtcttttagtgagaaaaagttgtgattttggtttgagttttgggcagagtttcctgcctttgccctgttttgcttggtttgtcagtttgtgatgatttggatgttgaattacttggatgtt

SEQ ID NO: 98710 - DNA, 449 bp, Glycine max
actcagctatcacccttaccggcgattggaaaaatcttttaatggaagtcaagggcatgatagtgcaccgatatcgttaactggtcaacaggttcttgagcgagttgagggcatcaatgttgtatttggaaagacccaaaaaggaaaaaagtaaaacttctatatagaagaaaaggtcgatattgtttgatcttccatattggtccgatctagatgtcagacattgtatttatgttatgcatgtcgagaaaaatgtttgtgatagtgtcatcgacacacttgttaacattcaaggaaagacaaaggatggtttgaatactcaccaagatctagttgagataggtatatgagaccaattacattcaaggtatgatggtaacaaaatatacttgcctccaacttgtcatactttgtccaaaaagggaaatataagttttgtcagtgtctgt

SEQ ID NO: 98711 - DNA, 382 bp, Glycine max
  unsure (1)..(382): unsure at all n locations
gcttgcacctgctcgccaggcgagcttatgttgtttctccataaggcaccggcttctggaaaacattctggaaggcccaagtgggtcttgatgctatttgcacccccctatttactaaatacacccctttcgtaacgatactttgtttctttccgtaatggtacggaaccttacggatcacgtaatcatncctttntttgctttcgggatgttacggagcttacggattgcgcactaacacttccttttgacttccagcatgtcatagaacttcacgggttgtgcaacaatgctttcttttgacttccggcatgtcacggaacttcacgaattgcctaacgatgggtgccaagtacctcgaagtagtcaaacgaaggtcaca

SEQ ID NO: 98712 - DNA, 437 bp, Glycine max
cttctcggcaatcctcactccagcgatcagtttgggttttgcgttatagcttgaacaactgctcacaaatggcagtgagctgcgatatgaatctggcaatataattcttgcgtcccaggaagccccggacttgtctctcagtacggggttctggcatctcaaggatagccatcaccttttcggggtctacctctatctctttctggcttacaatgaaaccaagcaaattccctgatttgaccccaaaggtacacttagcggggttcaaccttaattgatatttcttaagcctttcgaacaacttccgtaggttgacaaggtgttcttcctcagatttagatttagcaattacgtcgtccacgtagacctcgatctcttgatgcatcatatcatggaacaaagctaccatggcccgttgataagttgccccggcattc

SEQ ID NO: 98713 - DNA, 374 bp, Glycine max
  unsure (1)..(374): unsure at all n locations
tttattggctcgctatggataactatttgccaacctgtggtttggtattatgatgaatatgatatgatgaatagccttggtatattaaaggcctgctttaacttataaatttggtttgggggctttctttgttctcttcttcgcttagattttttttgatggcgcgataaaagggggaaatggaaaatgtggaatcngtttgcttgtggaggaagtctgtaatgggtgattangggttttctttcttgcaaaaatataagcttaanggtttcgtggtgaaccctgttgcaatttagtgtgctttgatttgcaagcttgttgactacctttgaatgttgtcaacttaaccagtctctaggtcagtgttatcaatg

SEQ ID NO: 98714 - DNA, 439 bp, Glycine max
  unsure (1)..(439): unsure at all n locations
actaagctattggactaganacatgggaccaactcattntatntcaaaaaggaagtcgtatctagtcaaggtcttagagaccatacaagtttcctaacgatttctaattatgtgggccattaagtctatcatatgctgacaatagccgagaagcccatgaatctcttcgggggcggagtaggtgtctgccatcgccttggccttggctaacaatcggggaaagttctgactcccgtttaaggtaagagcaaaccgatccatccacatggttgcctcttggtgtaaagagtcgatcacccttcctctagcctctttttccgcgtatacttgggcatactcatccgcgattctatgctcgtgggccatggctagacctaactcttcttggtacttggcgatgatagctagcatgttggtctccgtctcgcataaacgttga

SEQ ID NO: 98715 - DNA, 418 bp, Glycine max
  unsure (1)..(418): unsure at all n locations
atatagctcttccaaaaatttttcacaatcaattattaattttccaaaatataataactagtcacaatctactattaaagtctggatatatttgttgcactttttacacttttggggattaaaatgtgtattttcatctttcaaagacgcctttgtcaacgaagtgggaagacacaaagtaaaaaaaaaatattatgaaaaatatgcccctatgtttgcaattagacatgactacattgacaatcattttagtgacaaattcgtccctttgtgccacgcagactatnttataaacggtgacgaacgaaaattaatggtcggatatatttgccgcactttntacactntcangagactaaatttatattttcatcttttcaggacgtatttatcatcgaattacactttcagggacaaa

SEQ ID NO: 98716 - DNA, 416 bp, Glycine max
  unsure (1)..(416): unsure at all n locations
cacaatgtttataacagttcacgttatatattangtgattagaaactaataatttaagttatttggatgtcttttattgatttgtttggttgtattattataataagaatgatgcggcaattttttttgtggttgtatcataacaagttaattactaagaattcatttgttgtttcagccacattgtgaactaccaagaacatttgttcaacatagttatgagaagcttaatactacttggatattgattgacccagaaggaaacaaacaccgggttgtttttaacaaatctttggaaaatccatcgatcactgatagtcggtctggtctacgtgatttttataagttaacaggttaccataattgtatctttcattacttgggagaatctctatttgaattaaatatatgttctt

SEQ ID NO: 98717 - DNA, 460 bp, Glycine max
  unsure (1)..(460): unsure at all n locations
agcttcatctagccaagagtgtacanaagtgttacaacagaacctaacggtttctaattatatgggccattaaatctatcatgtgttgacaataattgattagcccatgaatttcctctggggctgaacacacttcggccatggcccttgctttggctagtagtcacgggagggattgacttccatttaaggtcaaggcaaacctatccatccacatggtcgcttcttaatgcaatgcatcaatcaccctccctcttgcttccttctcggcgtatgcttgcacgaagtcctctactaacttttgctcatgggtcaaagactggtttaactcttctttgtactgccctattacagctagcatgctttgctccatggcttctaagtgttaggccaaactcttcttggatcttgagcaagcggctaactcctccttgaagaccataccatgtactcgtgactg

SEQ ID NO: 98718 - DNA, 449 bp, Glycine max
cggacctatgaaactcagctgcttggaagctttatggaggctggactttttcttattgaggtccttcaatggtgattttccaccatggagatgcagtgaaagataaaggataagaggtgagaggaggcgccatccactagggaataagccatggaagaatgagcttcaccaccaagagagtgccttggaaaagaagcctagagagaaagcttcagtggagaaaaagaaatagaaagagaaggagaaggaggggagcacaaaattgaaggataaaaagagggagggaagttgaactttgaagtgtgtctcacaagactttcattcatcaaagttacaacaagtgttacacatgcttctatttataacctaggtagcttccttgagaaactctcttgagaagcttccttgagaaacatccttgagaagcatctttgagaagcttccttgag

SEQ ID NO: 98719 - DNA, 182 bp, Glycine max
  unsure (1)..(182): unsure at all n locations
agcttctagccaaatggacttaccttgaattaattccttngatagcccttttgagccctggttccctttccttggtttgaagctcactacaagccttaaatgaaaaaccatgatatcaccatatccttaaaggaatttggagctttggaatttgtttgggaataaatgtggggggggggggg

SEQ ID NO: 98720 - DNA, 430 bp, Glycine max
  unsure (1)..(430): unsure at all n locations
ntacttaattaaaattactctnttaaggcttntactaaattgttaagagaatgagcagtagaagagaaaacttaacaggaagtaaaagcggaaattaaatgcatagcggaaagtaaaagagtagggaagaaggaaacaaacacacaagagtttttatactggttcggcaacaacccgtgcctacctccagtccccaagcgacccgcggtcattgagatttctttcaaccttgtaaaaatccttttacaagcaaagatccacaagggatgtaccctcccttgttctctttgaaaccctagtggatgtaacctccactagaactgatccacaagagatgtaccctctcttgttctcagtcaaacccaagtagatgtaccctctacttgtaccacaaaggatgtaccctccaatgtgttaagacaaagatctc

SEQ ID NO: 98721 - DNA, 207 bp, Glycine max
cctttcgggctgatgacgcagtttatctttttctgccacgatacaacagggtcgtgtattctggtcatttcgctcggaccattaccgaactacttgctctcctttaccgttaatgcgttaggtgataggcggcgatgcttgagggttttcctttccggtcgcatttagcgatgcaacgttgttataacctaccgccagtactgacgt

SEQ ID NO: 98722 - DNA, 244 bp, Glycine max
tgacacgacgtgcccatttctgcagagtcatgaggaggatgctgcccacttgttttttcactgccgtaagatactacctctatggtgggaatcactatcttggattggaatatccgctgcactttctttacacccaacggagcactttatgcagcatgggcatcatgttactgggaccacaaagactacaaagatggaatgtttgtgggttgcagttacgtggaccatttggcaacaaagaaat

SEQ ID NO: 98723 - DNA, 409 bp, Glycine max
  unsure (1)..(409): unsure at all n locations
ctttgcctattgtcttaaataggtggcatgcaattcactgatattgtatttntttacatcatttgtgaatcacacttaaatcttataatataaataatcatggatctgactttngtttcgttttattgctttttatgttcgcttgattttgaagtcataaaggagctatatgtctttcttataagggctatgtttgcccatctatgaatagntataacaatattcatacacaagccatgatatctataaagacgtctatttctgattcgaactattttttctttagtcgtcatggatcaacaatcacgggtgtatattaccatcattttactaattaactatatcttcattttctgcatcttgcatttgactgtgatttctcatttccctcattgtttctgattgcaaa

SEQ ID NO: 98724 - DNA, 470 bp, Glycine max
  unsure (1)..(470): unsure at all n locations
agctntcttaatgcggcttctaacattcgagcttcggctgaggctggtgtctcanagttgagtgcctggcagacagcaaggggtggggtgggtcagagccatagcagtggtcaagtggagcaatgccctcagtgtggtgccaagttttcctcagttactactttggtggaccatgtgcaaaaagttcacgagaggagtggcaaccgatctggagcgaaggttacaattgatgtttgtccaaaatgtagtagaggatttcgagatcctgtggccctagtggaacatgttgagaaggatcacggtggaagttctagatcataggtatgagttgatattgattattgaatgaattataacttgaagaaattacatatntttgcaataattagcctggaagaatatagtttttataaacatgaatacattgagagtgtaaacattgtcattcaatcatggattaccaatttaat

SEQ ID NO: 98725 - DNA, 432 bp, Glycine max
  unsure (1)..(432): unsure at all n locations
agccttgtgtaatcgattacacatatntggtaatcgattaccagtgtttgtttctgaaaaatctaaagatgtaactcttcaaaaaggttttgactctttcaaatgggttttaagtttttctaaaagatataactcttctgaatggctttcttgaccagacatgaagagtctataaaagcaagggctttgtttgcattttgaatcaattattcctagtctttctaacaatctcttacaatcctttacaagccttgaatctctttgaacttcttcttcttctttgtaccaaaagtattttgaagttttctggttcttccaaaccttgaaaacttgtgctattcatcctttccattctcttctccctttgccaaaaagaatttgccaaggactaatcgcctgaattctttttgtgtctctcttctcccttttcca

SEQ ID NO: 98726 - DNA, 426 bp, Glycine max
ctggccacccagctccccaggcgagcagggttgcttcctccataagcaacagccttctggaggaatcttctagagggcccaagtgggcctggttgctatttgcaccccctttttactaagtacaccccctgccttttttttggtgattcttttttcgtaaagttacggaaacttacgaattttgtaacgatacttgttttctttcggtaaatcttgcggaaggcttgtggattacataatcatcccctttttgacttacggaatgttacggaacctcactaattgtgcaacgatgtttccatttgatttccggtgtgtcacggaaccttacggattgtgcatcaatatttcttttctttttcggcatgtcccagaatttcacaaattgcctaatgatgggtgccaagcaccttacaaggaccaaac

SEQ ID NO: 98727 - DNA, 455 bp, Glycine max
  unsure (1)..(455): unsure at all n locations
agcttaagaattaactaaaagttactatggcatgttcgtgggtgatgcacaacttaatcacatttttgttggatcgagtggcctcaaaataattaagaaggggggggggttgaattaattattcctaaacctttactaattaaaaatttattcttttaggcttttactaaggtgttaagtgaataaagagtagaagagaaactntaaccaaaagtaaaagcggataataaaatgcacaacggaaagtataagagtatggaagaatgagacaaacacacaagagtttttatactggttcggcaacaacctgtgcctacatccagtctccaagcgacctgcagtccttgagatttctttcaaccttgtaaaaatcctttacaagcaaagatccataaaggatgtaccctcccttgttctctttgaacctagtggatgtccccttcactagaactgat

SEQ ID NO: 98728 - DNA, 406 bp, Glycine max
  unsure (1)..(406): unsure at all n locations
tatgactctnggcaatttctntaaaactagtcacttaaaaattagttgtgacttttgaaaaaatatttagaaacaagtcacttgaagaattgtgactttcggaaatgtatttttcaaaatcagtcactggtaatcgattaccattaaggtgtaatcgattacacatcaatagatgtcactcttcattttgaattttgaaaattaaaatgtttagaagctcttgtaatcgattacaagtattgtgtaatcgattacacaagtttaaaatactttaagactatttaaacataagttataactcttaaaatttgatatcttaacgtttcaaaacactggtaatcaattacatgattatggaaattgattacaacttttgtaatcagttttgaaaacaatgctggctact

SEQ ID NO: 98729 - DNA, 193 bp, Glycine max
cgagatgaggaggtgttgcagggtgacacttcctgagtccatttttgactacatcattactcctgccgatatgaagagggggtgaggagaccttattgacctcatgaggagtgcaatatcccaataacgtactagacaaatcgcgagccatatcgggcataggtattcaaagagaacctgtgatgtacctaat

SEQ ID NO: 98730 - DNA, 452 bp, Glycine max
  unsure (1)..(452): unsure at all n locations
gcaagcttagccgatcaaacctgatgtgttgttgttctttgctggagtcatgccaactttgtctcatttcgagtcccagcgctcgtattcttggtggtgggatagctcctaccaaaaattaaaaggcttcaaaaaccttgaggctctcttcctggattatgtgttctacattatgctagaggaattgaatatattggttgaacttcgtacattatctagttaggaaattgagaccacaatagaggcccataaattttgtatactacgcatgcatgtgtgtattggatatatcatacnttctattccttcaaatcttttggattgatggactgaggtaaagccagtagtataagctatgatagcaccaaaaaaacaaaaacaaaattcatattctaagtcggttacacaaaaaactgtcttagaatgacgcaactactaatgcagtaatttgt

SEQ ID NO: 98731 - DNA, 428 bp, Glycine max
  unsure (1)..(428): unsure at all n locations
tccatattgttgcatgtattaatcatttntagattaaatatatctctatctatataagacagggattatattaacatacatttataagagaaataacattaatgaaaatggtatttttagaaaagtatataagttttgggcaaattattgtcatcaattaaattaactatttttattaatcttggaaattaagaattaatctagaagttttgctaccactgcccttaagacattggttaaggaattaaaatgagaaagttattaacgtgtattgttggattttccatacagatactttttggtccaatttttctttatatgaatatgttcaagggaaatccgattcgttggaaagcacaccggatcgtcaagtatttaaaattaaaatggatgaatccgagtatcgaactcaaggaactagacagggt

SEQ ID NO: 98732 - DNA, 421 bp, Glycine max
  unsure (1)..(421): unsure at all n locations
agcttgtagtctccagacgacgagagtaatacctgcaaatttttaaaataatcagaatcggacgaccaacatcatccagataccggcgaatttgttcacctcgattgatgaaaggagcggatgatcataaggtatctttgcctgccacctaacttgcttgccctggatgacaaaaggtgcggaagacgatgttattctctgtatgtcaacgggctcgtttgcccctggttaacgaaaggtgcggataaccatacagtatccncgcatgtcacctgacttcatgggtcaggatgacaaaaggtgcagaacacgatgttagtctctgcgcgtcaacgagctcgnttgcccctggttgacgaaaggtgtggataaccatgcggtacccccgcatgtcattggacttggcatctctagatgacat

SEQ ID NO: 98733 - DNA, 422 bp, Glycine max
  unsure (1)..(422): unsure at all n locations
ctcccagctcgcccaggcgagcaagggtgcttcctccatatgcaacaaccttctggaggaatcttctggagggcccaagtggggctggttgctatttgcacccccatttttactaaatacatccccctgccttcttttttttgtgattcttttttcgtaatgttacgaaactttacgaatttcgtaacgatacttatttttcttccgcagggtacgaatccctacggattatgtatttactcttttttagctttcgaagaagttacggaaacttaaagattgcgcaaaaacaccttttttcgacttccgccacattacggaatttcacggatcgcgcaagcctgcttcctttagatttctgagacgtctcgggacttcatttattgtgcaacanaggacgccaagtatcccaaagcggctaa

SEQ ID NO: 98734 - DNA, 201 bp, Glycine max
ttccttagaaattccaaatttttcaggtccactttccaaggtttacatgccctcaaggcttttattgtgactggacaccaatccctaaagttttaaacaaaagcttatctctctaaaacaaaacttttatctcttagaattcttggcccaacacttgcattcaataagattaatgagtgctcatgacaatctattcttcag

SEQ ID NO: 98735 - DNA, 440 bp, Glycine max
cttgtgtagcagcaataattcctactacatatgcaataaaatgaatagattactggtgcatcttccaaggaggaaggcgcgtggagtctccaccaacgtttattcgaggaaaacatcagaataaccagaacgtgtggtctacgaactttaagtgtgaaaggttcgggagttgtttttacgcacgggaaaggtattagcaccccacgtgttattcacaagggacgaccacctttaatcaagtgtgcaaatatgacttcaaaactatgtattttcccttttttatgtttttatgtattttcccttttttatgtttttttaagctttttatgggtcttttgtatcttttatcattttgtggtcgacaagggtgtttcccttgctcctaactatcctcaattgtgatgaggaaatcatacctacgtaattctttgagaactaaa

SEQ ID NO: 98736 - DNA, 434 bp, Glycine max
  unsure (1)..(434): unsure at all n locations
cctgaggcatgccagcttatgctgcanacatatataatagacctacacagcatcttaaccaacaacagcgaaataattatgacctttcaagcaacacatacaatccaggttggaggaataatccaaacttgagaaggacgagcccttcactacaacaatagtctatttctccttttcagaataccgctaggccaagcaagccatatgttccttctgcaatgcagcaacaacaacagcagcagcaacaaagacaacaagcaactgaggcccctcctcaaccttccttataagagttagtgaggcacatgaccatacacaatatgctatnttagcaagagacaagagcctccattcagagtctgacaaatcagatggggcagatggctactcactcgaaccaagcttaatcccaaattctgactacttgcgtttac

SEQ ID NO: 98737 - DNA, 421 bp, Glycine max
agcttgagatgaggaagtatatttgggtgattcttcctgctcttattcgttgaccacagagtggtacctggagatatgtcgcggcggtcatgagaccttggggacgtcaagtggggtgctattgcccaaaaccaagcttgaccaatcccgacccaacccgggcatagtcggtcagtgagaacctgtgatgtacctaagcaggcgagctcctggcagtcaacagataaaaggaacaaagaccaccaagcaaggtggcttgtggtggctggccagctgtgaaatttgattgatatgtgagatatggcctctggtaatcgattaccaagggtgggtgatcgattacaaggcttaaaaatgaagacaggaggctaagatggtctctggtaatcgattaccaaaggggtgtaatcgattaccaggc

SEQ ID NO: 98738 - DNA, 433 bp, Glycine max
tcacatggagctacatcagaatggtcttaaagtgtgtgaattgtggcagcgctaaggtaagtcccacttgagaggagaaggtagaaagattgcttgagaagaaaagctctcttaatatctccttttcgttggactagctcatctaggtccctatatggaaggagttcaaccttgtcccccacttccatattaagcccactaaggaacctagctatgcttgttttttccccctccctaagtccagctcttaaaaggagtagttccatttgttgtctatattctttgacactcatacttctttgtctaagcctttggagcttgtccataagctccctttcatagtaggagggaatgtgcctcttcctaagggcattcttaagatcattccaatactttactggaggatccccatgaatccttttttccctaacaa

SEQ ID NO: 98739 - DNA, 458 bp, Glycine max
  unsure (1)..(458): unsure at all n locations
agcttatgcgcatacttccttacgaacgttctcttgcacaagacattctataactaagaaaatgcacccatatcaatcaggcagcttcgttacctaaattaattacatgtactttcaaggtgtagtttgtacttacatcacacacatctccttggctaaatttacatacatgcatactcaaagcattttggggtaccaaaaattgcacatgtgcacatcttggtatttctaatacctatacatacacaaacttcatgatgaatctngactatntacacaataaggtgctacatttcatgctcttttcaagtttttgctacctacagtcgcatgcaaattcaagtatatnttccttcgctgactaanattgtattcaaattaaaaggtatatatttttctgtaatgtattccatgcaacatatttatatatatttctttgtgagacattttgactacca

SEQ ID NO: 98740 - DNA, 434 bp, Glycine max
  unsure (1)..(434): unsure at all n locations
tatgctgcanacatctacaatagacctcctcaatctcagcattataatcagctaaaacaaaacaattatgacctctccaacaactggtacaatcccaggtggaggaatcatcccaaccttagatggtcgagtccttcacaacagaagcaacaacaacagccttattttcataatgttgctggcctaagcagaccatatgttcctccaccaattcagcagcaacagcaacaacaacaaccctagaaacagcaaacagttaaggctcctccacaaccttcccttgaagaacttgtgaagcaaatgactatgcaaaacatgcagtttcaacaagagaccagagcctccattcagagcttaactaatcagatggggagagtggctacacagttaaatcaacaacaatcctagaattctgagatattaccttctcaatc

SEQ ID NO: 98741 - DNA, 445 bp, Glycine max
agcttgtgagtgataggatgtgtactctcatattatagattgaatctcaacgctcaagggcgctggtaatcgataacacacacattgtaatcgatgacagccttttgaaaatattaggaacgctgtaaattcactttgaaaacattttcaaactccttttgctactggtgatcgattacaacaatatgggaatcggataccacagagtaaatactctttggtgaaggatgtttcaaaaactcatgtgctattcagagcttagaaaaacatttttatacttatcttgatagagacttttccttattcctgagatctgagacgtgaatcttgatcttgactcctgagatcttgaatattgattcttgtgtgtaagctctcttcttgaatcttgaattcttcttgaatctttgaatcttcttgaatcttgaactcttgactcgtcttg

SEQ ID NO: 98742 - DNA, 460 bp, Glycine max
  unsure (1)..(460): unsure at all n locations
agctntagtgttcgcatggcggctaattattgatatattaccaacaaagttgaaccttattaagaggcaagtggtggtgaatgacacgacgtgcccattctgcagtagtcatgaggaggatgctgcccacttgttntttcactgcagtaagatcctacctctatggtgggaatcactatcttggattggaatagccactgcactttctcaacacccaacggagcactttatgcagcatgggcatcaggttactgggaccacanagtctacaaggtggaaatgttggtgggttgcagtaacgtggaccatttggcaacaaagaaatagaatagttcttcaatatcaaggtttcaacagcagcaaagttatggatgatgctctgctattactttggtcttggcttaaggtccacgagatagaattntccagtcactttaatcaatggtctttccatctaaca

SEQ ID NO: 98743 - DNA, 423 bp, Glycine max
  unsure (1)..(423): unsure at all n locations
ctttgcctattntcttaaataggtggcatgcaattcactgatattgtatttttttacattatttgngaatcaaatttaaatcttataatataaataatcatggatctgacttttgtttcgctttattgttttttatgttcgcttgtttttgaagtcatagaggagctatatgtttgtcatagaagggttatgtttgtccatctatgattagttataacaatattcattcgcaagccacgatatctagaaagatgtctatttctgatttgaactattttttctatagttgtcatggatcaacaatagtgggtgtatattacctcatttttactaattaactttatcttcattttctgcatcttgcatgggattgtgattactcattaaccttcattgttactgattgaaaaaattgtatgttac

SEQ ID NO: 98744 - DNA, 446 bp, Glycine max
agcttgtccgagcaattaagcacgaccgattataatatgtatgccatcatcgaccagtacaaggaaaagctaagcctagcagtgactcatgagcaaaggctagaggacgagtatgccaaggtatcagtcctgcaagcgaagagggaagcaagggaaaaggtgattgattcattgcacagagaagcaatgatgtggatggacaggttcgcctttactttgaatgggagtcaagagcttccccgactgctacccaaggccaaggcaatggcggatgtgtacttggcacccgaggaggttcacgggctcctcaattattgccaacacatgattgatttgatggcccacataattaggagccactaacgcaattgtattatcgctttgattttgactagataaaccctttctgttcctaataaatgaggttgattaatcatatgtattac

SEQ ID NO: 98745 - DNA, 433 bp, Glycine max
tccaaattagtgtaccaaactactgcggctccggtcaagctatcttggaaaaagtgtattaatagcttctcatccttagagtgtgcgcccatcttgcgacagtacatcttgagatggttcttgggacaagttgtccctttatacttgtcgaagtccggtactttgaacttcggggggataacaacatcgggtactaaacagagatccgtcatgtctgcaaacggatagtcaccaaatccttctacggccctcaatctctcctcgaggagatcgagcttcctcctttcctcagttgccgggggcgggccttccatggacaaaactattggttgtgctgtgaggttgggttgaggcaacgcgttgggtgccggcccttccgggatcgggggatagaactcgacatccctccgggcatagtcttgaggggtttcat

SEQ ID NO: 98746 - DNA, 450 bp, Glycine max
  unsure (1)..(450): unsure at all n locations
agcttcattcttgtataaatgtttgaagctttgaaaataattgccgcatcaaacttcttattcctagaaggaaattcaataaataggccctctatttttaatgaagagggttaccactactggaaaacccgaatgcaaattttcattgaggcaatagacttaaacatttgggaagccataaaaagtggaccttatgtacccaccatggtggctggaaatacaacaatagagaaacctatagaagagtggtctgaagaagaaagaagattagtgcagcacaatttaaaggctaaaaatatcattacttttgttctcggaatggatgaatattttagggtgtcaaattataagagtgctaaggatatgtgggacactctacaagttacacatgagggaacaatngatgtcaaaagatctangataaatactntaactcatgagtatgaatta

SEQ ID NO: 98747 - DNA, 430 bp, Glycine max
ctcagcttgaatgctgattttaccctctcactaagcgcaccgttattccatctgctgagtgagaaaagtcgcgctaagctgaaattcactaatgcacgctaagcggttcagaattgcgctaagcgcacgagcacgaacaaagccacctatttaagcctgaaatcagattttggaaagggagtttggccttttcttgaagcttctgcatgtctaaagaagtctagagagagaaaggtccaagttccagagagtttgagagattttgttgtgtaaagatctgcaaagaccagagcttgaagtggaagccttcctgagagcttgagatgagtttgtgagtgattgtgaggtcctagaggtggaggagacatctccacttcttgtatttctgcaatctttcatctttctcttttcgttgttggaaaggaagctt

SEQ ID NO: 98748 - DNA, 339 bp, Glycine max
tgttgctgaatcacgagtgactgcacgttgcgttgaagatcttttggtgctgatgcaggggtctaagggcgatctaaaatcgatttcactatgctgagggtagtttcgtcatcacatctagatgcggtagggatgttgatatcattgactctatgactagctcatcagtagtcatgatctagctctctctggtgactaactagagtgcctaattatgagacgacgtattcctgatatgtgtagagttgctctccctactgagttcaactggactgtctaggacacgttgccgagccatcttctctgtgagaattaatccagatgttgggtctgttctag

SEQ ID NO: 98749 - DNA, 474 bp, Glycine max
  unsure (1)..(474): unsure at all n locations
agcttccatcaactctatantcttaaaacattatagtctcactttgtcatataccaaagtgtaatagtccattggcatcccttcaatgggtgcgatgtgaattgggtcccaaaacaccttatattttcttttggttgtgaagaataatcgaaggttttaaaaagaaaggggaaaaccctaggatcaatattttagttgattgattaaatgtcaaaatggctccattgtcataactccaaaattgtcaagtgactaaattaaacagaacatacactctaaaggagttcccgaagagattngcanaagataggatgagggtgcatgagttatcacatctttccaaaaagagacagtcaatctgtgttcttcacaaaaaaagaaaaaaagatcaaaccanaatcaaaatcacaaaaataagaaagaatgtcatgaacattgtaccaattttcattgcatttgcattgtgcatacaaa

SEQ ID NO: 98750 - DNA, 440 bp, Glycine max
  unsure (1)..(440): unsure at all n locations
tctagccaaatggacttaccttgaattattntctttgatagcctccttgagcctatgttcccctttctttgttttgaagctcattacaagccttaagtgaaaaaccatgataacaccttacccttaaggaattttggagctttggaattgttttgggaataagtgtgggggggtatgtttcattggaagatatgatttttggccatgcttaatgttttattttggacatgcttgatgtatatatatattgcctagttcttgctttaatcttcaaattcgtactgtctaaaaaaaaaagaagaaaaaatgaaaaaaaaattcaattgctgcaaattcatactgttcaaaaaaaaaaaaaagaagaaaagaagtgaagttgaataaatgaggtcttgttatgaggacttgatttgggagccttggttgattttgtttatatt

SEQ ID NO: 98751 - DNA, 446 bp, Glycine max
  unsure (1)..(446): unsure at all n locations
ttcgagcatctcgattattacattacaccatccgacctccgaggtaaaaggtaatggcggttggattttctgagaacctttggtttccatttcgagccgctcgatatattaacggaactaattcgaccttccaagtaaaaagtattgttggttgaatttgctacgaaccaatcggtttcaaatacgagcgtctcgatatactatgggacacaatcggacattcgagtaaaaagatatcgtcatcagaattttctcagagcttttgttacccattatgagcatctcgatatgttacgggacacaatcggacattntgctcagagcttctcttcggaaatttgagcgtctcgatatattacgggacacaatcggacattcgagtaaaaagttattattgtttgaatttgctcagagcttttgtttcatttcgagcgtcacgatatact

SEQ ID NO: 98752 - DNA, 432 bp, Glycine max
tgcagaattggtcttcgccagtgaaaggatcaatgtgggtcctaaaagatgcaaatttgatcatcctactaggacgactgagaaaactggggcaaataaagagggtgaggatgagggagaaacccatgctgtgactgccattcctatacggccaagttccccaccaacccaacaatatctttactcagccaataacaaacttcctccttacccaccacccagttatccacaaaggccatccctaaatcaaccacacagcctgtctatcgcacttccaatgacgaacaccacctttagcacaaaccaaaaaaacaccaaccaacaaaaaggaattttgcagcaaaaagcctgtagggttcaccccaaattctgttgtcatatgctgacttgctcccatatctacttgataattcaatggtagccataacccta

SEQ ID NO: 98753 - DNA, 433 bp, Glycine max
gatacagatcgtagagaatagaaactgagaccacccatccatgacaattacttctgtttctaaagcaatgccaggaatttagagaataatgaattggaatacactggcattatatatcaaacagaaggagaaaaaagatcttatttagcaaagatgactcaattgtttacatcagcagccaataggaaaaacaagcgatgtcttggttgctgacaagataagatgagcatcaatcacggtagaaagcaaaacaagcaagcaaaagtgcaaaactattatgactatcctgaaaaaagatgcaaaattaccccctcccccaatctcttcaactatagcagagattgaaataggagaaacaattactaacctcttgtcaccaggttggcttcctctaatgtcagggatgacaagtgtcgccccaagactacgagca

SEQ ID NO: 98754 - DNA, 292 bp, Glycine max
acttttttcggaaccccatgaatgtcaaaggctaacgctattcatgggttctccacctttgagtctggagccccacaaatggcattggctaacaccgttcgcctaatcttcattctccacttttattcggagccccatgaatgtcattgcctagcgctgttcatgtgtacttcaccttcaagtatggagctatgcttcattattgtctaaggtgggaccctctagtgcaaacctccattctccacttttttcggagccccatgaatggaattggctaacactgttcatgtgt

SEQ ID NO: 98755 - DNA, 440 bp, Glycine max
  unsure (1)..(440): unsure at all n locations
ctcagctttggcgaaggaagaagaagaagttcanagagactcagaaatcaattggcaaaagctttttttttctaaagaatgaattgaaaagatgcattgaaaagaaaatcaaagccttgcttttatagactcttcatgtctggtcaagagaaccattanaagagttataggaaaagctataacttttagaaaaacttgaaaactattggaagagttacatcttttgattttgttcagaaactatcactggtaatcgattaccaaatcagtgtaatcgattacacaaagcttttttgtgaaaggatgtgactcttcacaattaaatttgaatttcaacgttcaaacacactggtaatcaattaccaaatcattgtaatcaattacaacatttgaaatcaattggaacgttgtaaattcagttgaaagctttttgaaaacca

SEQ ID NO: 98756 - DNA, 451 bp, Glycine max
  unsure (1)..(451): unsure at all n locations
actcaagctggctggtggagattctatggaggctggatctttgagcttcaatgaggttctttaatggtgattntccaccatggatatgaagcggaagacaaaggagaagatgtgagaggaggcgccatccactatggaataagccatggaagaaagagcttcaccaccaagatgagccttggataagaagcttggaacgatgcttcaatggaggaaaagaaagagggagagaaagagagaggggggagcacgaacttgaaggaataaaagagggagagaagtggaactttgaagtatgtctcacaagactctcattcatcaaagttacaacaagtgtttcacatgcttctatttatagactaggtagcttccttgagaagctttcttcagaaaacttcctagagaaacttccttgagaagctagagcttagccacacacacccctctcata

SEQ ID NO: 98757 - DNA, 457 bp, Glycine max
  unsure (1)..(457): unsure at all n locations
agcttaataaatntttgggtctataagcttatatgaattaaaaaattaatgtgttagcacatatagattaggaaaattaaaacaaaacaagaagtagtagataactacaatgggatgcaactgaaaagtggcagtgactaacctttgaagtttctagtggcagaggggggtgctaccgtggtggaagtgtgtccacgaagttggtttacatggagaaaggtggttctggcaaaaataagtttaatactcggctgatgtgaaaaagaaacaaaagtttaatatatacttagataattaacacggagtataccaatataacaatgatcactttaactaagccaatactaattttaaaaaaatagtgttgaccgagtcaacacaaatatataattataatagaaaaaagaagaanattatcatgcatactatcaatcacaccaagttaacatcgatcaaa

SEQ ID NO: 98758 - DNA, 441 bp, Glycine max
  unsure (1)..(441): unsure at all n locations
tactaagcttacacatggctgagtttactgccaataatctgtttgagcttgatccaactattgcaactggatatgttcaattggctaatgtttatgcagcacaaaacagatgggatcatgttgctatgatccaaaaatcaattaaagaaaataatgtagacacctggatataggtggtttgaaataaaaagtgtggtgcatgagtttagattgagagacagattgcaccctatttggtttatatacatganaaactaaatgtcttggagaacaaaatgaagttgactggctatgtgccagatcttgcatttgtgttgcatgatgtgggagaggagttgaaaggacagctttttttatggcatagtgagaagctgaaaattgcatttggacttccaaaggtaccatattaggggttccaatccgggtgttcaaaacttgaga

SEQ ID NO: 98759 - DNA, 467 bp, Glycine max
  unsure (1)..(467): unsure at all n locations
gatccttaagcacctgngctgcagctanaaccccttgtcattactaaacattctgtaattaatcacaatcacaagcaaggtattctaattacatgcaagagataagaaggaaaaatatgaaagggaaagaatagctaggttgccctccagtaagcactattttaacgtcactagcttgatgcatcatcctattatccaggatccaacagagttcctacttcaaggaccttcttctcatgtctcctttcctccatcacatgcactntaagacagacantttgactagggtgatctctgtcctcatggaacaaatcanagctgatcttttgatcttctatgcccatctgcagcatcttcttccccatgtctaccatgcagcttgcagtagacatgaatgggcggccacgaatgagaggaatgtcagcatcctcttctatatctatgacaacgaaatcagctggaaatat

SEQ ID NO: 98760 - DNA, 432 bp, Glycine max
  unsure (1)..(432): unsure at all n locations
tgatgaatcanggaccatagttaggaataaggccagattggttgttaaaggatacaaccaagaggaaggcattgactatgatgagacctatgtccctgttgctaggttggaagctattagatttttcttgcttttgcttgtataatgaatttttggttatatcaaacggatgtgaaaagtggatacattgaagaagagatatatgtgggagaaacctccaggttttgtagactttaatcatcctaatcatgtacacaagttggaaaagacactatatcgattaaaacaagaacctagatcttggtacgaaagattgagcaattttttagttgggcaatcttttgtaagagatcaagttgacaaaacattgtttatcaaaagatcaaacaatgagttgttacttgtgcaaatttatgttgatgacataatttt

SEQ ID NO: 98761 - DNA, 362 bp, Glycine max
  unsure (1)..(362): unsure at all n locations
gacatctgaggcatgcacgcgcgtgcatgcatgtacacagctaagaaccttatgatttgatgacttctaaaggaacggtaccgcgagtaacccacatatgcagggctaatgcactattggtctatattctctctttaggcacatgttacaccttagactagatccatgagcccaacatctcattctatgaagtctatagcacaaagagctactcgcacccaccagctgatgaatgaatgaatgaatgatcaactcgtgaatgtttatgtgcgcatgtgtgaggaagcangactgtgcttaacccatggatacccgcttgactgaattatacacgtgtgtgtctttgtgaagctacatacccc

SEQ ID NO: 98762 - DNA, 418 bp, Glycine max
agcttgtgctacactgttatggaattctgaatttatctcatttacacgctactgtcgaataatatatattggctgcggaaaatgagaaatactcctagatcatacccaccattcggtagtaattggatttttttgagtttgtgacacataatgtatggcaacagtgtataaacaatgagtcggaggaaattcatttggattttgctttccctacttattcatcctcactaaatattctgaatctaatttggagcaaagtggtgcgttgtgggccctttctggagcggctggttggtttatcctcaatgactttgtgtttgtatttgcactttctctgaagtctttatgtatcaaaataaaagatttactatgcattggaagagacttaacattcaaagtgcttgaattggcacaattt

SEQ ID NO: 98763 - DNA, 419 bp, Glycine max
  unsure (1)..(419): unsure at all n locations
agcttggaaaacgganaggttgtgganatttataacctcacatgtaagatatgggttaattaaggatgcacgctcacttttaagcacataaatacgtgcgttcattgcaacatggaaagagaatactatttcatagtacaagtttatttatataaaaaaaaagactgaacccgtgtanaatagttttatacaattatcatgtcaacatccattagatgtgtttggattntcagttagagtggccaaaagtatgtttgagagaaaaatgaatatgggatcatgtttggttactccccaatagtatgtttgagactccgataactcaggttcggagagacaacatttgggatacttatgcaaacttcaatccaaagatgtctaatatatgataaggttgttaacttctactcttaaaagtc

SEQ ID NO: 98764 - DNA, 425 bp, Glycine max
  unsure (1)..(425): unsure at all n locations
tcgatagagagagtttcaacttgggttgtgaaatactgttttatagcgagccaaccacaacgattcgttagttcaggatagtgttgattggaagttgtgaaatgaggctctagtttangacttctttggaatttttcgttgatttggattgagcaaaggaatagggatttatacgagatttttctgaaaggtagatatcttccgttgccactttttgttcggagatttgtctacctggtgctttatgatgctcagctaatcaccttttctgtgtgtgtgtgtgtgtatgaagatgtattcttcctgttttgtttgatgatgttccttttgtctccagaaaccaaattccttatttttttacttttgtactcctttacctcttcaatttctgtaatttgtgctgtttatccctaaaataagtattt

SEQ ID NO: 98765 - DNA, 469 bp, Glycine max
  unsure (1)..(469): unsure at all n locations
agctcttagagtcattctatagtgccgtagtggtccacattgagtgtcgtgcatctctattctcgttttggttactttctatacccccctcttgacgtgcttaagacattttacttaagtcatttgtcgcttgacttaaaaataaaataaatttccaccgaacgtttgaattgtattatccgttaacttcggttaaaataaattccgaccgttcggtcgtgccgtaaccacgttggaaatcaaaaaagaggtaaaaaataatataataataaaaaaaacatcttttagtaaaataaagcggaaaatcaatcggacgttttctctgtgggatctctcattcttaatcgaattgattaataactaaagtgaaactaaggctaaaatcaactcgcctagtcaagctcgtccataaaaataggcttntgaagttgtcatttcaatttctcactaagtaaaatggatcattttt

SEQ ID NO: 98766 - DNA, 426 bp, Glycine max
tactcagctgctcgaggagcgacctagtctataaatagaagcatgtgtcacacttgttgtaactgtgatgaatgagagtcttgtgagacacaactcaaagttcaacttctctgcctttatcttccttcaattacaagctcgccctccctctttttatccctatttcttttcctccattgaagcatcctctccaagcttcttatacaaggctcatcttggaggtgaagctccttcttccatggcttattccttaatggatggcgcctgctctcacctcctttactttgtcttccgctgcatctgcatggtggaaaatcaccattaaacgaccccattgaatctcaaagatccagcctgcatataagccccacaaacaagcttacatgacacggacctggcacttttgcttacctttggctatggact

SEQ ID NO: 98767 - DNA, 459 bp, Glycine max
agcttcatacaattaatatagaacctatatcctaatgtcacatcctatcagagcattgggttctcgtgtcctctagcatgaggttcttcatagtcatcaacctattcatctgctcccccgaacacaaagttcaagatcatcacaggattctaacacaaataacacacagggagcgagttatcacattcctaactaatggagagaaacaagataacatgtaggtataaatatcatataaacaaaatacaacttacttaagtatcactcacattatttcaccactttgtcgcataacattacctcgcaacaccacacatttcatttattttcacaacattcacgtattcaaggatcaaaacacaatatcatcaagttaatcaatatcgatcaatacacaagcgttatgaaacatatacactaagactcaatcctatatgcaatgtggtaccatgtcagtga

SEQ ID NO: 98768 - DNA, 424 bp, Glycine max
taatcaaagtagaatttaagatgtagcattcttcattctaagataattaatttatttaacatttactcttaatatgacttatacattgactaagttgcaatttttatttttaaaacaaaaatattaattatagtgacttataaaaataccaagtacgacgaatattgtttaagaaatattagttacttgccttccctaactaattgtcctattttaagttaattttagttataaaaaaaaatcaagattttacttattttgtgataggatatatatctgagtaagttgataatgagtaatatttataccttagagtttgataactatcatttaaatttattcttagattaatattatgagattgtaagtaatgtgatattgtaatgaaaatattatttttaaatattttaatttgaaattcata

SEQ ID NO: 98769 - DNA, 400 bp, Glycine max
  unsure (1)..(400): unsure at all n locations
agctntaagagaagttgcatgagagaagacttcatcctcaatgaggttgaaactggagtgattgcatatgacatagtccctggcgaatcggctgtgctagacgcaacattggtacaccttcgagatgattgaatctagaacaacgcctgtacaattggttgatttctacaagactattgatgattcggaagatatctgaggctagcttgaagaggatgatagagctctcttgcttctgaattccttaccagaatcctttgaacatttctaggatgcacttctttatggcgcagatcaagacattaccctataagaagtccatacctcaattgtgaccagcgagatgtctaaacagaaagactccacatctgatgatactggtgaaagcctcgatatttca

SEQ ID NO: 98770 - DNA, 407 bp, Glycine max
  unsure (1)..(407): unsure at all n locations
ctattacggacctataaaactcagcttgacggttctctcagaagtaagtgattgtcatgtcgacctataatatactattatggacggcaccattgctgattaatcagcacttgtgttcccattatgttattctattctatcagttgaatattcatacgaatcaatataccatacgattgcagagataaaaaatatcggcatttttacgttctagatagggatactagatgggtctgaaaactaaggtcttacttgatttgtacagacccccacaacacaaggggtgtttttttttttgtcttggatgtcttgaggtcagattcatccatgttcccatttccccactaaagcatgtgggcatcacatgccatgaaatgnggaactaaaactttgcccaatgacccact

SEQ ID NO: 98771 - DNA, 271 bp, Glycine max
  unsure (1)..(271): unsure at all n locations
ctcccactgagtggatccacggacgccccaacagacagcttgagggggggttaatatccattatttggaaaagaacttgacaggtgtgagggcctatctgtactgggagatcgatctctcccctaacctctcggcgggtgccatcgaaggcacgaaccaccattgaactcggctttaagtgggaggcattgaatggtaatttctccaaagtgctcttangcatcacgtttaaactggaaccattatcgatgagcactttggctatgatatg

SEQ ID NO: 98772 - DNA, 440 bp, Glycine max
  unsure (1)..(440): unsure at all n locations
ggtatgtntgactctgatgatgaatcannaattgaagaagcttggtatattttgctccgcacatataatgttgagactagcacttggctagaaggaatttacaaaatgaaagaaaaatgggctagttgctatatgaaagatgcttatagtataagaatgcaaagtactcaacttagtgaaagtttcaatgctagtgtgaaagattatgttagatcaagcttggatataatgcaaattttcaaacattttgagcgagctgtggatggcaagcaatacaatgaattagaggctgaatacaatagcaggaaaaaacttcatcggctaaggatagaacactcaccattattaaagcaggttaggcaactttacactccaaaaatattaaatttgtttcaaaatgaatatgattggagttttgcagcttatcttattcgtcgcaa

SEQ ID NO: 98773 - DNA, 487 bp, Glycine max
  unsure (1)..(487): unsure at all n locations
tctcagagtcacctgcggcatgcaagcttaagatagagaanagcacacaatatttttacttatgaaagtnggacattaataattaccaaggtaaaatttggaacaatggttaaagatagaaagcaacactttatttaaaagaatgaaggttgaacatcaattattaatctaactttaatcaataaataggccttaacgcggaaataaataaaattttgtaaatgtccaatgccaagattcaaagaagacttcaagtcaacgaagacattcttcaatttcacacgtcaatcaagggctaatggtttggtaatgcatttatgagagaaaatgttcataacaaacaaatcagtcactagaatgaatgatttaagagaaaagagcttctaaatcttctagttagcaataattattacctgtgttacaattgtccattgcacatctggggggagtttaacaaaatcatcaaatttggttcctattagaatgg

SEQ ID NO: 98774 - DNA, 438 bp, Glycine max
  unsure (1)..(438): unsure at all n locations
gggagtcagttgttgtggtttgtttagtgggatggagctggacaggagcgattcangactataacaagcagttattatagaggagaggatgccgaagataccagtagatcatcagagaaaaattcaattgaagaagacattgaaacttaaattgctgaagtgcaaacgtaagtttattatgcatataatttcagtaccatttttgttatatgattttggttcttgggtatggcagattttctagcaaaaaatggggaagaagagaaaacacagtgagataactcatgacgaggcacagccccaaaaggaacaactcatgatgaggcacaacccaaaaataaatttctttgacttgctttattttgccttttttttttcctaaatcatgcacacatcttggtttgatccgtgccttagctgtatggacaattgcatgtg

SEQ ID NO: 98775 - DNA, 146 bp, Glycine max
tgccatgaatcaattaccctctcccttgcttcgctttctgctgatatcttggcgtactcatcctctaacctttgctcgtgagtcgccgctagatttaacttctctttgcactcatcgatgacggcccacatattcccttcagtctc

SEQ ID NO: 98776 - DNA, 424 bp, Glycine max
  unsure (1)..(424): unsure at all n locations
atgccttaatcatttccaaatatgcatgttaattangacgcatcaacaagaatcaagccaaggctattgtgcaagcaatcaatggggcaaaacacaccaaatgattataatgatggatggctcaaattctcacaaaggtaaaatcatcactttcaaattgagctttcaaaactatcatgacatgtagagaagaatcaaggatttcaagtcacaaaatgtcaagaacttttattttcaaaacaattacccatttcttgaacatatcctataattcaaagaaaaacatgtaaagtcgtacgtgcacatgaaattgacccaaaatattaaactgaaaatccaacgaaactaacaacattaacaaattaacacaactaacaaattaacaaaaccaacaaaactagcaaaaccaaagaacactcccccc

SEQ ID NO: 98777 - DNA, 114 bp, Glycine max
  unsure (1)..(114): unsure at all n locations
ttagtctctgagattgtaaccagtttgcatattaatccctgactanattttaatcaaaaagttcctacttacataattttacaaatagcccttgtcgntaaattcccaatgatg

SEQ ID NO: 98778 - DNA, 426 bp, Glycine max
cactcagactactacagctgggcaggacgggcttacttcattaacttgactacgacgcgagctttgaccactgttcttccttgccacgatgcttatatacatatcacactgagagggcttatattctaaaccatacttaccacggcttccttgagtatttatcatgctatttatgccgccgcagtgtttgcctaaacccataccgggtttataaccgttacccaagataactaaggccatcattaccggtgcattggacaaacaatgctgcccaaagagggagtccacggatgaaatgctgaccacctcaaaagactggaaagcggcttctaacgattcttctgcggcttccacataacgcatggaggatgggcagcttaccaagatgtctttctcgcctgacacgatgaccaagtgcccctccac

SEQ ID NO: 98779 - DNA, 446 bp, Glycine max
  unsure (1)..(446): unsure at all n locations
agctntactatgcagagaatatccttagaatataccttcatctgacttagcatcaaattgttctaagttatctttttcattattcaatacaaaacatttcaaccaaagatatgaagatgtgagatgtttggttttctgccattgaacaattcatatggaggtttctttaaaatgggtcttatttaagccctatttaatatgtatcatgcagtgttaatggcttcagcccaaaagtatttcggaagaggagtatctattaataaagttctagcaatctctttcaaagatctatttgtcctttcaacaacaccattttgttgaggggttcttggtgcagaaaagttatgctcatacccatgcttatcacaaaataatttcaatttcttttttgcaaactcacctctatgatcactcctaatagatattatcttgagatttttcttatt

SEQ ID NO: 98780 - DNA, 67 bp, Glycine max
tccttgagaagctagtgttggacaagtggcctcatatatcataagaaggggggggggggggggggtt

SEQ ID NO: 98781 - DNA, 448 bp, Glycine max
  unsure (1)..(448): unsure at all n locations
agcttgtntaagaacttaggatatatcaagattcagcttngtcgcacatcggtcgcgtgtatgaatccactcgacaagttaaagtagaggagaccttcaatcctataacgcaacgttgcagacaaaaaggggcagtaacttgaatggccattattgtcaatgcagaagggattctgcgcttcactatccatgttcacacattatagcagcttgtggttacatgagcatgaactactaccaatatatagatgtttgttacacaaatgagcacatcttataagcatactccgcacagtggtggcctcttgggaatgaagcggcaattcctccttctgatgatgcatggacacttatccctgacccaactacaattcgtgcgaaaggtcggccaaaatcaacaaggataaggaatgagatggattggctggaaccatctgaccaccgacaa

SEQ ID NO: 98782 - DNA, 432 bp, Glycine max
tgtcagagccttgtatggattgaaacaagttccaataactctatgtgaaagactaagctcattcttatgtcagaatggcttctctagagaagaagtggacaccacactattaaaaaacagataaaaaaagagatctattgattgttcatatctatatagatggcataatctttagtgcaaactcaaaaaagatgtttaatgagttttttctaagctgatgaaaggtgaatttgaaattattatgatgggtgagctaaatttcttcctagggcttcaaatcattccaaaagattatggaatattcacccatcaagagaaatacacaaaggatctacttaagaggttcataatgaatgaagataaacctttggtcaaagacgggtttaagtttcttaaatccttagttaatgccaataatttgattgatctcta

SEQ ID NO: 98783 - DNA, 306 bp, Glycine max
  unsure (1)..(306): unsure at all n locations
agcttctaaactntatacaagtatgaagctctgataccactngttagacaagtggcctcagatatcttaagaaagggggggggttgaatttaaatattccaaactatttctccaattaaaaatctatttcacttcttattcaacttataaattcccttattaatgaacttctcaaatattgattcacataaaacaatttgtatatgaatatttagcactcatcaacaaactacatatatgtaagataaattgcaaactcatatttattctgtatcggccacacccttgatcctaccttcactcccc

SEQ ID NO: 98784 - DNA, 423 bp, Glycine max
ggatgatgagataattatgttaattgataatgttttaagttgttttggttgagttctagataatgatatgaacatcatttgatgacgtgaagatggtgatgttgataagatgatgataattgataataatgttgccttgttaccatgcatatgtgctggaaggcttagctatgacctttcagaaggttttttggtttaaaaaaattgtatacttgggagggtgatgttttcaccaaaactctgcctcaataaagcgacccgaggtctctcctattgatgtagtttcccaagtaccacccttaggttttgacttctaatggcatgtcaaagtggtgagaactacttcccaagatgtttagtgactttttaatgaatgtgggacggattgctacaaatggtgaaacttggatacttgagactgac

SEQ ID NO: 98785 - DNA, 461 bp, Glycine max
  unsure (1)..(461): unsure at all n locations
agctntcccataagtcctaaatgacatttcatactaggaataactcactntaatctccaattaccactaaatccagatttagcctttcaaaccctcaaagcatcacattnttccactcatatcactacattctcacttgttaaccctaggttaactctacccttcatctatatcagttttccatcagcaatttcagcacacaaacatcacaagcatcatcataaaaccctaaaacagaatgggtaagcttgactcacaccaaacatgacaagtttagcatgctttcaacaaattccttcacaaataactaccataaggcataaacctagtaaaactacccatcatatctcccagacacccaatacccaccaaatcatgtgagagagaggtctacccaaacctgaaatttgaagtctcacaaagtagaggtgcgcttcacaactccgaaatggctttcttta

SEQ ID NO: 98786 - DNA, 451 bp, Glycine max
  unsure (1)..(451): unsure at all n locations
agctntatcaattatttacccatgatcattgctaactngatcatcatcatcactcttggaaaagaacaatgacaaattttattgatcatcgtcatcacttcttcaagctttatcaatgtaatcgaatatcaaaaggctataaccgattaattcaacaacattcacttagaatgagaaataaacctctctgtatcaatcttgatcgtgatattgatacgaagttgtcccatcgaaagcagtgacaaatcttcatcgggaaccatgagtgcacacaaggtgggtattttcttcctgacatgatttatttcatatccaagggttaaccaaaatttcaaatttgaaccacttatttaaagaacacaagtcgctaccacttgtttcaaccagaactggtatacctatttactctntaacttctatagagttngaaaagntagaaaataaagatcta

SEQ ID NO: 98787 - DNA, 339 bp, Glycine max
tgttgttgtctctctgtctgctccttctaaaccatcttcgcatttgtctatgccactattgtctcgcccttatggctcatgtccttcagaagacacttcccctgttgttcttgcgcctccatatgagcctcaatctgatgtggttcatactgttccagcaagtcactctatggtgactcgtgctaaaactggtatctacaaacctcgtcactttgtagatataactacttatcggccatcttctcttttacatgcattactcaccacttatgaacctaaaggttttaaatctgctgccaagcatcctggctggcttgctgccatgaatgacgaactcat

SEQ ID NO: 98788 - DNA, 453 bp, Glycine max
  unsure (1)..(453): unsure at all n locations
ncaagctncttaagcagattcctaaagaagctatagcttagctacacatacgcctctaatagctaagctcacctccttgagatgagaagctagagcttatctacacaccccttataatagctaagctcacccccatgacaaaatacatgagaatacaaaaaaaaaaaaaattcctactacaaagactactcaaaatgcctcgaaatacaaggctaaaaccctatactactagaatggccaaaatacaagactcatacaaaggaaaaacctattctaatatttacaaagataagcgggctcatacttagcccatgggctcgaaatctaccctaaggctcatgagaatcctagggccttcccttggatctctggcccaatctacttggagtcttctattcaatgcccttgcgggtaggattgcatcacataatttgtctagaaaggagaagacaa

SEQ ID NO: 98789 - DNA, 442 bp, Glycine max
  unsure (1)..(442): unsure at all n locations
agctngtaggcttatgatcttcttcatcaatggattccttngcttnctggaagaagaatggcagtggaatggagaaggaagagagagaggagacaccacttcaaggagaagatgagtcttgaagaagctcaccaacataggaagccattgataagaacttggagaaagaaggagatgaatgaagggagagggagagaaaagcactgaaatttgtgctctaagagagctttgaaatttgaagtttaattttcgaatgatcaaagttgaaaaaatgcacacacatgacctctatttatagcctaagtgtcacactataatggagggatatttgaatttcaattcaaatttcacttgaatttgaaattgaatttgtggacccaaactttggagacaaacattcactaattatgattagtgaattntagttatggtttagcccact

SEQ ID NO: 98790 - DNA, 453 bp, Glycine max
  unsure (1)..(453): unsure at all n locations
caagctgtagaactccccaaaagaaaatcagctattggagctaagtgggtgttcaaaaacaagntggacgaaatatgtaaagttgtgaggaacaangctaggcttgtagccaaaggaaactcacatcaggaaggtataaattatactgagacctttgcttttgttgctcgtttagaggcaatacggattctactatcctttgtttcccattatggtatgatgttgtatcaaatggacgtataaagcgcattcctcaatgctattattaaagaagaattctatgtggaacaaccccctgngttttagagttctatttaccctcatcatgttttcaaacttaataaagctttgtatggtttaaagcaagctcattgagcttggtatgaaaaagataagtccttcttaactganaatggttttataaaagggaacgtacacactattttttttttg

SEQ ID NO: 98791 - DNA, 436 bp, Glycine max
tcgaaatggtctggaccatgtaccatctagaaagtccgaccatatggagcaatggagcagtggagctttgtgatcctcaatctaaagaccctgacaagacatgggtagtgaacgaacaaaggttgaagcaatatcatggtggagctatggaaagattgaatactgttctacacttcaaaccacaataacaggatgatgcgccaagctaatgacgttcaataagcacttattgggaggtaacccaacttttctttcccttttctctttttcattatgtatgacttgcatgtaggtaggatagttgcttgtgattgagattaaattttcagcttgtttagtagtgaacaaggggttttttaagcctaggtgaagagatggacaaaaaagactaagaaaatttttcagttgtccatctgctaagtgcaacccttgcgct

SEQ ID NO: 98792 - DNA, 421 bp, Glycine max
  unsure (1)..(421): unsure at all n locations
ctcactttaacctccatttaccacagaatccagaattaacctttccactcttaaaggctcactcttttttcactcataacaacacattctcactttctaaccctaggttaactctacccttcatctctaacaggttcccgtagcaatttcagcatataaacatcacaagcatcatcacaaataccctaaaacagaatgggtatgtctaactcatccaaacatggcaagttcaacatgctttcaacaagagtcttcacaaataactatcatgaagcagaaaactaacaaaactacccatcatatctcccaaaaccccatacccacgaaaatcaaaggagaaagaagtccacccaaacctgaaatttcgaagtcccactcgtagacacgcacttcacgaccccgaanatgccctcctttcgcg

SEQ ID NO: 98793 - DNA, 415 bp, Glycine max
aaattgccgaatatagttttaccaaataacacaagttcctcgagagtttgatactcgattcttaccgttttatactactctcacgatccggtgcacttgccgggttcgaacacccatgcataaagagatcaccaaataagcataagctaggtatactccagttgtccttgttggtggtccttcacataaataaattttgaattgatgatcacgtactcaggcaagaggtagattgaatgaggtggctgcaaatacaaactacatgcataatcaataaacacaatttttttggtttcctttccaaacagggcattcaacaaaaagaaacaacctttatcacccaaaaaattttcgtagccattttatactgcaggaaagtcttcctgtatttgtgaaggagaccagaacttagtta

SEQ ID NO: 98794 - DNA, 451 bp, Glycine max
  unsure (1)..(451): unsure at all n locations
gcttacctttggtcccctcataggtgttgcacgagaaaacatgctctattttcatcntccactccaagtagtccttcggatcattcttttctttaaagggaggaatgttgagtttaataccatcaattcgcttttgtctaggaacaacatcattccctcttctccttctttcttctccattaggatatctattctccatttgatccaacctctcatggagcgcatcatctcgttgtttcattaacctctccaaattnttcatcaaagcttgcatttggaattgcgaaagccccactccatcattaagatatgttcctgccatctcaaacaaacaaatcaaacataacaagacaattattagtggtgtttgaatacctcactcactcaagtgtatcacacaattatggcttttctctaatgaaaacactctngccttttaccactctaattc

SEQ ID NO: 98795 - DNA, 436 bp, Glycine max
tccttgagaagctagaacttagctgcacataccccctctaatagctaagctcaccttcttgagaagcttccttgagagacttccttgagaagatagagcttagctacacacccctctaatagttaagctcacccccatgccaaaatatatgaaaatacgaaaaggtccctactacaaagactactcaaaatgccctaaaatacaaggttaaaccctatactactagaatggccaaaatacaaggcccaaaagaaggaaaacctattctaatatttacaaagaagagtggacccaaccttgcccataggctcagagatctacccttagattcatgagaaacctagggccttctttagccgctctagcccaattctcttggagtcttctatccaatacccttggagtgcaggattgcatcatcccctcccccttggaa

SEQ ID NO: 98796 - DNA, 460 bp, Glycine max
  unsure (1)..(460): unsure at all n locations
agcttgntcttgattnttccncagttctttaacaagcttttaacaatatacttggccctcatttaactgtctttgggcttggaggccacgctcaacaaagtactttcgacacctactttacgttgaattcaccaatgctgttatgggaatgttgcgacaatcctttaaaaccttattgatacattctgagaggttcgttgtcatgtggccatatcgacgtccttctctatcgtaagccatcgtccatttttcctttgagatgcgatcaatccatgttgctatggctggactcagttcacgaaatttttctaaattntgataaaaaatgtgcttgcaaggagtgtaggctgcataaaaacagctatgaataaaaattataagtataaatgaaagtaaaataaacgtgacaatcaaatatgaaatcttacccaatntcttcaacatttctttttgttgacat

SEQ ID NO: 98797 - DNA, 451 bp, Glycine max
  unsure (1)..(451): unsure at all n locations
agctntacaaatntgttttatatccaagcccataaataaaataaaatatagataagataagataagatctagatgaaataatatctaaataatatctagatgagatcagatctagataagacaagatttggtagaataaaatagtctgctctcttcaagtccaagcccaattctggattcaagcccaattgcctataattctcctgaaattaaattaanaacacaaaaattaatccagtaggcccaaataataaaactgcatatttaatttgacaattaaggctaatcagtaattaaaatggtgacaaaaagagttaagaaataggagaaaatgatgacacgtcaaatctcctcacacttagccttttgcactcctaggaaaaattaanaaaaaagccagggacanatccagagacatttaagagaaacaaacagactcaacaacaattat

SEQ ID NO: 98798 - DNA, 458 bp, Glycine max
  unsure (1)..(458): unsure at all n locations
agctattagagntttaacacatctcttttatcacactctccactgttggtcctcaatttattgagaattataaaatcagaataatgactcatcatatgagtagtgggacctgtcaaatttgtgatttttaagaaatttgagccaacaaaaaagagtgttcaagagaatgtgttagagacagtgttgctaccattttctctgttaggaatggtgtttgtagttattagtgaaaatagaaatagaaaatattttccttatgtcaaacaagcttctgcattactatttttagtttttacaacattatgatagatcattatatattttttctttctctataacaaatgatttctttattgtcttgcggtggtgtatataaaaacttatcaacacattttactcttctttntttgnctgttcattccaatgtacaaatgattggctatgatgcacaaaatcta

SEQ ID NO: 98799 - DNA, 431 bp, Glycine max
  unsure (1)..(431): unsure at all n locations
tctcttggaccttangcaaacctttagctcatccttcaagatcaaactgtctactcgtgattggtccctttcctctctccgaagattaagctcgttgttactgccccacagagcccctcagaatttgttccagtcgtgtttttccctacgagcccttttggtctcttgttccaaggccttggtggtagctatatttacgtctctcagtttggcattctcctttctgatcttaagagctgctgatttgaacctttctttggttgtttaggcttgctcgagttcttccctaagggcctgcacctcttcgtcttcctccggtgcttcaacttccacccctttagaggttctcaaactcgggagccaatccaaaccttgaatgtgggctttcaaccacctatggtagccgccgatgggcccgttgttactacctt

SEQ ID NO: 98800 - DNA, 276 bp, Glycine max
caagctatgcatggacgatgcatcttttatatctatattcccacacaatcacacattcctagctaaacatgctgtcagttccatgtgccattattttgtgttataagaaaccggcatgtgatcccaacatgggctgcttgcacgcctgagtcaacctacatttccgcggatggcactcgagactctctggactcgagccccctctaggaatacacccggactctgccccaccgtatagttgaagaaaacatccgtgaaaacatacaagaccctgtc

SEQ ID NO: 98801 - DNA, 391 bp, Glycine max
  unsure (1)..(391): unsure at all n locations
tgtgcccggtacatgcgactatgacattgtgatgccctgctttactccattccctantgaaccaagcactctgtaccatgtacaatgattatgtgtctaagtgaaacggctttatgatcccaacctggttggctcgtggtgcctatcacatgtcactacgattgtagtgtgaagacaaaggcttacccatatttagtttacgttctcgagaggacaacgcgtcgatgagcatacatatgcaattttgcacactccaaagtgtgttcagcgcctctgcgtgaggacgccctgaccttgcttattgttaggctggactatgataaccgacaaatgctcgagacgctccttattatgntctgatgagatgcttatgcgatgcatgaattgaatg

SEQ ID NO: 98802 - DNA, 384 bp, Glycine max
  unsure (1)..(384): unsure at all n locations
agcttatccttacggcctgcctccggacttcacccnccgtgccaccccggaagatntaagccaagcccctacttttgaggggcaactcccaccttatgaagactatcccgggcaagacgatggggaaggagatacccatcttggccccctgctccacctcaaagatcaatccccgtatgaactaccccagccgaacatagtctgccatatcccggcctcacccacgcccgtaaaagaatctgttcccttcgcggaagataggggaaagattgaggcgcttgaagagaggttgagggcagtcgagggcctcggcaattacctattctcggatttggtagatttatgtgttgtgcccaacatcgtcatccctccccagttcaaagt

SEQ ID NO: 98803 - DNA, 407 bp, Glycine max
  unsure (1)..(407): unsure at all n locations
agctttgaatgagaattgtattattgcctgtaaaatgattacacacactattgcacgggtttacatgctatgtatacactaagtaacgcttaaccatagttagttaacaaccaactattatggctaacctctaatgcatttcacaatcttaacaaaattgaacaattacattngaattacactactcttaacaatatataattagttatgtataaactaattatataacaagttaggtctaagatcaattatataattagctatgaaccataaaaaattatctaaaatactcatttctataaattagttgtagttttataactataattaataaccataattaatctttaaataagatcaagttatttgaaaaatctataagtataaaattagttatattttacacc

SEQ ID NO: 98804 - DNA, 436 bp, Glycine max
  unsure (1)..(436): unsure at all n locations
naagcttntggagtataaacatgggaccaactcattttatttcaaaaaggaagtcatatctagtcaaggtctgagagaccatacaagtgtcctaacgatttctaattatgtgggccattaagtctatcatatgctgacaatagccgagaagcccgtgaatctcttctggggcggagtaggtgtctgccatcgctttggccttggctaacaattggggaagttcttgactcccgttcaatgtaagagcaaaccgatccatccacatggttgcctcttggtgtaaaaagtcgatcacccttcctctagcctctatttccgcgtatacttgggcataattcgncgcaattctatgctcgtgggccgcagctagacctaactctcttttgtacttaacgatgatagctagcatggtggtctccatctcgcataagcgctg

SEQ ID NO: 98805 - DNA, 425 bp, Glycine max
  unsure (1)..(425): unsure at all n locations
tgtcagagatcctntcattgatgagattgtcgatgatgatgacaaanatgatgtctgttcttgttcatatcaatagaataatatttcatacagtgttggttttttaatttgattcacctaccttttcagtatgcaatgtcaatttgggcagcctggaactatgaaaattaaattgtttttattttccgtttggctagttgtgaaattggataaggtttggttgatgaatatggnggttaccaggggagggcttgattggggttggtatcgttttgtacatagcaaattttactgatgtgttgtgcagcaaacattgaatgatgatttgatttggcaatatatgttaaaaaaagtatattagatgtaatcagcagtcaatggatgcgtgatggaatataaatactatatcttgaagaataaaaata

SEQ ID NO: 98806 - DNA, 451 bp, Glycine max
  unsure (1)..(451): unsure at all n locations
agcttggagaacatggtatggtattgagtgtcattcttagtcaaagtgggattgactgggatagcacaaagtacatgattactgttgaaaatgaaattgcatggaatgaatatgtaatgtagccaattatcttttaattttattcaatagtagntattatttgtggtgttattaacatgtttctattttttttcaagtcacatgaagaggccaaacgatttcgattcaaaggcctaattgggatgatatttgtgacctatgtgcaaaggatagagctactggactcggagcaaaaaatgcattatatgcagatgatatcatgagcaaagaaacaaatgaagaggaatcaattcatagtgtgagttttgacttagagggatcaagttctgccacgagaaaaaacattcgcccaagtaagagtggagagaaagaatggatgattttctcaatg

SEQ ID NO: 98807 - DNA, 424 bp, Glycine max
  unsure (1)..(424): unsure at all n locations
nganatgaggaagtgtagaagggtgagacttcctgcntttattcgttgaccacagagtggtacctggagatatgtcgcgggggtcaggagaccttggggacgtcaggtggggtgctattgcccacaaccaagcttgaccaatcccgacccaacccgggcatagtcagtcagtgagaacctgtgatgtacctaaacaggcgagctcctggcagtcaacagataaaacaaacaaagaccacaaagcaaggaggcttgtgtggtggctggccagctgtgaactttgattgatatatgggatatggtgtgacatcctggaaatttctactcacaatttttgaaaacgatgtattttgaatgattatatatataagtattattcagtgtatatgcatatatgttcttggtagaagtaagaataatgggg

SEQ ID NO: 98808 - DNA, 403 bp, Glycine max
tctacttatgtggcagggcggactttcttaccttcttgtctacaacgcgaactttgaccattgtgcttccttaccgcagagcttatattcatgcctgcctgagcgggcttatagcctaaacacatactttccacgatttccttgagtattcatcaagctagtaatgccgacgacgatttttcctaaacccaccccgggtacaaagccgatccccaacataactacggggcatcattaccgctgcatcggacagacaatgatgccctcataaggagtccacgaaagaaatgctgaccacctcacaagactggaaagcagtttctaacgattcttgttgagcttacacattatgcatggaggatgggcacattaccaagaaatctttctcgcctgacaccatgac

SEQ ID NO: 98809 - DNA, 445 bp, Glycine max
  unsure (1)..(445): unsure at all n locations
agcttattatggttggttattagaggctcaacactttttantgtctatcccgattttatagcccgccaacaaccaaaattctaagaaacaattcatatccctcgatgggtcctatatcaagaactgcaacgtaataacataacatttatataccttaaaccattaataattaaaatcatgcatctacttaattaaatttcggaagagaatggcaccactgtggcaggaatcataagtagtgtttctccaaccagataatgaaggtacacttaagtcatgtctgccaaacatttttaagcttattaaatagtgatgaaaggaactaaagctaagttatttattctcatcaaactctgtggctttaccccaaagcacaacatataaaccagcaataactacaatagcccctaccaaactgaaaatgcattaccgaaatcccacccat

SEQ ID NO: 98810 - DNA, 443 bp, Glycine max
  unsure (1)..(443): unsure at all n locations
cttactatgcagagaatatccaatgaatataccttcatctgtcttatcatcaaatnttcctaagctatcttttccattattcaatacgaaacatttacaaccaaagatatgaagatgtgagatgtatggttttctaccattgaacaactcatatggagttttctttaaaatgggtcttattaaagccctattttaaatgtagcatgcagtgtttacggcttcagcccaaaagtgttttggaagaggagtatcatttaataaagttctatcaatctcttgcaaagatctatttttcctctcaacaacaccattttgttgaggagttcttggtgcagaaaaattatgctcaatcccatgcttattacagaataattcaaattctctattttcaaactcacccccatgatcactcctaatagatataaacttgagaattttttatt

SEQ ID NO: 98811 - DNA, 476 bp, Glycine max
tagtctacctgcgagcatgcaagcttcttccgtagatccctcttataagactatgctctatactaagcagcattattgtaacaacataattaaaaccaaaacttaatccgcaaatccctcttgtaagattaagttccgatcctgcttcaatcaagttctaaggcaacaatacatttctcaatgctaaagtcacctaactatgcacacaaatggatgatcagaccaaaaacatacaaacattaatcattgaaggaagcattgaacacaaaaaacataatcaattagatattaggtatttacatcagatgttcattagaaatccccaactagggtgcttagccagccattacaaagaaacccaaacaataataatcttacaaaacctatgtttcaatgcacaaggtgctcctcttgatgcttctatggctctttccccaaataagcattgtggtgtgctttggaatctgtgccctttt

SEQ ID NO: 98812 - DNA, 457 bp, Glycine max
acttgttgagaaccataagccaaagttgtatgttcctttgatatagtaaataatttgttttgtggccttgagatgagtagtggttggagtctccatgtattgactgatgagtcgagtaccatatagaatgtctggtcttgtggacgtcaaatatcacaaactacccaccaaactcttgaaatttgtagcacccatcttttttgcttcgtcaaactttgataacttcattttgcactccaccggtattccaattggcttgcatagttttgctatgaaatgaagattcaatcttccttttgctttacctcaataccaagatagtatgacattagtccaatatcggtcatcttgaactccttgaccattgctttcttgaacttttcaaacatacttggattacttcccatgaagatcaagttatccacatatatgaacatgatcaagatatctccatctt

SEQ ID NO: 98813 - DNA, 460 bp, Glycine max
  unsure (1)..(460): unsure at all n locations
cgatccttaagcacctgctgctgcgcttaaaatatggctatcaaatattattttctgaatggaatnctataaatagggccttctatttttaatggtgtgggttaccattattggaaaacttgcatgcaaatttttatagaggcaatagatctgaatatttgggaagccataaaaatagggccctgcattccaactatggtggcaagaaatacaaccatatataaacctatggaagaatggagtaaggaggaaaaaagattagttcaatacaatttaaaagccaaaaatataattacatctgctttaagaatggatgagtactttatggtatcaaattgtagaagtgcaaaagatatgtgggataccctacaagtaacacatgaaggtacaacagatgtgaaaagatctaggataaatacattgactcatgaatatgaattatttagaatgaatccaaatg

SEQ ID NO: 98814 - DNA, 436 bp, Glycine max
  unsure (1)..(436): unsure at all n locations
tggactaganagtggaacaatgcaacacatgcgaaactttactatcatatgcttgccttaccgtttgcctacccctagtgcttacccaaattggtgtggtgttgaccatcactcaaactgactctttattcatcttccgaatcatgagatcctgaatgataacgtgcatatgcatgcatgtttatgatcggacgttcaatgtaacatattaacaggtgttatcctgctcaattgtatttatatgcttacggctccccgttgattgagccatatggctccggattcagcgagcaagatcgaaaatgtatgttcttaaggacattaatatgttaagagacacagcacatgaggctgagatgcagatcattaacccacatcttttattgctgcgacttatggtttacacaagatttcaaagcttggagattccaatgag

SEQ ID NO: 98815 - DNA, 427 bp, Glycine max
agcttgcagagttatgtctcgtatcaatttaatcgattacaaccttctcataatcgattacaaagttgtttttgagacaatgtctgatttatttaggagtctttgctttaatcgattattgggtgatataatcgattacttctctttcttaagtagttcagaagtgaacaagaatactttaatcgattactctgagtatataattgattgcactattcttgagttatttctagattttgggaagaatactttaattgattaaaaagataatataatcaattacttcattgaattaatcgattaccttatagatttaatcgattacagatagttataattgttttctttataaacaaccaacttgtgttctcttctaaacaatcttgaaaataacacaataagcctctgaatgagctaagatcacatg

SEQ ID NO: 98816 - DNA, 448 bp, Glycine max
tatctggatgatgcaaaagactcaagtcaagaatcaagattcatgctagtttcaataatcaaagtcattcaatcaagaatcaagatttaagtgaagatttaagagaagactcaagatatgcaagaacctcaagaaaagcatcaagataagtattgtcataccctaatttcgtccggcgattattatttgatgatatacaacctttgattggtcgcttcgggacacttggcgtccttggttgcacaatgaatgaagtcccgagacgtgtcagaaatcaaaaggaagcaggcttgcgcaatccgcgaaattccgtaatgtgacggaaatcgaaaagaggtgttttgcgcgatccgtaagtattcgtaacttcttcgaaagcttaaaaagagtaaatacattatccataaggatttgtaacccttgcggaggagaataagtatcgttacga

SEQ ID NO: 98817 - DNA, 426 bp, Glycine max
  unsure (1)..(426): unsure at all n locations
gcttgttatgagagaaaatagngaagataatgatgctagctatgcaacctatgtatttactaatgcctcatgattatagttngtcttctattactaactctttgcctataagtgtggaacaattattgaaggagtttggggatgtctttcccaaaaacaccccttatgggttaccttcttttgaacggatagagcaccacattgatctcattccaggagcttccctaccaaataagccaacatatataagcaatttggaagagacaaaagagatccacctcacgtggacagcttgatggaaaaaggatgggtgagagaaatcttgagtccatgtgctatgcccgtcatcttggtaaatcaaactctatctcacattctaaggtatgtggtatgtaagaaattgaaagcttgggaggaatgcctatc

SEQ ID NO: 98818 - DNA, 465 bp, Glycine max
  unsure (1)..(465): unsure at all n locations
tcacgagttcaagattctcaattcagacaagttgagcatgcgattccatgtctctgttctgcgattnttcagccacgaatgcgagtctcgatttttcatgatttgggagtcccctgcaggctcatttggcgcaagagaattgatgtccatagatagtgttttcaaggtgcatcccaacgcatgcttggtgattctatcaaggactttggacaccatccgtagctatagggtccttaagccaattcttgatgaagggttcaaagttcaaccagtgaccccagacttgcaatttctcttcatggggactccagctgaagcatggttgaatgagttgaagaatgggaagaaggaccctcggcagatttctctctttcataatctatcaaacttcattagacttgcagttttgttcaaatatggtggtgtctacctagacatagattttgtagtcttgaaacctttatc

SEQ ID NO: 98819 - DNA, 448 bp, Glycine max
  unsure (1)..(448): unsure at all n locations
agctnntatataagctgaaccatcttatctattatcacaagttgagttntatttagaaaattagagtttatctcttttatcttagtgagagtgattctcctaaattcttgagtgattcaagaacaccttggctgtatcaaaggactttcacaacctttgtgtgttgccctcgctggaaagagngattctttccttcctttcatcatcacccttgttctttcaaaccacaattccagaaaatccacctctgcccaaaattatctcgtggccataactcccattttacgcactcaaattaagtgattcttgatcctaaattgaatttcaaaacgagacctttcacctcgttttggaatcacctcatttggagccctgtagcttcagttattgccatttctatatttctgtccagccaccacttaacctacgttttaccatcccattcatc

SEQ ID NO: 98820 - DNA, 426 bp, Glycine max
gtagacctcgatcggtcatccttccaggtcgttgtcgaccgctcattttttcgatccatttcggtgaataatatctttttgccgagatgggctaatgttttcctggccgaataaatgggaaaatgccaggttcggccgaaacgaaaagtcggttgagctcgcacaaaaaaacctagccgacctacattttaaattttttatgcaaccccaaaacaagaaaactttctgtgccgtagaaaaaaaaaaaaaactttacatgacagggagcgttttgaaaaacaaaattgcgcaacgcccgctgaaaaatattatgcggtgcgttcttcacgaccgatgtcggctatggagttttcaattcactccgtgaacgaaatttgcatgatgtcggttaagaaatgttcgatcggcatcatcctgtgaaggttc

SEQ ID NO: 98821 - DNA, 337 bp, Glycine max
  unsure (1)..(337): unsure at all n locations
agcttgcatgcatncacactgcacttgggtatacccattgttggctgttgccacctcagatcgtgaatcacatagcgctcgacagtgtgcatgtgatcataccattgaacacttatccagctctgacaaaagtcatcactactcctcaccaccgagtcagctgaatattggatattgactcaaactttgtaattgcgcctccttcaaatttacgaataagcatgcatggccttaccactttctcgcacaggttgttagcatgagagaatgttaaaataagaggtgagcacgactctgcattcacaatcatgctctctcaaatttgacgcaactggac

SEQ ID NO: 98822 - DNA, 243 bp, Glycine max
ggacacaaaaactaagcttctttgttccgtgtctctcacgccgggtgttttttaatcttagttacacaggggagatgtcaatactgccgttctacttttatgaatttccacacttgtacgttaagtgaggaaaaatcgttacatgcgctctacaactttacatactcccaatatttctgtctatcatggatgactatacgtttaccccactgtgacccatatatatgaaatgtcctccgtata

SEQ ID NO: 98823 - DNA, 445 bp, Glycine max
  unsure (1)..(445): unsure at all n locations
agctntncgattcattctatgtacccgtattgtgccacattgtgtgtcgtgcatttttattctcgttttgtttactttttataccccctgttgacgtgcttaagccattttacttagatcgtttctcgcttaacttaaaaataaaataaatttccaccgaacgcttgaatcgtattatccattagcttcggttaaaaaaaattccgaccgttcggtcgtgccgtaaccacgttggaaatcataaagaggttaaaaataatataataatcaaaaaaatatctttttagtgaaataaagcggaaaatcaatcggacgttttctctntgggatttctcattcttaatcgaattgattaataactaaagtgaaattaaggctaaaatcaacttcgctagtcaagctcgtccacaaacataggcttttgaagttggtcatttcaatttct

SEQ ID NO: 98824 - DNA, 434 bp, Glycine max
  unsure (1)..(434): unsure at all n locations
ngcctcatagaggtccaggaaagacaaggcggccttagtatctagttccgccccggagtacgacagtcaccgctttaggagcgttgtacaccaacagcgtttcgaagccatcaagggatggtcgtttctccgagagcgacgcgtccagctcagggaggacgagtatactgatttccaggaggaaataaggcgccggcggtgggcaccactggttactcccatggccaagtttgatccagaaatagtccttgagttttacgccaatgcttggccaacagaggaaggcgtgcgtgacatgagatcctctgttatgggtcagtggatcccgttcgatgccgacgctatcagccagctcctgggatattcgatggtattggaagagggccaggaatgtgagtatggccataggaggaaccggtctgatgggttcgatg

SEQ ID NO: 98825 - DNA, 441 bp, Glycine max
gagcttgtagattccagaactaccccaatatcatcactggtattaacagtatcaacaaactcagaaccagtatatattgctgttaccacactctcatggtcctatgataagaaatggtgaagaacagacatcaatggaaggcatagaagctgattccgatataatatctattgcataaacagagtgaataagtctaatacaactgctcaaccaataaccaaaaattagtgtctctttcattatgtctacttccattgtaagtttaaaagatgcaaaccatcaaaatatcaagagcaaagaaggagtatgagggaagagaaacaatagtagaaactcctcaattcagtatcagtagtaggagtttaaataaagttattcataaattatcaaatctcagctcactaaatgcttatttaggttcgtttgtttatctacacaaac

SEQ ID NO: 98826 - DNA, 379 bp, Glycine max
  unsure (1)..(379): unsure at all n locations
tgaagcactgatggttgccacggacagagaagctctatggtggtttcaatggtgggaatcttggaacccaaaccattcttgggaagggttcaagatcgcaatctcccaaaggtttcaagcgtctaacctatggaatccttttcaagcattgctggtgctggaacaggaagaaacagtgcaagaattctaaggccaattcaagaagcacatcggaatggtgaaggggttggaagaaccgtttctggtggaggtgtttctcaaggggctgtaagaagagatcagtactgaggtaaggcttcatgaaccaaaaaacttgatggaatctatggtctatgcttcgttggtggaagatangaatcaactcttaggaaagttaccc

SEQ ID NO: 98827 - DNA, 443 bp, Glycine max
  unsure (1)..(443): unsure at all n locations
agctngttgcattcactaattagcatttcttatttctcaatagattgtatctaaattgtttaactatttggccatatatcaagtgttgtgacatctaatcctggataaattagttttagttgcctataaagaggcagcaaagtgagctgcctggcccaatgtggattgtgggctataacaggccaggtcaaaaatgcctagattcaattcaggcctctgaaacgaagtctaagtccggcaaagcccagttttttaggcttttggcgggttttgtaggctaacctggatcaggccatgataagattatgcttaaaggtccgtgttaatttgggctcaaaatttaaagcccaaacactacatttcattgntaacccaactcattttgccacctattatcttcccaccacacattcctcctgcttctctttgncttcattgacaac

SEQ ID NO: 98828 - DNA, 452 bp, Glycine max
  unsure (1)..(452): unsure at all n locations
tatcttggtttatctggagggtaagacactggctagagtttcatgcttatcttaaattatgtataaatggacaatttcaataatataagtataaccttgttcattcatgattgtctagaaaacatcgatgcagatccttcatacaattttgtgtcatatattttgatgttatttgttatacaaagatccctcttaagcttaatggaaaatttaactgtgcaatcatatgatcaatgttgctttaattatggtgctgaatgttgggcaattaacggctaacaagagcataagatgtgttgcgcagatgaaatgttgcattggatgaggggtcacactagaaaagataagagaaagaatttattaagagagaaattgtgagttgctnttatacaggaaatcatgcctataatagcttggacacaagaaaagaataccaatagaagccccaatta

SEQ ID NO: 98829 - DNA, 434 bp, Glycine max
  unsure (1)..(434): unsure at all n locations
agctnngattgtgagttgantttatccttagtttcactttggttattagtcaattcattcaaggaaacttccaaagaaaaacgtcggattgattttttttgaatattttattcaaagatattttgattattttattattattttgcctttttttggttttaaccgagattactgcgtgaacgatcggttggatnttattntaatagtgattaaacaagattacaatataaatgatcggttgaaattcattttattatttattaggtgagaaaacgacttaaataaatggttaaagcatgtttaaagggggtacgaaaaacaaacgaaataaaaataaaagtacgcgaaacaagtggggaccactaagggtgcatagaatgaattgaaagatttgatttcgagaacttaccggttgaagatcgaagaacgacgaa

SEQ ID NO: 98830 - DNA, 431 bp, Glycine max
  unsure (1)..(431): unsure at all n locations
tcctcggggcaatntcctgcgaaggcaaacatttggaaagttagttttaccaagaaatgctactcttaaaacaaaaatggcatacaacctcctccaataaacacaaacatcaatgtaaatttagagcaaactcatgcacatacttccttacgaacattcactcgcacaagatattcttctaactaagaaagatgcacctatgcacaatcaaggcaccttcgttacctagattatttatatgtacttccaaggtgtatttgttacctacatcacatgcacttcctttgctaaatttacatacatgcatactcaaaacattntggctaccaaaaattgcacacgtgcacattctggtatttccaatacctatgcatatacaaactttgtgatgaatcttggctatctacacaataaggtgctacatttcatgc

SEQ ID NO: 98831 - DNA, 436 bp, Glycine max
  unsure (1)..(436): unsure at all n locations
agctnggatttccttttagtatggaatctatccttcctaagatggagccaaacccagtcaccctcattaagaactagctcttttcttcctctattgcctttagttgaatacacctttgtttggttctctatttggttcttaaccctctcatgcaacttctttacaaattctgacctagattccccttctttatgtataaaagaagtgtccagtgggaggggaatgaggtctaatggtgttaggggattgaacccatacacaacctcaaaaaggggactgcttggtggttctatgaaccccccctgttgtaggcaaattctatatgaggaagatactcatcctaagacttatggttgcctttcagaagagcccttanaagggtggataaagacctattcactacctttgtttgcccatcagtttatggatgacaagt

SEQ ID NO: 98832 - DNA, 403 bp, Glycine max
tgtaaaactgcagtagaacatctggcagtgaataagaataaccaatctcatcgtccagttggtgttgtaggttgcagtgagcaatctttgattcaagctgggctagttgttcttcctcccaagaaaacaatgctctcctccagtcccagttccaattccaaactctgttttgatttcatccagaccataaagtatctttatctgttgagatactgaacaatctagcaaacatattcttcaatatcactttatctatccatttctgtttgcagaatttagttgacaaaactacctagtcttgtgcaccacaggcttaaatccgcagctcctaaccttaattaaaatccacacttaccactggtttcctgcgaattccaaaagatcatacacatgaagacattct

SEQ ID NO: 98833 - DNA, 441 bp, Glycine max
agcttgctagcttcgaaaagttagttaaaatggaactctcttgcaatcatcaagcctacagcacttcagaatagaggagtttcctttaaacttacaaataaactatttggcaatgaagtttcatgacacaggcaatcattgaggcctttagcaagcacaaatttctttgtatatctatacaatgcatattagaaaatctcaaaatatctttagtgtatcttagaaaattatccaatagtacctcaattatatcttagaataatatatcttagttcatttgttaggattagtttccatatttcttcattaacttatgagtatgacttgtttcttagtaatattaggattcttgatctagtattactataatagtgaataatgttttgtattgcaacacatcatatcatatcaagtcaatataatgtctcttttggctcactt

SEQ ID NO: 98834 - DNA, 451 bp, Glycine max
  unsure (1)..(451): unsure at all n locations
tggagcatnttgattgaattgctgcacacgtaactgagctgatatgtactcaaggtggtcgaggtggtgatggtggtagcaaaggctgaagagttgattgagcaaaggtgtttgtttctcttcaatttttgctcatttttgcattttggtgtcttgtcattgagcattttttttttcctttctgaaaaatgttaatatgggggtcgagttcacttcggttggacggttggaagttggtaagtatatcacgtgggggtgcaaattgtatagagagaaaataaagacttatttctttctatgttttcctctaatgtactaatactactctggatcaccaaatgtgtaaaacgcttatattaatatgatggtgacaagttgctactatcttaataaacattgttgttttcgtggatattgtaccttgaagtgcatcttgaccgttagtaaactc

SEQ ID NO: 98835 - DNA, 425 bp, Glycine max
  unsure (1)..(425): unsure at all n locations
agcttattttcgagtgatgatatttgtaactttgttattataattgcaacctaaactagtgacccataagaattttcactagttatacaaactacacatcagacaaggaaacaaaaaaaaaaaagaaaaaaaaagtgcctcctctaaaggaatgataattatttgttcattggaaaaaacaggcatgaaagttacacatacatatcattcattttatttttcttattatatcattcattatatataaagntaatattccatgccaaatcaacaaccaatgaaaaatcaaatggcagcttaagcttgatattatgtcgtatattctataaaaaaagttaatggtaatgataaaaaaattaattaaaaccagattgaaaatataatatatcaaaccagcagaggacaagatataaaactttacagaa

SEQ ID NO: 98836 - DNA, 418 bp, Glycine max
tgttgttgtgtgtcgcatgggacaatactatcgcttggttctgttctttgcgtaagaagcctgatgttaacatcaaagctacaattaacaggttatgtttaaaactataattcatttattgtataacaatagtaggatatgtaaacagaattttgatgttatatacgtttaagtttttttttaactagtgcactgaagacattaaccactagtttggaaggtaaatcggatcaacccgtacctcgttggattgaaacgaaagctagtctttatttaatgaataggtgtttcgaattagtgacattttgtaactttgtaagtagaacatgttaaatatatatcatattgaatttagagtcatgttcaaactagaggctgagtgtggatattatgtcatgcataggatgtggaacataat

SEQ ID NO: 98837 - DNA, 450 bp, Glycine max
  unsure (1)..(450): unsure at all n locations
agcttcccagatccgatcatggaaggacttggcaactgtcttcattangcagtaccagtacaatacggatatggctctcgatcggaaccagcttcagagtatgactaagcgagagcatgagtcaattaaggaatatgcccaaagatggagagatctcgcagcccaagtcgtaccgcccatgacggagagggagatgatcacaattacggtagatacgttacccacgttctactatgaaaagctgataggctacatgccagctaactttgcggatctcgtcttcgccggagaaagaattgaatccggactacgaaaaggcaagttcgaatatgcttccaatgtggcccccaacaacaacagaagagccccagtagtgggcgtgaggaaaaaggaaggagacgcccacgcggtcaccaccgccccgacgtggatgaaagcaccccataatat

SEQ ID NO: 98838 - DNA, 458 bp, Glycine max
  unsure (1)..(458): unsure at all n locations
cggcctatgatactcagcttacttgcgagaataccaggaaaattctttcatctgacttatcatcaaatcttcctaagttttcttttccattgtttaatacaaaacacttgcaaccaaaaacatgaagatgtgagatgtttggtttcctaccattgaacagttcatatggagttttcattaagatgggtcttatcaaagccctattcatgagataacatgcagtattaacggcttcaacccaaaaatattttggaagaggagtatcattcaataaggttctagcaatttcttccaaagatctatttttcctttcaacaactccattttgttgaggggttctagttgcaaaaaagttatgttcaatgccatgcttttcacaaaataaatcaaattctttattntcaaactcaccttcatgatcactcctaatagatataagtttgagattnttcttattt

SEQ ID NO: 98839 - DNA, 473 bp, Glycine max
  unsure (1)..(473): unsure at all n locations
ttgaatctcagcttaagccaggccagactctcgtgcatgcagaggcttcttctatataaatgccaaactcctttcacaaaatttgattttaggcttaaataggtggccttgttcgtgctcgtgcgcttaacgcacgtatggaccgcttagcgcacattagtgatttttggcttagtgaacttgtttcgcttagtggatgagctgaagcggtgcgcttgatgacctggagcggtgcacttagcgaacttgacagctcatcttcttttggattcttcctcacgcttagccactgaaggttgcgcttagcgaattctcgctaagccagcagcttggcttatcgaaagagtgaaaaacagtactttgccaaagttgtctatttaacctaaaattgagagaaattgattattaaacgcacaanaaaagtataaattatctattacctatatttaacaaaaagtacttataatattaca

SEQ ID NO: 98840 - DNA, 432 bp, Glycine max
  unsure (1)..(432): unsure at all n locations
atccttaagtcacctgcggcatgcaagcttataagtgcgggtctgggagacaaatgtcaagtggtcgcgatatgcgaagatgatgttccgagtacattggatttggtacgaccatgccctcctgatttccagttgggaaaatggcgagtggaggaacgccccggcatttacgcaacgagcataatgtaaacctttatggttttaaaagctctatagttgggcctaggctttagaagttttccttttgttaaggctntgtgtcttttgtttttgaatttataatacgaggacctttcttcatctgttcctacgtctctacccattctcattcatttgcatgttcacttttttttctgaaacgacagatccgatgaccagtccccccgaggtactaatacctgggacccgcttattaactttgagccagaaatg

SEQ ID NO: 98841 - DNA, 421 bp, Glycine max
  unsure (1)..(421): unsure at all n locations
cttgggcgagagttaaacaaatacactttttggccaatatgtttctctnttctaagaatcctataatcatcctctttactttctccttgtaaatcttggagttctcatattcctctaagcgaatctcctcaagttcttgcgattaaagctatctttccatacctacttcgtcaaatgccatgttacaactcttcacggcccaataagcattgtgctcaatcaccaccagaaggtggcatgccttaccgaaaaccaccctatatgtagacatccccaaaggtgtatggtaagtggtcctatgagtccatagagcatcttcaagtagcttgctctagtccttcttgttgggctgcactacttatgcagcacttgcttgatccctctattgaaaaccttcgcttgcccattagttacgggatga

SEQ ID NO: 98842 - DNA, 440 bp, Glycine max
  unsure (1)..(440): unsure at all n locations
agctnggaacccaaactaaggaataagatgtttcatactngnattttccatgggttccattttgagattgtagaatgaagttgttgttgctgctgaattctgcttatctggtgaaggaatgaacccaaaggaattcatattccaatactctccattcctggtcttgtgagcaacagngccaccaccctctgcacttgaaattgccacttttctccagttgcaccagatcctgagcattatatacagcatcactaagcatatcactgtggaagtaaagacaatggccacaatgattactgccacttgtgtgtttgatagctgcattttcccctgtgccgtggattcggagcacgaactcaaaggtgggccacacaagccgttattgttcaggaatgagcttagtgggaatcctganaatattgaaggaatctggccttcaa

SEQ ID NO: 98843 - DNA, 438 bp, Glycine max
  unsure (1)..(438): unsure at all n locations
ntgaagttgngttaatagtttaactcatgtaacattacttccatacatcaaataccatataaaaaatttccatcagctcaacatatatgtattaaaaaacatcatactgaattttctctacactgacacacacccacacattgtatcttataacattgtttggaattagggtagtaggagaaaatcagctcccaggcgaatgaggtaaaaggttaaaaaaagtaacagaagcataaagcaaataatagaacattaccttgccctcagaagcttgattcccaatctcctcattttcctcctgtagggttctacatttagccatcagcatcttccccatcttgctttggggagtaaagtttacagcagcaatgttatcttgcaactcctttaactttttatccttttcttcaactaaattctatgttcagatgaaaactc

SEQ ID NO: 98844 - DNA, 448 bp, Glycine max
  unsure (1)..(448): unsure at all n locations
agcttgaacaaaactgaagaacatgagagaatattcaagtgatgaagaagaatgaacaaggctagagtgaagggtgaacttgcttaccaacacttctaggcttcaaggtttctagaccaaccctcaagagcaagaagaagtttttctgctctaaactctcctagaaagatnttatcatcagggaatccaatcaaatttagaaatgagcattttatatttacaaaataatagttctaatttatcatttcagtaatcacaaacacctggcaatttcaagtgatgaagaagaatgaagaaggctagagtgaaggataaacttgcttaccaacacttctaggcttcaaggtttctagaccaaccctcaagagcaagaaaaagttttgttgctctaaactcccctagaagcaatttatcattagggtatccaatcaaatttagaaatgagcat

SEQ ID NO: 98845 - DNA, 447 bp, Glycine max
tatcagaaggggaatggtaaaataccacctcaagctgatattaagaatgtggcaaagtgtttcttttgcaagaagaagggacacatgaaaaagaattgccccgggttccagaaatggcttgagaagaaaggtaaatcaatctcattagtatgttatgaatctaatatggttagtgttaatattaacacctggtggattgattctggatctactattcatattgcaaattctttacagggtatgcaaaacctaaggaaaccagtgggaagtgagcaaagcattttatcaggcaataagctaggctcacatgtggaggccattggaacttgcattttgactttaagtagtggctttattttaaaattagaaaggactttttatgtaccaagtttttcccgaaacttgatttctatttcaaggcttgtagccgttggatattcctttaat

SEQ ID NO: 98846 - DNA, 441 bp, Glycine max
agcttttctataattggcacagtatgagattattctccaacggtagaatcaattccagcagcagaaccattcctttgctctagcactgcagctacaaaaatgacaaggaaagaagtcagctgtaaatgttcaaacaaataaataactcataaaagctaggatattgtcactcatgctccagctccatatctaaaaacggttagacaaaatggatccatgccataaaacctctatgatatggcatccaccagaacgaaagtagcaaacttgcatatttcactacatcttttcaatgacagggcttgagatattaaggggcttaagggtcattcggccatgtggatgaaaattatacagcctatatgggtgaaaataatattctttctgagtattggaatgtggagagtactaatagactgggggagttctcggtcttaactc

SEQ ID NO: 98847 - DNA, 338 bp, Glycine max
tgtggactcaagagtctaaactcgaatgaagaattgtgcttattcttggaacaatgttcagactcaccaacaaggtaattactgttctacttagatccaatataagtcgcagagcttggtcacgaaacaccatcatgtcaagaagtagctgcacacacatatgaatcattactgtacgagttcatgtgacatgaattgaatatctaaaagacgtgacataaacaagacagttctaactgacataaatgactccaacaatgatatctattgttcaaaatcataaattatgaatgaaaccaataatctatctcattaaggtgaatgatagccggagaatg

SEQ ID NO: 98848 - DNA, 440 bp, Glycine max
  unsure (1)..(440): unsure at all n locations
agcttgtgccttgcacaaaataaatgtttaatgtatatacctaaaatntataataaataaatacttttaaatataaaaattatattataattaaaattcataataaataaatatttttaacatataaattgtattttagtatgataaataatttatattgggatacaatattattgataattattaatttcttttaaaaagtattgaaattcaatttaaaactaaagatattgaaaatgatagaatgaaagatataagttgataagaatccctaaaattgctccagttaaagaaaaaatcctaaaaacactctaattgaagaatgatacctaaaaatactcttgttcaacatagctattctaatttatgtaaagagaagatataaaatcaacatgacaaaaatctaaattaagaaataagatttatataattcacattct

SEQ ID NO: 98849 - DNA, 425 bp, Glycine max
  unsure (1)..(425): unsure at all n locations
ttacgaagttntggaattatttcacgtggttacatattttatagatgatntactttctccatcaacaggtgcatactgataacccggatggactctttatgatactgtcatcatctttccaattccagggaggcaaaacctgagtttacaaatgtgctctcttgttatttctatttatacgtggattgccttaacagttcgatgccattccttcttcccatttattgtctagttatcccctttgtatatgctatatatttgtttaatcttcttgtacatcaccgtaatatatattttttaatcgctactctgttctttgtctagttatccctttcagatggcatctattacaaggtcttacatattgggccaatctctggtcaaacaagtcctgtgagatttgagctaatattgcctccacctcc

SEQ ID NO: 98850 - DNA, 300 bp, Glycine max
tctctcgccggatccttaagcacgagctcagcttattatcattttttttataaaaagtcagcatttttagctcttcttaaccactatgaaatacctgaacttgattctcccttggtgagcatagattgtccactccaaacttagaacactgcattattataaggcatttgctctcctcttccctaaagacaaagatagcattgccttttctttcggcttaggattcaatatgatcaacaaaatttttatgtttaggatcaacatgggtgacacagggtaataaattttaagtgtactatt

SEQ ID NO: 98851 - DNA, 451 bp, Glycine max
  unsure (1)..(451): unsure at all n locations
ntcatcaagtggtatcagagcacaagagctntaagtatgtgctccttaaacctccattaattttcagctttaccttctcttccattgttgtttcttcatttttctccatgtatctcctcacttgtcttgtgctaaatgttgttaacatgattctttataatttccactgattaatcttgctatagaagctagattcgattttctatggttcaaatttcttgttcatgttcttaaaccatgagttgtgttgagtttaggttcctttgagttttgtcttgctattatttgtggctgaaacctaaaccataaaattattacaaaaacattaaagtaaaagaaaacctcaaaaatctagattgacttgtcacctattgtagtttgtcatagaagtcatgtcttgtcgtgagacttagcacattagattccttatgttgtgccgattttattttct

SEQ ID NO: 98852 - DNA, 440 bp, Glycine max
  unsure (1)..(440): unsure at all n locations
agctntgcttgtaatgtaaggctatagcctctttgttggggagttactgctgaaactcttgatgtaatactcttactatctatttaatgtttgttttttgtgttctttgtttctatctatacttattttacatgcttgtggcttgatcacccatttgtatgtgcagttaggctttttagtattggaaaatactttaaaaccttataaattgatagagcaagctagaaatctgtatatctaggaatgaagtgcagtgatctattatattttacatgtaggcttaatacaactcttttagaacaagtgtgttgaggaatcaagaacaaaggctaagagagttaggctcattcatgtgaggaatcatggtttgagtaatttctttgtgtaagaacactacgataacgttaaatagagaacaatacattttatacaacaagaga

SEQ ID NO: 98853 - DNA, 438 bp, Glycine max
  unsure (1)..(438): unsure at all n locations
tcggcaccccaatattgttcagtttcttggagctgttactgacagganaccccttatgctaattactgagtatctaagaggggtatgcaaataaaacataattccttcagatgtacacctagtttttggtttaacaaacttatgctttaaattgaatttctgtttcattcatatatagggtgatcttcatcagtacctcatagaaaaaggcgcgcttagtcctgcaactgctatcagcttttccatggatattgtcaggtatggtgtcttaccatatttatcttttcttatttttatcttctataaggagattattaagaatagaagagaaatacataagaggaggatatgagaaaattatcttacctatgaacaattaagcacattaaaaacaaattagcccacaagtgctgctctattatttttacatttgttata

SEQ ID NO: 98854 - DNA, 435 bp, Glycine max
agcttccttttagtgcgtcacgtttaaaaccaagttcaatggtggtacgagcctttgatggtactcggcgggaagtgatgggggaaatcgacattcccattgagataggcccccacacttgcaatgtggtgtttcaagtgaaggacataaatcctgcctatagctgtctcttggggagaccttggatttatgcgctgggagttgtcccttcgacgcttcaccaaaaattgaagttcgcggtgggtggacttttagtgatagtgttgggtgaagaggatatgttggtgagctacccctcctccgcaccatacgtagaagcggcagaagaatcattggaaacagctttccaatccttctaggtggtgagctgcgcctctgtggaaccaagttctgtgctaccttctctctccaacgcggccataatggtggcacggg

SEQ ID NO: 98855 - DNA, 428 bp, Glycine max
  unsure (1)..(428): unsure at all n locations
ngctgacttccanatataagtattttaactgcacactatgttactcttctctaccaagcaggcttttacacttcaccatttcattgaaatatttccaaccaataaaaacatgaagtttcacttgtcttgtcaaaacttgaacaattgcacaatcaaatcaaatttggcttctcttattgaagtaatagtcttttatacagtaagaagtaatagaatgacaagctatattattcatttaactataatatttttttatcacattgggcaacattcaatgcagaaaaaagacaaaaaagatagttctattcacaatagaaaccatttacatggtgttgttgtaagttacagaatcatatgaaacaattaaaaatatcttgaagaattatttacgattgattatttcttgaatagttgaatatactagatac

SEQ ID NO: 98856 - DNA, 449 bp, Glycine max
  unsure (1)..(449): unsure at all n locations
agcttggcatcctananaaaccaatatttattgttaccttgcctcattacaagccaataaaagtccttttgattcaatttgtgcatttctgactttatgacatgagatgaagttcaaagattggacctcttgctagtcgttattgataaaaagcttaaacacttgtgcttgagtgaaacaaaagctgtgagatttcggntaagcatctttccatgaatctgtctcctgtctagctttatttagttgtgttgcttgctaacatgttcttttctctgaaaaactgcatgccttgtgaaaagcaattgataaaggcatttttgtttcattttttatcatgcgactaatattttgggagttacacacctttgcacataatcactgcatgttttgtcacctttttatttacctttgtttagttagtttacacacgttgtcatactacacacaaa

SEQ ID NO: 98857 - DNA, 471 bp, Glycine max
  unsure (1)..(471): unsure at all n locations
ntatctgaagaactcgccaagcgcacttactgcgctaagcgagttcatcctttgaggatgaacattcatcctcttgctgaactacctgtggctaagcgaggctgaatcgctaagcccaggtaacttaaccattttttgtgtgatagtcgcgcactaagctgagcattcttgagccaagcacaattggttgtggcatccgctgagctaagcgagcttcactcgataagctcccataacttagtgaaatttttgctcagtttagtgtcgctaagcgcaacttattcttggctaagcttaaatccatgcggctaaccttaggcttagtggactcttctccagctaagccaattttgaaaacactagaccatagcaatttccgctaagcaacattcctgtgtcgctaagcccagtgtcatntttgtgaaggcgaattatgtctcgctaagcggctagtggtgttttcagttttat

SEQ ID NO: 98858 - DNA, 454 bp, Glycine max
agcttatcagaatttcagatccaatgttttttaattaactgtgagaccagagttcagggccaagatgttatcattaaaaaccatgagaaaccaatccccttaaccgaaattgaaatggcatacaaaacattatcctggttggcgtaaatgaagggaagcatcaaaaatagtttcagcctcaaaaagcattatgccaaacaattatgatcttggggaccatcacttgtgtcaagcagtaaaatgctgtagacattcaaacgctgcaaaaacaggtccaacattttaagcatacaaaacttccatagtagctggtttacccacatactcgtccctaataatattttgatcagttaaaatgtaatgagtctagaaagaatatttataacttgaatgaatgtatggctattgcttatttcttcaatccaaaatatgattgaagtaaaaaggaaaaaaa

SEQ ID NO: 98859 - DNA, 463 bp, Glycine max
  unsure (1)..(463): unsure at all n locations
aagatattggagatgaagagagatggttggattatgtggagaggatgaagaattnttgaaacgtgagaacaagaggcttcatcgtgatttattgagaatagccccagtgtacattgggggttcagattctgccagtgaaaattcatttcagggatgggaatctgttgctgggcttaaagatgtcatccgttgtatgaaagaagttgttattttacctctcctatatcctgacctctttgataatttagggcttacacctccaagaggtgttcttttgcatgggcatcctggaacggggaaaactttggtggtccgggcattgataggtgcatgttcccgtggtgataagcggattgcatattttgcccgtaaaggtgcagattgcttgtggaagtatgttggtgatgctgagcgtcaactaagactattatttcaggttgctgagaaatgtcaaccttctata

SEQ ID NO: 98860 - DNA, 447 bp, Glycine max
  unsure (1)..(447): unsure at all n locations
agctttgaaagaagaaaatgccagtctccgatcagtagtgagccggatcaggagtgagtatgagcagctacgttctgagaatgctgccctcaaggtgattttgaaatgttgatatgttttgatttttgtcttttntgctaattggcaagcactgttgcccataccaagttatacctactatcaataacacttatatttgaaccctggtttggagagaaggaaaaggcctaaatggactaatatgaccattctagttttcaaattccgctcctactaccataaaaggttcattcaaagactgagccagctatctgattacaggatagacttggggagatacctggtgtcacgacacctgtgaaggaggatcttatgtctggccagaatgatcagcatgtgagttatgacactcaacaaagtggtcagacagatgttgtgcatggtgtt

SEQ ID NO: 98861 - DNA, 435 bp, Glycine max
  unsure (1)..(435): unsure at all n locations
ggatcaaaacaattatctaatcattccaatccactcaaatcatacaatttctcattcaaatcattctcaaacacttatttcatgcaaaacaatccactgcaaatcattttcaatcaattcactgttcaaacaagctttttggtacaagcaaacaactcaaagtgctgaaatttaaataactgaaaagtaaaaaatgaattaaaatgttgaacataaatcataaaataactgaaaataaactaaaatgttcaagatgcacaaatttaaatgtcctgctcctgtgcatgctcattaaggtccaacacctgagcaactggtgaatcctaagagataggctgctctaactcagatgctatggcatcatcangtatgggtgctggggatggctctgggatttggtctgtaaaagtctcctnctgagccatgtgtacacct

SEQ ID NO: 98862 - DNA, 452 bp, Glycine max
  unsure (1)..(452): unsure at all n locations
agcnttggaatcacaaggtttctggttaagttgaagtaaaaaaagcatgtggaatacattttaagcaagaaggcacattaggtattgacttggggatgatattgtatcacaagaatagttatcaaccccaaattgtggcagagttgcagaccccaaagtcatagctttgtcactttgcacatagaatcagcagagggtaaacatataactttatagaacataatccaattcagagactggtaactcgcaacatacattccataaaactttaatccaactcccaaataatgactggaaaacaatgaatattccagagcaacctaataaaaaattaatgaaatacatatcctaacttataatttattacatcacaactataaactatacttttatttgcttcatgtatctctgtacaatatgtatccactaccaacactctttgatactacact

SEQ ID NO: 98863 - DNA, 462 bp, Glycine max
  unsure (1)..(462): unsure at all n locations
tgttgtatatataagctatccctgagcctctgagtgatttgttttatatatctgctcattagaattcacaaaggatgtaacaatctcactgaagtgttgttacaaatattaaatatcaatgtttgttgtagtaataaaatccttgagaatttggtctttaactgagcacaatggcattgtacgattcatgtaaccgatctcacctggtgcctagtgggataagttttttgctgttgtttgttgttgtagcatagtagtgttgtccagtaatttctaatctgttgtatcttcacatccatgcaatttgtgctcatatgcagattttaatattcgatataataagaatttatgttccctgaactgccaataaaacttattntaatgtcaaagtccataacatatggatngtggatattgtctattcattttctcatgccactttgtcctcgtccatgacttgat

SEQ ID NO: 98864 - DNA, 464 bp, Glycine max
  unsure (1)..(464): unsure at all n locations
ttaagtcacctgcngcatgcaagcttgctgaagcaaaatgcgttcggtctgataaattttgaagatttatgacatatatagatgaatctaagttttttttttcaagttgagaaaaaataatgaaaatcagatttaaatatattttttaaattaggttaatactaggtactttttaataggattgaaacaccgatttagacaaaaaataattaataaaaagattgtgatattgaagatgctatatggaggcaattttttaagatactaaataatcaatgtagtgtattactataataatgtatataaagttatgtattataatatgagaaatattatcaatatattttttaacatgctttttgactaaaatttattaaaaataatataattntattggttcactttaatgtaatgagtcttgtaataatttataattttaataaatccaatcacaaaggatgtgt

SEQ ID NO: 98865 - DNA, 447 bp, Glycine max
  unsure (1)..(447): unsure at all n locations
tcacggagctataccagagtttataggggagcttccagtgttggaagttgtgcaactgtgggagaataacttcacaggtagcattccagagggtttgggcaaaaacgggagactcaaccttgttgatctttcttctaacaagttaactgggactttgcctacttatctctgttctgggaatactcttcagactctgataactcttgggaattttctttttggtccaattcctgagtcgcttggtagttgtgaatcccttacacggattataatgggagagaactttttgaatggttccattccgagagggcttnttggacttcccaaactaacacaggttgagcttcaggataattatctctctggagagtttcctgaggtgggttctgttgctgttaatcttggtcagattactctctctaacaaccagctttctggggttctacc

SEQ ID NO: 98866 - DNA, 441 bp, Glycine max
  unsure (1)..(441): unsure at all n locations
agctnttcaattgaacacatctatatccttgcatcattttccatcattntctctccaaaaaccaaaacttggaccttcattctctccattntgcacgagacactcaaggagggagagaccaccattttcatattcttccaaaatccatcttagtgttttgaggcttcttctctcaaagccttggtaagaagcccttanacctcttttttcttcttatttctttcttatttgcgtgcaaagttcttacttgaggttccaaaatttgtttttcatccattgaagcttgagacttcaatatctgagcatttttccttgaccatttcgtggaagcttcattcaaggtaagtggagtcttttcacttctcaaaccctaaccttattgtctttggaagctaggctttaatacatgttatnttgatgtttaaaattttgtatctgctt

SEQ ID NO: 98867 - DNA, 279 bp, Glycine max
  unsure (1)..(279): unsure at all n locations
tcttgcgtagccgctcttggtgctcagaanatccttattcaaatccctcttattactagnctatttgaattctttagttcctgaatgtacaaccttcaaattgttgctcgttcccctctttgagaatgaggaggatcttcataggacttcatccagttgatgtttgtcggcaatnncatcattcaccacccttcccttgtgtgccgtctcacgctcgttgtatgtaaactcatttgtgtgccttcctccccttatgttgtgtcttatcacaactttttt

SEQ ID NO: 98868 - DNA, 442 bp, Glycine max
  unsure (1)..(442): unsure at all n locations
agctttatcaagtctctcccatattgtgctttaccaacacttgcaccaatgcccttaccactcaactcattacctacagcaccggatgcaagaaaaatgttaaaacaaacaaaaatgagcataacaaaacttaagaaatgtaaaaaattccaaaaaattcaccccgtaaagaacacttcaagaaggggtaattctttggataacttctaattaatatatgttagtaatgatatgtgtagactcatatattgaacaaaaacatcttaccataatgcactaatgagataagaaaattgtggaatctatgacaagtttgctgctatcactcagctggttcatcatgaaatgatactacagcttgtggccttgtagtataactgcagtaaaggataaaagaannattactaacagattttctgaagctacattattgcaaaacctg

SEQ ID NO: 98869 - DNA, 460 bp, Glycine max
ctagacttcatgtggctcatgttgctccccctatctcttttttgttgggtaatagggtctattattttgaactcaatccaacccatatcatatgattaaatttattattatatatgaattaattattaaatataaaacacattaaattttagctcacatcacttattaaattattaaattaaatcactcatgtttttctttcttttttaagttattggttttatttatgtctagattttgtttatattttctcatgctaatacaatactttatttctatctaaaataaaaaaagatgttattagcattaaaattattaattttattagtcaaatattatcacaattggtcacttttgattgcatttagtcattatatagttacaaaactttatgtagaaaacaactaattattcttaaaatggtaaattgttaaatatttaaacctgattaacctgacac

SEQ ID NO: 98870 - DNA, 443 bp, Glycine max
  unsure (1)..(443): unsure at all n locations
agctnttactagaagagttccacctatcttctactggtggtcttatgggagtgcaaaagactctacatcgcctgcaagacaacttcacatggccttcgatcaacactattaaaaaatacactttcaacatcggttatttagggcattctacatcgattttaaaaccgatgttgaaagcaccgatgttgaatgtattgttgttaacatcgtgttttaaaaaccgatgttaacataaaaacgataacaacggttttgcaaataaccgatgttataaacaaagaagtacaacaaaataagtgtatgcatgagggacgttgacatctattttctgtaaaaaccgatgttaatataatatattaacatcggctgccaagacaactgatgtgaatatacgcaaaagtttatcgtgggttgcgtgacatggtcaatcaccaaatacgata

SEQ ID NO: 98871 - DNA, 457 bp, Glycine max
  unsure (1)..(457): unsure at all n locations
taagcagtgatcaaacttgctctttggaactggctttgtttacatatcagcaggattgtgcagagtgctgatcttatgaactttgattcttctttctgaccaaatgaagtgatatctaacatctatatgcttggttctatcatgatgaacttgatccttggccaagcatatagcactaaggctatcacagtagatgttagcatattcttgattaattctgagatcatttatcagacatctcagccaaattccttcctttgcagcttcagtaagagccatatattcagcctcagtagttgagagagcaatagaaagttgaagtgtttccttccaactcaccaagaagccaccaagggtgtaagcataccctgttagagaccttctcttgactagatcaacaacanaatctgcaccaaaatagctagtgaggcagcaatctgagtgagatccatagatc

SEQ ID NO: 98872 - DNA, 448 bp, Glycine max
agcttgaacaattctcaccttacatgtctgtttttgtaagatcgaacaacccgtaatcccaaatcttaagatggtgtgtaagcatatcctagatccattgttgggccacatgatgctaatctatatatagaaatcaagtgcaaaatcttttggcttgctaccctgcattataatgttatatggaatcaacataatctttttattatactatgtcaataaataataagcctactattgcaataagtaatttataccctatccaatggtatgtactccattctcatttgcaaaattattttatttgcttggcaagttctttatactgcatgtggtagaccatgaaatatcgatctgtgcaaaataagaagtaacttggaaaaaaagatacaaagttgacttagacataaaatattttgtgataacttcagaccaaacaatcaaatatttt

SEQ ID NO: 98873 - DNA, 323 bp, Glycine max
cttgcttctacacctctttccccatttgttccttatttgattggttgagcctcctctggggctgcctgactggtctataatctacttccatcattatattgtgcatgtagtaagcaaggctgatccctttaagatctgatatgtaccacccaatttcttccatgtgtctcttgaggacctctactaacatgttatctatcttctactgttagctcactgctgatcaccataagctaggtctcattctcctccaacaacacatactttaggtgggtgggtaggatctttatctctaacttggctttatggaatggactcccgct

SEQ ID NO: 98874 - DNA, 435 bp, Glycine max
agcttcagccggatcggtaagcgacagcttattctcgtggaagcgctaggtattaccgtcaagcttaattacttacggacatgactagagtacatgaatttatactccaaccatggcacctaatatgaattacttgcggcaatgtgagcactaattgagtccttatcagcttagcgcatgctcgctctatacttacgatgcatcattttagctaagtcggcctagatcccagcttatccagaattgtatctgttctgatctagagacctcgctaaacggacttgtactcacgctaagccaagcctatgtttaaaataaaactgatttttgaatgtgaaacgattgcttagcgcgtgggttcgctaagcgagcctaggtgataaaccaaacatctctctaactcgcttagtgtagcgatccgcctagcgagaatgt

SEQ ID NO: 98875 - DNA, 414 bp, Glycine max
  unsure (1)..(414): unsure at all n locations
ttattnacatgataatgatcaaggcgtccattctggaatctgatccaaggnttatgatggaaatctaacaggaggaaagagaaaagggttgggaagtagctcctgacctgttggcacatctgctgacacagttcgaacaagtttttaagaacttcaagggcttacaccacatcgagatagagattatgctatcactatccaagagggaaccaaaatccctacttaaggccctacatatacccacattatcctaaagatgaaaatgaaaagatggttagacatatatgaattgtctaaattattaaaactagtactagttcatatgctagtccaattatattaatttagatagaatatgggaggtatagataatgtgtagaccatatgacactctaaaaaattattgtgccatat

SEQ ID NO: 98876 - DNA, 355 bp, Glycine max
agcttgatgggtaccgacaagcaaggactgttatgtatatttatttgacgtgactaggaatccgtggagaatctcactgttagtttagtgagaggattatataatcttccattctaacaccatattgggtgattaatgaacctacctgtgaagatatctgcctgtccttgagcgtgctggtcttagttgaatgacaatgtcggacaacctttgggaagccattaattaccgtgacgaccgaaattgtgtgggctgtattaatgctgtgcgagaagagaagacagagatgtgattgtacgaactagagtaggtgttgctaaagcttgatatagtgcgaaatgtgatggtggagatg

SEQ ID NO: 98877 - DNA, 286 bp, Glycine max
tcactcatggaccgcccatcccctgtggcccaccatcatatgagcacacgtactcacacacagtgaagaaaatgtgttctgtcagcacccggaacacatcaatggtctcaagcgttcacagcatccactcgaacatcatttcaacaactcatgctatcacagacttcatagcagaccagaaccgcatactgtgctaacgaattagccgagacacaaatgttgtcacttcagacctcaaatccatactacgatcaatacgttaccgtaggatccactctaatattct

SEQ ID NO: 98878 - DNA, 442 bp, Glycine max
agcttcccttgttcaatttcgaacatctctttatcttatgcgcctgaatcggacatccgagttaaaagttaggaccatttgaatttctcgactgcttctgttgttgaatttcgagtctctcgatatattatgcgcctgaatctgacctccgtgtgaaaagtgatgaccatttgaatttctcgacaacttccgttgttcaatttcgagcgtgtcgatatattatgcgcctgaatcggacttccaagtgaaaagttatgatcatttgaattgctcaagagcttccgttgttcaatttcgaacgtctcgatatattatgcgcctgaatcggacatcctagtgaaaagttatgatcatttgaatttctcgacagcttccattgttgaatttcgaacgtctcgatatattatgcgcctgaatcggacatccgagtgaaaagtatgac

SEQ ID NO: 98879 - DNA, 459 bp, Glycine max
  unsure (1)..(459): unsure at all n locations
nttgagcaattcanatggtcataacttttcactcggatgtcctattcatgcgcataatatatcgagacgctcgaaattgaacaacggaagctctcgagaaattcaaatggtcattacttttcactcggaggtccgattcaggcgcataatatatcgagacgcttgaaattgaacaacggaagctctcgtgaaattcaaatggtcataacttttaactcggaggtccgattcaggcgcataatatatcgagacgctcgaaattgaacaacggaagctctcgagaaattcaaatgatcattacttttctcacggaggtcagatttaggcgcataatatatcgagacgctcgatattgaacaacggaagctcttgaaaaattcaaatggtcctaacttttcactcggatgtccgattcaggcgcataatatatcaagacgcttgatatngaacaacggaagc

SEQ ID NO: 98880 - DNA, 424 bp, Glycine max
  unsure (1)..(424): unsure at all n locations
agcnttcttcttatttctcagcaccctatctataattcagtctccgaaactgactaaacacactaaagtctttattaaatatgtgtaagatgttagatatcttgaatttatttagactaaattatgttcatgttccaaaattctattaagaaaattatccgaaacaattcaaaatatccagtcttctggacagagctaacagtgtgtacaacacaaggggccagcaaaattttcattttcatgttagctatatgtgaatatccgttgccgcccattttctcattttttatcagaattatttaaatgaagtattgaaccacccgctgtctgggtttataaataaggtttgaatatattttgtttctggtcattaatacaattctttaatgtatcataaattagtgaattatattctttttctaat

SEQ ID NO: 98881 - DNA, 462 bp, Glycine max
  unsure (1)..(462): unsure at all n locations
tatcagctaatgtttncaaacaaagccttaatataggactagattctctttctgcacggtgtgacaacatgtttggtgagaggaaaaagatgtgctcgaggtcctcctcccaatataagggaaacgaacttttttgggacaatctttgatctcgataatgaaaaaatttgtaaggcctgtaactaagaatgtagtgattctaagaaataatttgatataaggacaaaaatggaattgtactactcggagtcaataagccttcatattcaatgactgacggagtagatatcttattttagttcattaaagtcacctcatctatatcaagagagagagaaagtctatctctactaattatacaatgaaagattaatggtagatccattacatattatcaataagataagatataatcttatcttacttataatatctaaatacggacataagcctatggagata

SEQ ID NO: 98882 - DNA, 438 bp, Glycine max
  unsure (1)..(438): unsure at all n locations
agcttctncacttcatgtagttgttcaatatggtcctaaaggtcttgttcatccatttttatgagatcaaagacagaatcattaaagatgacaagaagtgcctttagtctttggatgaaaacattgtccactttgtctttgacaaagcatacacaagcatcatcaaagtgatatgtcgagactgaacgcaacacctgaatattgtctttatggtctgtaatgtcttggccattgaaactggacgacaaagctttcctagtgtcaccccaaactatttgattccagaatgtcttggcatcaaatacatcaggtctcttcactagcttcttctacttgtcgaanagagtatttcagttgtgtggatagttgacaagctccacttttttgtgtctgcttgccatttcttggataaagtacaagttgaagtctttctttcta

SEQ ID NO: 98883 - DNA, 418 bp, Glycine max
  unsure (1)..(418): unsure at all n locations
atactacgcttcgaagaagtgatgaggacaagccctaaaggcagatcttttatgagcccgggtagtcgaagagaggttcaagtccatagccatcaaagtctgaaaagagtatgatgaactaagggatgtcaatatggccaccgctgaagccttggaacgagaaaccaagaaggccagaaaggaagaacatgaccaaagcaaagttttgaggggctttatagggcagcaatagtgagctcaaactccgaagaggtgaaaggaatcatcacgggtcaaaggcatgatctggaaggacgagctaaaggcttgccttatgtcgaaaagaaattngtcccaacagctaagcgagactgaagggaatatgtgggccatcgtcgatgagtgcaaagagaagcttaatctatcagcgactcacgag

SEQ ID NO: 98884 - DNA, 358 bp, Glycine max
  unsure (1)..(358): unsure at all n locations
gtcggatatgctccaaggaaacacgtcgatgttgcttaaaaacactcgctctactttttattgtactatatcttccacttatcttggcacatagtgtgcattgaattgaatcccttgcgatctggaaaaactcaatatcctttgtacgagttggtcgccaatcttcgcaatttgaacgaagattaaagatcttccagagtggggaccacagggtggatactcaaagatcggtgcccttcctttgtctatctcttttaccatggtggacatctcaatcatgccactttttacatatcattcacaacgncaacttggttatgcctcataatgacaatctccctaatggatgaaagaaact

SEQ ID NO: 98885 - DNA, 464 bp, Glycine max
  unsure (1)..(464): unsure at all n locations
tatcttctagtaggtgaatagtcgtgtgttggtatcactatataaatatgggctaacatgttatcatgcacaacagtcattacaatttacaattattattcagagtcaagggcaagtacttagattgcacacttggtataaatgaatactgattcttatttctttgtatatgccaacaagctacaatgttgttaaccaaatgagcctcctaatatccaaagctgagacaagctgaactcattaagctgctgaatattgtacccttcaatacagtttttacctgatgaccactttgagggattgttatgtgcttcttcctaccataccttttgactgaacttgctctcagaacatcctcttccttggttctcctaacgagtattgtgtccttatggcatctaccattcgcatgccacaactgaatgatntgggtatgtgtgtttgctttaagctctttatataac

SEQ ID NO: 98886 - DNA, 409 bp, Glycine max
  unsure (1)..(409): unsure at all n locations
ccatgcgttgntacacggaccacatgttacatctgccatacttgactccacatagtgctagtagatagaccagaagaagtgcccattactgtagaccatatacattgacctgctatatcccatagggattcacatctcgcccaaagctttgttattatgcaaattctcacttgtatttggactagaaaaaccacgccatgatttggaattcctattgactccaatggagtatgatgggcggngcaacgtttgtcgatacaacatggagcaagtgcacctaatagaggttataaaagatcaaggagaccatgcagacatgtcgtccgaggagttcgaggagtaccatatacttctaaggtagttggagtatatgtttgaggaggagagtaacgattcttctgagaacacg

SEQ ID NO: 98887 - DNA, 462 bp, Glycine max
  unsure (1)..(462): unsure at all n locations
taaaaactcaagcatgaatngagaggagatgcctatggattcgcactattatttttgagaatctgcacaaattaagactctaactgcagaacatcagtattatgctcgaggtttgtatgtgacctcagtttcacgatcttattcctctacgtggatgattattgctattaactgtcttctaacttaactcttactaatttagttctatccaaatctgtcggctacccttcaagtcagtttctactctcgctatagaatccatatcaacaggcttcagttcatgtatgttcatgctgtctcttggttcagagctcattctcttttgcttgatgatacccggcgcctctctcatctgtgtatatcttttctcacgcgcttgttgattcaatcggttttctcattgatttggttacgaatttgatttcattggcagaaacttctgctgcgacaaatttaattact

SEQ ID NO: 98888 - DNA, 441 bp, Glycine max
agcttgtaaagaaatgaggaaatatcattatcacgcttgtacacacatcgttcgcgtgtatgatatccactccacaaggtttgaagtagaggagagcttcaaccctataacgcaacgtggcggacaaaagtgggcagttaacttgaatggtcatcattgtcaatgcggaaggtattctgcgcttcactatccatgttcacacattattgcagcttgtggttacgtgagcatgaactactaccaatatatagatgttgtttacacaaatgagcacatcttaaaagcttactccgcacaatggtggcctcttgggaatgaagcggctattcctccttctgatgatgcatggacaattatccctgacccaactacaattcgtgcgaaaggtcggccaaaatcaacatggataaggaatgagatggattgggtcgaaccatctga

SEQ ID NO: 98889 - DNA, 425 bp, Glycine max
agaaactcaagcgtagcgcgcagcgcgaaaactcgccctggtgcattattttatgaatagtcaaatgtctcacgcttataaaaggagtggaaagcagaaggaaatgacacatcgagtctcagagttctctagtgaagaaattcacagtctcagcctttctcttatgggaaaccctctttctttaagacaattctccctttcttgctattagacatccagtgcgctgctttcatccatattagccctgaagagaaaagtctcacatagctatgagaggctgaaccccttttattgagagactggatgaccagctcttgacatgtgagacttaaatattatctatctaatgcaattcagacgctatgaatcttcggtatgacctgctgttatgatggcatgaacatgcatataagatggcaatgcat

SEQ ID NO: 98890 - DNA, 393 bp, Glycine max
gctttgagcaaattcaaacgactatattcttttgaatcggatgtctgattgtgtcccataggatatctagatgctcgtaattgaaaaccgaagctctgagaaaaatcttactacaataacttttaactcggatgtcctatcgagccctgtaatatgtcgagacactcgtaattgtaaaacggaaactctaagaaaagtggaacgactataacttttggctcggatgttcgatatagtcccgctaaatatcgagacgctcgcaattgaaaacagaagctctgaactgattcggacgacaataactttggactcggatgtcctattgagtcttcgtaggaaatcgataccctcatatatgaaaacggaagatctatgaactttcttgcgattata

SEQ ID NO: 98891 - DNA, 442 bp, Glycine max
acactataaaactcagctttgtttcaatttcgagcgtctcgatatattatgattacttattctaacgtttgagtacaaaattattgtcgtttgaattatctcagtgctttcgttttaaattacgagattctttcggacatccaagtaaaaagttattgtcgtttcaatttgctaaaaccttctgtattcaattatgagcgtctcgatatattacgggattcattcggtcatctgagtaaaaagttattgtcgtttgattttgctcagagcttatgttttgaatttcgagcatgtcgatatactactcggatgtctcatgactcaatctgacatccgagttaaatgttattgttgtttgaatttgctaccaccattccgtgtcaaatacgtgcgtctcgatctactacggcgcacaaatgaacatcccgagtaaaagttattg

SEQ ID NO: 98892 - DNA, 458 bp, Glycine max
  unsure (1)..(458): unsure at all n locations
ggatcctctgagtcacctgcggctgcagctaaggaagctgattgagagtagactttcttttctgaaccccatgaatatgttgcaagtagagatactcaagaggctaagatgtgatgatgacaatcttaaagccagagatgccttgcttatcaccataaatggtattgctgctgggatgaagaacactggttaagttctcaacaactacatacaattttcacttatttatgttaacatgtttcccttccactttcccatgttattttctgaccgtttctaggatttaggtatattctaatgaaagataaatgtagccaaaagtcttagtcaaatgttttgttttatacatagacaagatgaatatagtttcaaaacatgatgaatatagtctgactaaatgactattgactaactattcttattttcttaatttttaaatntgagtcgataaatgtgaa

SEQ ID NO: 98893 - DNA, 445 bp, Glycine max
tttgtggtgccactgctgcaccacaaaactttgactcttataaaaaaatccaaaatgaatgaaatttaaaactgtgtaatgaaaagagagaaaggggtgtgtggatagaaacctaacctggagaggctaatggaaggaggagggttgaagcaacagagggggtgcatatgtttatggtgccacataggatgaatgaatataggggaactatacagtgcgcttgccgccattggtgctagcatctatccggctcttcacggtatggattatacttatatgaattaactcaaatcaattcacatacttggattgaataatttttatgtttgaatctaaatgaaacggaaataataaaatctgttgaattctgaattggattaagaatcttatatttagatctgttgaatcactaatccaacctcatttatctattattattatatta

SEQ ID NO: 98894 - DNA, 424 bp, Glycine max
  unsure (1)..(424): unsure at all n locations
agcttatcctatctttngcaaatctttcctggaactccctcagagtatatgttccgtttgatttagtcacttgaccattttggagtgacgctaatggagccgtttgacgtttaatcaatccattgaaattctagggtttgtcccccccttttttttgtttaaacacatcgacgggtaagaacttttgatctgcccctatgttcacttgaggctcatgcacgatgcccctcattgccccagtgtaaggctttgaggtaccaatcgttgtctttcgtcatgaccttgtagatgggaacatattgggtgggaacttctaatctgaccctaggttcacttgaggttcatgcacgatgcccctcattgccctagtgtagggctttgaggtatcaatcgttgtcttggtttcacaaccttgtagcaagga

SEQ ID NO: 98895 - DNA, 444 bp, Glycine max
cttgtggagcttctatggaggctggatctttgagcttattgaggtcctttagtggtgactttccaccatggagatgcagcggaagacaaaggagaagaggttagaggcggcgccatccactattgaataagccatggaagaaggagcttcaccaccaagatgagccttggataagaagcttggagaggatgcttcaatggaggaaaagaaaaagggagagaaagagagaggggggagcacaaaattgaaggaagaaaaagggagagaagttgaactttgagttgtgtctcacaagactctcattcatcaaagttacaacaagtgttacacatgtttctatttatagactaggtagcttccttgagaagctctcttgagaaaactttcttgagaaacttctttgagaataattccttgagaagctagagcttagctacccacacc

SEQ ID NO: 98896 - DNA, 427 bp, Glycine max
  unsure (1)..(427): unsure at all n locations
agcttatatctagccaagattatacagagtgtgttacaagagaatctaacggtttctaattatgtgggccatcaaatctatcatgtgttgacagtaattgattaacccgcgaacttcctcgggggctgtacgtacttcagcgatggctttcgctttggctaatagtcgcgggaggtcttgactttcattncaggtcaaagcgaacctatccatccacatagtcgcttcttgatgcaatgcatcaatcaccctccctcttgcttccttttcggtgtacacttgagcgaaatcctctactatcttttgttcatgggtcacagactgggttaactctatcttgcactgccctatgatagctagcatgctttgctccatggcttccaagtggtgagccaaactcctcttggatatgacgcaagcaactaac

SEQ ID NO: 98897 - DNA, 362 bp, Glycine max
tatacacatgagtctgcttataggtaaggaagagtttatcccaattgagaatagaatgaacatgcgtaggaatccttatgtgatcaaattgggatctattttgggatgtttattgtattgaaattcctcctatatgactatatgataccgtctgggggatattgcctcccgtggatcgagaaacatttttgtataatatatatgtgtatttgatatgaataaagtgatatattagtatatttggatcattaaattgtgatcgaaattgtgtatatgtgataaattttataagtgatgaattatgggataacatgctactgtgaaattatatattgtattggaattgagtttagtgcacagtt

SEQ ID NO: 98898 - DNA, 426 bp, Glycine max
agcttgaagaaatagtataggtttatgtgtttaacgcgcaaaatgctcttcaacaattatatgatgagtatgtggctctaaacaatgaacagtcatcctcccatgaaaggaatgttggtgagataaactcctcaagcgtccatttgccttatacattttcaatgattgggtttgatcaattaatgatccctatgcatgaaaaggaaatattcccaccaatgaaatcagaactatatgcttatctcgagaagaaaaatacttatattcctaataatggaaactcctcttttattgccttggagtggtggaggaataacaacttcatatatacgattttatcaaagaaggcaagagatatactagctgctcccatatcaatacgtgcatcagaatctacattatttgctggaggcacagtaatcgatg

SEQ ID NO: 98899 - DNA, 407 bp, Glycine max
  unsure (1)..(407): unsure at all n locations
tgagagctagtcatggactcaaaaanatgtgtctcatattccaatcggttccacactgaagagctgtagaaaaccataacctctccttctaaaactcgcgatgtgaaacacactttctgctagaaacttatgggaattgatggtttcatatataaacttcatcctaaataattgtatgtacttttcttttaatatgccttatttttccatataaataccttattttcatatatatcaatttcaaaatattatcttatctgacaaaactaaatatgaactggctctattttatttaacaaacatgattttatcattattaaataataataatattttatctgacattactaattatattcatatctttaatttttatggggacttgagactatcagtaccatacatca

SEQ ID NO: 98900 - DNA, 330 bp, Glycine max
agcttaatgactctccgcgttgaccatctgttgcttatcagcttatcggccaccatagcggcccttaaattcatatttactgatccaaatgagggcatggtgctcttgacccctcaaaaacaggctctatatatgtgtgctacttgctacggcaaccaattatacgcatagagacttaccgctctaagaatataagtttttgcgcattgcacattttaagatcctgaaaatactaagattttcgcacctatctccacgtctacaaaaccgataatgattacaactcttgcctttggcttaaagacaaatgcatgaagaaaggatgggaga

SEQ ID NO: 98901 - DNA, 322 bp, Glycine max
gcacgagactagtttgtgtatacatcccgtgtgatgcacaacagtggctctagagcatctcccttgatgcatgagatcaaaacactgcattaataagtgtgcaagatgcttgagtgagaacagcgaacatttacgatcgtgctatgctcaacaactcgtctaaacactttgtctccgctagactcagggttcaacgctcttagctccagggataatcttccatgacttcatcatctatgcttggcactcatctccagatcagggagcattgcgcagaatgtggcatacgctacgctaatgtcgatactggtgctaagaccaa

SEQ ID NO: 98902 - DNA, 448 bp, Glycine max
  unsure (1)..(448): unsure at all n locations
agcttccattttgacacaaatatcctagctattatatatacaaaacattcttcatgtgggtgcttaactaaatatatatgtatttctgacaaatcacacattagtatgaaaatgaatgatagtggtacagaagttccagtacaatagttgaaatttaataagaggtttgcaaattcataactcaaaaatagagaaaacaaaaatcttatcaaaaggtaggggcaatctcattcagtcattcgagtcagtccaaaatgaatattaattttcacctttaactaatacacagaacataacaggaataatagcatatactagtatcaattaatttactttcaagttcaacaagttttgaatcaaaataatgcatgcaaatatcccctggattggtaccttatttnttntacttagtggttgttaatatgtgtaaacgtagagtttcaataac

SEQ ID NO: 98903 - DNA, 472 bp, Glycine max
  unsure (1)..(472): unsure at all n locations
actaagcttatataagaaagtgaagtcaaaaacttttaatgttggttatttattttggaaggttatcctgcccatggatagtaaggatcgagccttgggcaaatggtccccaaattgggaaggaccgtttaaaataattcagatctattcgaatggtgcttatgaattagaggaattaacccctcagaaacgtactttgagtataaatggtaaatatttgaaaaaatataaaccaacattgctcgaagttaaaataagcatagaatagacagaagtaatggaaacataaaaatggcgataacagtaaaattgccacgaaagggcatgtgtcaatattacatcaagagtagaatcgaaatacagaattcgaaataaanaatcataagttctactaatgcatgactaagtcctcatatagtttcttcagggtggccatctctttgctcaagacctggtcagcactctccatagc

SEQ ID NO: 98904 - DNA, 438 bp, Glycine max
  unsure (1)..(438): unsure at all n locations
agcttatgcacggaanatgtaattatgaaattgacatgcccgaagaaacaccatctcctagttaatcatgcattaggtaccatgttcaattattttgttnttaagtgaaacgggtttatgatcccaacatggttggctcgtggtgcctaacacatgaaactaagaatgtagtgtgaagtttcacgctctcccctcttttttgttttgttttgtagaggaaaacgcaaggatgagcaatcatgaaaacaaatggtatgcaattttgcagaccaaaaagtttgttgaacgcatatgcatgatgatgccatgaccatgcaaaatgtgaggctggaatatgataacggacaaatgcaggatatgttcattatgatgttatgaagagatgcttatgcgatgcatgatatgaatgcattntacggacacgagagcccggaaaat

SEQ ID NO: 98905 - DNA, 444 bp, Glycine max
  unsure (1)..(444): unsure at all n locations
aaatctcagctataacttaataactgtccttcataactagatctgatctttatatttttttgntatcaatcatgtcatcgaatatttgtaagtttatattcttttcgatcaagcatcaaacataacattaatattgtgctctttagatcaaaccaacttcaataaatcttctaaattcccatacttaaaaatttttacttgtaccactaacacaaactggaagcataagttaacctaccatcgtcaaccataacaaaattctacagtaaacaaaaatgtttactaaaatgggacgaaatgacttcaatttgctgatgggtatccattcttgtaaatgcaacctatcgaaatggaatgtagaggacaataagttcatcttgctattgggatcgttgagaaaattttatagcatataaagttgttagaacaaatgatgacagtttg

SEQ ID NO: 98906 - DNA, 448 bp, Glycine max
agcttaagaggaatgcctaccccacgctgtatttgtttataatatggttagaaactctactacttcttattctccttttgaggtagtttatggttctagttcattgttccctcttaatttgttacccttgcctaacacttttgttattatggatagggatggacttattaaagccaattttattaagagtttgcttgtgaaggtgaaagcacaaattgagaaaaaggttgaacaatatattagatattctaataaggggagaaagaaaatggttatcaaaccgggtgattgagtttggattcacttgatgaagaatatgtttacttcccaaaggaaatatatactgtaagaaagggtatatggtcattttcaagttttagagcgcatcaactataatgcatataaaattgatctatcactagactatggtgtgagcaacactattaat

SEQ ID NO: 98907 - DNA, 436 bp, Glycine max
  unsure (1)..(436): unsure at all n locations
agcttgactaggcgagttgatnttattcttattttcaccttagttattagtcaattcggttaagaatgagaaatcccaaagagaaaatgtccggttgattttccactttattttactaaaaggtatatttttgttattatattattattttatctctttttgatttccaatgtggttacggcacgaccgaacggtcggaatttattttaaagtgtacggatcatacaattcaaacgttcggtggaaatttattttatttttaagttaagcgagaaatgactttagtaaaatggcttaagcacgtcaacagggggtataaaaagtaaatgaaatgagaataaaaatacacgaaacacaatgtggaccaccacgggtacatagaatgactcgaaaagcttggttcaaggtacttacccgttgaagatcgaagaacgat

SEQ ID NO: 98908 - DNA, 444 bp, Glycine max
  unsure (1)..(444): unsure at all n locations
cgaccanagaaactcaagcttagctacagaattacaatagacctcctcaactctcattagcaataatctgccacagcagaacaattatgacctgtccagcaacagatacaaccctggatggaggaatcaccctaacctcagatggtccatccctcagcaacaacaacaacaacctgctccttccttccaaaatgttgctgtgccaagcagaccatacattcctccaccaatccaacaacagcaacaaccccagaaacagccaacagttgaggcccttacacaaactttcctcgaagaacttgtgaggcaaatgactatacagaacatgcacgttcagtatgagaccagagcctccattcagagcttaaccaatcagatgggacaattggctacccaattgaatcaacaacagtcccagaatcttgaaagctgctgctcaagctg

SEQ ID NO: 98909 - DNA, 420 bp, Glycine max
  unsure (1)..(420): unsure at all n locations
agctnttattattatatcaacaaagttcttttataataagacaaaagacaatcatgtgtagtctaattatacaagttttccaagtgacacttcaattctaaatgaaaaacatcattagcacgtatagaacggcgcctaagttttggctttttgcccttaagaaaatataattacaagctttattaaatctaacaaagttgaaaattaaaaaaaaaaaatgtgaagcctaattaatttagaacctaacaagcaacaggtatcagaagaaacagataattccaaacacagcattcaacaaaatgatagccacaaaattgataaccattggagtttccagtggtgacaggcgataaaccatcgataacatactataaaagacaaaaanagtttattaacgacgaaaatactatgatccatcta

SEQ ID NO: 98910 - DNA, 399 bp, Glycine max
cggacaacaacagaccagtagacagggcgtatgtgtatatttctttagtttacaccaagctattactgtggcttacattgcttgacaaatgcgaatatggctataaacaagtataatgagcctgagaaaatatacttgtttaacctgtaaaatgcatcaataatctaatatagttcaatcaatgcactaaggaaaacaactcatattgttatataagcaagacatttagtggatagcactacacatgaaacttttcgctgcctggctcatgtataaagagaggatagaggtttcctatttcaaaaagattgggaatgaatcaaatcccccctcccctccctccctaatagctaaaatatgaaaactcctgagcccctaaaatacacatgagttgagttg

SEQ ID NO: 98911 - DNA, 334 bp, Glycine max
  unsure (1)..(334): unsure at all n locations
aggcaagcgaagcgggnggtattcctttatctattcccttatngcagccaacacaagaacggaataggtagtattgtagccgatgctctttctcagcgtcatgcgttactttctatgcttgaaacaaacatgatttgtcttgaatgtatggaatacatgtctgagaatgatgaaagcttttggagatcatttttacctattgtgaaaaattgtcagaagaaggtgtctttagacatgaaggcttacttttgaacgaaaacaaattgtgtgtgcctaaatgttctactaaaaatatgcttgtttgagaaacacatgatggatgtttaatggggca

SEQ ID NO: 98912 - DNA, 441 bp, Glycine max
  unsure (1)..(441): unsure at all n locations
tgtgtagagctagttgttntcacctacaacttgtatccttagatatgggtcaatcacaagatgggtcaaagtgccttctccatgtttccgcgtcattgagacttcattatgattcctacaacaaataatcaaaaattttgtaaaatgacaataggttaacaaaagtaatcaatcttaaaatatgaaagcacatacaatgaagttcttcgccctatgagagagaaattcagcatctatgtctttaaataaatattctaaagttgtgtgcttaatagtagaaatataagaataaacgtaaaatagaatcaattggatttcattngatcaatttacagtaaggcatactacactaaaacctttgcatcttgtggcaatgaatatgatcacttaacttctaaaattatccctagctaacacctctcattcatatatctgttatta

SEQ ID NO: 98913 - DNA, 437 bp, Glycine max
agcttgataacccttcttgaatagtatcaagatgtctttgcgggggcgtatcaagacatgcccggtctggattctgacattatgcagcataagttgcctttgaatcctgggtcttctccggttaagcaaaagttacgaagaatgaaacccgatatgtctttaaaaattaaagaagaagtaaggaagcagtttgatgcaggattcttagctgtggcacggtacccggagtgggtggccaacattgtcccagtcccgaaaaaggacggcaaggttcgaatgtgtgtagactaccgggacttgaaccgagccagtcctaaagacaattttcccctgccacacattgatatattcgtagataatatagccaaattcacccttttctcatttatggatggtttctcggggtataatcaaataaagatggcacccgaagatgt

SEQ ID NO: 98914 - DNA, 438 bp, Glycine max
  unsure (1)..(438): unsure at all n locations
agctnggagactgttgagttgatttatctttcaacttttatgaatgatatatattcttctctaggtatgtgaccccagaggtcgctggtatctgtgcctaaagatcttttactaataacaggcaaggcacttacccatgctactactggcctatgtcctgttgcatcatatagagcttctcctgattattttctgagtcctaatggtggaggaaggtaccaaataatttttttaacaaaagtcttgtatttgtgatgactgataagatttccaaggaacttatttaggtacttttttgagctttgtgactataggacttgtcttgcatatagactcatgccacagggccatgctatatttgattgttccccaattgaagcagctggccatgttattccccaaagttatgtatgaatatctgtaagccaacttatggat

SEQ ID NO: 98915 - DNA, 403 bp, Glycine max
  unsure (1)..(403): unsure at all n locations
cttgaatgctctattcaacggagttgacaagaatatctttttatngatcaacacatgtacagcggccaaagatgcatgggaaatcctgaaaatcactcatgaaggaacctccaaagtgaagatgtccagattgcaactcttggctacaaaattcgaaaatctgaagatgaaggaggaagaatgtattcatgactttcacatgaacattcttgaaattgccaatgcttgcactgccttgggagaaagaataactgatgaaaagctggtgagaaagatcctcagatccttgcctaagagatttgacatgaaagtcactgcaatagaggaggcccaagacatntgcaacatgagagtagatgaactcagtggttcccttcaaacctttgagctaggactctcggat

SEQ ID NO: 98916 - DNA, 438 bp, Glycine max
  unsure (1)..(438): unsure at all n locations
agcttnggtcgtcgagggagcaaaccatgttatattgattcttatgcatcttctanggggtttgttgtgtctctcaagagacaacaactgtgtttgtccagccaagggaaatgtcaatcactttttaattcatatcaaacgttattttaagtcaagaatgtaaaacttgccgttagatacttctataatgatgattctagtcttggtgcatcaggattatgggtgcttttgttaccttcattaaatatgcaagggattgaacctgcgacaaacattatgttataatgccacaattatcttagttacattgcaatattattcggtcaccaattataatataatataatcgtttttcatggaagtatgtattatttgtaaagactgatgtgatgcgtggttgattagtacatgaacgtctaattgatcttaattatcaac

SEQ ID NO: 98917 - DNA, 467 bp, Glycine max
cttacctttggaaagagtagatgaagagaagggtgagattctattgttgaattgggtttcaagaaggcggctatggctttggttatggctctctgtatctttgaatattttttgtttgttttattctcgtcgacataacacagtacaacagtggtattttcgtacgagactactagtaacaaaatttgacagctgaactcttatgtttgatttatcattcatgaagagaaaaaaaaatagttgctaaaatttattttattttacttaaatgaataaattttcaaagtttgaaatttacttattttaaagatacaaaattgaaattaatggattaatctattattttttattagttttcttcccagaattatttttaaaattattaatttaacagttatcaagcatgatattaagaagataaaatgcaaatactatataattttgtaataactgagatgacttcaaaa

SEQ ID NO: 98918 - DNA, 446 bp, Glycine max
agcttgttaatctacatgggttcttgaattcttggtatttatctctcttgattatatctttctttaatccgttatgagcttcatgatttatacttttggtcccaagggaagatgttttgtgatttatcttctcaattggagcaagggacgggtttggttggctttcatttttgtttcgagaatctacatgtgggtttggataactatgtgacacttctttcactattttctcgataatttttacatggaagatatatctcggtgttgaactgtttgcatttttttgtttgatgcacgttgagtctctgagtcttcatatggtatttctgtctcagttgaagattaaataataaataattcttgatgcagcgaattataactgccaaaagcattggataaataatatattcaatggagttcctctgtattatattatttctctggac

SEQ ID NO: 98919 - DNA, 466 bp, Glycine max
cttcattctacacctgaaaagaggatgagatagttgcataaaagagaaagcttcctaacaaaaaatttcatgcaggtggaccttcttctagtaattctgacttaccgcagcctcctatccctcttccattcccacctagagtaattccaaacaaaaagatggaagaagccgaaaatgagatcttggagaccttctggaaagtagaggtgaacatacctctactagatgccatcaagcagattccaagatatgccaagtttctaaaggagctgtgcacccacaaaaggaagctcaagggcaatgaaaggattagcatgggcagaaatgtgtcagcattgataggtaaatctgttcctcacattcttgagaaatgtaaggacccaggtactttttgtataccttgcattattggaaacagtaaatttgaaaatgccatgctagatttaggagcatcagttagtgtcat

SEQ ID NO: 98920 - DNA, 466 bp, Glycine max
tcgtcccggatccttgagtcacctgcggcatgcaagctggctcataaattatcagaagatagactgcaaataaaagaatttgtattctgaagattcaattaagtcctacatcagcaatagtaagaaaaatcaaaaaccttttcaggactctgatggcttcaatagcacctaaaacaccaacaactccatcatattttcccgagtaaggtatagcatcaatgtgcgaacctgttgcaactgcagcaagctcaggttcaaggccatccctgcataaagcaagcaaagataaagtggtgagtgtagttagtaaattacaggcatactgcaactaagatagaatttttttttttttttttgaaaggccaattttagttgttaatatgttagggggagggattcgaacccaccacctcttccttcccccttctcctttcaaccaccaagccaaccttatgatgtggacatg

SEQ ID NO: 98921 - DNA, 464 bp, Glycine max
  unsure (1)..(464): unsure at all n locations
ggctcctttgttgttggaaactntctctcttttcacacatgttatcattttccttattaactataaagttattctctcaaacgtgtagtaatgctgttaacaaaccactcttgctagttaggagttagtatttagtaccctctccttcttccaccctttaaccagacacagacacagctcttagtttcttcttcttgttccctagactgtggctgattcaagatttattagcttttttaatgcacatataatcttgtcccttttactttgaatttaataagtaatcattcaacgatattttgaatatcaaaaaaatcataaaccattttatcaagtctaagcacaggtttgctatatatataacttaacgatgatcttgagttggactaatggtcttgagttcaagtcttgacttaagaagaagttgtttcacgtggtaattctatcagcttatacatgattac

SEQ ID NO: 98922 - DNA, 482 bp, Glycine max
  unsure (1)..(482): unsure at all n locations
ctcgtcccggatccttaagtcacctgcggcatgcaagcttatagagaagaacaatgatgagacattgagaaaccgctatgggccagctaaaatgccttacactntgctctatccttctagtgaggagggattgactttcaaaggaattcccaacagtatctctatctaagggctctatggttgctgaagtactgtccctgcctttaaataaatgtgaaatagaaagaatttgatttcttcatcagttgtgtatgtttaagttatgtatttggagtggctgaatgtacttgtattgccatatatcttattttgggataactgaaggaccctaattagtaaaaccaactctattcagtgactgataaaaaaacaacaaccaagccttttcccactaggtggagttcactacatgaatcagacaatgccataatgttccattgtatctctaaatctttttaattcttttgttatggttttcttac

SEQ ID NO: 98923 - DNA, 448 bp, Glycine max
  unsure (1)..(448): unsure at all n locations
tacgtgacctatgaatctcagcttanacttgcacagaggagttgagcaggtaaaaaagattcgtcttcaaactcttagaggtgactttgagcgtttgtttatggaggagtccgagtcaatttctgattatttttctcgagtattggccgtagtcaatcaacttaaaagaaatggtgaagatgatgatgaggtgaaggtcatggaaaaaatacttcgaactttaaatccaagttttgacttcattgttaccaacattgaagaaaacaaggatttaaagaccatgactattgagcaactcatgggttccttacaagcatacgaagaaaaacataagagaaaaattaaacaaaaggaggctacggagcaactactacaactcaacgtaaaggaagcaaactatgcaaattacaagagccaaaaaggacgaggtcgcggccaatatcgtgga

SEQ ID NO: 98924 - DNA, 439 bp, Glycine max
  unsure (1)..(439): unsure at all n locations
tcatatgtttatgtgttctggcctgcttaaaataaaatattgctattaagtttgacaagtaatcaataacaatcaaatattttgctcaaccttgcaaatatggtaccctcataatgggatgtattcgcctttttggatccactggagacagggtgaggctatcttcttcaatttaatatagaatagttatatttaaacacccactatttttaaacatctattctatattcatcatttctctcttctttacgtcacatcatatttattagctattatttttctttttttatttctttcattacatatataatataaaggtgtgagtcactcgatatatattgtgttcgatcagattcatgattcaacttaatcaaatttgaacgattagtttaagttgatttnttagggggaaaaataaaatttaactcatactaatttg

SEQ ID NO: 98925 - DNA, 430 bp, Glycine max
agcttagctttggtgtccattggtgttggtgtatgtttacaagaggtcatgttggctttatctatgatctcctcagcatgttttcgttgggaaagaaataaatcacctgcatgtctagttactgcttttgggccctctcagctaatttttgggcatgtcattacccttgcaatagataaataatgaatgatcgatttgttatgatagaaaccaatggtggatacaaaatcagcaaactgttgatactaggcacgaggggcctgtttcagaccataaagagatttttttaagagacacacataatctggatgaattggatccctgaatcccataggctgattcatataaacgatctcatgtagctgaccgtgcagaaattgcatttgaacatccaactgatgaaatggtcgtgatttagatagagcaatgc

SEQ ID NO: 98926 - DNA, 469 bp, Glycine max
taaatctaagctttgagataaacttttcactggtaagtcgatattatatattggcaatcgattacaaaaaagagaaaactctggtaacttggaaaattttgagaaaaacttttcttgtaaaacaaaaatgtgctatgtttggtttttgaaaaattcttttcaatacttcccttgtgaaatcatcttctcttgaatcttgattcttcttgatgtcatttcttgaatcttgaaattattcttgatttaatcttgatcttgaacttgttgactcaatcttgaaatcattctcttggtctttttgtcatcatcaaaactacttgaatcaacttgattaatcatcatgaagcttgcttctacagcccttcgccagaagacgagccttatacctctccacattacctttggaatcccgcttggtcttatatatccatttgtaaccaattgggttcacaccttctggtaatgggac

SEQ ID NO: 98927 - DNA, 201 bp, Glycine max
  unsure (1)..(201): unsure at all n locations
agcttctanccaaatggacttaccttgaattatttcctttgatagcccctttgagcctatgttcctctttctgtgttttgaagctcattacaagccttaagtgaanaaccgtgatatcaccttacccttaaggaattttggagctttggaattgttttgggaataagtgtgtggggggggggggggctcttcctctaactt

SEQ ID NO: 98928 - DNA, 457 bp, Glycine max
  unsure (1)..(457): unsure at all n locations
tcatcattactgttctatggtcgtgctgaagagaggtatattgaagagttacacaatctttctaaatacaaatccactaactntattagtccaactcgctctttatatggttctaaccgagagcaaggtccctatagctagctagttaacttaacattttccataatggtaaaaagtgaaatctagaaaaccgaatctaattctcttttgtgttcttttggttgattcccacacgagccataaaaactttacaccatcaacattcctcatgtggttagggacaacacaatgctcgatcacaaaatgaataagaaaccaaaacccctcgagactcacttgcattttttttttttctcttttccccctttatcttggaacagaagatgtctaactcttgacttgaatagactacgatagagaatagtaatgggtactttcatgatctcatactatatat

SEQ ID NO: 98929 - DNA, 416 bp, Glycine max
  unsure (1)..(416): unsure at all n locations
tagcttgaaggcaaactggatgcattggttaacttggtaacccacctggccttgaatcagaaatctgtacctatcgcaagggtttgtgggttgtgctcctctgctgaccaccatacagacctttgcccttccatgcagcaacctgtagcaattaagcagcctgaagcttatgctgcaaatatttacaatagacctcctcaacctcagcagcaaaatcaaccacagcagagcaattatgacctctccagcaacagatacaaccctagatggaggaatcaccctaacctcagatggtccagccctcaacaacaacaacagcagcctgctccttccttccaaaatgttgctggcccaagcagaccatacattcgtncaccaatccaacaacagcaacaaccccagaaacagccaatagt

SEQ ID NO: 98930 - DNA, 404 bp, Glycine max
tggttcgaggtacttacccgttgaagatcgaagattgattaagaacgaatgaagaacgtcgaagaacggttcatacctttgcgagattcctcacggaaaacgttacggaaacgtttcggaagcgcctcggcttagattttcttcacggaaataatttttccaagcaaattcgaaagagagagaagtgcctaaggggctggaccccttccttcttcatttcctcccctatttatagcaaaataggggaggtggttgccgtccagctcgcccaggcgagctcagctcgcccaggcgagcagggttgcttcctccagaagcaaccgccttctggaggaatgttctggagggcccaaatgggcctgggtgctatatgcacccccattttactaagtacacccccctct

SEQ ID NO: 98931 - DNA, 393 bp, Glycine max
  unsure (1)..(393): unsure at all n locations
tgcagctgntggtagacaccacgatcgagccctctatactttctcctgtgcccaccctttataggcgtgcgtctactactcaaccatagatgcaaatttaacaatatggacgagagtattcgtgaatgacatgatctaaaacatttttccttgactactctgatattgcacgaagataaatcgcgataatacccagatcatatcttcgtagaggggatcatacactatcttgttactgatccaagaattagtagagagtttcagaataatagtcaaatgtatacgccttgtcgcggttgagcaccgaataatatacatgatacgataagacgcacgagagtatactgcgtcgcctaccccacttgaattacatacagatcttggctaatgacc

SEQ ID NO: 98932 - DNA, 418 bp, Glycine max
  unsure (1)..(418): unsure at all n locations
tgcaagcttgcgaaaaaaatanagtgaatattcataggaagtgaagaattagtgtcacgttggatagtccacgtggcactaaaattgccaacaatgcacctcactaatggtgttactttaaaatttaacggaatgactattttgtaaaacttatgcaaatataaggactattttttacatttcaaaaggatagggattaatgtgcaaaatggctacaaagacagggactaaaatgcctatttactcgtttaatatatgcactgtcgtctttaatgcttcagcccacaaggatttacgaagattggagttgctatgcatactctgtaccatgtccaataatgttcaattccttcttttngccacaccattctgatttggtgaaccagacatagtgtactatgcaataatcccatgttct

SEQ ID NO: 98933 - DNA, 397 bp, Glycine max
  unsure (1)..(397): unsure at all n locations
tatgaggngcggcaccgatgacaaagagctgtcgattggtgcaaagtttgacgtaaacccactgcccaacctcacagtccacatctcgccatttcatatctgcatgtttcttcatagcggcctggactttgaggaggcgacgtttgagagatgcgtgaatagcatcccttgtggacagcaaagaattcacagcttcgttgttagatgaccccaagatgtaatggggaatagaagggggaggtttggcatagatgacttcgtaaggagtcaccccagtgctggaatgaagtgaagtgttatatgaacactcagcaagagctaaaaatttctaccaatctgaaggttgtgagtggacgaatgagcgaagatactgctctaacacacgattcatcacctc

SEQ ID NO: 98934 - DNA, 427 bp, Glycine max
  unsure (1)..(427): unsure at all n locations
agctngcctaattaacctganattgaaagttaattagtggtaaacacacacaatggagggactaagtatttattacctatacttaacagataatattngtaacactacaaaataaccataaattggaagagtttgatataatttacacaagttttatacacaaaagttagtgcgattcaccgactaacacttgtaacgaattatctgagttgagaaagtaatgggtttgctaccactaccaccagcgaaccccgtagcagcagtcctctggttgttggggcaattaccatatttctttggaggggtcgggtatgattttcaccgattttgggatccattcttcatgttcgtcattaggcccatattccaataatacgtcaccctaactcatgagtcttcatcccgaatcctacacatgttcacgata

SEQ ID NO: 98935 - DNA, 374 bp, Glycine max
  unsure (1)..(374): unsure at all n locations
ntcataagtgaagtcatgtgcagccatctccctaagaattctctcaaaaggtggagaaagagccatgctctcaatatgataattagcagccgaatgctcaaaatcataatgttcacaatcactatcaacataatgctcagaatgcacacaatgctcataatgatcaggatgcacactatgcctaaataatctatgaaaggctctatctattataggatcaaagggttagtaatcaccaggatttcccctagtcatgcactatatgtagcaattcaagtatttctcaaacaaacaccaaagggggtaaaactacaactatactcacacgatatccaaatgagctgaaaatttgtgagcaacaccttgaaatcatg

SEQ ID NO: 98936 - DNA, 432 bp, Glycine max
agcctttggaatggttttattataggttttgtgatatggattgagtttgagtatggttggtggcttataagattcttaaggctgaaggcactgcttaaagccattgctaggagatctaaagagaatagttcatctaggagaagggaggtcataagaaaaataaatttaaaaacatatgaatgaacacttgaattctgaagctaagtatagcctcttgaaagcacaaccataaacttccaaaaatgacaagattgagaaagtataggcttcttttgaacaaccaaataatgcactgagttgcccaagttatataaaatagcgatagttttatgttaaatgcaaattatttttaatgttcgcatgtcactccctattcgctatgtatctaaactatgattttaaattgaagttatggtcatggcacagtgagtc

SEQ ID NO: 98937 - DNA, 433 bp, Glycine max
  unsure (1)..(433): unsure at all n locations
tggactgtgctatagagaanaattaatgatctttgtgatcaaaaagccatttctagggcagatttgggtgttgaagagttaaatcttgattctgcgagatcttaggagtaaatccagttcgaacaagtctaaatatgatgctatggactggtgtgaggcgagagtttgcttcgaatttacctcattctaaattttacttttcatacctaggaacaccctttgaattgatatgtattggacacctacatcctgtgtttgggtgttttgaagcttgactttgggttagacatggttgatacatgatttgggacttgtacgaattgatttgggcctgattggatgatacgatgtgtgattttctatatctgctcttatgcacaatattgctgacgacatacgtgcaacaagaatttggcatttgtcataataatgc

SEQ ID NO: 98938 - DNA, 429 bp, Glycine max
  unsure (1)..(429): unsure at all n locations
agcttggaggggttgatggngacctgatgctgattataacgaggataanggctacgtaggagtacgtgagctcagttgaaggtgggaaactggggatggtgggttcatgtttgatttgtggatgagggagagttgatttgcaccatcgcctgatcgccacctagtaccacatatgacgggtaccccataatcctacaagcttgaagtgagaaagcgtggaagagtcagtcttcctacttttgtatgttgaccacagagtggtacctggagatatgtcgcgggggtcaggagaccttggggacgtcaggtggggtgctattgcccaaaaccaagcttgaccaatcccaacccaacccgagcatagtcagtcagtgagaacctgtgacgtacctaaacaggcgagcttctggcagtcaacccataaaagaa

SEQ ID NO: 98939 - DNA, 453 bp, Glycine max
  unsure (1)..(453): unsure at all n locations
tctaaactntatacaagaatgaagctctgataccacttgttatataagtggcctcagatatcttaagaaggggggggttgaattaagatattccaaactatttcccctaattaaaaatctattttactttttaaccaagatatgaattcccttaatgacaatcttcttaaatattaattcaaatgaaacaatttgaatatgaatataaagcaataataaataaaggagattaagggaagagaaaatgcaaactcagttttatactggttcggccacacccgtgtgcctacgtccagtccccaagaaacccgcttgagagttccactatcttgtaaattctttttacaagttctaaacacacaaggacaatccttcctttgtgtttagaattcctttacaacaagagactcacagtctcttaatcccttagagaatgagaagaagaagaagaac

SEQ ID NO: 98940 - DNA, 447 bp, Glycine max
  unsure (1)..(447): unsure at all n locations
agcttattaaccacttcaataactttcttgatgagataatatttctcaagaagtaatataagtattagaaattgaagctaattcagttttcattaagcgaacactatatggatcgatgtttccctgctccacagttgcaactctgagagcctgcatgcattgcactgatggatgcagagaggaaccaaaattgcaggtaattcttagcatcctatacgtggaatctgaaaccaaaccatgggtccaccaatattcaaatgtgccaatataatcatgataatcatcagtaacaacattaccaacctgatatcaatcagagaaaaatcaaatccattatagatatatcgtagctaacaaaaaaactaggatgcaaaaattatagatatatcgtgcttattttcttggggatatacttatatgtatacatccagtacattntccttaact

SEQ ID NO: 98941 - DNA, 472 bp, Glycine max
  unsure (1)..(472): unsure at all n locations
cttcctaacaaannatttcatgcaggtggaccttcttctagttatttcgacttacagtagcctcctatccctcttccattcccacctagagcaattccaaacaaaaaaatggaagaagcagaaaaggagatcttagagaccttcaaaaaagtagaggtgaacatacctctactagatgccatcaagcagattcgaagatatgccgagtttctaaaggagttgtgcacccacaaaaggaagctcaaaggcaatgaaaggattagcatgggcaaaaatgtatcagcattgataggtaaatctgttcctcacattcctgagaaatgtaaggacccaggtactttctgtataccttgcattattaggaacaataaatntgagaatgccatgctagatctangagcatcagttagtgtcatgcctctgtccattntcaattctttatctcttggaccttngcaatctacagatatgg

SEQ ID NO: 98942 - DNA, 457 bp, Glycine max
  unsure (1)..(457): unsure at all n locations
atccttaagcacctgagctgcagcttgagcaattcaaagacaaagcttnttctatgatgtnttgatgagncccgtaatatatcgagccgctcgaaattgaatgttgaagctttgagcaaattcaaacaacaataactttttactcggatgtctgattgagtcccgtaatatatcgagacgctcgaaattgaatgttgaacctctgagccaattcaaacgacaacaactttttactcggatgtctgattgagtcccgcaatatatcgagacgctcggaattgaatgttgaagctttgagcaaattcaaacgacaataactttttactcggatgtctgattgagtcccgtaatatatcgagacgctcaaaattgaatgttgaagctctgatccaattcaaacgacaataactttttactcggataattgattgagtcccgtaatataactagacgctcg

SEQ ID NO: 98943 - DNA, 457 bp, Glycine max
ccttcatactcagcttcacattcaatttcgagcgtctagatatattacaggactcattcaaacatccgagtaaaatgttactgtcgtttaaatttgcttggctctccagcattaaatttcgagcgtctcgatatattacgggactatatcagacatccgagtaaaaagttgttgtcgtttgaatttgcttagagattcaacattcatcttcgagtgtctcgttatattacggggctcaattagacatccgagtaaaaagttattgtcgttggaattggctttgagcttcaatattcaattacgagggtctcgatatattacgggactcaatcagacatccgagtaaaaagttattgtcgtttgaattatctcatagcttcatcattcaattttgagcgtctctatatattacaggactcaataagatatccgactagaaagttattggtcgttaaat

SEQ ID NO: 98944 - DNA, 401 bp, Glycine max
  unsure (1)..(401): unsure at all n locations
agctntgagggtgcgtagcccaccatcttttcatagtagagtatcgataatgggtctaccatcacgatcatcgtctccctttccatcattgggggtaccacctgggccgccagatccctccaccttttgggcgtgttctttgaaagatccgtccccctttttgcaaatgttctgtagttgcatcctatccggaaccatatcaaaattgtactgatactgcctaacaaaggcaaccattatgtccttctaagaatggactcgggaagattccaagttagtgtaccaggtaacagctaccccagtaagactttcttggaaggaatgtattagcaattcctcatcttttgcgtattcccccatcttctgacaatacatctttagatggttcttgggacaagtag

SEQ ID NO: 98945 - DNA, 472 bp, Glycine max
tcagcttctgataatgaatcaagtatgaatcaagtcagtttgatgatgtttaaaagcccaaaagaatgatttcaagattgaatcaacaagttcaagatcaagattaatttcaagattcattagaagaaataaagaagattccagattcaagagaaattgatttcaagattcaagagaagttgatttctagattcacgagaagaaatcaagaagacttcacaagggaagtattgaaaaggatttttcaaaaatcaaacatagcacagtttttgttttacaaaagagttttttcaaaattttctaagttaccagagtatttactctctggtaatcgattaccagtttcctgtaatcgattaccagtgataaaatctgatttcacaaacttttaactgaattggccacgttccacatgatttttataatggtggaatcgaatacaatacattggtaatcgagtaccagtatatct

SEQ ID NO: 98946 - DNA, 435 bp, Glycine max
  unsure (1)..(435): unsure at all n locations
agaggcatactgatataattgttcctatgaagctgttacctaaacgaaatgtgngaatctaccacacagagttcgatgagtttaaagtggaattaatgagatggcactgggacgataagctcaaaagcattgatgaaggcagcatcaatgttgccattgtgaaaaaattctattgcaacttgtatgaaccaaaagataaatcacccaagcaggtgcgggtcaggggtcatctgattaaatttgatgaagatactttgaatacttttctgaagaccccagtgattgtagaagagggggaganattatgtgcttattcgagatttgcactcctgaggcctgatcctcacgagttagctactaagctctatatccctgggaggggatttgagctaaatgttgatggtcttccctcgaagatcttaacgaagaacatga

SEQ ID NO: 98947 - DNA, 463 bp, Glycine max
  unsure (1)..(463): unsure at all n locations
gagagatctcncatttggttcaatcgattactagttattcttaatcaattacacagttccgttgagatcatatatggttttcatgagtctctactttaatcaattatcaggttatcataatcgattacatcgttcttgaaagtgttcccaaggttgatcaagaacactttaataaattaaatcatgaatctaatctattacattggtcttgaaaactttccaagttttgggaagaacactttaatcgattaaaatgggaatctaatcaagtacgtctttggatcatattgatctaatggttgaaagtcataatccatcatagatcacttattaaggtggtccacctaagccttttccatattattaacggtgtaactagaaaatataattaatattatcttgaacaatgaaaatgacactgtatttcagacatttgtttaccaaaatattgttttcgtcttaa

SEQ ID NO: 98948 - DNA, 426 bp, Glycine max
agcttgaaagactgagagccagattactatatatcatccaaccatacataagttggtagtgctaacaacttacataaaacttcaaactaggaatctagaaaaaatctagaaaataactgaagcaaaattcaagtcaaattttttttaccggtaacatatttaaaacagaatagtaaaaaaaactggcttgcattttactccctgttgtcattttccagatgaagacttcaataatcaataatgagtccaatccatgaccacattatatattgcaggaagctttggagcttctttatgttaaacaatgtcggacttagtatttcttgagttgcatcacttgcacgtacaaggacactggtgcagtggcaatttttttttcttacgtcatgatctcaggattagtcttcaatgcagggtaactcacct

SEQ ID NO: 98949 - DNA, 450 bp, Glycine max
  unsure (1)..(450): unsure at all n locations
ntgacttgatttcatcaacattatccnctgacatcttctgtctcatatccgaaactgcatcctcaatttctttggccacttcactgggaatcttctctctgtattcacctaaactcttctcaatgctatagatggtagtgtcagcactgtttctaatgtcaatgagagcctttctctcttggtctttctgagcatgcaattctgcttctttgaccatcttttcaatctcatcatccgagagtccaccggatgaccgaatagttatttgttgttctttaccagtggacttgtctttggcagagacagtaacaatcccattagcatcaatgtcaaatgtgacctcaatctgaggcagacctctgggagcaggaggaataccaacaaggtcaaactctccaagcattntgttgtctgcagccatttaccgctcaccttgtagcaccttgatac

SEQ ID NO: 98950 - DNA, 429 bp, Glycine max
agcttgcacttcttcgctttcctcagggacttcagcttctttgccacttaggccttttagctttgggaaccaagttatcccttgcatcctagacttcaaccacttgtgatagccaccgatgatgccattgctacaaccctaagctccttatcttacctctccgctgtattccaagctctacggattctcttaagaatcttcgcattggcttcattgaaacctcgcgcgatgaaaggtacgatgatctcctctgacgtcgcacctctcatagggtagcctagttgtcttatggccaacatgggattataattaatacaacccctcgttcccatcaaggggacgtgtaggaatccttcacacgagcataacactttggcccctccttctttccatcgggggaaccagctaatggacgctcctaccatacct

SEQ ID NO: 98951 - DNA, 433 bp, Glycine max
  unsure (1)..(433): unsure at all n locations
tatcatatttttccttaaagtgtctctctcactgtttctgtctaatttgataattcaatcaagctctccaattatttaacaacattacaattaaactaacggaaataatggaaaatgataccatccgtatagttctaaataattgacgattcaattaaatatttttaaacaaactttttaattgaatttttaattatcattaaaaaatcgattgtgtagttaaacttttttctatcaccttagatatcatatttggcactcttataatatttataatatttatgcagatgcttgagtgattatgatgttggttttcaattaaaattaaaatttgactataatatgcttgtgataactgangaaatctaaatattgcggctatacttaataatttatctttggtctgctctatgagatatcactatatttttat

SEQ ID NO: 98952 - DNA, 364 bp, Glycine max
  unsure (1)..(364): unsure at all n locations
agcttcgaccttttgtacataatcattgtttgttgttcgatttcggcttggttggcaggtatgatgatatttcaagccataaggttcgacctttttgttcataaaaaacgttgtttgttgttcattttcggcttggtttgtaggtatgatggtatttcaagccacaaggtttgacctttctgttcataaaaacacgtgtttggtgttcgtnttcggcttggtttgcaggtatgatgatatttcaagccacaaggttcgacctttttgttcataaacgttgtttgttgttcgttttcggcttggtttgcaggtatgatggtatttcaagccaaaagggtcgacctttttgtattttatcatgagt

SEQ ID NO: 98953 - DNA, 438 bp, Glycine max
  unsure (1)..(438): unsure at all n locations
ntgtgccaggagaatgggtgtttgtgaaactcanagcactcatacaaaactctgttgttactaggattaatgccaaattagctgctcgttattatgggccttaccccatcttataaaggattggagctgtagcatataagttgaagcttccggaagggtcaaaagttcatccagttttccatgtctcgttgttaaagaaggcagtaggacaatattttgaggaagaggatctcccagatcatatggagggagatttgactgacacagcagaacctgaagcggtgctagcttccacgaaagtgcagaaatatggagaggtggtgcagcagttactattgcattggaaggggaaggcagtacaagaagcgacttgtgaggatttgttgatgttcaaaagtcaaatttctaanttcaacccttgggacaaggttgaaattg

SEQ ID NO: 98954 - DNA, 443 bp, Glycine max
  unsure (1)..(443): unsure at all n locations
agctntcagtgatgaanacccaactacacataaccccttattgtattcatacagaaagccatcatctagtctcttaagagcttcattgaacccaaaaaatgctaataaacacatttcagataaagcgacatattactgaagaaatggaacgaaccaacaagattaaactaacatgtgcagtaacattattattaccaggaggtacattcccacagagggtattgttgtgaacatccgaaaccttcagtgaaagagcatcaactaggctagtgggaatggaaccaaagagattattagaactcanatctaggctcaccagcatacccaaatcacctatactaacagggatggcaccggttaaattgtttgactgcaaaacaacaactctcatctgtttcaaagcaccaatctgtgtaggaatgcttccttgccactgattataa

SEQ ID NO: 98955 - DNA, 449 bp, Glycine max
ggacctaaaaactcaagctttaggaaatgaatgttactctgtatatagcgtgcatcttttctatttcgtttatttatcaaaaagcttatataatgaaagaaataaaagagaatgaaatggagaggatctaaactcgtttctacatgtggtagttaatgttggatactgaagtggctatacaaattaaaaaatgcagtaaagatgttgagatgatgtttaacctaaaaaacatgtttagatgagcttttgtataatcgattgttcttgaaagaagaatactggtgaaagtgtcaatgataaaaaaaagattaggtagaaaaattttctacaaagagaaaaaataagattatttaacttatccattaggaaaagattaatttcaagagatgctgatttaattttattagtattttcgcgacttattctgaacaatgaacaatatctatgag

SEQ ID NO: 98956 - DNA, 428 bp, Glycine max
  unsure (1)..(428): unsure at all n locations
agctctagccttaggttgttcttcatgctgcttccctgatctctaacaatttctgtgagatatatgaattaatggcgagggcacacgaatgttccggtcactctttagacataataaattctgttgtgagtcaaaccgaacttgactgaattttttttagctcctttgccaaataaatactttgtgtgggacccacacaattattattttatattagcacgcctagagtaatagtatttttttcatcccacaaaatcaattcttctaaattcatttttaaaatatcattcttaatcacaagtaagttctttaccttaatttattcaaaaatcaattgtttcaacattacttctaacacatatgagatcaaattcaccctttattngcttcctcaaataatacattgtgttgataactacctgatactg

SEQ ID NO: 98957 - DNA, 420 bp, Glycine max
  unsure (1)..(420): unsure at all n locations
tgttcatttacatgggtcggttcgcataagatatttgattacgtcactagcagacacaaacttcttagtctctaccaacccatgagatgatttggaacatttaatatgaaaacaataacgcactccaaaataaaaaagattactgtgttcttttagaatatttttttacttgcaattcgatctagttattattagctcatgaaaacaataaattgagaacttattccaactgtgcaatattctcgggtaaactacttcaaaatgctattatataacatgaggtggaaactataaattaaaagcatatcgcaacgaataacatgtagaaaataccatacatacatattggggacgaccagaactngaagaacttgaatgttgatcaatcattctcgcacctacctagtatgcctttaattg

SEQ ID NO: 98958 - DNA, 380 bp, Glycine max
agctttataccattcctatgcatcctatatagtctcgtctgccactggtcgagcgctgtgcatccgtgtcctgttagctgagattctttatagccatccgactattttgtgcagctccgctctcattttctccaatgtcgccggactctggcgcggccgcacacagggccagtgatgtgcccttcctcgctatgagagaggcaagacagcttcatgacgtgctattaagagaaagccattgttctacagtggctacgtgacggaatcacttacggtggctatgtgctcttttcattcgacggtcacatgacgcaacaatccgactctctgaccaagacataactgacgctcatatgctcgcatatgcgacagttatgatt

SEQ ID NO: 98959 - DNA, 236 bp, Glycine max
gcgcttaacgcatctatgaacagactaccgtgcattgatgaagccctactaatgagctgatatactccgacgtggatgtaaccgaaactgtgcgcttagcgggatgacccttaattctacgaacatgccccaatattccatattttccactgttcatcatacttaactaacgatcgctgcgctcacacggatatgtggctaaaccttgtacagacacaacggagggcgcaaatttt

SEQ ID NO: 98960 - DNA, 431 bp, Glycine max
agcttatcattaatgaatcattacctaaattatataaaattaaagaaaggtcaagactacttgtgtgtgtgctaccatattagttaactttttttagaaatgatactaagacttgaatgtattagtttcttttttatttaattttatgtgtcacaagcagctctaaataatcaaacgaattcccatatatgaaattacaatgccacggtggctaacttaaggctaaactgtcagaattttttaatcctgataaatttatatatttatatatataattaaaactaagagaggcctggttgcttgtgcaatctattatatttcattggtattattattattattattattattattattattattattattattatgtaggctctagctgaaggcccttttttatgttgtgatgacaaaagttaacactgata

SEQ ID NO: 98961 - DNA, 420 bp, Glycine max
  unsure (1)..(420): unsure at all n locations
tcactaacacccaatcaccttcctgaaaactcacttcttgtctatgatggnctacgaagtgcttcattctctgttgggacttagtcaacttcttcgttaagctagcaagtattgtttctcgattggtcaaccaatcatctacatctttgacattcaatgcaccgatcaagtattgnggaatcctgtgaggtttattaccaaaagtggcttcatacagggatatcccagttgctgagtgaatgaatgtattataagaccactcaacccatatcaggaaacgcccccatgttgatggtcaacgatgaacgaaaaccctcaaatattgctcaacaacgcgattcatcacttcagtatggtcattagattgaggatgatacacgaagctcatttgcagttttgtcccactgaggttaaacaact

SEQ ID NO: 98962 - DNA, 451 bp, Glycine max
  unsure (1)..(451): unsure at all n locations
agcttccttaagaagattcctaaagaagctagagcttagctacacatacctctctaatagctaagctcacctccttgagatgagaagctagagcttagctacacaccccctataatagctaagctcacccccatgacaaaaaacatgaaaatacaaaaaaaaagtccttactacaaagactactcanaatgccccgaaatacaaggctaaaaccccatactactagaatggccaaaatacaaggcccaaacgaagaaaaaacctattctaatatttacaaagataagcgggctcatgcttagcccatgggctcgaaatctaccctaaggttcatgagaaccctagggccttcccttggatctctagccaatctacttggagtcttctacccaatgcccttgcgggataggattgcatcacgttgtatgttccaaataaccatcatagaaaa

SEQ ID NO: 98963 - DNA, 458 bp, Glycine max
tgaggaagtgtggaagggtgagacttcctacttttattctttgaccacagagtggtacctagagatatgtcgcgggggtcaagagaccttgtggacgtcaggtggggtgctattgcccaaaaccaagcttgaccaatctcgaccaaacccgggcatagtcagtcagtgagaacctgtgatatacctaaacaggcgagctcctgacagtcaaccgataaaagaacaaagaccataaagcagggaggcttgtgtggtggttggccagcaatgagtcttgagtgagatttgggatatggcctttggtaatcaattaccaacggtaggtaatcgattcctatgcttaaaagtgaagacaggaagctaatatggccactggtgatctgttaccaacggagtgtaatcgattaccaggcttgaaaacgagatcatgaagctacgaaggcttctggttattgatt

SEQ ID NO: 98964 - DNA, 447 bp, Glycine max
  unsure (1)..(447): unsure at all n locations
agctngctcaacgtctctatgagggtctctatttgcttggctcagagcttgttttgtgtaagtagtgcatcttgtgatgtgagctcaagaagacttttctttgtgcgtgtgtaagctcgaccatgaagaatggcattgtcactggctgtcatgttttcaattaactccatagcttcatcaggtgttttcaatttgatctttccaccaacggaggcatcaaaaagttgctttgaatggggttgcaagccatcaatgaatatattgagctgaaccagctcgttgaaaccgtgggtgagagtcttttggagtaaaccgtggaagcagtcaagagcttaactcaatgattcattatggaatttgtggaataaagagatctccaccttcccttcagcggtcttttactctggaaaatatttcttcaagaacttctccaccacctcttcccat

SEQ ID NO: 98965 - DNA, 450 bp, Glycine max
tcgccatatattaccaaattttttcttacttgcaaagtatgttttcattattatatatgtgacttttaaaatatttttttatttaacatttaataaatatgttgttaaaagcctttaggtcatatttaaaaaatattatcaaattatgaataaatattattaatatgtttttatgatatattatcaaatgctatatataatatatgttgctaaaatctaaaatgtcaaaaaaaactttaacaacatgatctatacataatattagataaatcttattataatatattaataacattactcatagttttgcaatattgttaaatattataaacaaattttactaatatatttattaagtgttaaataaaaaaatattgtttaagattatatttatgatgatagtaattccctttaagaggatacattctatatgaagggtattctcacatt

SEQ ID NO: 98966 - DNA, 401 bp, Glycine max
  unsure (1)..(401): unsure at all n locations
aactgagcatcgtagctagaaggaaatcatgagccangtcattcaaacaccgaaaaagcatatctacctttcacgcctcgtggggtatgactacacgattcagtatcgctcaggtaagtccaacatagatgtggatgccctgtctcatgtttntgaggattcacagggaacattctttattctctcggcacctcactttacttttttggaacagattaagcatgacttatcaattcaccctgaattcaaggctcttcgataggatattttgtctaatcctatgcgcagatcagattatactatcaccacgtatttgattttgcataaaaactgcattnggctgcctagtggagttcaattcatacagacactgcttactgatatccacaatactcttacca

SEQ ID NO: 98967 - DNA, 447 bp, Glycine max
actcagcttagtcacgatgattgcgtcttctcatactagtaggatatagttctaatttatcagtagtgcttcattgttgtttaccacagcgaagtaatgccttcggggagagacatctcctacttcaattggaaccatgacatccatcccatatgttaaccggaaaggtattttctgagtggtagattgtggggtgcatctatatgcctataggacctacgaaagctcttcaacccatcttcctatggctccatccagacgtttctttagctcacttagaattatcttgttggctgctttaaattgataattggtttgggggtgttctacaaacgtcacccaatgtttgatttctaggctgcctaagaactcattgagctgtcattctgtgaattgtagaccaatttttataccaatgtgtttgaaattctaaagcgtgtgatgata

SEQ ID NO: 98968 - DNA, 378 bp, Glycine max
  unsure (1)..(378): unsure at all n locations
cggaccttgaaactcagctgaatgtgactatgtngagcaatgcctgaacaggcgttttgtacgcacaatcgatctcattgcggaacatttagagatagaggactatcatgccttactaaagaatacttcctcacccatctgacggagtgaccggactcatgaatgctagcctgcttaagctaatggtatcttttatggataaagtatacctacactaagtacaatgcttctacaaacccaaatgctatgtgaccggacacaactgacttatgactccttagtagcaagaaggttcgcttctctgcgtagataagccgaccattgtaacattataccgacttgctttgtctgaacctatgtcgagaatggtgaatcatt

SEQ ID NO: 98969 - DNA, 467 bp, Glycine max
  unsure (1)..(467): unsure at all n locations
gatccttcagtcacctgcagctgcagcttttatccaggttcgtttttggtggtgaagcttcttcttccatggctgattccctagaggatggtgcctcccctctcctcttcttctttgtcttccgctgcatctccatgggggaaaatcatcattgaagctcaaagatctagcctccatagaagctccacaagcaagctttcatcaacatgacttgaaaattgggnatttcccttctttatattttttttatttttttaggggcgacaagcaagctccacaagcaagtttccatcacatgtagatgaggttcaacaatatattgatgcaagatggacttttgctctataagttctgtggaagatatttagatttaccctctacagaatatatatggtgtgtggagagattacaaattcatttactgcatcgtcatcaagtgcaattctatatacattaaagaatcacta

SEQ ID NO: 98970 - DNA, 386 bp, Glycine max
actcagcgtaggatgcagaaaccccacagtgaagtttctttgtgtgcttatcggcttgcgctaagagcgaattcagcgagaaaatatacgtacctgaaagctatataaggaggaataagaaaaggggaaatacacacaaagactcatatctatccaaagcctcagtctatcccttagggaaaacacatctatgattcttatccatttctctttctcttgctattagacaaccaaccacttctttcattagcttccgaagtgtaaagcctctaatgactattatagagccaacccctttttgtgggagcctgtggccaaactcttgtatgtaaactttcctacttcatgaatgcaagatgtcctattattctctatatgtgttctgt

SEQ ID NO: 98971 - DNA, 377 bp, Glycine max
  unsure (1)..(377): unsure at all n locations
agaaactcacgctggggcgaagatgtacacatgccacaggccgtttagattgttattaatctattccgcaccttacagaatgttgatcagccgaggccagacccgtgagaggactagatctacagctgcctacctctgcgcttagagtatctcggtctacctatcctggataataatgcgacacaatagggagttgtggcccacaatggtgctatccttgtatgctgtgcggcgtggccgatgctacacgagcgaatacacgcatcgatcggtgggatgaagcgatcgcaaaccatctggcaaccatgacttccaaggactgtgaactcctcattaccatgagtggaatgtgagggttggacaccnacgctcactct

SEQ ID NO: 98972 - DNA, 310 bp, Glycine max
agcttcgtatgtccgcttcaaggtgttacttcttatcctatgactcaaacagaccacgaagacgaagacaatggagatgaggagaggcatatagataatgcattatcctttctacaataacatacaccaccgtgcataattgcaacttccgttacagacaagattgaacatcgagagttctttaagctagccatcaagattactagcgttcggaggtggtcatgctctattactgtcagtgtgagtgtgagtatatgtgtgtgctatctcaacatgatgaatctaaagaggatagggcgtagcgatatac

SEQ ID NO: 98973 - DNA, 271 bp, Glycine max
ctctcatctaatatcattcggctatcagtgcctatccactggtggaaaatcacccgtgatagagatcgtcgaagctcaaagatccagactctctagatgtaacacaaacacgcttcccatatgtgatagacagagcacaatacgttcatgttcgtgctgcttacacctccataatctagctgctataccttgctcatccttggtgtgatttcatttatccacacgtatcttcttacatgtattgtgctatatgttgccaacatgatcctta

SEQ ID NO: 98974 - DNA, 389 bp, Glycine max
  unsure (1)..(389): unsure at all n locations
tgtgaccattagaacagaatgagcattcgattgcctacttttaatgtatcacgatagacgagtccgcgcagactcgatcaattataagagagtgcttatgtcactgtgtcnctcgaaagagcagatgttgatccactacgatatgtgaagagagagctatctcattgtctactactggatatttgtctcgaaatattgacagatggtctgaacgcatgagactgatgatgatgaacgaaatgcttgattgcgatcttgactaatccaaaaagaatgaccgcatgctctgaatgagaatagctatcccccctagagacatgttgaattctctattgatgatccctgaagctatcagagactgatatgtattatgcttcgatgctgacaca

SEQ ID NO: 98975 - DNA, 449 bp, Glycine max
agcttttcaaatgagtaaaaggctcgcattttctttcttttacatcatatacaaacttgtccaaataaataataaagtcatctcgactcagagaaagtcatataagtctcatacaattaatatagaacctatatcctaatgtcacatcctatcagagcgtggtgttcccgtatcctctagcatgaggttcttcatagtcatccgcctattcatctactcccccgaacacaaggttcaagatcatcacaggatccaaacacaaacatcaaaccggaagtgagttatcacattgctaactactagggagaaacaacacaacatatagtagccaaatacaatttacttagcatatctgacattatttcatcagtttgtcattcatcaatcacacttttcatccatcaatcacacctttcaatcatcaatcattatacacaggaatcacacac

SEQ ID NO: 98976 - DNA, 448 bp, Glycine max
  unsure (1)..(448): unsure at all n locations
tctcaaggaggtgagcttacttcttagaagggagtgtgtatctaatctctagcttctcaacgaagatttctcaaagaaacttctcaaggaagatttcttaataaagcttctcaaggaagttttcttaataaagcttctcaaggaagctacctactctataaatagaagcatgtgtaacactcgttgtaactttgatgaatgagagtcttgtgagacacaactcaaagttcaacttctctccctttttcttccttcaatttcgggctcccccctctctctttctctccctctttcttttgctccattgaagcatccttccaagcttcttatccaaggctcatcttggtggtgaagctctttttntccatggcttattccttaatggatgacgcctcctctcacctcttctcctttgtctttcgctacatctacatggtgaaaaaatacc

SEQ ID NO: 98977 - DNA, 142 bp, Glycine max
agcttgcttgccctattaaatgggagcgtctattttatcattataccgatgaacgacttcacaacgtgcaaaggagcatgagagatgctgacaaccgctgatgcctggaccacctgagcgctgatgtacccattgctactat

SEQ ID NO: 98978 - DNA, 321 bp, Glycine max
tgtgatacagtgtgcaacgtaacatatgtgctttgatactattggcgagacactaaggctgcgatgagtgtgacaagatctaccgacaacaatcgactatttgattggctatcataccatctgtgaccagggtccacttgatgacctatactacctcttgaggttatataaagagattaactaccttgtgtcattgtgtatgacttataagaggaagtgcaaaaacagcatatcacatactccttcacattttagagcgtcccatgaactcattctttgttacactatgctataatgtgctagattgctcttacaaaccaa

SEQ ID NO: 98979 - DNA, 359 bp, Glycine max
  unsure (1)..(359): unsure at all n locations
agcttgtgacacgcggtgatgtacggcatgttccgtactcacaagatgtgttatgactgacatatgagacacgctgtccggtgtgaatacccggaaggttcaccgaatgaacattcttctggctctctgtatgactaaattcctgatagcatgcgataactgacatggtgttctgcacacgtctgtattctctgtcgacacgcctgttgacgcgcggagatttacattatcttgcgcgctcacgatagatgtcgtactgacatgtgaatcagactgactggcggagtacccgagtggttgtcctataagcattctatattgctgtctgggaaacgaanggccaggtatcattccataac

SEQ ID NO: 98980 - DNA, 318 bp, Glycine max
cttggctgatgaaaagaagaggggttcattctttggcgtttattaactagacgacgtatgggatcctgctcattccacatggagacgggctaacgtatcttacatcgagcaatactttacttgcttataaccacatcaaggaaagcccagtcatcgttggtatagccgatgcctgtgacaaagtggagtggatatgcatgaaaacccacgccagaattatcagttgcccacccgctctctatgtatggaggggcttgcacattggttatcctgaaaggagactcgactgatctttacaaagtcgtgacatgtgcgctg

SEQ ID NO: 98981 - DNA, 446 bp, Glycine max
agcttaatcaaaagataaagcagaaattattatgcacagcgaaaagtaaaagagtacggaagaaggagacacacacaagagtttttatactagttcaacaacaacccgtgcctacatacagtccccaagtgacctgcggtccttgagatttctttcaaccttgaaaaaaatccttttacaaggagaagatacacaagggatgtacccttccttattctcttcaaaaccctagtggatgtaccctccactagaactgatccacaagagatgtaccctctcttgttctcagtcaaacccaagtagatgtaccctgtacttgtaccacaaaggatgtaccctccaatgtgttaagacaaagatctcaggttgttaaacctttgatacttgtgtaatgcggatacaaaagaattctcaggcggatagtccttcgaacacttttggataag

SEQ ID NO: 98982 - DNA, 426 bp, Glycine max
  unsure (1)..(426): unsure at all n locations
ntagtgcccttagatttgaagcaatatgtgacattcctatttgtattttccctgacatttcctttgccttgatacttcatgaaaatcaagttatgaaggagagtgcttgtttctgccttatcgctctttgcaaagcgcttttcaatttcagcaaggaattctttggcactagttatatcaactaaaacagtgcccctaaagacctcaggaatgccatgcttaatgatcataagactcatgtaatttgagtgatcccacttctcatgaagtttcctctgtttagaggtactggaattcgtacgagaagggggtttctcaatccttaatgcaaggtctagatccatgcagccaataacaatttgcctattctctctccagtccttataatttgtaccattgagaaccgggaccgcattcagattatca

SEQ ID NO: 98983 - DNA, 359 bp, Glycine max
ggacacaaaattgatggacaacagcattgataattggcacgtttcgaaattaccttgatgccttaaaaacacaattgggttagaaactaccttctataaatcacattgaagagaccagttaaatagttcaaaatacaaaggaaataaatagtgaaggagagataagcacccattatgaaccttcttgccatagaaacccgaacagataaaaaataagatgatgatcaacgagttatacttcatgttagctcacgcatttcatctaataggtcatacgcaagtatgcaagttggttaaacacttaatccccaaagtcctcacaaccagccaacacaaggcatgcacaatcattcaacatg

SEQ ID NO: 98984 - DNA, 342 bp, Glycine max
  unsure (1)..(342): unsure at all n locations
ttgtgaagagactttgagggtgggctcatgggccactntgggatatacaatacccttgtcttcctcaaagaaagtgtgatggccccatatgaagaaagatgtccatatgcattgcactaagtgtgtggcttgttacaagccaagtctaaggtgatgcctcatgggctatacacacccttacccattccatctgcaccttgggtagacattaatatggactttgtccttgggcttcctacaacccaaagaggtgtagactctatctttgttgtggcggataggttcagcaagatggcacactttataccatgccacaaaggtggatgatgcttcccacatctc

SEQ ID NO: 98985 - DNA, 357 bp, Glycine max
  unsure (1)..(357): unsure at all n locations
atctctaacaatatgccttagtgtggcggactcagtgaggagtgatgttaagaggatgagaaagcctttgattcatactatgcaagacatgaagagagttttgagagagagaattgtgtcgtcctattataagagagactcttacaacaagctccaaagactatattaaggaaataggagtgtggatgagtatntcaaagaaatggagatttccttgattatgactcaaattaaggagtctcaagagaccaccatggcaaggtttttgcatggtctaaatagggagatccaagacattgagagttacaccactatgcctatttggaggatctcattcatcaagctatcaaggtggag

SEQ ID NO: 98986 - DNA, 292 bp, Glycine max
  unsure (1)..(292): unsure at all n locations
gctgtacaccagcaagcgcttgaggcatcaaggatgtcgttctccgggagcgatgcgttcatcttagggacgacgagtatactgatttccagaggaaaaaggcacctgcggtggacatcactggttactcccatggccaagttcgatccataaatagtccttgacgtttatgccaatgcttggccaacagaggagggcgtgcgtgacattatatcctgtggaatgggtccagtggatccctgtttgatgcccactctatctgccntctcctgtgatatccgttggtgctaaa

SEQ ID NO: 98987 - DNA, 437 bp, Glycine max
  unsure (1)..(437): unsure at all n locations
gtgcaagcttttctgatagtttctgganaaagacttcttccggaaaagaattgtgaattccggaagtactcacaaacttcgtccagaagatcgtcatccggaaaccttcggaagaaccttcttccggaactgaacttttttaaaaaaaaaattatttgataatataatntacttntaatggataaactaaattataaaataattaatattattatacataaataattaaataattagtgaacgtatgtaacgaaataagaattttcattttataataataagtaaaaataaaataatatttaatgcgtatgtaatgacgattntgcccttgtgtaattttctttaaattaacgcgtaaacgcttctttctactgcgctntcgctntcttcgcttctttntactgcctttcgctttcttctgctntgtttcttccggg

SEQ ID NO: 98988 - DNA, 195 bp, Glycine max
tggaaaggaaaagttcctacaattattgttggcgacaatggacgaattcatctaattgaatctttaaggtaagctcttcttatctttagattttgactacgtcatcttaaatgggagaaaaaatgggaattaagcattgaaaatgctgcaaaggaaagtgtgctccaaaaaatgggacttgatataccttaatct

SEQ ID NO: 98989 - DNA, 359 bp, Glycine max
atcatacttgttttcacttttagttcttccctgtttctcgcacaaattgtgtggctcttccactagtgatgatcatggaatgctgaacactcaatcaattgaaggatcccactccaagcaagactaaatttgacttatggtctagatattataataagcgtgaatgatcaacttcttcttcaatcctattctgaactatcatgactatgaatgggcttaagattgaaaataattagttaaggataattgcctaacttgaactctacacacatattatgaagacgatattccaacctaattttttatctaaatgaattttgagaataattcgactgaattaactctaataacattgactg

SEQ ID NO: 98990 - DNA, 415 bp, Glycine max
  unsure (1)..(415): unsure at all n locations
naagcttttctatccaagatcatacaaatgtgttacaacagaacctaacggtttctaattatatgggccatcaaatccatcatgtgttgacaataattgattagcccgtgaatttcctctagggctgaacacacctcggcgatggcctttgctntggctagtagtcgcgggaggtcttgacttccatttaaggtcaaggcgaacctatccatccacatggtcgcttcttgatgcaatgtatcaatcaccctccttcttgcttccttctcggcgtatgcttgtgcaaagtcctctactagtttttgttcatgggtcaaagattggtttaactcttctttgtactgccctattatnagctagcatgcttgctccatggcttctaagtgttgggccaaactcctcttggatcttgagc

SEQ ID NO: 98991 - DNA, 213 bp, Glycine max
  unsure (1)..(213): unsure at all n locations
tttgggggagggtttttattaaaaggggggggggttttttaaaaggggcccaaaaacaaaattgttngtgggtaaaggtggaaaaagtaggaggaagacgggaatagagggatatatggggggaaagaagaaggagaggggggagggtcagaagtgacgtgagtgaaagggaggaagagtaagtggaggggaagacgggggagggaaggagaa

SEQ ID NO: 98992 - DNA, 345 bp, Glycine max
  unsure (1)..(345): unsure at all n locations
aacattattgggacaggcataattaaaaccaaaacataacccacagatcccctcatgtagaataagtttcgatcttgcttcaatcaagttctaaaggcacagtacatttcccaatgctaaaatcacctaactgtgcacacaagtgggtgatcataccaaaagcataccaacattaagcattaaaggaagcctacaattagatattaggtatttacatccagctgtcattagaaaatcccaactanggtgttaagccgccattacaaagtgtcgcaacctacctttcggcaggagggggacgcaagactcactggtgcntttttcaatgaacgaaaatgcacggag

SEQ ID NO: 98993 - DNA, 342 bp, Glycine max
  unsure (1)..(342): unsure at all n locations
cactgcttttgattgaaaattgcttatatgtctgacattgctaattattactttcggggctgctttctggaatctcaatttccatattaattacatntgtgtggatatttatttatttcatataacctgttactataaagtaactgcaatgccgagtaatgctctcaaaaatatatgaaagaacttgacactgaccacttgggttttttttgaataatatgagatttgagaagcccttttgagggaaaaaatgtcaatctccgcacttggcttcaacttttctatttttgaaaattccttttgaccccctcggaagactctcttatataaacccctgctcaa

SEQ ID NO: 98994 - DNA, 237 bp, Glycine max
cgaaacatattattttattgaagtaacactattttttgggcactatggaaatgaattgttgtcgacattgaattttctgttgatatggaatcccattgttgaaaaatgttaaaaatgacccaattgtcattattgtgtatatgtgcacaatgaacagtttcttatgcgattaaatgaatcttctccaattttttcggtttgagacttaagtgggtataaatcccacttaggtgttag

SEQ ID NO: 98995 - DNA, 252 bp, Glycine max
  unsure (1)..(252): unsure at all n locations
tatgatagcgcangtacatttgtcataagatacccagtgcacaatattccttacacacaccttctagtgaagaaacatggtcataaaacctgcatgaagcagcattgacataccattctttgtctggcatagtaagtaccctatcgggaccaggggctgtcttttcggtaaaaatatgcccagaatatttatcctagacccaatttttggtctttctgtagcttaaccttgacataacttagagattctcct

SEQ ID NO: 98996 - DNA, 325 bp, Glycine max
  unsure (1)..(325): unsure at all n locations
ttcacgctcacatgcaacatgccttgagtttactaaataaacatntcacctgccaaagatgaaattacaaatattgttgaactaacgccatgcataaactacctatctatcacttatcacgaatgagacaagtagtgagctaaaatatgattgtttatgcaaagccaaataaaaaaggaatttgaaaccaatgagtcagtaataacctattagcaaaatttgctcgctaccactgtcaaagccttccatttcaatgaagaactgcgtctttagccggctaacttgatcatgctcaccagctgaattacgctggcaaaaagttatt

SEQ ID NO: 98997 - DNA, 302 bp, Glycine max
acaacctaagggaaattttatttaccctatcttagggatttggactatgattgtttggaataaagtgggggtttttgttatggacaactgtttgtggctatcttaataagtttttggccatatttgagacatgattttgttaaagtggaatcttacgaaaatttctctttggttaaaaaaatatatttataatattctaaaatataaaaatttttaaagaaagaaactatttttacgttttatttttaggtttttgtattcttttgtttcatcttgttaatctattttcttcttttgtctat

SEQ ID NO: 98998 - DNA, 421 bp, Glycine max
  unsure (1)..(421): unsure at all n locations
tgctgcttacgactacccacactatgacaaatttcattgacaccccttatagtttcttgagatttacacgatattcattgcccctaccttttttaaaagctatagtaactccccttaattgtttgaaaaacattaaaccctgtacccttaatacctaagaaacacattacatcataaatccctgacactcctgtggtttcttgaaatttcacacgatactcctagtccactacctttttaagggaactcctttgaactgttngaagcacattggacaatgtatccttattatccaagaaacacatagcatcatgcatccctataatggctggagtattgtgtgaaaattgaagaagccacatgaaccatgagcataattttgccgaaaacattaatatatatgcttaacacaaaacaatgg

SEQ ID NO: 98999 - DNA, 371 bp, Glycine max
  unsure (1)..(371): unsure at all n locations
tgcagnagtaatgatggccgagtatgttgtgaacggntacgaaccctgaatgggtttanggaaagacaacggcggcatgactaaccttgataatgccaaaggaaatcgtgggaagtatggtttaggctataaacccactcaggcggatataaagagaagcatcgtgggaagaaagagcggtggtcaaagctcgcggttgaggcaagaaagtgaaggaagcccgccctgccacataagtagaagctttataagcgcgggtctgggagacgaaggtcaagtggtcgcgatatacgaagatgatgttccgagtacattggatttggtacgaccatgcccttctgatttcagctgggaattggcgagtggaggac

SEQ ID NO: 99000 - DNA, 382 bp, Glycine max
agtatggaatctatccttcctaagctggagccaaaccctgtcaccctcattaagaactagctcttttctttctctattgcctttagttgaatacacctttgtttggttctttatttagttcttaaccctctcatgcaacttctttacaaactctgacctagattccccttctttatgtataaaagaagagcctagtgggattaaacccatagacaaccttaaaaggggactgcttggtggttctatgaacccccttgttgtaggaaaattctacatgaggaagatactcatcccaagacttatggttgcctttcagaagatcccttataagggtggataaagacctattcactacctctatttgcccatcagtttgtggatg

SEQ ID NO: 99001 - DNA, 394 bp, Glycine max
  unsure (1)..(394): unsure at all n locations
tcaactgcaattatgattgtcatttgttattntatttctaattttgttggcttttctctttccataatgtctggaatatacacaatcattatattgtttggcctgaaacactaaaattacaagtgaatgagaaggtaggcttattattcttctctgtatcttggcacttgttgttttgttatggtaactgtcgtctttggctttaaaacaagtcttttaacaagggctataaaaaacataggaggaaaccaatcatgaatatgtttacttgtcaaatagaatataatcaaattatttcaggactgaactgtgatgctagtgttgggctctggggctattatgatttataaagtttttgaagttttaggactccattctctctcttccatctgcg

SEQ ID NO: 99002 - DNA, 429 bp, Glycine max
  unsure (1)..(429): unsure at all n locations
agcttatgtgtattctaatactgaaagatttgatcttatgatgaattatctagatctttttcaatgaagtagcaacgagagaagctcttttcttcagcgtcaccttctttattgccacttattaaaatacgtaattgcgaaaagtttttttttattcatacagaataacttaagctgtatcactttctcttggccctagcattcttttgaatgttgttaatatgttttcatgtcataaattcatttaagctgtaaaaatatccaggtgagacaaatgctgccctacctgcttgacttgctcaataccacgctacaaaccaaaacgaaaatctaaaaattggtttcagaagtggcaagatacactgctgagattatttattccttttgagttttgattntaggagcactatatatgtctcttcatttctg

SEQ ID NO: 99003 - DNA, 327 bp, Glycine max
caacatcacgcgtgtggtggtgacgatgggctacttggcgccggagctggccacggtggcggcccccacttctgcgaccgacgtctacatcttccgggtggcgctgctggacgtggcgtgcggtaagcggtcgatatagacattggtggcagatgaggaggtggtgctcattgatcgggtcatggagctgtacgctaaggggcgcgcgcgtgaggctgcggatttgaggattacaggggagttcgatgacggagatgtggagatggtgttgaagctagggttggcttgtgccaccctgatcctcagaggagacccaccatgaatgag

SEQ ID NO: 99004 - DNA, 175 bp, Glycine max
aaaaagtaaaaaacaaaaaataataaaaagaaaaaagaataaaaaataaacaaaaaagcaaaaaaaaaatcaaaaaaaatcaaaaagtaaaaattcaaaaaaaaaaaaaaaaaggaaaataaataaaaaaaaataaaaaaaagaaaaaaataaaaaaaataaaagaaaaaaaaaa

SEQ ID NO: 99005 - DNA, 90 bp, Glycine max
attataagaaagaccctcacaacaagctccaaagactaattcaaggaaataggagtgtggatgagtatttcccagaaatggagatttcct

SEQ ID NO: 99006 - DNA, 250 bp, Glycine max
gtggttgaaaaaaaggtgctttaagtttaaattgtaatttttgaataaggtttttttttatgatataattggagggtattttgtgtttttaatgagtattttatgtaacttttagtgcgttatttgtttaatgttttattattttaatttgttttttgttaaatttttttaatttttttaataattggtgttatttagtgtttgtttttaataataaaattttttattttatttttgaattattgtttta

SEQ ID NO: 99007 - DNA, 276 bp, Glycine max
tgtatcaatcaacaaccttataggagagcactctctctagttcaatgcttccatctaaacattcagccatacagcatgacaagctgccatagcaacaacaatatattatgctttacatgttgaccaagtaacaacactttgcttctttgagcaacaagagaatgattgtagttccaaattagaaacatacaccaccgagcgtgttctatcatccttattaccataccatactgaatcactataaccaaacacatctccttctatattcttctgatt

SEQ ID NO: 99008 - DNA, 179 bp, Glycine max
gtcaggggaagaaaaaagggggagagaggaggaaaaaaaaagaggaatcgaaagaggaagaaaagaaaaatagaaggagggagaagaaagagaatagaaaaaaagtggaaggagaaataacagaggaaaggaaaaaaagaacgggggggaagatgaaaggggagaaaaggaaaaaaaag

SEQ ID NO: 99009 - DNA, 220 bp, Glycine max
cttttagcttgcccctagaaggagacaggaacacgctcatcacatgacgtgacaagagataggagctgtcatctcggcttgacagaatcacgtttaccctcaagccctgactactaccgaaagtgacatgagcttgaccaatgcggcaagctaagagtacattcgccaacttttggtggatatcttttgttgtgatgcctatggctggtggaatgcacac

SEQ ID NO: 99010 - DNA, 420 bp, Glycine max
  unsure (1)..(420): unsure at all n locations
agctttattgtgcttagagaatattttaacatgtcaggacagagggctgtagcaaagttagtaccgagaatgctacataaagattaatcatcttaaggaagaagctaaaggtatatttggtgcaacctgtgtttgctgtatgatattgatagaataccatgtggcatagntgttcttcattggaattgctatctttttttccccttgtggatttgggatgttattgnggtgaaagcttggttatttgggtagtcctttgttgtttgctatttgaaattgatgggaacacagatcgactattacttcaatttgttgtttattttttcttccatggaaatcttattctttctctattctctttccactcttgtagagtggaaatcatagttagaagattgtgaanaggaaattcaagagtga

SEQ ID NO: 99011 - DNA, 436 bp, Glycine max
  unsure (1)..(436): unsure at all n locations
agctntagtgtcatagttntcgacccggtctgggtggatntcagtaaggccatagtgcgcctttttggctgatatctttaagaagctataattaggggttgttttttgtatctttgacatctattacctaatttacaaattggaggggcacttgaggggttgagattnttgaagcatgggcaacaccttgaggatggatcgtgattaactatgggaattagtaataatccttggtcagaaatttcataggaattaggatttgactntgggaattagtaattaactatggcaggaattttatacgaattangatttgggaaaaattggtattaatgaatcataataatccttggtcactttntatatcaatcaaatatctattttgtgatagnttattttgtttcttttaaaaaccaaaaaccacaaaaattattta

SEQ ID NO: 99012 - DNA, 227 bp, Glycine max
agctttccttcctcacggtgtttttcttttcctccccaggagcgcacaaagtcaacttgccacattttgctccaacccaagaaccatttctgagcgtgagccaccgctcgcttggactcaaattcagttgggagactccttccacatatttctgggtttgggtttggggatagatggtagtctactaggtatcctcgtggctttatttggaagaattgtgtagctgc

SEQ ID NO: 99013 - DNA, 200 bp, Glycine max
ctctacattcatctctacagttttcatgggcatttagcttacaaacatcacaaacatcatacaaaaccctaaacagagtgggtatgctaactctccaaactgggaattcacaagcttcaacagtttttcacaataacttcatgagtataaactagcagataccatcatattccaaacccataccacgaattaagaagaag

SEQ ID NO: 99014 - DNA, 288 bp, Glycine max
ataattttatgctaataaccgtcattgaattgtttatgtttgacaacaagttcttatgctaaattgaactgtactgtggacaatgcgagaaactactgactattgataggtttatttctcaaacataaataacattgggagactgtggtggggtgaagagttatctaaaatgactaatgtttctcttatttcaattgtctcttgaaatgaataaattgattcttaaaactgtgatctctctacaataaggtgtaattatatttcagttatataaaaaataaaaattta

SEQ ID NO: 99015 - DNA, 125 bp, Glycine max
attggggtaagatgcctacattggccatgcttgatctttccaacaattctctgacaggccaaatacctgaaagctttggaaattctccggctctggaagcactcaatgtctcattcaataagcta

SEQ ID NO: 99016 - DNA, 171 bp, Glycine max
aaagttaaaaaacgaattttattttatacctagccggaaggtaatttatataattaatttctattggacaacaatctttttttcccgataagaatatgatatattatattaattttagaagtactgattggtggtaaggactgggcaagaaaaaaataaataaaaaattac

SEQ ID NO: 99017 - DNA, 191 bp, Glycine max
ttccgagagctatcgtggttttattttagcatctcgatacgcctgtgggcctgaatcggacatgcgagtgaacaagtatgacccattgaatttctcgggagcctcccgttgttaaatttctagcgtctcgatacgctatgcgcctacatcgaacatgcgagtgaaaagtatgaccatgttaatttctcgag

SEQ ID NO: 99018 - DNA, 109 bp, Glycine max
ggggggtttttgggggggtggggtttaaaaccctttgtgtgggggggggggggggtgtgttgggggggttggggtgtgagggtggtgtagggtgttgggtggtaggggg

SEQ ID NO: 99019 - DNA, 201 bp, Glycine max
tgaggcaagaaaatataggaccccatatcataatgtttttatgtaggggaaaaatctattaactggttgctcactgccaaaaataagaaacacacatattgaagacttgtacgagaatgaagaaaaaaattactttgagaatgactatagactacatatatattaacatgtccttcaacacatacggtatttcttgaaaaa

SEQ ID NO: 99020 - DNA, 413 bp, Glycine max
  unsure (1)..(413): unsure at all n locations
acgacgatcactttttcctcggatgtctgttagggtcccataatatatcgagacgcctcgaaatgaatgttaaacctattatccaatgcaaacgacaataactttttactcggatgtctgattgagtcccgtaatatatcgagacgctcgaaattgaatgttgaagctctgagccaattcaaacgacaataactttttactaggaatgttgaatgagtcccgtaatatatcgagacactcgaagttgaatgtttaagctttgagccaattcaaacgacattaactttntactcggatgtctgattgagtcccgtcatatattgagatgctcgaaattgaacgttgaagctcttaaccaattcaaacgataataactttttactcggatgtccgattcaatgacgtaatatatc

SEQ ID NO: 99021 - DNA, 156 bp, Glycine max
gggaacaaaaataaaaccaagagaaccccccccaaaaaaaacacccaacatgaaaaaagattagaggaacaccgacaaaccgcgcagccaacgccacaaaccaacaacaactcacccggacaaaaaccccgacatacacccccaatcgaaaaaacc

SEQ ID NO: 99022 - DNA, 286 bp, Glycine max
  unsure (1)..(286): unsure at all n locations
tttcgtnccggttctgtgggtgatttcgcgaagatttcaaccgttcttcattcgttcttcatcgttcttcggtcttcaaccggtaagttcccaaaatcgaacttttcaattcattctatgtacccttaatgggccccatttgtttcgcgtacatttattctcgtatcatttactttccgtacccccttttgacgtgctttagtcatttacttaagtcattttctcccctaatcaaaaataaaaataaattccaccgatcatttgaattgtatatccggtattttct

SEQ ID NO: 99023 - DNA, 327 bp, Glycine max
  unsure (1)..(327): unsure at all n locations
ggagagaagttgatcttgagttgtgtctcacagactctctttattaagttaccacagtgttacacatgctcctatttatagactanggagcttccttgagaatctttctaaagaaaacttcttgagaggcttctctgagaaaactttcctgagaggctagagcttagctacacacacccattctaaaactaagctcaccttcttgagaagctagagcttatctacacacacccctctataactaagctcacctccttgagaggaggagctagagcttagctacacacccctataatagctaagctcacccccatgagaaaatacatg

SEQ ID NO: 99024 - DNA, 284 bp, Glycine max
  unsure (1)..(284): unsure at all n locations
ttttttaattagttatgaaaaccctacnttatattggtttggcaatccctaatgcctttaatatattcctttttggaaagggttttttagagatagggggagcacatgaaactaaattggagctgaagaagtttgncttttacatgcccaacttcttgagttgacatttgtattgaattgtgcattttaatctctatcttttcgtatgtacatcatgcatcatcatgtagaggtatgaagattgtttctaagttagaaatttctttagtgtataaaactctcta

SEQ ID NO: 99025 - DNA, 327 bp, Glycine max
gaggcccaagtgttctttttctatttgccccccaatttgtctatatacacccccttgcctgtttttgtgattctttccgtaaagtacgaaaactacgaatttctaacaatacttggttttttccgaatgtacagaaccctgcggatacataatcattcctttcttgattacggaatgtactgaatctactaattgtcaacgatgcttccctttgattccggtgtgtcacgaacctaccgatgtgcatcatatctcttttgatttcgcacgtacggaattccaaatgcctaatgagggcgccgcacccaaatgccaaaacaattgatg

SEQ ID NO: 99026 - DNA, 271 bp, Glycine max
atatgttcaaggggaaatctgattagccaaaaagcacaccgggtcgtcaagtatttaaaattaaaatggagtgatccaagtatcgaactcaaggaacttgcttattagacaaagttttattcagaaataaggcattgttgtaacaacattgataaagaatggttaaaaacagaaataaactacttctatggtaaaaacaataatgccagtaaaaattgacagcaatacgtaaaaagcgttgggtcttttcaacaaacaagcttatgcatat

SEQ ID NO: 99027 - DNA, 396 bp, Glycine max
  unsure (1)..(396): unsure at all n locations
tttgaagatggtcaacacaaaatttactgaattgataaacacagagtactgtcagtttcataatgacanacagaggggtcaatttgcggctacggatgagctccatttagctccattttgagcttatctgatggaaccctgatttgcggattcaagggaaccaatcatggactctatgacattggggaaaataaaaggaaaaaacggaattagagaaggaaatggaaagaacaacgccacaatcttggaagatngataaaaaatagaattctttgataagaatctaaggtttcacacaagaaacaagagagacactctctcnaaaatgtgtctaatatgaacatttcatataaactgtcaacaatgtgtctaaggagtctatttataactcctact

SEQ ID NO: 99028 - DNA, 392 bp, Glycine max
tctgggagacgaatgtcaagtggtcgcgatatacgaagatgatgttcctagtacattggatgtggtacgaccatgccctcctgatttccagctgggaaattggcgagtggaggaacgccccggcatttacgcaacgagcataatgtaaacctttacgggtttaaaagctctatagttgggcctaggctttagagggtttccttttgttaaggctttgtgtcttttgttttcgaatttataatacaaggatctttcttcatctggtcctacgtctctacccaatctcattcatttgcatgtgtacttctttatttctgaaaacggcagattcgatgaagagtcccccgaaggtactaatacctgggacccgcttatcaacttcgagcaagaaa

SEQ ID NO: 99029 - DNA, 341 bp, Glycine max
ccgcttatttcttatatgatttagcatgaaacattcctatttttctgttccatagtttaatacaacacacttgctgccataaacatgaagatgtgagatgtctgagttcctaccaatgaacagtttatatggagttttctttaatatgggtcttattaaagccctatttatgatatagcatcgagtattaacggcttcagcccacaaatattttggaagaggagtatcattttctatagttataacagatgtctccatagacctatattatctttcacaactccattttattgaagggttctacgtgtagaaaagatatgttcaatgccatgctcatcact

SEQ ID NO: 99030 - DNA, 409 bp, Glycine max
  unsure (1)..(409): unsure at all n locations
tcaagctntgtgtaatctattatatgatcatggtaatcgattaccagtgacaagttttgaataaaaatcaagagatataactcttgcaatggttgtcaggtttttctaaaggttataactcttctaatggttttcttgaccagacatgaagagtctataaaagcaagaccttgacttgcatttttaagaacaattattttacaacctttgcacacaacctttctaatatacttttgaatatcttcttcttctttttcctttgccaaaagctttcaaagttttctggtttccaaaccttgttctttaacagaaaacaaaagtgtgctattcaactttttcattcgcttctccctttgccaaaatgaattcgccaaggactaacgcctgaattctttttgtgtctctcttc

SEQ ID NO: 99031 - DNA, 252 bp, Glycine max
gtacaacaagggttacacatgcttctatttataaactaggtagcttccttgagaagctttcttaagaaaacttccttgagaagcttctttgagaaaacttccttgagaagctagagcttaactacacacaccaatctaaaaactaagctcacctccttgagaagctttcttgggaagctagagcttatctacacacacccatctaaaaactaagctcacctccttgacaaaatacatgaaaatacaaaaaaa

SEQ ID NO: 99032 - DNA, 258 bp, Glycine max
ccgcggcgggaggaccccaaaaacatgaaaaaaaaagggagcggacaagagttagaaaaacccccgaagagaaatggagacccttttgaaaactgaggggggggtttgaaaaaacatttaagcgaaacccagggggaaacccaaaagggcggccccaaaaccccccacacaagaaaagagggagaaaagaaaaaacaacgaagaccaaaacgccgaaaaagaagagagaagcggaaaaaagcgccaaggagaaaagag

SEQ ID NO: 99033 - DNA, 270 bp, Glycine max
  unsure (1)..(270): unsure at all n locations
atatttctatgcatcagtttggttggtaaaaaagaccaacatatctacctattgctgtcattttatttaccttgcattttataagttttaacataccaggttagtttaaaggcttgttgaaataacacttatacatgttctctcaataatgcttngattctgaacttaattcaggctaacaatagttccctatgttcaatactcagaatcatctgtnttaattaaaatacttgacgatccggtgcgcttttcggtaaacccccattgaaa

SEQ ID NO: 99034 - DNA, 381 bp, Glycine max
  unsure (1)..(381): unsure at all n locations
taaatttgtatttgaaactttcatgtgtaccccaatattgtatctaagccaatatttcttattttattgatcgggtggttgtctttctattttaggcaagttagaacattgaaatttctattttagtttagaatgaacaactttatgcagtatctgttgtgcttctaatgaattttttttactaattttctaactggatttgtaggagttaaattttgggggaagaatattattttttattatttgtntctattangcatgttactggtttaaagttgaattaattggttccaatcatgagaatgtagcataccttgtcattngactgtactgattggaccccatgggaatataataacactaataagttaagaaacatgt

SEQ ID NO: 99035 - DNA, 232 bp, Glycine max
taaaaaaaaaatttgattaatatattaacgatgggaaaagatattataagttttatattcacaagctataattttcaaaaataatgttaaaagttacttaaaaaaccttcttaaaaaacctttttatcggataggcacatgacatttcttacctatgtaaacaatataaataactaaaaatatctaccacaaatcatcctaggatttttaatcttgatcatccatgtgtata

SEQ ID NO: 99036 - DNA, 396 bp, Glycine max
gactacacactcaagctcgcttagaggttttagatgaattattcacatgtggggaattgtgagaacatatgtatggatcctcagagaatcaactgggatgaagttcaagatgttcatgttaattctgattctatcttttctatcatatatgcccgatgggcccaattgatgtccccatgccaaattgctgtaaaactgatgtgttcttgtgttgagtatgaatcctaaaaattggaatttttctttctaattagcgtgaattggtgaaaccgaatgataccatgatgtgttactagtaatttccgtgtgagctgattttgaatttgaatatgtgatccagataaatggtcaaggaaaacaattctctgtcttgtttcatatacgtagattaaaaaa

SEQ ID NO: 99037 - DNA, 351 bp, Glycine max
  unsure (1)..(351): unsure at all n locations
gggcaaacataccaaatgattatgatgatgggatggctcaaatctcacaaaagaaactcatcactttcaaattgagctntcaaaactatcatgacatgtagaggagaatcatggatttcaagtcacaaaatgtcaagaacttttattttcaaaacaataactcatttcttgaacatatcctataattcaaagaaaaacatgcaaagtcgtacatgcacacaanaatgacccanaatattaaactaaaaatccgacgaaactaacaacatttacaaattaacacaactaacanattaacaaaaccaacaaaacttagcaaaccaaagaacactccccccccccccaacttaa

SEQ ID NO: 99038 - DNA, 220 bp, Glycine max
ataaaaaaaatttcaaggaaatgacaccctttcacacgctatactatccatcacttcttactggacacagtaatcactaattatcaaataacgagagatcaatatatgtccaaaaaaagatgattgtccacattcagccttgacaaagacgaacgtacaagagatttttgagtactatttttaagagcacttacctttgagcctgccatgccaaaaataa

SEQ ID NO: 99039 - DNA, 420 bp, Glycine max
ctagttcatacatatatagccactagtgttggttacaacagaaaactatctttctaatagaaagcctaatctactgatttattcttctttattccttctagaatatttgagcgccttcctacgcacgttcatgccttcatggtctgtttattacgtagtctttcagatgcatgggcgtgctactgtgccttttgggccttgctgcttgcacccctactctactattcatatcattaccgcttgcttcgaataacaccttgtcctcaaggtgatgtagtgcttggagggtcgtccactcttcctacgatgtttcgtcagggtgtaggcctctccattgaaatagcacaaggtgcttcggccttgtatccgaaggaatggttttatgagctataatagctaatggggtaagaactggttgat

SEQ ID NO: 99040 - DNA, 369 bp, Glycine max
  unsure (1)..(369): unsure at all n locations
atcgaatcaaatctagataagataggataagataagatctagatgaaataatatctagatgagatctaatctaaataatatctagataagatctaattttttagaataaattagtttgccctcttcaagtccaaacccaattctggattcaagcccaagcccaattctagattcaagcccaatgcttcattaattcctaaagttagattaaaaacatcaaattagctgaatgggcccaaataataaaactgcctcataaattngacaattaagactaatcagtgttaaaaatggtgcaaaaagggttaagaaataggagaaaataatggcacatcanaaccccccatacttagccttttgcactcctgg

SEQ ID NO: 99041 - DNA, 292 bp, Glycine max
  unsure (1)..(292): unsure at all n locations
tgcccttccatgcagcaacctggaacaattgagcagcctgaagcttatggtgcaaataattacaatagacctcctcaacctcagcagcaaaatcaaccacaacagaacaattatgacctttccagcaacagaaacaaccctggatggaggagtcaccctaacctcagatggtccagccctcagcaacaacagcagcctgctccttccttacaaaatgctgctggcccaagcagaccatacattcctncaccaatccaacaacagcaacaaccccagaaacaaccaacaggtg

SEQ ID NO: 99042 - DNA, 415 bp, Glycine max
  unsure (1)..(415): unsure at all n locations
agtctagagtgagaaaggccaagttctatagagtttgagagattntgctgtgtgaagactcgcagagaccagagcttgaagatgaagccgtcttgacagcttgagatgagtttgtgagtgattgtgaggtcttagaggtggaggagacatccccaccacttatatntcttcaatccttcatctttctcttctctntgttggaaagggaagttcccagtatgggaagctaaatcctctgttggttcttccttgtaggtacttgatgtaaatacctgtatatttatttaatgatgttttgtgtgttcattgtgttatccgaacttcattttaccatgctttttcctttatcacatagatgcatgttgttttagggtcattcaatagtggaaactggtctgattcttataacttgatc

SEQ ID NO: 99043 - DNA, 242 bp, Glycine max
agttaactactatctgactcgtcgcaatcctctgtagataactcactaggagttacgaagttacctatttacctaacttcgttacagatccttctgtagacttgctttgatcaacagtttatcatacactaatataccaaacttaatcgagatcctcttgaagactaagttccatcaagttctaaggcaacaatacatttcccaatgctaaagtcacctaactatgcacaccaatgaatgat

SEQ ID NO: 99044 - DNA, 374 bp, Glycine max
ttgatgataacaatgatgataacggatgatgatgactaatgtgatgaccaaaagctcaaagatctattaaagaacaacgtcagtgaatcatgaacaattggtgagtcatgataagaatctagaagaattcaagactcaagaagaaaagttagagtcaagaatcatgatttatggtcaagatctcaagaatctagagaatgcttaatcaagataaatatgaaaagattttctcaaaattgaataacacatgatttttctcatagacatgtttaccaaagaggtgttactctctgggattctataccagatcgtgtgatcgattaccaccactaacatgttttgaacaagtttaaattgaattacaacgtccaatt

SEQ ID NO: 99045 - DNA, 313 bp, Glycine max
  unsure (1)..(313): unsure at all n locations
aatgatgaacatgaactacttagacagcttaacctagactacctaaactgggagcagcaagacaaacaattaaagtctttggctcttaccatcaatggcaccagagtcttcacacaaaaggatggttggaagatacttgaaacctaaccttttagaccaaagccaaaatctaacaactaaaacagaaactaagtgtctaatacatatgagcaatgaatgtatatttttgaaacataatcatagttacacgaatgggtaagataaactaactggttntgacacagaattaactataatgacttagtatcggctt

SEQ ID NO: 99046 - DNA, 388 bp, Glycine max
  unsure (1)..(388): unsure at all n locations
gcaagcttcatccaactcaagcatggagagaagacagtatataccagacaccgaagatttctaanagcctttcacccttatcgacaatngaaaaaagctcttaatggaagtcaagagaatgaaggccccccggaagcattaactggaaaccaagttcatgatcgcgtaaaggacattgtaaccgtgtttggcaagtcccagaagaagacatcatcttccaaaaacatgtggaagaaacgctcaatattctttgatcttccatactggtctgatctatatgtgcgtcactgtctagatgttatgcatgtggagaaaaatgtgtgtgatagtttaattggtactcttcttcacattaaagggaagaacaaaggatggttgaaatgtcatc

SEQ ID NO: 99047 - DNA, 257 bp, Glycine max
aataaatttatatattttttatatttgttttattatattagaccttgaaagattctaatgaacaattttgaaaaacaatataaatcataaatatgatggtaaaaatatcaagacaaaataaatattatgtttaaactaatgaatatttttatggaaacaaccaaatttggtttattaaataaacattatacctttataaatagtaaaaagataatcttgcagaattaattacttgttaaaaagctacatgtaaagtt

SEQ ID NO: 99048 - DNA, 229 bp, Glycine max
atttgcacccccatttttactaaatgcaccccccttttattttttggaattcttttccataacgttacgaaaatttacgaatttcgtaacgatatttattttcctttcgcaaggttacgaatccttacggattatgtatttacccttttttagctttcaaagaagttacggaaacccacggattgcgcaaaacacctcttttcgattccgccacattacggaatttcac

SEQ ID NO: 99049 - DNA, 369 bp, Glycine max
tagcatcaagtcaagacaatgtgcagcacatggaagtccaaatatttttggtctcgtgactttgtaaattttaccttaaaaagatcaaaaatcaataacctgtgtgagtagtgtaacaatttaaagttattactattaaaaaaaaacttcattaagcatgattgaattctcatccgccaacacataattactttcattgtccgcaccacttgaataacattcttttctcaatcttctcaacaagctatcctaagctcaagatcttcgacagtcttatgtattcaagcatcacctcctacaaactggcccaatgacattaccaaaagtatcaagtttatcttctattgccaccattgactaacccttggg

SEQ ID NO: 99050 - DNA, 385 bp, Glycine max
  unsure (1)..(385): unsure at all n locations
gaattgttgattatcctgaactatgtagaaaatgccagccccatgtcggcgaggtttggtccaaaatatcacatatcaaagacgtcttcattaaagaattacaaaagctggaggaagaaaaagacgaataggaatgatttgttgacacatataaccgctgaagctcctttggcaacccctggacgtggatcaggaatggttaaacgtgaaaaaagaggagaccatgatgnttgatttattgtttggacgtgattgacgtattgaaaattgattttgggtgaagttacccttgagctgcttctgcgtcatgggagaatcaattctcagatttcaatgttggacttttcttgttttctcttcactctgttccattgtccatcaagtt

SEQ ID NO: 99051 - DNA, 305 bp, Glycine max
actgatatcagagaagatcactgttttaccttttggatgcatttgttacaaagaataacccttgtcttttgtatgtcaaagcaagctccaaacgtttatgataaccgaaagtgacatggggtgcttgccttcaagcttcatgaatcttagaagacagcgatatctgagagttctagatccgagggagcttcgaatgatagaaagtggctctgtagatgtcatagaatgcaaatcattgaagcacgtattggttcttgctgaacaattcaagtatatcagcagtggcgttggcattcataattacc

SEQ ID NO: 99052 - DNA, 392 bp, Glycine max
  unsure (1)..(392): unsure at all n locations
acactggtaatgtgtcaactatcattgttattatctccttttccgncattgggggtgctacttgaactgccagatccctccacctttaggcgtattctttgacagattcgtgctcctttttacacatattctgtagctgcattctatccggagccatatcagaattgtactgatactgcctaatgaaggcaatcattaagtctttccaagaatggactcgggaaggttccaaattagtataccaggtgacggctgccccagtaagactttcctggaagaaatgcatccataatttttcatcttttgcatatgcaacccatttcctgtagtacaccctcagctgattcctgtggcaagtagtcccccggtacttatcagagtctagcaccttg

SEQ ID NO: 99053 - DNA, 386 bp, Glycine max
ctggatgaaaaagggaagtggaatggacaatgaacatatagaggacatcccactttaaggagaagatgagtctataagaagctcaccaccatatgaggccatggtaataccttgaggaagaatgatattaatgaatggagagggagagaagagcaccaaattttgtgctctaagagagctctgaaatctaaaggttaattttcaaatgatcaaagttgaagaaatgcacacacatgacctttatttatagcctaagtgtcacacacaattggagggaagattgaagttcaattcaaatttcacttgaatttgaaattgtatttgtggacccacactctggagacacaatttcactaattatgattagcgaatttatgtattggtca

SEQ ID NO: 99054 - DNA, 299 bp, Glycine max
aaaaaaaccctgttacgtaccgtgaccaattaaccactgttttatacggttcacactccctactattgttgtgttttgcttgcccctctctttcttaaatctatttcctttcactctcctctctttagatgctaaattgaaccaaagcttgctacttggtaaaacaaaatcacttgccaaaatgaggggtcctttgggtgcactaataagaaggtacccattaattgagtgttcgaggaaaccgacgaaaccaattgcagttcacatgaaaacccttgtagaattctaaaataccaata

SEQ ID NO: 99055 - DNA, 347 bp, Glycine max
gctgcagcttaagttaaatatacataattattgtttgtagatgcagtaaaagaagccatttatcattgtctttacacaaaaacatatttctactaatactttttcttatttcatgacattatgcctctatatttctcttatatgaaagaaaaccagttctttgaactatacgggttttttcgaatctcatcacgactttgagtctttatctgatttccagccattcttcaccatgttctaataaccacctatataagtccattatataattcaatccccattgtactcacacacctattgtgacgttgatcagcatacggcaaatacatagccacttcacatcactc

SEQ ID NO: 99056 - DNA, 363 bp, Glycine max
  unsure (1)..(363): unsure at all n locations
agcttgtgatgatgccnagtgtagtgtgtacatggctctcaaacttggacaaaagaatacaacgcttcttttaatcaatggtcaaatcacatcaaagaaagtttttgtgttangtttcagtggctcttattatgagctgtaccagatcttttgtttttgtagccatgctatggttcctattcaaactgcattagttttctttggaaccatgagtatggctctatctctgtatattnttagtacctctggtaagtatatcaatatattatatttttgctgataaaaaaaaacctaatatgacanagggaaaagtcatctgagcacatcatatataatactactgatttctgctgtgcaaaaaaa

SEQ ID NO: 99057 - DNA, 272 bp, Glycine max
  unsure (1)..(272): unsure at all n locations
aggtgggtggcatgtggccttatcgaccgtcttctgtatcataagtaatcgccattttttctttgaaatgcgatcaatccatgttgctatgggttgactcagttcacgaaatttttctaaattttgatcaaaaatgtgcttgcnatgagtgtatgctgcataaaattagttatgaataacaatcttaagtatatatgaaaagtaaataaacgtgaccatcanatatgaaatcttacccaatttcttcaacatttctttttgtttgcattatt

SEQ ID NO: 99058 - DNA, 303 bp, Glycine max
  unsure (1)..(303): unsure at all n locations
tgaatgaagaaatgattattcttaagtcattcccaaataaatttattaacttattttgagttgacttaaatatcatactcgagaagtaattcagagttgtaaatgatgaaatgaaaatgttacattaatcttctatttgattcttgtaagtaataaatattatttcatgttatcttggcgccgacgattattgctagatgtctgccttgatatattaatntgagtaatatattatcggcttaatttttaacctacngtatcacacacaaacaagtattctaatctctattaacgaaatgatat

SEQ ID NO: 99059 - DNA, 255 bp, Glycine max
gatttaaacaccgcttcttcacttgaaataatggccgaactattttcccagcattaataaaagcaccatttatggaggggttccactatttgaaacccgcatgcacatttaaaatgccgttattaaacattggaaaccataaaaaaggtcttaattcccccatgggtgtggaaatcaacaattaaaaccctaggaagattgggcgaggaataaagagatattctatatacttatatccaaaacatattacatctg

SEQ ID NO: 99060 - DNA, 294 bp, Glycine max
  unsure (1)..(294): unsure at all n locations
tgacaaagatgcacgtgcatgcatgcttatgattangaagtttaagtgcaataattaaacaagtgctattatgttcaaatttacttaaacacttacgacacccctttgatggagccaaatggctttagattcaatgggcagaattgaaagtgtatgtcctctagaagttaacacaacacaaggaattaaaacgcaaatcatcaatccaatgtttattaatgtagtgatcatgggttacacaggattggaagactttgagaccccaatgagtcttcggagaacaaacatgttttg

SEQ ID NO: 99061 - DNA, 356 bp, Glycine max
  unsure (1)..(356): unsure at all n locations
catttttcggattcttcacaggttgtgaaggcaatttggcagaaatttggggactagcttagttcaactgaatagccatctgccccatctgatttgtcagactctgaatggaggctcttgtctcttgcttgaattgcatattctggatggtcattagcctcactaactcttctaaggaaggttgagaaggaccctcantcgcttgttgtctttgttgtgactactactgctgttgttgcattggaggaagaacatatagcttgcttggaccagcaacattctggaagganggatagcttgtgttgttgtgaagacttgtcaattagattggaagattcctccatctggattgatct

SEQ ID NO: 99062 - DNA, 340 bp, Glycine max
  unsure (1)..(340): unsure at all n locations
tataataatgcagctacaaaatagaatggccattactttatctacttaaattttctctcacccaaggcctgtcatacaataatcttcctttactaaaggacaccaaatttgtctgtaaacatatactgtggccaattgttttaaaatctcatacaagaagttaaaaacaaatgttaatcaaatgttttttaaagtattggttaaaaaaattattttaaatctttttacttaaaaaataaaaaattattgtatttataaaaaaatatacactctcataatttatataataaaatattntattttaattctttaactatattctaaaaatacttgattatca

SEQ ID NO: 99063 - DNA, 335 bp, Glycine max
gcgcatgttcacttggaacttcaaagtatcaaaactttcaccaaaaaaggatcgtagaccatcgaacctatccaaaatattttgaagaagagaggaatcttctccaccatgttctttttcatcaacaagtcgagcaccccttttcactcaagagccatcatgctctttatgataaccaaaggatgcaatgacaaccacacctattagaaaggatctcttgattgggacataatgttcaaaattaagaaggatgttaaagtgttgaacgaagcgggtgactaagtgtgggtatggcaatggagcatttaaacgcaatgccttatgcatgcaatatc

SEQ ID NO: 99064 - DNA, 337 bp, Glycine max
  unsure (1)..(337): unsure at all n locations
aaaggatgccccaacttatttggcatgacacaaatgccaaacctgatgaacttggaatttttatgcaaaactgggacatgcatgcccgctatgtggacgctcaagagaacagatttttatgggcatgttatgcgtcggctcaggattcatattctctatgttaaatcaacccgntgtttacaaaatatggtcttatatcaatgtgagcattcatcctagctcattatgggcgtccggggaaatctcacaggattcacccttcacgtggagacacattgttcaaaaaatgattatgatcaatgaattattttcaaacaaaagttggaaatcatctctt

SEQ ID NO: 99065 - DNA, 432 bp, Glycine max
  unsure (1)..(432): unsure at all n locations
agcttnttttatgggtacattagtaatttctatatacttcaggtntagtatatagatattgatgataatngattaagaagccgtaaaaggaaaacatatttacaaaaaggaagctgttacatgacataaagaaatgtcaatgatgtttatcaaatttttgtattgacttttgtacattgagacttaattcgattatactcttgatattttaaatgaataaaaaaatagtatttgattaataaaaaagtatttgctaacacataagtgatgagtttaatggatttatattgttttgatttgacttttagggtggttattatcaaattcaatagggtaaataatcatttttgtctctaaatgtatagagcgctgataaatttgttttcgaaagatgaaaattcaaattttaattcccataaatgaaaaaagtac

SEQ ID NO: 99066 - DNA, 269 bp, Glycine max
ctgatttagtgcaaagagatcaacaagtttttgttcagatagtcagatgttcacaacaagcctgatcagattttcagacagcctgctaaacaaagttaagcatcaggcctgtatcgatacatactgtatcattccatacatgtatcataccatgttgaagggtatcataccatattggatcatacaaaacttgacgtggattcaaattataagagccattgtcagaaaaatgggacatacctatgcgaatgatctaaagattcagattc

SEQ ID NO: 99067 - DNA, 426 bp, Glycine max
  unsure (1)..(426): unsure at all n locations
ctgcagctttcgctatgctgaaacgcctctagtcaacacccgtgcgcctatgcacccaccagaggaagctacccaagttccgactccgaacacgactcgaccggccggttatttcaacacgacaaggaacttccctccgaggcctatttccgaattcaccccgctcccaatgacgtacgaagatcttctaccatccctcatcgccaatcatttggccgtggtaactcccggaagggtcctcgaaccccctttcccgaagtggtatgaccctaacgcaacttgcaagaccatggnggtgtcccggtgcattccgtcaaaaaatgcttggcccttaaatacaacgtccaacatttaatggatgccggatggctgactttccaagaggatcggcccaatgtgagaaccaacccgcttcgcaatcatgga

SEQ ID NO: 99068 - DNA, 393 bp, Glycine max
  unsure (1)..(393): unsure at all n locations
ttggatgcgtcatngtttcaaataagtcgaatgagactttctgatcctccacacccaattctaacttggctttccccatatctactatacagttggtcatggacatgaaaggacggcccattattatgggaatgtcaggatcctcctctatatccataaccacaaaatctgcaggaaatacaagctgcttgacctgaattaacacatcctcaatcactctatatggtctagcaatggagcgatcaaccaactggagggttatgcatgtgggcattatctctatctctccaagtcgctgacacatggagagaggcattaaatngatactggctcccaagtctatgagagctgtacccacagcaacctcgctaatggaacacggtatagtgacac

SEQ ID NO: 99069 - DNA, 251 bp, Glycine max
  unsure (1)..(251): unsure at all n locations
ataaggaatctatccttcctagattttttctaaccgagtcacccttattaagaactatctcttttcttcctctattgcctttaggagaatacaccttttgtttggttctctatttggagcttaaccctctcatgcaatttctntacaaattctgaactagattccccttctttatgtataataaaaatgtccggtgggaggggaatgaggtctaaccgcgctaagagattgaacccatagacaacctcaaa

SEQ ID NO: 99070 - DNA, 331 bp, Glycine max
cgccgccccccagagcccctctgacctattcaccctgcacaaaggcaacccagaaacaactggcacaaagcctagctagaagcgttcatacacgagaaagcccaacagagatcaaaatgaccacatgagaaaattcttgcgattaaacacagccaaaaaccgcaaaggttcccaggacaacacgcgagccacataaagatcacagcgccaacggtgtgaagtcagcgaaagacccaccacacccaccaccgatgcgcacgaagccggggaccactccatgcggggcggcccccaaacacactgcccgcgctcatccacaggagccccaaga

SEQ ID NO: 99071 - DNA, 244 bp, Glycine max
  unsure (1)..(244): unsure at all n locations
tttttannaagagatgttttttttttggaaggggggaaaaaaaaaaaataatgatttagtatattggatttgtgtttgtttggataatatattatattgatagtgttgggtgtagatatttaatggtatgataggtttttagtgtattaattaattttagatagttatattggtattattgtttgtttattttttgttatgttatgttgatgagaaatgttatgattattttaaattgttatat

SEQ ID NO: 99072 - DNA, 242 bp, Glycine max
  unsure (1)..(242): unsure at all n locations
tttttttttttacngcgcgaagattttttttgttttagtaaaaaacccccccccaccctaacaccaaagtatttatgtgattccaatttagggacataaaattataatttataaccaattttgtaaaaaaagattgcctattttagtctcaaattttaaacaaatatgccaattttatttaaacggagatttaaaaatatgttattagacttgaacaaataaaattaaaaatttaaaaacta

SEQ ID NO: 99073 - DNA, 312 bp, Glycine max
  unsure (1)..(312): unsure at all n locations
atctgagctcacgtattcccacgtagcccatatacttgtttctctcaacaccgggtccccatcaatcctcccaagctttcacaacatccaatcaaaacaacattcaaacagcacaagctatcacagccaagcaaaacagggcaaaggcaaaaaactctgctcaacacaccaaccaaaatcacagcttttctcactcaaagaccccagtaacaattccttcgatccaattcgttaaccattggatcaactccaaaattntactgcaagtctatagtgcataagcctacattgtgaccgttgggatctactagc

SEQ ID NO: 99074 - DNA, 399 bp, Glycine max
cttagaaccgctactatatcaaaaatatacaagtccgaattcacacaacttttttgagaataaaatcagaggtatgaatgtatagttccaccttagaattctatttaaaagtctacaaataaaactatgattttcaccgaagtcattggtcagtaatgcaacttcttttttggctacaagtttaacctttcttcattcacaacgttctatggctgaagcccaagtgaatttcttactcacgattgggtcacttcacctcaagctgtgcaacttgcatttgtggagttgtgatatatgccatatgctgtttataagtgacgcttctgtgtttagtggttgtaccgctttttcttataataggggaaactaacacctagaaaatgaacatcatatcaacct

SEQ ID NO: 99075 - DNA, 217 bp, Glycine max
tggcccatggtgttgaagacgaaaacttaacttaagtccgtgaaacactcaccatggttgcacctcgtatagaagaagaagttctaacaccagacgaggtctcggtggaaggagtggatgtcctcaatgcacctattgcaagaagatgggtcatactaaagaaattgttactccttacatggctttcctgcaatgtgccaatgtttctaatcacaaa

SEQ ID NO: 99076 - DNA, 343 bp, Glycine max
  unsure (1)..(343): unsure at all n locations
ttttgacaataaaatcagaggtatgaatgtatagttccaccttaaaattctatttaaaagtctacaaataaaactatgatttccaccgaagtcattgtccagtaatgcagacttcttttttggctacaagtttaacctttcttcattcacaacgttctatggctgaagcccaagtgaatttcttactcacgattgggtcacttcacctcaagctgtgcaacttgcattgttggagttgtgatttatgccatatgctgtttagaagtgacgcttctgtgtttagtggttgtaccgctttttcttataatangggaaactaacacctagaaaatgaacatcatat

SEQ ID NO: 99077 - DNA, 259 bp, Glycine max
gctctagaaggagtgatgcgtaatgaacgacttatatatcaggcagtaggttgccatcactcatcggaaaataacattgaaaattggttcaaacctgttttataaaatattagacctttgaaaaagattccacatgaggccaatttatcaataaacacatagtatggttcatgaaattaccgatggcttaaccctcactttagaacggaagaatccaatatgaatgtcttataaactcaatggtaataattgttttatg

SEQ ID NO: 99078 - DNA, 312 bp, Glycine max
  unsure (1)..(312): unsure at all n locations
cactaacaaagttagggctataaatacgcaggatataagtggaataaagtctataacgcaatttcatttctttggaatagaaatttttcccaaagctgatccagaatccagccacgccangtctgtacgttttcttttaatataaatcattcttgggggtcttcataaatacaatagcccttttctcttatgaagaaagcaaaactcatcccagcccgacatttcccaacttaattttataatattagggctcatcattttgtctcaaattgatcttttgtgcaaacaaaaaggtcttggtctaatttttca

SEQ ID NO: 99079 - DNA, 346 bp, Glycine max
agaatatcctatttcgagttgttctcatacacacatgaaattaaaatgatttgaattcaaatcgcatgaggaaaataccaatatttcagaagttctagaatgtgtatcaatcttgctagtgtgcatgtgtacgagctcatattggacgttaactaacttggatataaatatgtttgtggtagttagttaatccctttatgaacatttaaagttgcacaacacatactgatgtttggttgtacaaagatatctggacacttgtttagatacaacatagttggacattgttttcccctattagttatacaagtgctattctttgatgataaatagtgtttaattatac

SEQ ID NO: 99080 - DNA, 223 bp, Glycine max
  unsure (1)..(223): unsure at all n locations
ttcaaaataattgcaagaactatgacagaaatgtgcaaagttcatcctttgcaagaccaaaaccagaaatggtgaatgatagttcttgccattgaaaaaaatgacaatntcatattgagtattaaggagcatgtcatgtcatccttaattgatacacgaaatgaatcacgttcaaaagtgttgctaaaacagtcttgaaccttgtccaatgacaactactcac

SEQ ID NO: 99081 - DNA, 378 bp, Glycine max
accgctgatacacgctaagcgcaccaaactcgcttaatgcgaccttcacttttgcacttcttcaaattttctcttttttgcctgaaattgaagagaatttaacattaatttcttataaaaaggcttcttatgaaccgagatcaaaccaagccaaatttatttacaatcctacaaaagaactataaattgtggatttatctacattgtgtaaaagttttctatacccaagttagtcatataagacaactaacaaactcccccaaatttatagttttgctttccctcacgcaaagaaagaacaactcacttgtcctcaagtgacagaataacaatggttattctaaaacaaagtttgttccaagaatcaatcacatgaaa

SEQ ID NO: 99082 - DNA, 360 bp, Glycine max
tggtacctggagatatgtcgcgggggtcaagagacttggggacgtcagggggggtgctattgcccaaaaccaagcttgaccaatcccgaaccaacccgggcatagttcgtcagtgagaacatgtgacgtacctaaacatgcgagctcctggcagtcaacagataaaggaaaacaagaccacagagcaaggaggcttgtggtggctggccagctgtgaattatgtgtaatatgtggattgtggcctctggtaatcgattaccaagggtgggtaatcgattacaaggcttaaaattgaagacagggggctaagatggtctctggtaatcgattaccaatgggtgtaatctattaccaagctt

SEQ ID NO: 99083 - DNA, 390 bp, Glycine max
aaatatctgcctggtggtcattagaaataataaactcaatgatgatcttcttggacaataacttctctcgaatgaaaagacaatcaacctcaatgtgcttagtcctctcatgaaaagattggatttaaggcaatgtggatagcagcctgattatcacaaaataacctcatttgacaacttcacaaaatttcaattcttggagaagttgtttaatccacattagctcacatgtaaccatagccatggatcgatattcagcttctgtactggaccgagcaacaacaacttgcttcttgctcttccaagaaataatatttcctccaatgaagacataataacctaaggcagatctcctatccataggacaactagcccaatctgcatacaata

SEQ ID NO: 99084 - DNA, 352 bp, Glycine max
  unsure (1)..(352): unsure at all n locations
tattactagctanttcgaattctttatttcctgaatgtacaaccttcaaatcgttgctcgttcccctcttttttttctgcaaaaaagaaaatcaatatcaaagaaaacatggatgaaatcctaacaacatctatatcaaagaaaacatggatgaaatgacaattaataagcacaactacctatctttcagagtcctttggttaatatgtcttgtctccttatgtggaggggttttgtttaataatattatactattgcctttccaaaaaaacttatgactgatcctcttttcattaatctaatattgtatgttattgaataaaagatcaaagggtcttcaactgccttcact

SEQ ID NO: 99085 - DNA, 380 bp, Glycine max
tacatgtgcagcggaaagagaggttccgcccatcataaagaaatcatcatcattacaaacctctttgaccattaaagcatcgtgaaacgcctgttaaagcaattattaaatcaaaatccttaattattcagaaaaattttataagccataataattgactgaatttccagaagagaatacctttagtggactcaaatttattgcatgaatagtttaggagtcatgaatttatatgcatagaaatacacaaatgaaatatatagaaaatgtctcattatattagaggatcataaactcattcatcatttgtaatgcatcatagatcacacaatggaaagacatgtatattgcaaacagacacaatattcttatgaaatttt

SEQ ID NO: 99086 - DNA, 288 bp, Glycine max
  unsure (1)..(288): unsure at all n locations
tatgacagtcaccgctttangagcgctgtacaccagcagcgcttcgaggccattcaagggatggtcgtttttccgggagtgacgcgtccagctcagggacgacgagtatactgatttccaagaagagatatggcgccggccgtggacatcactggttacccccatggccaagttcgatccagaaatagtccttgagttttatgccaatgcttggccaacagatgagggcgtgcgtgacatgaggtcctgggtaaggggtcagtggatcccgtttgatgccgacgctat

SEQ ID NO: 99087 - DNA, 293 bp, Glycine max
aaaatgagtgggggaaggagagacttttcttaaacatgttgggatggcgtacatttcttctcaacattctaattaacattcaataatataaagtctaacgacactacataaaatttcctgtaaccttgagattaacctagcaaagaattgttccttaattctatcacaacttgtttgtcatcctcaatcatttcagttgaaagacaacttttcttttgttttcggtattgacagagtgcgaggtaggattataaccagtatttacaatttgctacaactactttgaaccttgt

SEQ ID NO: 99088 - DNA, 237 bp, Glycine max
acctatttgtgtctccggatgcgcattcttacagctatatcatttttatcagttgtgaagacctttcttatcatggagaaaataaaatcgttatcacccttgatgagtggaacaacaaaaagaagatattgttctttactttcaagtcctaaactatacttaaacttttctaatttgggacgggtgcactcatgtctccgggatatgcgtctatttaagatgctaaagagaaatgga

SEQ ID NO: 99089 - DNA, 320 bp, Glycine max
gaacaccaacacgactccttgttgtaacacgggagtgcaaggggcctatacccgggtcatggaacataggagggagggaattgtggcatgcaggctttgactgcttgatataatgaccctcatcttgggtgtttctttgatacaaattgttgtggtagtccctacggcgcatatgttgtcaatgggatgatcctcttgaaccatcagagaatttgacccctttggaattatcactaaatcttttaattcctccgttatgtccctaaatatgggccgaattgacacctgcgtccttttaacacaccatcatatacctaatg

SEQ ID NO: 99090 - DNA, 209 bp, Glycine max
atatgcaaacccagcaatttatgagcataattaatattggaagcaaaaaagacctaatgtccttaatggcgaatgcaacataaaaactaagcaatggttgagaaaagaaatagtcatatatttaagcaaaaatatacattgcctagataagaaacttaggttaaatgtaaaagcaagaatgggatacctcatacacatgagccacaagt

SEQ ID NO: 99091 - DNA, 150 bp, Glycine max
ttaacacttggatttagtcgagacactaacgagtgtcctttttttgcaaaaaatcatccaaactgtgaactcgctccttcaacactgagaagcataaaaccactccatttaagcctggtatcgctgttctaggggggttgtaaattatct

SEQ ID NO: 99092 - DNA, 399 bp, Glycine max
  unsure (1)..(399): unsure at all n locations
ttcatccccttcggcacttctctctcttccgaattttgattggaaacaatgttttcgtgaagaaaattcaagccgaggcgctttcgaatcgtttccgtaacgtttccgtgcggaatttcgtgaaggtttcaaccgttcttcgacgttcttcattcgttcttcatcgttcttcgatcttcaacgggtaagtacttcgaaccaagcttttcgattcattctatgtacccgtggttgtccacattgtgtttcgtgtatttttattctcgtttcatttactttctataccccctttngacgtgcttaagccattntatttaagtcatttctcgcttaaataaaaataaaataaattccaccgatcgtttgaattgattattcgtaacttctgtaaatgaattc

SEQ ID NO: 99093 - DNA, 256 bp, Glycine max
catttcgagttcgtaaccgttccccaacataactcgggccatcattactgctgcatctgacaagcaagcttgcccagagaaggagtccacggaggaaatgcttaccacctcaaaagaatggaaagcggcttctaaagactcctctacggcttccacataaggcatagaggatgggcagctcaccaagatgtcttcctcgcctgatacgatgaccagatgcccttccactacgtaattcaacttttggtggagtgta

SEQ ID NO: 99094 - DNA, 321 bp, Glycine max
atcgacttcggtaaaagtaatgtattgaattgctcatagttctgtttcaatacaacgcctaatatttagggattcattcgactccgagaaaaattattgccttgaattgctacagcttcgatttcattacgagcgcttgattacaacgaaaaacaattcgacatcgagaaaaagtattgtcgtagaaatgcttaagctttgtttcattacagcgtctgaatattacggactaatcacatcagaaaagttatgcattgaattgtcatactttgttcattacaacgctcataatcaggatcatcgacaccgattaaattatgc

SEQ ID NO: 99095 - DNA, 345 bp, Glycine max
catttacacactttccagctggggctaacaactgacaccctctactgtcaagctctatctcacacaaatttctcttttaactgacaaccttttctctcgtagctactaagacttagggggctttttctggtcagggtccacaaattaacgtggaaaactactggactccaatcacatccaaccctccttttagccctaaccaagagcatggctttttccctcatcagctggctctcaatgacacgttttttaacccttcataataaatatttgaatctctttctatggctggtatttatttacccacatttgttagccttttattctactatttttcagcttttt

SEQ ID NO: 99096 - DNA, 344 bp, Glycine max
attacatatgctatgaaaggtgggcatatcaagcataaccgctaatgaaagagagggcatatcaagcataaccactaatgaatactgcgatcctgcttggagcgacagatacattcttttaactcaatttgtcattgaaggcgagtttcttggaacaagtttataatatccaaacctcacgtacttatttaatgatgtaccggtgaatttcacattgtgtttgattactattttctgcagcaataataatgttcacatttcacaactaaacttttttattaatacattttgtcaccctttataaatccctgcacgttatcccattatgaaacaaaattttattt

SEQ ID NO: 99097 - DNA, 262 bp, Glycine max
aaatttgccttgatgtttgtccatgctggtcctacccaattgggataatgattatcggtttttccaaatttgagtttactgtttaacaatcggcctgtgtagaataatgcttctttcaaaaatgcatcagaaccctgcttataatatggcccctggcattattctgttgtaaaaaaaaagagtccccatcattatgcgcacgaatatgaactgctaagtaaactcattctgaatgatgtgtacatgggtggggaatcaaaac

SEQ ID NO: 99098 - DNA, 158 bp, Glycine max
ttacctacgcacacatgtcttgtagcttagcacacctccgtgagatgagacgctagagctcttctactcaccctctatgctagctaagcttacccccatgtcaacttacatggaactacaaagggacgagtgcttactaccaagactactcattatgc

SEQ ID NO: 99099 - DNA, 220 bp, Glycine max
aaaaaatttcttaaataagtttacatctattttaatatatataaatcctaattttcaaaaaatatcctaataaatggtattttagtaataatatcatttttttcatctattaataagagtaaatttataaaaatatcactctttttatctatttaataatttttttatctatgaaaaaaactaaagataatacttaatttgaaaaaaataattaatcatt

SEQ ID NO: 99100 - DNA, 363 bp, Glycine max
  unsure (1)..(363): unsure at all n locations
tttttgtgccacaccaagtgaatttcccttatggatagtcgggatggtacattttgttcataaggatcaccaangtgccacaatagttccttacgacacaccctttctaatttgaagaaaccatgtgttcataaaaaccatgcatgagagtcatgcattggaacatacacatttctcttgtcatgtgtcatgagtagagaagccactatctgggtaccatggtggcatgtctttttccggttaaagaaatatgccacaaaaattaatttatccttangtncctaaatagtaatgtgttgctttttgtagtcttgaaacattggcaacttcattttaaggagatatctcacttgaatgcatatg

SEQ ID NO: 99101 - DNA, 160 bp, Glycine max
tttttttaggagggggcacaaccacaattttataattgtattatttattttgttaaatataattgattagggaattattaattaaattaaaatatattaatagatggatcaaaaatttggagataaaataggtattttatcattaaattataggaatatg

SEQ ID NO: 99102 - DNA, 404 bp, Glycine max
  unsure (1)..(404): unsure at all n locations
agcttagggatagcgtcctcccatcggtcattacttgtnttcgaacgagtgccgtcagccatggcaacgatgatgaaagcaccaattttagcagctggtctttgaggcccaacaaccttctctaagggaaagagagactctatagagagattgaggacaggagtcttactttttcttatttttgcgaagcgctttcaaacatttatcggttatacataagggaccaagctcaacggctataacagatagcctaactgccagttagttattctaacagaaagcttctaatggttggattcttctccaagctgcttgcctatttcgtgtacgtgcatggcttaactaccagtacgtattccttcaagtgaggggagaatacattgcttttggctttgctattggaa

SEQ ID NO: 99103 - DNA, 325 bp, Glycine max
tgctcgaccttaaacaaccggctggggctcacaatcaaagcttgtgtgttcttaggccgtgacatatgccctacaaaataacacctcgagtggagcagagagggtggcatagtctctaatgaaacaaggacaaaatccacggaggcccaacaaagctcataaatctttctgagttgtctgtattggccaacacaacatggcggcaattttggcctactctggttcaatacacttaccggaaatgatatggctgaggtattctaattgttcgtgagccaagaaacatatggagcacttgagataaaacttgcctgccacaaagcac

SEQ ID NO: 99104 - DNA, 334 bp, Glycine max
  unsure (1)..(334): unsure at all n locations
tgcacgcatgcaagctcgcatcttaagggtgagatgttggaaaaccactcttgtgagctntcagcttcgaccacttaggcacaaaatcacttgctataagtcagagagcgggtctatcaccaggagtgcactgtcttgttatggtgtttgacaacctccagaacgggaatttcattcattcttcataggatttgatatatcctaggagaatgtctcttcattatgaatttctgactcaaggcaataaatgaactcttaaatggaatctatttagtgatgaatcagatcatggcgtgtctattctatcatttgataatacacacaaggatgtctg

SEQ ID NO: 99105 - DNA, 363 bp, Glycine max
gtatctgagcctggaaaaccatacgtgctagcgtgtgttattagactcagggttcgctcgggcattcttggatctcgataaggtactcctacacagctagcaaatgatattaatgctatgctgtgttgaaaaggcgcacattaatctgagaaagtgaaacaaacactactggcccagacactcttccagtttggatcgtcaatgtatgacgagtaagagtgatctacacgggagtgtttatatgtttctgtgctaactgctaactcattagcgctcgtggtggtcatttatgttagaagaaggcacattatcatgtcttttgactactgcttgtttaaagtaattaaaaatgaaatcttttaa

SEQ ID NO: 99106 - DNA, 400 bp, Glycine max
agcttgcacaagctaaatatcttctatcctggatagcaaaatttaaaacactgatatcagatagatatgagtgcatacctgaagtcattttggctggtgacttcaattctacgccaggagatatggtactagcattcctaaaatcttaactcccctatttcttatttttgtctagtatataacggtcctgtttgttatattcctatcttgcccaactcttgtcttgttatttgaagctaggtgctagattaagattgttgttgcacagaaatcctgcgtgatgcattaatctgctagcaactcatggttattgattaaccttcaatctcaaaggaaaagagaagaatggcatataaatatttgctgggaaagggaaattgcaaaatgtgtccagagatgt

SEQ ID NO: 99107 - DNA, 327 bp, Glycine max
agcttagacactaaatgttgaagagtatcatgaatatctatctggagatgtgcgatttttattatatacgcgtaatttgcctatacgaaccattagctgggattctgttgctaaactaccataagttgccacaactgaacatgatgtgggtttggagatgattaaaggcggtggccttgattttgctatttttggctttgccgtaacctcacacccgtgagccctatgggtataatacttagccctctgtgtgtgtgatgtgccgataccatggtgagttgctcttcaacagttacgaccctctcaacgggtgcacagcggctaata

SEQ ID NO: 99108 - DNA, 448 bp, Glycine max
  unsure (1)..(448): unsure at all n locations
atccttgagtcacctgcggcatgcaagctgtatttgcaagagagtttaccgaccgtattntattntattattttacacgtgacgacctacaatgatggctggtacacttttatttttgaaagagcaaaatattctaaaggttatgcgtgatcagaaagaaatgactccaaatagagttgtgaactggccatttatgactttatagtgaggattttccttctgaacttaattactgcgaaaaagagaaagaaacgacaaagaaaaagaaaaagaaatttcccatggcttttgctatttaaatcattactattagaccagtcatcatttagggacgccacacagattctcttgcatattcttcccactcgctaagcgagctgagtgtcttgcttatctgatgttactcactaagcgcatctgcctcgcttagcgagacaccagctacttc

SEQ ID NO: 99109 - DNA, 256 bp, Glycine max
gtaagaactcttctcttgctctattgcccttaaatgaatacacctctagttggctctctatttgggtcttaaccctctcaagcaactattttacaaactctgacctagatacccctattctgtgttataaaagaagagcccacaaggagggcaatgagtgctaatggcgttaggtgattaaacccatagacaaccctcataagagactgcttggtgtggttatgaacccattctgtgtgttgaaaaattctacatg

SEQ ID NO: 99110 - DNA, 174 bp, Glycine max
  unsure (1)..(174): unsure at all n locations
cgcttttaggaaggtatatgggaatatctatgatctggcgatgatagaagngncagttgatgccattgcatctctcactcaatacgatgaccaatctgttctaatgcttcagatttggtgactctcagttatcaccacccatagatgagattgaagggatcttttgatgcccca

SEQ ID NO: 99111 - DNA, 281 bp, Glycine max
cttaaaactcagcttaggagtaactacattgaagttgatgttagtctatgcgatcaatagtccatgctagagaagaaatcgacgtctgaaatcactggtgctggcaacttggacatatgaacttgtaaaattactgagaattggtcactgcaaattttgagctgaaacttctactgaattttcatgacatctggaaaagagttataaataagaaacaagtgatttggattaaaggaaaaaatacataaaatcacacaaattgcgagaaaaaatattatgaa

SEQ ID NO: 99112 - DNA, 412 bp, Glycine max
  unsure (1)..(412): unsure at all n locations
agcttgccgntgaacaagtttgagatccgtttggatcaccgggcagtgcactcgcattggtacaaccttgagaggtttggctatggtgtgttggagggtgacaagaggaatgagacaaaattctcaagtaggattcacctaagggtgtgtcttgagggtgcttatcatgtgcttgatgagtccacaatgtatattagtgacacaaggcctactgctagacaactttggaaacaaccaattgggattcttgaagtggggatattgagtgcccaagggctccaatctatgaagaaaaacaatgctaaagggtcaacagatgcttattgtgtggccaagtatggtcagaaatgggtgagaactatgactatcactgagagctttaatccaaaatggaatgagcaatatacatggg

SEQ ID NO: 99113 - DNA, 440 bp, Glycine max
  unsure (1)..(440): unsure at all n locations
tacggaactatgaaactaagcttgcacccagctcgtccaggcgagcagggttgcttcctttataagcaacagccttctggaggaatcttgtggagggcccaagtgggcctggttgctatttgtacccccattcttactaagtacaccccctgcctttttttggtgattctttattcgtaaagttacggaaacttacgaatttcgtacgatactggttttctttccgtaatgttacggaaccttgtggattacataatcataccctttttgacttacgaaatattacggaacctcactaattgtgcaacgatgcttccatttgattttcggtgtgtcacggaaccttacggatngtgcactaaaattntcttttgtttttcggcatgtcccggaatttcacaaattgcctaatgattggtgccgagcacctcacaaggacc

SEQ ID NO: 99114 - DNA, 413 bp, Glycine max
  unsure (1)..(413): unsure at all n locations
agcttgtcatcgtgagacatcagaggctattattttaataaatgtgggtaagaaaaattcaccaaattgatagagaaaaatctaaaatcatacatcttatgcaaataaggcatgctatcccccaacattattgcattttgattccatctttagacattcaaattggtgtttatttatcctgttatcttttcctttgccttagtctaaatttcaaacttacaattcggtatctctttcttcttttgtttctcctcatttcttaataattggatttgcatcacttaagtacaaccaaagtccctctggatttaattgttgaacttcaatttcaatctttactacttgtgataaaattaggacacttgtcaatctattaacaagttcttggcgttgntgatggggactttggtttt

SEQ ID NO: 99115 - DNA, 216 bp, Glycine max
  unsure (1)..(216): unsure at all n locations
gtaaaacattcgaacaccgtgttcggaattcatatgcgcatatctncaccgttgggattagtcaaacttgaatatggagagagaaacgtccctcgcatagagacaaagaaatggagcctcatatcccttctcctactctctaatgcttgagaaccctagcagaacaatcaaagctaaagtttgagaanacataagcaacaactagagatgctacta

SEQ ID NO: 99116 - DNA, 406 bp, Glycine max
  unsure (1)..(406): unsure at all n locations
ngcttgtaatcgattacacaaggtttgtaatctattaccataagtttaaattgtttgtaacagcttttaaatatttgatattaaatattaaaagattgtaattgattacatcatttgcgtaatcgattaccagacacgaatataattatagtttaagtctgaggagtcacaactcttcataaactaattgtgtaatcgattaccatatttatgtagtcgattaccagtaaggaatttttaaaaatacctcccatgagtcacaactgttctagaagtttttgaatgactattaaaggcctataaataggtgaatcgggatacaagattccttatatgatttgtgaacaacattgtcttatcctcttaaaccaaattatcttattactctcaaaaattgcttgggcaa

SEQ ID NO: 99117 - DNA, 408 bp, Glycine max
  unsure (1)..(408): unsure at all n locations
agcttggaggatatgggctttgctattgcaaggagcgatgtggatctganacaaataaggcaaatgtgatcatcctacttagacgactgagacaactgcngcgctataagagggtgagggtaagggagaaactcctgctgcgactgccattcctgatcgaccaagattctccccatccccacaatatctttactcacccaatagcgaaccttctgcttacctcccacccacgtatccacaacggccatccctattgataccacagagtctgtctacccgacttacgatgacgaacaccacctttaacacagaccaaagacaccaaccaatacgtgtattgtgcaacgataaagcctgtataatgcaccccacattcagtgtcctaagctgacttgctgctacatctac

SEQ ID NO: 99118 - DNA, 352 bp, Glycine max
tgaccgggatcttaagtcacctgagctgcagctgtcatttgaaaattgggtcatctattgaatgggggcacatattattggctacaagaactcaaattttacagcttctaatgctatgattggttcggccacacctttcacatgtataagacaggcgagttcctctttaatctatgtcctgtgacaatgtccttatacacagaactccttctattggtctttggctttcctttttggacccttttatgtggtggaacagggtgttgatactatgtctgggcccaatattgtggtccttatactggtcaataagtcttatataatcttctattggaaccactcataacacatg

SEQ ID NO: 99119 - DNA, 372 bp, Glycine max
  unsure (1)..(372): unsure at all n locations
gtaatacgtatcacctccatcatagctattgatagtcacatttatgtctaatcaccactttactgtattagagtaaattgctaaggcattcattgcctaagacatctcgggcagtaagtagacataaccataacgtgaataatcatcaataatagtgatagagtatcattcctttccgaaagaactaacatcacaaggtccacaaatatcagtatgcacaatttcaagaagctgagtgcttcttggagctcctttctttgtatgttntggttgtgttcctttaatacaacccacacaaagtattagaatccgtagatctagataaggaagatcatcatttttttataatctgtccattctttctctagaaat

SEQ ID NO: 99120 - DNA, 393 bp, Glycine max
atccttaatgcacctgtagcatgcacttactctatatattttcgagatcttccctggaatttacgagccataaccacatctcgcttgtaaaattctacttatgctgaatttgaagtgcccacatattgggattgatatatgattgtctcacctacttgttagcatgactaatgggtgaaaaatgatttaaacccatgatatcttccatgctcttaagagatgaagatattgacatgaatccatccatgtctttgaaaaaaatatatgtcatcagacaaacattgtctacaatgagggctgatgaatattaatcattcgccatattaaaaatacagattctcgcatcatttgttttgtgtaaaacatatcaaccactaacgcccaccagaaatg

SEQ ID NO: 99121 - DNA, 373 bp, Glycine max
  unsure (1)..(373): unsure at all n locations
agctcgagccaaaattaggaactaagctagattctatttttcacaattaggttgtttttcactctagcttagtcaaaattttaagctcaactaaaagtcactaaaaataaatattttagcttttccataaataaggcttgactgccatttagaaagtgaggggggagttcttcatttggcatgaattcacagtccatcgagaaggggaagctcctttgggctccactcttcatctatttcctccctccatgtgntttgaggctacccatggaaatgggagctaaatcctcaccattgtggtagatcaaccaactcaattctctttatcttttgatatttaatnatagttaatatataatatattatctcgatc

SEQ ID NO: 99122 - DNA, 466 bp, Glycine max
  unsure (1)..(466): unsure at all n locations
ntactgttattccatgtagctgggctatgaaggagggttttgcactactcatttctgggatgggtaactccttccaaacatctttgaaactttcatctatgtaaggggttagtcatgagaaataatacagggtgcagttatgatcagagctcaacaattggtaatgacttcttactattattgataatctgatataactatggcatcatatttacttttaagcaaatataaccaagtaaaccgagtatgggcattaacaaaagacatgtaatatctgaaaccagattgtgaaaccataggagagggactccacaaatcactgtatattaattccaaaggagatttatacacagtttgagaagagaaggtaaacgatgtatcttgtccatacaacaagcagaacanagggaagatcattcttaacaggaaatttcagattacaactattaagaacaagctttaaagc

SEQ ID NO: 99123 - DNA, 428 bp, Glycine max
gatactcacacgccgcatgcaagcttcgcggactcaagtcaatggtcaaactctttttattctacgcgaacccaacaacattgtcgagaactaccctaggtcacatgttcttaccatgtgtgctaagacatgtctgcttccttatgggcttgtaccgagtctaaggttgatgctctcataacacaggcgatgttcgacaatggtgcttgtctcagtgaatagtttgatggagacaacaagacgatgagtgagatgaaaagggaaaagtgggaactttacacattttggcgggtgcaccaaacaaaaaatgaggtccattatgtgtttgcgcacgctatattacggtagtgaaatgtaaactattcacccttcagccctatatggcttatttttctattccgcactcatattgatggctgtcaaaatga

SEQ ID NO: 99124 - DNA, 184 bp, Glycine max
tcaatatatattatatatggatatgtagtttattattcatgaaatacaagatattattatatacattcatcacaatattataagttataaatatctaaagcattatttatattatttataaatattaattatatatgctttattgataatataaatattacaaatattatatataacctatata

SEQ ID NO: 99125 - DNA, 418 bp, Glycine max
  unsure (1)..(418): unsure at all n locations
agctnttcacaacaaaattgcatataaatatctcttcagatcaatcactctggttttccacgaccagataagcatttctgacatttcataaattctactttggctgaaattgaattgccaacatagtggaattgatatttgattggtttaccttcttgttagcaagtctaaagggtgaaaaatgttagaaactcaagaaacattccattcccataattcctgaggatatttgacatgaatccatccatctctttgaaaaaaatatatgtaatcaaacaaacattgtctacaatgagggcgaatcaatattagttattcgccatagtaaaaatttattctctgggatcacttgctttaagttaaaacatataaaattactaacgcccaccagaaatgggacttcattaaaaaaaacgtt

SEQ ID NO: 99126 - DNA, 200 bp, Glycine max
tcagaaaaagagaattatatttgaagcttagtgacccaaatcaaatggtatgcttgagttgtcccttaatgtgggtgcaagatgaaatttatattcatcgttagaaaaagagatgatattttgaagcttagtgacccaaatcaaatgggatgctggattggcccttaatgtgggtgcaagatgaataaaattcatcatcg

SEQ ID NO: 99127 - DNA, 418 bp, Glycine max
agcttgctcgtggagcttctatggaggctgtatctttgaacttcaacgaggctctttaatggtggttttccaccatggagatgcagcggaagacaaatgatatgaggggacaggaggcgccatccactagggaataagccatggaagaaggagcttcaccaccaagatgagccttggatgataagctcggaaggatgcttcaatggaggagaagaaagagggagagaaagagagaggggggagcacgaaattgaatgaataaaggagggagagaagtggaactttgagagaggtctcacaagactctcattcatcacaggtacaacacgggttacacatgcttctatgtatacactaagtagcttccttgagaagctttcttgagaaaacttccttgagaagctgctttgagaaaact

SEQ ID NO: 99128 - DNA, 426 bp, Glycine max
  unsure (1)..(426): unsure at all n locations
agctngtntatcccgaggtgttttgatcctctcattgcagattctatggcatttaggtgggctatcaagacctcgtctcagatgtgcttcttgaatataatgtatgtttgagatagataaccagattctgatttcgcgctcttatcattccacagctattgagggattgctaaagacttactcatacaaaacggtgttgtaatacacctacggattataaatgttgcacgccccatggatgtacgctcacaagggagattaaacaagagatctctcactaaatcaattgtcgagcataaagagcttcatcacttcgtcaccctattaggtttatgtaaaacttatattatgacattaatttttaatttgctaatgtttgttacttaacggaataatattttttatgaattaacgtcttaacaatac

SEQ ID NO: 99129 - DNA, 415 bp, Glycine max
  unsure (1)..(415): unsure at all n locations
agcttcccaacatccaattaattcaacatttaatcatcatggactaacaaaaccaagcaaaacagggcaaaggcagaaaactctgcccaaaacacaactcaaaatcacagcttttctcacttaaagaccccagtaacaattccttctttccaattccttaaccggtggatcgactcgaaaattttactggaagtctctagtacataagcctacattntgaccgttgggatctactagtaaacatccagaactcattctgcactactctttccagaaccagcaaaacatagcatttttctgcacttatgcaaaattctactgcacaatttcacagcaaaattctgcataaagtgcagatttcgaaaaccacacttcccctcatccaatcttgcccaaatcaaatcctacaagtccc

SEQ ID NO: 99130 - DNA, 419 bp, Glycine max
  unsure (1)..(419): unsure at all n locations
ntataagcgcgggttcgggagacaaaggtcattcgtnctctatatgctaagatgatattccgagtactttggttttggtacgaccatgctctcctgatttccagctgggaaattggcgagtggaggaacgccccggcatttacgcaacaagcataatgtaaacctttacggttttaaaagctctatagttgggcctaggctntagagttttttccttttgttaaggctttgtgtcttttgtttttgaatttataatacaaggatctntcttcatctgttcctgggctctacccattctcattcatttgcatgtttacttctttttctgaaacggcagatccgatgacgagtcctccgaatgtactaatacctgtgacccgtctatcaacttcgagcaagaaatgaatcanacggaagat

SEQ ID NO: 99131 - DNA, 414 bp, Glycine max
agcttgccgcccagctcgcccaggtgagcattgttgcttcctccaaaagcaacagcattctggaggaatcttttggagggcccaagtgggcctggttgctatttacacccccctttttactaaatgcaccccttctatttttttgtaattctttttccgtaacgttacgaaactttatgaatttcgtaacgatacttattttccttccgcaaggctacaaatccttacggattatgtatttactcttttttggctttcgaaggagttacggaaactcacgaattgcgcaaaaacacctcttttccatttccgccacattacggaatttcacggatcgcgcaagcctgcttccttttgatttctgagacgtctcgggacttcatttattgtgcaacaaaggacgccaagtatctc

SEQ ID NO: 99132 - DNA, 436 bp, Glycine max
ctgactcaccataaaccttttttctttgtgatattctcatccgtaccctccgatgcctaatatacatagaggatgacaatttccactcaaagatgaagctaataactggagagaacgaaaatttcctctcacaggaaaaagagaggaaaggaaattcccaatcaaagagtgggagatagcaaaaagaaaagaaagataaattctcaatcaaagaatgggagatagaaaaaaagagaagtaataaagaagaaagctcctggtcgaagaaaccataagaaatgtgccgagaggtccttggaccagacgatgtctgaacaatacagaattgtcaccaaatgaacaaaagaaagaaaaggaaaccatgacctataagtggcttctccctttattaccacccaaatcctgtcgctagcaacttttcgctcctcaaaccaaa

SEQ ID NO: 99133 - DNA, 410 bp, Glycine max
agcttagtcaattggtttaatctgtctattgataatccttcatatatttcgtctgtgaaaattctctttcaagaatctgcatattttctctcatttcttcttactaccaggacatgacaaacgatagcagcagatacctctctgaaccctacgttggggcaatggtaggcaccatgcatgagctttcaagcgaacttagggggcagatataaggttttcacctagtaggttgaaaacccaaaagggcggcttaggcaaaagttaaggtaaataaaaaaaaaaagagaaaaacactcaagagcatgttatcagaagttttgtcccaaaatcaaaactgtaagaatctctagttaagatttgaaatgacacatggtcgtgtttcttcattcccaacactaagttatcccttg

SEQ ID NO: 99134 - DNA, 415 bp, Glycine max
  unsure (1)..(415): unsure at all n locations
agctntgattccaaattgaacttctcttctactgagtcctccagctntttctgaaatagagttntggcagcctcaagttctgatatagctacttccttgtcatgtaaaatggtagtgatgtattcctgttttttagcctcagaacgagcaagttcttctagtaattgatccctctctttctcaataatctcttgtctatgttgtgcctccgaaagagctttnttggttaccactaattcatcttctattcctataacatcatcttgatcaacaactacatctgtgagtttgtcatctgaatcattctgtcacacaaatagaataaatatagggtcacttcccactatcaactntgtaattngcacctacttaatataatatcattacaagatatgtgaaactccgtcacctttct

SEQ ID NO: 99135 - DNA, 424 bp, Glycine max
  unsure (1)..(424): unsure at all n locations
agcttatattctaggagagcactcatccatatataaacctttntctttntatttccaaccctattacttgccccctttttacactcaactttctttttattaaatgacagcacacacacacttttattttatacttatagntgtttttttttgaagcatttgactgtgtgtgctgctctgctcttaccatttcattcccttttacctagtagctcccccaaatttggggcaaatttggccttgaaccatgtctttctatgaatgatgctctcctacaacctaagataaggtagcaggagataaactgtgcaggctcaaggttcaatcaatcaaacattgattcagctcacactgggtgcaagggataaatcattcatgcacatggtcagctttttggctaagtgtgtatttacaatctaacatg

SEQ ID NO: 99136 - DNA, 218 bp, Glycine max
gacaattgtctaggaaggcgaagaggtgactatgactattatgttggacacgaaattgtgatgagagtatatccgagatagagcaacatttattgtagcatgtggcgtgagacaaagggcagttcagtctagtcaagtcaacccaagtccacctatgcataatgtactatatggtcttgaaaactttgatagtgcaatatggctggttacacaattta

SEQ ID NO: 99137 - DNA, 413 bp, Glycine max
agcttgtaggattatggggtacccgtcatgtgtggtactaggtggcgatcgggcgatggtgcatatcaactctcccacatccacaaattaaacatgaacgcaccatccccagttgcccaccttcaactgagctcacgtacccccacgtagcccttattctcgatcctctcagaaccggggccccatcaaccccttcaagcttgcacaatatccaagcaattcaatattcaaacatcatgaactaccctaaaccaagaaaacagggcagaggcagaaaactctgcccaaaacacatatcaataccacaacttttcctactcatataccgcagtaacattctcttcgtttcgattcgctaaccgttggatcgacatcgaaaaatgtactggaggtccctagtacataagtctaca

SEQ ID NO: 99138 - DNA, 253 bp, Glycine max
  unsure (1)..(253): unsure at all n locations
tacaatgccttgcaaaaagcaggtatggatccctgcggcgggcacaaagaagactcttgctngatgcatccgggtgtactccatgacatggaaacatgttcggaagtaagggatcttctacaatggatgatagaccaacgtcggcttgaggtcgatagttagagggaggaggaacaacatgtatacgtgcaatcagcggacgaagaaggacctaataagcctaaacccttggttatacactttaccaggaaca

SEQ ID NO: 99139 - DNA, 308 bp, Glycine max
atctataagtcacctgatgcatgcaagcttgttataccttgtcatgctatctatcctgaaacgagattatcactatccattaacgagcgcattaccatggaatatgtggtacttgttgtttatcatctacgaacgagcaattatcgtgtatcttagagaagatgacccttttgcatgacactttatgagcttctacatgtaagaataggaatatgtgtatgacatgcctgcaagatctcaagtacttataaatggaattgaacttatatgacaatcctttccatatagctcacataaactcttctgac

SEQ ID NO: 99140 - DNA, 426 bp, Glycine max
agcttgcactttaagagttggttatatccacagtccatgtgcagagggaagtctcgtatgcaaattggccacccaatactacattaatattgtccacaccagatggattgtagtaactactttatgggttatagtgttaggttgttaattagtatgtgtttgtcattatagagataaacttcattctcatgatcaatccaaagcatataaactaacatagttcaaaagttatcaaaatatgtaacaactatgtagctgaactcatttacaatggtagcaaacaaatcatgccctctgcactgaaaaattaagaatgaaatctttaatttcgtaggcagccctatccagtgccgtccttccgtctgcatcttttacatcatattttgctccagctctcaagagttcttcaatttttggcttgtcacc

SEQ ID NO: 99141 - DNA, 289 bp, Glycine max
ttgtactacatctccctagggatatgtgtactcagagtaaatttcaaatagagataaattacaatgcgacttagtgcgcagttcaattcttgcacagatgaaaatatagttcaaatagttgttatttctctgtcaagcttcactaaactaatcacatgtatgtatgtatatatgtatgtatgtatgtatgtgataagcatgacaaataagaattaaaaacatataatcactgcaattaaatacatacatgcatagatgatacaacatagagtctcctttgcaacttgag

SEQ ID NO: 99142 - DNA, 352 bp, Glycine max
agcttgctcaactgtgcatgtcactcgttattgaatcacatatcgacacctgaagctagtaccagcgctgttacttactgcgctgccctatcttatatgtgacagggccggaataaaaactagagcatacggctctcgattgaattcttcacatctcacgtattgaataccgacgacgcctataactgctgccatctgcagggcctaacaccaccacaacggagcaggttccaatgttccatggtgcctcacccttcaaggttgcccccctactgatctcaccgctgggatgcctaccaacgaaccagaactgtatgcaatttctccactcacctcggcggcatacacatgc

SEQ ID NO: 99143 - DNA, 189 bp, Glycine max
cttcattatacatattgctagtatcagcctgtgctaatgagtgcgggcgccgtggcacttattctgtgagtgaaaatactaagaggacccactcatggtgcgcacgacaccttgaacatgaacatgcaactgaatgatgagtgcatgtgaacatggcccggggatttcagatcacatgatgagcatata

SEQ ID NO: 99144 - DNA, 422 bp, Glycine max
agcttcaacatcagaccacttccagggtgctggaactacttcacatggacttgatggggcctatgcaagttgaaagccttggaggaaagaggtatgcctatgttgttgtggatgatttctccagatttacctgggtcaactttatcagagagaaatcagacacctttgaagtattcaaagagttgagtctaagacttcaaagagaaaaagactgtgtcatcaagagaattaggagtgaccatggcagagagtttgaaaacagcaagtttattgaattctgcacatctgaaggcatcactcatgagttctctgcagccatcacaccacaacaaaatggcatagttgaaaggaaaaacaggactttgcaagaagctgctagggtcatgcttcatgccaaagaacttccctataatctttgggct

SEQ ID NO: 99145 - DNA, 231 bp, Glycine max
ctatactcgtctcattatctgttattgagaacctgtgatgtacctaagcaagcgagctcctgtcagtcaacagataaaaggaacaaagaccacaaagcaaggaggcttgtggtggctggccagctgtgaaacttgattgatatgtgagatatggtctctggtaatcgattaccaagggtgggtaatcgattacaaggcttaaaaatgaagacagggggctaagatggtctc

SEQ ID NO: 99146 - DNA, 412 bp, Glycine max
agcttctgaaggagaaagagaataacatttatagcttacttggattgaggtgaaagatgtaagatgagagcaagaatgcatgagaatagactcaaagcacacgcagaaaaaatgcacacaagcacagcggtaggcacaagcataagagagtaaaagcttctgggtactgctattcaatgaatacgactaactttcgtgtaagaaatttgtgcaaattgtatctaactcctcccatttatggatattttgtagtgttgtaattactttttgataaatattggtactaagtacttagtactcccattttgtgtatttaaaaatcatttcctttcaatttcaagttaattaggcaagtttgtgaagtactgatttttaacttctcgcttagccaatctgccggcttagagagcca

SEQ ID NO: 99147 - DNA, 329 bp, Glycine max
ctcttgcttctcatggaaggttactcaatgaagcgtctcaaggaagtgttctcatgaaagcttctcaaggaagctacctagtctataaatagaagcatgtgttacacttgttgttactatgatgaatgagagtcttgtgagacatacttcaaagttccacttctatacctcatttatttcttcaatttcgtgctcccacctctctctttctctccctctatcttttcctccattgaagcatcctcttcaagcttgttattcaaggctcattcttggtggtgaagctccttcttcgctggcttattgcttaatggatggcgccttctctc

SEQ ID NO: 99148 - DNA, 125 bp, Glycine max
  unsure (1)..(125): unsure at all n locations
gtcacctgcggcatgcaagcttgcgataactcaacacatccttatgaattgtttaaatcatacttcttanacagctcgcgcatattacatgtgatatggacaccttataatactctaagtgtcta

SEQ ID NO: 99149 - DNA, 412 bp, Glycine max
  unsure (1)..(412): unsure at all n locations
agcntgacgaagaaatatttctgaatttgacgcacgaaacggctaatgtgaatcaatcatgctcttaagctatgctcttactaaaagacttgtaaaatgaataaatttcaaacacaattcaatagggcattgtaggattgctaacatggcttcaaattacaacgataaccaatggtcagtgtcatctttcttgagcaaaattgcatcttcatgcactctcttcctgggcttcttcattattgcccttctacattccatcacccttctgatgttgctgctcagccttcttctgtgctcgaatcatggcacgccttgcttgcggcctcatttctcgtacacttctaggaggcatcacataaggttcaagtgggcgagtcacaaactgtggctcacttgcaagaaagatccttaa

SEQ ID NO: 99150 - DNA, 300 bp, Glycine max
  unsure (1)..(300): unsure at all n locations
acagcagctcggctatttcacccctagtactacaagacctaacaactattcaaggggcatcatccctattcctaccttagggaattgaaataaaacataataataaagtccctataatcatataagtttgggaacatatctagatggtcctaatttctccttaagaggagtgggttgaggccaatttgaagaacaaagattgcatatataatggttcccattaaacccacaactaaacctcctatggtgaccaagacattnnttgttcccttctttctaggatatctagaacgaaaacta

SEQ ID NO: 99151 - DNA, 302 bp, Glycine max
gagatgatgcattcgagattcaagagaagaaaccaaaaagcaacaaggcaagacttcacaagggatgtattgaaaaagatttttcaaaaaccaaacacagcacaattttgttttacaagaaaagtttctccaaattcgtctaagttaccagagtatttactctctggtaatcgattaccaattacctgtaatcgattaccagtggtaaagattgatttcaaaagctgttaactgaattcgcaacgtttcaaatggtgtttagggtgtatcatatacaatatattggtaatctgataccagtg

SEQ ID NO: 99152 - DNA, 382 bp, Glycine max
tcagcttcattagtcgtcgcatttctttattatcgcctcctatggcatacaggtatgcattactttcattgtatacttgcttaattattgcatcactattggcattgggctccttcaatgctagaagaagatctctcggtttcaccattgactctgtcatatcagtaataataatatatttatccttaatcagtcgaccattatatgaaagtccaactaatgacttagtcaattcataattgtgactccctcacatctaacttcatcacccatttttcgcctcccactactgtttacacataatgcttagagggacacctacattttttactgtcaataagtgatcatactatatcatttatcctgcacctatattggccac

SEQ ID NO: 99153 - DNA, 216 bp, Glycine max
gcgcagcagtaacattctctcaactcaagtctgcagtgagggcgagtagcttggaacaaagttgataatagccacacatcacgttctatagttaacgactcatggcagaactttggcttgattagttgattcactatcttcatccacgcgactaataagggttaatatgcgcaacaactaatatattggtgaataatctacaattctgagcaccac

SEQ ID NO: 99154 - DNA, 137 bp, Glycine max
  unsure (1)..(137): unsure at all n locations
aggcntgtcaaagatctactagcacctatatattaatactgtttctgtgcatacctcactatcaagatcgctaatataggggacaaagaatgaaaatagtatcaatccttcaatgaccctcgccgacataggcatga

SEQ ID NO: 99155 - DNA, 232 bp, Glycine max
  unsure (1)..(232): unsure at all n locations
agcttgactttgcgggtgattttttttttatttcccntcagccacaagaccatccgatcatgaataagaacaccgtataagatcacgccgatggatttttgtgtttgatttaactaaaagatagtgtgggattaatataatactattataccttcttggggtgaacatcgtggtttcctgtgtgcccgcacggctgtattttttttacaaaaattacggattttcacttcaa

SEQ ID NO: 99156 - DNA, 455 bp, Glycine max
  unsure (1)..(455): unsure at all n locations
tatgcgcctatntccttacagacgatctcttgtcaagacatctaaccgaaaaacatgcgcctatttacaatcaatgcagcttcgttacctagattatatacacgtaccttcaaggtgtatttggtacttacatcacacacatctactcggctatagtcacatacatgcatactcaaagcatcttgtggcaccaaaaattgcacatgtgcacatctgggtgtttctaatacctatacatacgcacacttcatgatgaatcttgactacccacacaataaagtgctacatttcatgctctttctttcaagtgtttgctacctaaagccgcatgcaaatacaagcatattttcctttgctgctaaaattgcattcaattaaaaggatacacttctttggaatggacttctttcatacatgaacatattatgggatttttttggaatttgaccccaaat

SEQ ID NO: 99157 - DNA, 363 bp, Glycine max
  unsure (1)..(363): unsure at all n locations
atgaaaacgcctaggatcccatcaacacaagatgccaatagcacctcattctctgcttcacaagcgactacgacacctcatcatacatctctcccaccaatagaaagtataacaacaatcgtgacaccgacaaccttatccccacccaagatgctgccttcaagagatagaactcaaacatcaaagtatcccttatcctccgatgggacagtgtctgcggatgtgggaacgctaacttcaatccatcttccattgattcggggggtttcaacgcggtttcttcactcacaagcatcatcaaagagtacatntcggagggaaggagattgagaagagcattccaggcccaccccccacccccct

SEQ ID NO: 99158 - DNA, 178 bp, Glycine max
cttatgtgaaacaaaggatgcttagaattccccacttcctgcctttgaaatgcttgcctgtaattgaggatctggccttaatgcaattcttggataagatgtcgcctgttcaaccctactaagattacatctattagtgatatagggtgacctactttctaaataacaaggtggcttg

SEQ ID NO: 99159 - DNA, 187 bp, Glycine max
gaacaggatcaccgtattgtcagaaaaataaaatgctgccttggtctgccatgatagatgatcgatcgacgtgtaacaaagaagcatgacctgattacgccgatcgaacatttcctaatagatgttcttcaacgattattattcagggattgagtgggaaaaacatggcgcgcatcggtgttaaata

SEQ ID NO: 99160 - DNA, 238 bp, Glycine max
  unsure (1)..(238): unsure at all n locations
atgcttttcttccaagagaagagctntgtttaagatctcgngctattcaactatttcattccctcctccctttgccaaaaagaattcaccaaggactaaccgcctgaattctttttgtggctctcttctcctttacccaaaaaaccgaaggactaaccgccggaattctttggggtcggcctctcccttggccgagaattctaaaccaccccacttggaaattcctttgagtttttcc

SEQ ID NO: 99161 - DNA, 439 bp, Glycine max
  unsure (1)..(439): unsure at all n locations
cttctcatttnctcctttcttcacataaaagctaganagtttatgtttgtatagttaagggaagcttaaccctacatttgaatgtaatgattgtagataacttgctgattgtgtgaaaattgcatttttgtcattattgagatattgggtatttagggatgaattggggaccatggatcgccctatagtgaattgatttatgattgatagtgaactctagtaggtagagctgctagcttaagcaagcatagctctagaagattgataatatttgataagtcctcgcttaagtaagaaagacttttcatttaagtgagatgttgacctaagggagtagtgcttttacctaaagcaaaattggtcttaatgtacttctttgtttcaagttccaattgatcaagtngagaactgatgtaacctactttaaagaggggtttct

SEQ ID NO: 99162 - DNA, 423 bp, Glycine max
  unsure (1)..(423): unsure at all n locations
agctntgcaagggtgtggaactaaagtgattagttgttcttgcttaagtgagaggacctgtaggggaaaatgggccactggtttttaagcttaagtgtggttggaaccaagcttaaaagtgaccaagcttaagcgtaggttgagccaggcttaagcgagatgacttgtaagggaaaatgagctactagatttcaagcttaagtgtggagcgaaccaagcttaagcatagggcaagccatgcttaaatgtgaaaccttgcaaaatgtgtatgaatgacttccaaatggatttcaattggaattcccttagtgtataagaattatgagatgcataaatatggttttaaggttatattatgagaatctacttttacgaagtaattatgagtttagattngagtggacttaaatatgaattccttgc

SEQ ID NO: 99163 - DNA, 281 bp, Glycine max
  unsure (1)..(281): unsure at all n locations
accataagtctatgactaaaaaaaatgttgtttatcatgacctattacgtcatcccatgtcaactataatgtggaaaatatttaaaaattcatgtggacatccatggaagagccagaagattcttcagtccaatgaattctcatgtactatttattctcaaaggaagtntgtgattagactatcaccaacaaaaatcggaaatgagtctatttgattgttagaaccgatataatgtgatattggtggatcaatatattcaccatatggatcattgtgatat

SEQ ID NO: 99164 - DNA, 423 bp, Glycine max
agcttgtggatagagttgggcaaacaggattgagcccacaggccacctgaaacccgcacggtatataaaattttttagagctcatttaaattgcaagcattttagtccggtccgttttacccatgggctttgggggtcccacaggctttttataatttaatataaaaatatagaatactactaaataagggacataaacttagtaaaaataaaattaaaaaaatatataaaatttatgtaatttgtatatggctcaatggttgatgaatggtcataaaatattttgatttggtataaaattaaagattaagtaaacatgatgtaaaaaaaatgttttttaggtggcttaagaagtgaatttccttattattttgggcaaataatttttttattagacatttcattgttagtttttaaaatggg

SEQ ID NO: 99165 - DNA, 322 bp, Glycine max
  unsure (1)..(322): unsure at all n locations
acatttgatcttctgcatcacttatagactngagattagagattaattcacatttcgcaatcatggttagcaactcttggacagcttgtggattgatagaacaaaagtaatgtaaaggcaaaaagaacttgactagaaacatatgtgatgaactaaggtctacgctaatactggcaaaaatgtcactgttttttttttttaaataatgctnttataaccattctaaaaagctgttcaagataatgtatttttgtactagtgatagaaatttactcatttttcgccaatctttatttttttgtaaaacttcattgcaagaatt

SEQ ID NO: 99166 - DNA, 420 bp, Glycine max
  unsure (1)..(420): unsure at all n locations
agctntgcctttagcgctntgcacctcatctttaacctcattgtctctcacagtctttagatttgggagccaatccaatccttgtgttcggactctcagccacttatgatagccgccgatgatcccattactgcttcccctaagctatctgtcctttcttcacgctgcatcccacgccttgcgaactccttggagtactctcgcgttgtggtcactaaaaccccgtgcgatgaaaggcgtgatgcttttgtctaatggcgctcctctcatggggtagccaagttgtcttatggcgagaacgggattataattaatacaaccccttgttcccatcaagggaacatttggacatccttcgcatgaagatagaatcctgattcttccttccttctagcgagggaaccaattaacagacgcccc

SEQ ID NO: 99167 - DNA, 305 bp, Glycine max
  unsure (1)..(305): unsure at all n locations
acatataccacagactcttgcagcaggtgtagatttctgattcatggcaagctgggttactagggtgaccaaggcattaagttttccctcaagctttntattnttagtagatgaagatgaatctgtggccacctcatggactcctctaaggataatagcatcatttcttgcactgaattgttgggagttggaagccatcttctcaatcaaattcctagcttcagcaggggtcatatcaccaagagctccaccattggcagcatcaatcatattcctatccatgttgntaagtccctcatagaaat

SEQ ID NO: 99168 - DNA, 411 bp, Glycine max
  unsure (1)..(411): unsure at all n locations
agcttgtagagggtctctgncanggcttctatttgttgtgacaacaacttatcttgagccacagttgcatcttgagtggtgagatctacaagacttctctttgttggtgcatatgtgcgatcactaaggatggcatgatcactatctgccatgtttactataagttccattgccctctccggggactttaacttgacctccctcctgtggatgcatccagtaatagctttgaatgtggtcacaggccatctatgaagatgcttcattgcatctgatcactgtacccatgtgcatgcatttttctgagtagtctgtggaaaccgtcgagcacctctttgagggattcattaggaaattgatggaatgatgagatttccatctttcttcagcggtctttgagtctgggaagta

SEQ ID NO: 99169 - DNA, 414 bp, Glycine max
  unsure (1)..(414): unsure at all n locations
agctttaattcatttanatattntattttttataaaattaaaattaaaatatagtattttaaaatattttgatagataaaatttaaggagacagaattttttttacttttgtctagtgtgagtatgaaaaattttcaaagctcaaaaattactcaaaaaaaaacttatatttaacttacttctaaaaaataagtgaaggctccggcctatgactcaaatcttataaatattattgtttatgattgaaaaagagtgtaaaaacacttctatactagtctattgtttattattattattattattattattattattattattattattattattattattattaaagggatgttattttactattctaacaaaatcaattcttctaatctcattttttaaaatatgattcttaaa

SEQ ID NO: 99170 - DNA, 453 bp, Glycine max
  unsure (1)..(453): unsure at all n locations
ngagtcttagcataactgttgcataacacttgttaattgtttcttatgaaattgatgagtgttattatatcttgattagagtgtgtgattcatgtgtaatgtgattgattattgaaaagtgaattttaaatgacaaagtggtgaaattatgtgagttatgtttaagtaagtcgtatctcatttatatgatatgtatatctagttgncttgtttctctattagttaggaatgtgataactcactccccgtgtgttgtttgtgtttggatcctgtgatgatcttgaactttgtgttcggnggagcagatgactaagtgaattgttgtatagaaccttgtgctgaaagacatcgggacacaatgctctgacataatgtgacattggggcataagttttatattaattgcatgaagtcttgaacatctttgtttaagccgagatgattttatattta

SEQ ID NO: 99171 - DNA, 398 bp, Glycine max
  unsure (1)..(398): unsure at all n locations
agcttctcaagaaagcttctcaaggaagtttctcacggaagctacctaggctataaatagaagcatgtgtaacactttttgtaactttaatgaatgaaagtcttatgagacacacttcaaagttccacttctctctctcttttattccttcaatttcgtgctcccccttctctttttcttttcctccattaaagcatcctcttcaagcttcttatccaaggcacattcttggtggtgaagctccttcttccatgacttattccctagtggatggngcctcccctctcctcttctcctttgccttccgctgcatcttcatggtggaaaatcatcattgaaggacctcactgaagcttagagattcatccgtcacatattatcaatgacgtgcttcaaaa

SEQ ID NO: 99172 - DNA, 288 bp, Glycine max
  unsure (1)..(288): unsure at all n locations
aatttgtagtatgtctcacaagactctcattcatcanagtacaacaagtgtacacatggtctattataactatgagcttcttgnaagctttctgagaaacttcttggaagcttttgaaaacttcttgaaactaagcttactcaccaccctctatactaactacctcttggagcttctataaattctaagagctgagctactccatcctcttatactactacctctgaatgaactgagtactccacccttatactagtacccatgcaaactgaatcaaaagagtctctc

SEQ ID NO: 99173 - DNA, 405 bp, Glycine max
  unsure (1)..(405): unsure at all n locations
agcttctccactatattcctataaatatgttgagaggcgaagggaaaaaatgttcagccctcctggtaatttgagaatcacttgaaattagtgaaaaaaattgtttccgtgaagaaaatccaagccgaggcacttccataacgtttccgtaacgtttctgtgggtgatttcgcgaagattttcaaccgttcttcattcgttcttcatcgttcttcggtcttcaaccggtaagttcccaaaatcgaacttttcaattcattctatgtacccttaatggtcctcatttgtttcgcgtacatttattctcgtttcatttactttccgcacccccttttgacgtgctttagtcatttacttaagtcattttctcccctaatcaaaaataaaataaatntccaccgatca

SEQ ID NO: 99174 - DNA, 291 bp, Glycine max
  unsure (1)..(291): unsure at all n locations
actcagctgctctaattacattgtgttatggaggatgtgttgccattttgcttaaagtagtgcccactggaaaactaactttccaagtgattgccttcgcacgacatggccccaatgaagctgtgctcanagaggtccaggaaggacaangctaccgaaggaactagttccgctccggagtatgacagtcaccgcttatgagcgctgacaccagcaacgcttcaaggccatcaatggatggtcgtttctccgggagcgacgcgtccagctcatggacgacgaatatactga

SEQ ID NO: 99175 - DNA, 423 bp, Glycine max
  unsure (1)..(423): unsure at all n locations
agctntattggataaataattttactggagaatttatatttaaccctctttaatggagttttttcaaccaaccaagttttgtcctccacagaactttgaacttcagattttaattatttattttgtatatacacatataatatcatttgtaagtttttttattaacaacaaaaatacttattttacattctaaggtgatatacttatttcaaagaagtcagattcgtcataaatatccctacttacatttaataaataaaaaattgctttagacttggcgctaaaatcagtttaatagtgaaaaatttggatagttagtaagcaattttagatttaaaccataaagganaaaacatttggctggtaatcggtataaagggcaaatcagttgtgtatgttttgatagacaaagttacaatttaa

SEQ ID NO: 99176 - DNA, 248 bp, Glycine max
  unsure (1)..(248): unsure at all n locations
tagactaagtntagcttaccatcttcagactgatggccaaactgaatggaccattcagtcattggaggacctcttgagggcgtgtgtcttataccacaaaggaagctgggagagttgtcttcctttgatagagttcacttataacaacagttttcactctaccattggcatgggtccctatgaagctttgtatggtggaaggtgtaggacacccttatgttggttatagctcggagaaggcctcacct

SEQ ID NO: 99177 - DNA, 377 bp, Glycine max
  unsure (1)..(377): unsure at all n locations
agctntctttaattgtgttattcaagataattgagcataagcaaacacaaattgtaactatccaagccttaagcaacataaacactactcttgatttctaggttgaaatcgctggtgctggcagcttgaacatacaaacttttataaattactgggaattggtcactacgttttatgagctgaaacttttactgaattttctagacatctggaccaaaattataaaaaaggaaccaagtgatttggattaaaggaaaaaataagaaaaatctcacaagttggcagaaaaatcagtgtctaggaaaaaaaaagtgaaaggaaagcgtgcttgttgttctacctcacaatttgttctataattggtgcctattttatac

SEQ ID NO: 99178 - DNA, 419 bp, Glycine max
  unsure (1)..(419): unsure at all n locations
gtgcggactttgncttcgncagagaaaggattgttgcgattatgagataaaggcgaatctatcatctcactaagacgactgagataactgtggctttgaggagggcgagatatatggtgatacccatgctgcgactgccattcctatacggttcaagttgccaacaacccaacaatgtgattactcagccaataacaaaactcctccttactcaccacccagatattcacagaggccattcctatatcaaccacacagcctgtctaccgcacttccaatgacgaagaccacctatctcacaaaccataataaagaaagataaacctcacctacacaaaggaattttgagcaaaaagctctgtgggttaccacaaatatcgctgtatatctaaactcgacccatattacttgtaattaat

SEQ ID NO: 99179 - DNA, 269 bp, Glycine max
ctcaacccaagaaaattatattatttacacaaaaacgttcactttttattatttgcataagagggtgatctctcccaacgacttgtaagaccttgactgatatgtctcaatcgaacatctaggctcctactatacactaaattatcataaaataacacatcgtctatataccttggattccttaaacatgatgcattacctcataacgcgcttgtgcttaatgagtctataagcatcactttccttcaacaaaccaaactgtattgaaa

SEQ ID NO: 99180 - DNA, 432 bp, Glycine max
  unsure (1)..(432): unsure at all n locations
tagcctntaagttgagctcttgacaatgtagatgcaactatattcctgcaaatgacggacgaacgatgtgttgtgaacaagtctcccatgttcaatggagccaactattaataccggaatgaaatcatgattagccttctgtgacatcttctctcattgataatgcgggatgttgaagaaaatgcggatcacactcctttatgttatacaagtcgccctcagatatcttaagaaggtgagctcgaattaagatagttgcaaatatttactcaattaaaattctatacaaattctatgcaggtttcagcttccaaaaacatgactcttaataatgactctatagacaatctgatatacatgttagcattattaatgacgagttaaggaagagaagtgccactcacattatactggtcggttcaccttgtgcta

SEQ ID NO: 99181 - DNA, 421 bp, Glycine max
  unsure (1)..(421): unsure at all n locations
agcttcatcagatgacgccgatcgaacctttcctaaccgacatcatgcaaattntgttcacggattgaattgaagactcaatagccaacatcggtcgtgaaatagccccgactgatatttttcagccgacattgagccatttttttaaaaaaactctcactggcagataatgtttatttttatggcagaggaagttttcttgttttggtgttgcataaaaaatttacaatgtacgtcagctaggttttttgtgcgagctcaaccgacgttttgtttcggccgaaactggcatgttcccatttattcggacaggaaaacattagcccgtctcggcaaaaagatattattcaccgatattgatcgaaaaaaatgacagtcgacgttggcctcgaaacatgaccgatcgaggtctataaatgaa

SEQ ID NO: 99182 - DNA, 388 bp, Glycine max
  unsure (1)..(388): unsure at all n locations
agcttctntgttagacctcgatcggtcatctttctcaggccgaggtcgaccgtcatttttttcgatccatttcggtgaataatatttatttgccgagatgggcaaaatgccagtttcggccgaataaatgggaaaatgccagtttcggtcgaaacgaatagtctgttgggctcgcacaaaaaaacctagccgacctacattataaattttttatgcaacaccaaaacaagaaatcttcctgtgccgtaaaaaataaacattacatgacagcgagcgttttgaaaaacaaaattgcgcaacgccggctgaaaaatataaatcggggctttttccgaccgatgtcggctattgagttttcaattcaatccgtgaacgaaattcgcatgat

SEQ ID NO: 99183 - DNA, 415 bp, Glycine max
  unsure (1)..(415): unsure at all n locations
agcttcgcgcacactccagacatctttgtttctatcccaacggtcagatcgtggaanattgtctggtgaagctgcagatcaaatttcgagaagatccaacggttaacagaggctgggaagcgtttttaccgaggcagctttatgtagcttcctcaagaagcttcattaagagacttcctcaagaagcttcctcgtggcttctttgagaagttttctcaagaggcttctttgagaagctagatccgtatttacccacacccctctattaactaaattaacatccttgaaaataattacggataaaaataacgcaacaaataatcaaacatcaaacataattactaacaatatatatatatgtatatatatatatatatcaagtgtttcaatcatcacaggtatcaacgtttgaacg

SEQ ID NO: 99184 - DNA, 416 bp, Glycine max
  unsure (1)..(416): unsure at all n locations
agctntcaagaaattcagatggtcataagttatcacacggaggtccgattcaggaatatcacatatcgagacgctcgaaattgaacaactgaagccctcgagaaattgaaatggtcataacttttcactcggatatccgattcaagcgcatcatatatcgagacgctagaaattgaataacggaagctctcgagaaatttaaattgtcataacttttcactcggatgtccaattcaagcgcataatatatcgagacgctcgaaattcaacaatggaagctctcgagaaatttaaattgtcataactattcactcggatgtccgattcaggcacatcacatactgagacgctcgaaattcaacaacggaagctctcgagagattcaaatggtcataacttttcacatggaggtctga

SEQ ID NO: 99185 - DNA, 427 bp, Glycine max
agcttcaagaaaaatggcctcagcaaacttcttatttccagaatataattcaatcaatagacctccaatctttaatggagagggttaccactactggaaaacccgaatgcatatttttattgaggcaatagacttaaatatttgggaatccatataaatagggccttatatacccaccatagtagaaagaattacaatagatggaagcacatcaagtgaaagcataacaatagaaaaacctacatatagatggtctgaagaggataaaagacgagtacaatacaatttaaaagccaaaaacataattaaatatgccctgtgaatggatgaatatttcacggtttcaaattgtaagagtgctaaggaaatgtgggacactctacaattaacacatgaaggaacaaacagatgttaatagatctaggat

SEQ ID NO: 99186 - DNA, 176 bp, Glycine max
  unsure (1)..(176): unsure at all n locations
tcgagatatgcgcanactctccctccattgttgattacttgcttaaataagtggtctcgnnggtgctctcaggcttaacaccactctggctcgctgagcgcacataattgaatttcagcttagcgcgcgtcttctctcttagcggatggatgccaagctgcgccgctcaatgcgat

SEQ ID NO: 99187 - DNA, 414 bp, Glycine max
agcttaatatacatattaatatactataatatttcaattttaatatagaaagagtgatagtaaaatacatatatatgacacatagacacacaaacatgatagtacttgtgtttcccctagttaattaataaaagtaaaagagaacaaatgaattagttacatgaacataatttgagagtggtttacacatgatcaattgatgtggagaagaataaatggtattttactaattatttaggggcaaaatcagtcaaataaagcatacaccatatgagtaatttccattattaatagctatagataattgaatttaatataattttgaaacactgatttcacgattaatagtgtgggtgttgtacacacacacacacactctcacactcacatacacactcatatatttatatatat

SEQ ID NO: 99188 - DNA, 407 bp, Glycine max
  unsure (1)..(407): unsure at all n locations
agctnttggagtaaaaacatgggaccaactcattttatttcaaaaagaaagtcgtatctagtcaaggtctgagagaccatacatgtttcctaacgatttctaattatgtgggccattaagtctatcatatgctgacaatagtcgagaagcccatgaatctcttcgggggcggagtaggtgtctgccatcgtcttggccttggctaacaagcggggaagttcttgactcccgttcaaggtaagagcaaaccgatccatccacatggatgcctcttggagtaaagagacgatcaccctccctctagcctcttgttccgcgtatacttgagcatactcgtccgcgattctatgttcatgggccgtggctagacctaactcttctcggtactaggcgatgatagctagcat

SEQ ID NO: 99189 - DNA, 418 bp, Glycine max
  unsure (1)..(418): unsure at all n locations
agcttatcataatatgttgaaaatttctttctggccggaatgtcataaattaatcctgatcactnttgcatacaagttcttacaaatttcctaagattacaatagttttttttgctcaaccaaaagaagtatatattaaatgaggaacaagggtacccccaacacatttacataataagtattatcattatcaaataaactgcattcataccagcactctgatctaaaatctaaactgaaatgctaaacaacaaatatgttcataaacctgcacctgcatatcagcacacctcatatatttatatttagtgtgtgtccaattattctttcacaagtcatcgaccttctaacatggtaatcgtcacataatttgatgaactcgtgttttgcggattcgagtgtaaatctaattcaccta

SEQ ID NO: 99190 - DNA, 361 bp, Glycine max
gaacaaaattctaggaggagtcttagattatgtgcgttttaacaacttttattatataatacaatggatatgcaaattctatttacctactacctcgtaagtttgaataaaggatgtttgcgtaatacaacaagcgtgggctaaagatgctaattgactttttaaattcatgataacctttttctctctccacgaagggtctccataattaatatacttaagatactcgctggtatacttatttgtgtgaataacctgaatgcatcttatcctacacatctagcatagtttctttatgtatagtcctaatcagatttgtagtgtattataaattgattgaaaacatttggcacatgttcaa

SEQ ID NO: 99191 - DNA, 393 bp, Glycine max
  unsure (1)..(393): unsure at all n locations
agctntatttgtctagttcaaggtctgactaatcacatttgaagatggtcaacacaaaatttacagaattgataaacacagagtactgtcagtttcaaaatgacaaacagaggggtcaatttgcaggctacggatgagctccatttagctccattttgagcttatctgatggaaccctgatttgcggattcaagggaaccaatcagggactctatgaaattggggaaaataaaaggaaaaaacggaattagagaaggaaatggaaagaacaacgccacaatcttggaagattgataaaaaatagaattctttgataagaatctaagggttcacacaagaaacaagagagacactctcttaaaaatgtgtctaatatgaacattncataaaaac

SEQ ID NO: 99192 - DNA, 400 bp, Glycine max
  unsure (1)..(400): unsure at all n locations
tactcaagcttacaagcaagcttccatcagatgtgtctaaagataactatgttattgattctctcttagatatttacttttataggcttcatatagtccatgtattggtaacaatatgccgccactacataataacttaaaactaacatagtggaagactttattgtatttcaaactctttgattaatttatgggtaaactatatttttagtctctaaatgttttaaaacttctatttttagcccctaaattaaccataacattcgaaagtaaaaaaagtaatacattcatctcatataaacagggaatctcatttcaatcatcatgaatcaccataaagaattaacatcatacatcattatcaatgtatcatccncatgaattatcatcaccatgcata

SEQ ID NO: 99193 - DNA, 423 bp, Glycine max
  unsure (1)..(423): unsure at all n locations
agctntataagcgcgggtctgggatacgaatgtcaagtggtcgcgatatacgaagatgatgttccgagtacattggatgtggtacgaccatgccctcctgatttccagctgggaaattggcgagtggaggaacgccccggcatttacgcaacgagcataatgtaaacctttacggttttaaaagctctatagttgggcctaggctttagagtttttccttttgttaaggctntgtgtcttttgttttcgaatttataatacaaggatctttcttcatctgttcctacgtctctacccattctcattcatatgcatgtttacttctttatttctgaaaacggcagattcgatgaagagtcccccgaaggtactaatacctgggacccgcttatcaacttcgagcaagaaacgaatcatacggaa

SEQ ID NO: 99194 - DNA, 354 bp, Glycine max
  unsure (1)..(354): unsure at all n locations
aaggcactggtgatcgattaccaaaacattgtaatcgattacagctttgtcgaaatcaatcggaacgatgtgtattcatttgaaaacttattcaaatccattctgctactggtgatctattacaacacatctggtgatcgattaacacgagagtataaactctttcggaaacatgttgtgaagaaatccatgtgctactcagtcttgaaacaccntttcatcttatctgattaagctctgttgatctgatcttgagctgatcttgtctgatattcttagtcttatccttgaaacttgaacatgaactctcttgatcttctcttgtgcttgaatcttggatatcaaaaaccttga

SEQ ID NO: 99195 - DNA, 396 bp, Glycine max
  unsure (1)..(396): unsure at all n locations
agctntgtattctatctcaacaaaatggcgtattttatcaccgtacgtgcataaacccataaacggaacccgtcttctgcttaagatgcgaattctaacatcacatgtcttcatttgtccacctgacttctgcattttatcttttcgttgttgctccgatgcttcttttgttgcttgattttcgtttcacagagaagctcgaagaacacactaaagcttcaatttttggatttttagaggtacggttgcgtgtatattgatctcctacaaagccttctgaagttccttcgctcaaactcatattgtatgttatttctttcgcaaaaaaggtcgaacaacacactaaagctctgatttttatctcaacaatacggcgaattttatcactgtaggtgc

SEQ ID NO: 99196 - DNA, 395 bp, Glycine max
tctttcagtttgggaagtccctacatgctaccattctgaagcttggattcgaacacgagactttccatggagacgcctcgtcagattgtatataaagtctggagatatggtaagtgctataatagtctctcaaatccattctgattgtataataataggtgtctatgaccgctattattgatgggtatgtcgagatggatcaaattgatacggcttcaaacacttttgtgacttgcggaggatgggaattgaacctaatgaatttacattcactaccttgatcaatgcttgcgctaaccaatctaagctagaacatgggagccatctccctggttacatgttctaattcaactcttaaagaaaccttttgttttttcacactacgtgataatgtt

SEQ ID NO: 99197 - DNA, 397 bp, Glycine max
agcttgtagtgtataataacattattgcttgtatttaaaacaatcacgagctttgtgctttcgactgttaacaactaatcctttgaagtatggaaatgcatttaatagaccatccttctctgatagatttgttactcccactagatatcggaatactcggcttaatcagattagggatcttgtggaaatgagatacacaacaccaactttggcatgatttaaaactaacgagtgttaactgcatcaaaatattaaaatgggtacgataaatcataacatatttttttggcaaaacaatcacgaaaacaatacttgagcattgtaattatataatatatgctatctaattataaaaaggtgagcgaagaatattctcgtatatgaaattttacgctta

SEQ ID NO: 99198 - DNA, 307 bp, Glycine max
tgtggtgaccgagaagcacgtggttctgctgttctccatatctgttcctctcccaaggatgcgtatatgtgtatatctgtgttatattcaccgttctggctgttgtttgtatgctgtttcgcgcatacgatcttggacgatgccgagatgacagtcgccttcgcttaaggggcgagactgacgaaatccttgtcctatctttgctttcctcttatctccgatgagaagtacagtaacacgggccactgtcgtaccctaatgtcggtcggcgattattacttgatgacatgcgaactgtggtctgccg

SEQ ID NO: 99199 - DNA, 413 bp, Glycine max
agcttcttatccaaggcaattcttggtggtgaagctccttcttccttggcttattccctagtggatggtgcctcccctctcctcttctcctttgccttccgctgcatatccatggttaaaaatcaccattgaaggacctcattgaagctcaaagatccatcctccatagaagctccacaagcaagcttccatcaagtggtaatcagagcacaagagcttcaagtaggtgcttcttaaacctccattaattttttgctttaccttctctgccattgttgtgtcttcattttttctccatgtatctcctcacatgtcttgtgctaaatgttgataacatgattctttatattttccaccaattaaacttgctatagaagctagatttgattatctatggttcaaatttcatgttc

SEQ ID NO: 99200 - DNA, 425 bp, Glycine max
  unsure (1)..(425): unsure at all n locations
agctntcttgagttgccagtgtcgttaatgtatatatagccaagagcatgttgtgagtttgtgttattgttgtcaagaaggaaggcatgccaatgacattgttgggaggatgatgctttgcttagggagagttntaatgttccacaaattaggtgggatattttttgtttaagaaccaaaagggaacaaagaagtgagagaagacacacgagagataatttttaaaaaaaaaaaaatgattgaattactattatgtacctaaaataaaataactacatcaaaaaaactttatttaattttttgtctagaattttagtgtagcttactaaggccttgttcgggtgatnttctattttcagttntgaaattattaaattgattgaattactattatgtacctaaaataaaataactacatcaaaaaa

SEQ ID NO: 99201 - DNA, 399 bp, Glycine max
  unsure (1)..(399): unsure at all n locations
actcttttctgcctctcacttaatgcacaaaaaaggacaaaatgtgatttatttaaagtttctgagctgagcactgcattggggttttgggtatttgtttgtaggagagaagaatgatggaccagtgtaagatatttgcaaaagcaggtgatggaggtaatggttgttctagcttgcgcaagggaagacctgatggngtgtnttctttacttatctttgttttgatgtacagccaagttttgaactgcagatgcagttgtgttgtgattacagaaattgcggtccaattcaaccgtagttgtggttgcaattaggtggtagagactttcaaaatggcaatattgcagctgtagttgtggttgaagaccacaatttganactatgtgnttagcataattc

SEQ ID NO: 99202 - DNA, 448 bp, Glycine max
  unsure (1)..(448): unsure at all n locations
ttacagngacctgcggcatgcaagcttgttcatacatttatagccactagtgttggttacaacagaaaactaactttctaatagaaagcctaatctactgatttattcttctttattccttctagaatatttgagcgccttcctacgcacgttcatgccttcatggtctgtttattacgtagtctttcagatgcatgggcgtgctactgtgccttttgggccttgctgcttgcacccctactctactattcatatcattaccgcttgcttcgaataacaccttgtcctcaaggtgatgtattgcttggagggtcgtccactcttcctacgatgtttcgtcagggtgtaggcctctccattgaaatagcacaaggtgcttcggccttgtatccgaaggaatggttctatgagctataataactaatggggtaagaactggttgattatc

SEQ ID NO: 99203 - DNA, 174 bp, Glycine max
  unsure (1)..(174): unsure at all n locations
ttgacatcactgcagatgactcacaagagcatgtgggccaacatgatatggttctagagacacctcttgagggtcaacccactgcaacatagcccttgtagcttatgggcctctcggtnttattgccttttcttatggatttattctttgagttttcaatcatttcattgaatg

SEQ ID NO: 99204 - DNA, 415 bp, Glycine max
agcttgagatgaggaagtgttgattggtgaaacttcctgcttttattgttgaccacagagtggtacctgtagatatgtcgcgggggtcaggagaccttgtggacgtcaggtggggtgctattgcccaaaaccaagcttgaccaatcccgacccaacccgggcatagtcggtcagtgagaacctgcgatgtacctaagcaggcgagctcctgtcaatcaacaaataaaaggaaaacaagaccacaaagcaaggaggcttgtggtggctggccagctgtgaattttgtgtaatatgtggattgtggcctctggtaatcgattaccaaaggtgagtaatctgattacaaggcttaaatatgaggacaggaggctaagatggtctcttgttatccattaccaaggggtgtaatcgatta

SEQ ID NO: 99205 - DNA, 390 bp, Glycine max
  unsure (1)..(390): unsure at all n locations
actaagcttctagatggataccatgccactcctgctccggtcaatcttgtcttgaagaaatgcaccaacagattntcgtccgcaaaatacgcccccatctttcggcaatacatccgaagatgcccttttggacatgtcgtccctttgtacttatcaaaatctggtactttgaacttgggagggatgacgatgtcaggtaccagacataagtccgctaaatccgagaacgggtagttgccgaggccctctaccgctcttagcctctcttcaagtgaatcaatctttcccttaatctttgcagaaggaacagattctnttacgggtgcggatggagtcgggacatggcgaactatgtatggttggggcaattcatatggtgtcggatctttg

SEQ ID NO: 99206 - DNA, 383 bp, Glycine max
agcttatgagctgatcgtgtatgttctcttataaaatattaatccttttcaattctccacataattcatttctatgcgttatcctgttatgaatagtattgtataattagagctggggaaaagagcataacttcatggactacataattcaaacctggctttaaaaactgattggctttctcgtagtctggattgtttgaaatttaaaagcagtaaaccagaccagacctgtttagcacatggattaaattggttagggtatgaaatatgtgtgtgtacgaatcaaattacactagtgtaactttaccaactcttacaccattcaataatttttaattggataattttatctcataacatactgttggattaaagtttctttc

SEQ ID NO: 99207 - DNA, 407 bp, Glycine max
tacactgattgacaattcagaaggttagactatatgacttatacggattggtaaaaatatgcgttacataataatttaaaatcaatgatccatacaggtctcacacctgtgtgactttcatgttattatcataacactctaatcaactcaatgaataagtcaattatgttaaaaaataattatcgtcgctatatataacattaaaacatttaatgtatattcaatttacataataaatttagaacaattatttttgatctaataaaggttttttacatatataaattctaaattaaaattatatgtgtaatgaaaatttatatatgttaaacatacatcattaaattaaaacttatcatcacgaaacctattatataaacttatatgcgtattacatatacattaca

SEQ ID NO: 99208 - DNA, 413 bp, Glycine max
agcttaatggccatggtgattgattattgttacatacattatgggaatgcaaatcatgcttccattttgctatttagacatgactcttgcttcaataacatggtttgctagtcttgtaaccaccaacctaataccattgcataacccttgtgattgatacatgttccttaaaagcattatcggggtacccacctttagttttatcttatgattaggaagaccaaatgttctcaaactattgagaaattcacttgtgaccacttcaagtgcatttcattcaaccatttttgacttgtcaattgaataagaacttagatattccctttgatcacctgaaaacaattcattaataaaaacattgtagaatcaatattaattattaaatcaattgatttatttgttgagatacctgg

SEQ ID NO: 99209 - DNA, 186 bp, Glycine max
ttattttattggctctgctctgattgggatgattatgcttgccggcgatgcataattatattattggcttgggtttgattgcgatgactacttgcgaacattgttatgagattaagaccgtggaacttgagaaaccaactggcgaggtatatttatacttgtctggagctgatactacgtaagtac

SEQ ID NO: 99210 - DNA, 431 bp, Glycine max
ctcgacccggatcctctaagcaccgcggctgcagcttgttgaccgacacacctatgtattgtatgtggtataggtggcagggacctatgtattggtgtagactgtgctagggtagacagattctgaatagaacttaattgtccaagcctactttgaccccgattgagcacccacttgtgattacaatgggagttcttataggagcttcaactcgtactatcatctctagaagagagaacatctattgggcgatcaaagacatgtgtgagatcaagagattgtttcgctgcttgacttgtgagaatcactagcacgaaggagaggacctctttggtatgttcagagcctgttaaggatatacatgagattcgatcaaattcacgtgaatatcttgaggactgtgtgtatgcactagaactggccaaactttt

SEQ ID NO: 99211 - DNA, 196 bp, Glycine max
ctaaccttttagacccaagcccaaatcgaacaactaaaacagaaactaagtgtctaatatataggagcaatgaatgtatatttttgaaacataatcatagtaacacgaatgggtaagacaaactaactgggtttgaaacacaattaactataatgacttagtatcgccttagtctaatttaaatctccaaattcac

SEQ ID NO: 99212 - DNA, 301 bp, Glycine max
  unsure (1)..(301): unsure at all n locations
actaagcttaattaccggtctctgtcagttctacagagtacctgttacctccatcaaggtcatcangccccctactaatcgagctttcatcaagaagtactgcgtctccaggcatgcgcaaggcgaaacaccacagcagcctgtggatggccggtagcgggcaacagacgcaccgccatcacctctagagttcacctctgctcatccacaaaaaggtttgagtattgcctacaccacatgagcgaccaataggcgaccacactcaaagccaaaggtaagcacagtactatgtcagtgaccg

SEQ ID NO: 99213 - DNA, 421 bp, Glycine max
agcttcccacatccgcacttggaaggatctgattaccgccttccttaggcagtatcaatacaactctgatatggctcccgatcggactcatctgcagaacatggttaaaagggaaatcaagtcctttaaagagtacgctcagcgttggaggacctggaagcgcatgtagcccctcccatggtcgaaagggaaatgcttaccatgatggtagataccttgcatgtgttttactatgagaaattagtgggctacatgccctccagcttcgcagacttggtattcgccggggaaaggatcgaggtgggcttgaagagagggaagttcgattacgtctcctacacaggtactaacgctaggaggatcggagcaactggggcaaagaggaaggaaggagatacccatgccgtcacttcaacgcctg

SEQ ID NO: 99214 - DNA, 449 bp, Glycine max
  unsure (1)..(449): unsure at all n locations
atattatcctttagttgattattggatttggaattcagtgttcgtgattggtttgaattgatcaattgtatgatgtgagtgaatcgaaatgcgtaaatcatatgctttgaatgagcatgaagtcattagaagagaaaaaacatggaattaggatcatgactgaaaatgttagttggtttgtcaggttgattgcgaaggaacacgttagccacaactcggtgagagtgtgatctttaattgtgagagaacaactagcagtaagtaatggtttttgcatgaatctctgaatatggaatgaatgaatgagttcgaagatgatgaacgccatgtctgaattgaaagttgtcatttagccagaaagcttaccttgtgtatgaatgaattatcccttngccctaattngagttgacgtatgagtgttgattgaccttgccatgtcagttatccct

SEQ ID NO: 99215 - DNA, 417 bp, Glycine max
  unsure (1)..(417): unsure at all n locations
agctcgatcagtaagctgtatgtcttgtaatgaatagtcagaatgagagtgctttttcaagaattcaaccaaattcacagtcgaatggggataaaattaacaaagcccaaacttggccaggttgatgtatatcttttactaggaaatgatataaatnttctacgacaagctagttacttattttatatgcatgtattgataacgatgctagttcttttaagaacatcttggtttatattattgacaaatatatcataatactcctatatattttgatatttttaattaaaatcgagaaatttaaggctctagtttaagtatttgtttcctttttntgttgaaatgattagtcttatttaaatatttatttattttattgagctagttcattattaacaataacttatagttatagga

SEQ ID NO: 99216 - DNA, 434 bp, Glycine max
gatccttaagcacctgcagctgcagctgcacccactcgccaccaagcttgatgtttcctctagaagcaacagccttctggaggaatcttctggagggcccaagagggcctggttgctatttgcacccccattattactaaatgcaccccccttctatttttttggaaattctttttccataacgttacgaaaatttacgaatttcgtaacgatatttattttccttccgcaaggttacgaattcttacggagtatgtatttacccttttttagctttcaaagaagttacggaaacccacggaatgcgcaaaaacacctcttttcacttccgcccattacggaattcacggattggcaagcctgctttcttttgtttccgagacgtctcgggacttcatttattgtgcaacataggacgccaagtgtctcaaagt

SEQ ID NO: 99217 - DNA, 83 bp, Glycine max
tctatttttctctccctgaaattaacgacatttcgtatctgaggttaaatgatcgacttcgtatttagaatcgagttatccat

SEQ ID NO: 99218 - DNA, 420 bp, Glycine max
  unsure (1)..(420): unsure at all n locations
agcttgaaggtgtaagtgcttaaatattattgttacaatcatcaatctcgagacctatctcaatcgaatggtccacaacccacaatcactgatcttgtaaggcataagtgcttaagtgtcatccttacaattgtccatcttgagatctatcttgaacgaacagtccacaacccctcaagtgtaggacctaaaaggcgagagtgcttgttgtgcttagtcacctaattcatcgggtagtctacaatccctcaattcctacttagccaaacttggttatgcaagtgatctcataactntgtaagggattatttgatatactattgtatgtcatttggttgcttgatcatcgattacatatgcattcaactgagagatacattgaacgaatataaccaaaaggtgattatatgagtaatcaac

SEQ ID NO: 99219 - DNA, 320 bp, Glycine max
  unsure (1)..(320): unsure at all n locations
gcttggccactctactcaatgtttcgaaagatatgtttattaggaatctcangtaccttcagtaggagagtatcattgtggaaggcacctgcagtagtgtgatatctaagagccttccaccaaaacagtaggaccctgcaagtatgactattcctctgtcaataggtgacggcacaccgagaaaggctctcattgactttgatgcctatataaactagatgccactctccatgtgtagataagtgtgagagttataaatcatgcccaccacaatgactatacagcctgctgatcatccatcacaaggtcttaccgggtaa

SEQ ID NO: 99220 - DNA, 314 bp, Glycine max
  unsure (1)..(314): unsure at all n locations
agcttatatctgtaccggatatcatctctgtctctttgtctgtctgacaaggctganaatgggtgcttatcctgagatatgtatacaatgactgccgcactgtcgggaagcattgttcaagatatcacatatcatagtacgttgtcctacgagaaaaaaaaagctggatgaatagaataactattctgaacgattcgttgacacatatttccggtgacactccttcgtcaacccctggtcatggatcaggactggttaagcgtgatcaaagaagctaccatgacgtctgtgttatcgtgaagcactcgaatgtc

SEQ ID NO: 99221 - DNA, 365 bp, Glycine max
  unsure (1)..(365): unsure at all n locations
agcttgagatgaggaagngttgaatggtgaaacttcctgctnttattgttgaccacagagtggtacctggagatatgtcgcggnggtcaagagaccttgtggacgtcaggtggggtgctattgcccaaaaccaagcttgaccaatcccgacccaccccgggcatagttggtcagtgagaacctgtgatgtacctaaacaggcgagctcctgacagtcaacatataataggaacaaagaccacatagcaaggaggcttgtggtggctggccagctgtgaattctgtgtgacatgtggattgcggcctctggtaatctattaccaatggtgggtaaacgattactaggcttanaaaaaatgaagaca

SEQ ID NO: 99222 - DNA, 219 bp, Glycine max
  unsure (1)..(219): unsure at all n locations
ttggtgttgtccatggctatgcttcactaaagaagatgaataagagtgcaatgttccaaaacctatgaaggaagatgacgttttcataaaccatgtcatttnttatgatggaaataatattcacggtggcgactacaagcaattcatgattgcgtgcgctaatgcattgggctcgtggctcggtgagagcaactccatcgcgcatngggtggtgtgggg

SEQ ID NO: 99223 - DNA, 384 bp, Glycine max
agcttgaaggtgtgtaacccaccatgtcttcacagtataacactggtaatgtgtcaactatcattgttattatctccttttccgtcattgggggtgctacttgaactgccagatccctccacctttaggcgtattctttgacagattcgtgctcctttttacacatattctgtggctgcattctatccggagccatatcagaattgttctgattctgcctaatgaaggcaatcattatgtctttccaagaatggactcgggaaggtttcaaattagtataccaggtgacggctgccccagtaagactttcctggaagaaatgcatccataattattcatcttttgcatatgcacccattctactgtatacaccctcagctgatt

SEQ ID NO: 99224 - DNA, 392 bp, Glycine max
  unsure (1)..(392): unsure at all n locations
ggatcttaagtcacctgcngctgcagctgcgactcaccttcactttactttatcgtgtgtatgcctaggccaggattgaaggtgggctatagtaccggctccgctttcttaactgaactgtacgcgcgtgcagcggctatatcctctatggttgtgtggagtgataacatgacctcccagatggaagccatttgatcttgtaaagactatagatcggacttcatctgttcctgctcgctctcttaattatccatctttatggatctgagtgtcataggggtgccttggcgttttcttagttatgatgaaattcctaaagaaataaacaacggtgagtatgccaccaaaacatgagtatgccaatggatgattggagcacttggatccacccc

SEQ ID NO: 99225 - DNA, 414 bp, Glycine max
agctttaagttaacaattattacatatatattatgcattgttagacggcagttaaaagaaagcacattccatcatcgttcttctacaaaaagaaacatatgtgctactcaatactttttccttatcttcattgacattatgtcctctatcattttctctatattatgataagaagaaccagtttctttgatactataacgggctttttctgcaactcatccacggaccttttgagtccttctatctgattctacagcacattcttcaccatgttctcaataaccaacctatcatatggttcatctatatcaattacaatcccccattgctcactcacacacctattgttgactcgttgatcaagcatcaacggtcaacatagcatacgcacacctttaacaatacacttctata

SEQ ID NO: 99226 - DNA, 268 bp, Glycine max
aagctcaatgttcctcccttcaaaggtagaagtgatccatatgcctacctggactgggaaatgaagactgagcacgtatatgccatcgatgactacattgatgcgcagataagtaagctagcagcagccgaattcttcgactatgccactgtttggtggcataaataccaaagagaaatgttgatagaggaacggcgagaggtttattcatggactgagatgaaaagggtgatgagaaaaatgtatgtgctcactagctattacagaa

SEQ ID NO: 99227 - DNA, 407 bp, Glycine max
  unsure (1)..(407): unsure at all n locations
agcttatccatgttattggaagtgacgtttgatatgcnacttatattgggagtaaggacactactagctcttctggataaaccatgtgtaatgtctctcttcgctgctcgaaaaaataactctctctttgcttgtgctccaatacactgtgatgctagtttttctttcacacagcaacggtgcttgttccttatcagtgcagaacaaagatatttgtgcagaacttttgaagaacgcagataagctgaacaaactgaaagacaggtggttctctcgcagcttatggactaacggcgggtatctctatttaaacactattccggacaatggagagagggttattgttccacacattcatatggatggatacctttgtattngactaatacttcttttgaacaattatg

SEQ ID NO: 99228 - DNA, 114 bp, Glycine max
gcttggcgaccacgaacaataaagtactttccgcgcctactatatgttgacttgaccaaccccgctcttggaatgttgcgacaatcttttaacaccttattcacacattcttat

SEQ ID NO: 99229 - DNA, 403 bp, Glycine max
  unsure (1)..(403): unsure at all n locations
agctttaatcatatgatcttataatacctttatgtgcncttagaaataggagtactagtgggttatccatatgttgttgaaggggactcatttgaatacatgcctctctttcgggatacaggttaccttaagtattctacataatgtagattattagaagtgaccgggttcgcttcctttatatatgttttaagcgttccactccaaaccagttgagtccagtgatgtttgctgtttataaacaactcctgcaaagtaagtaaatcctagggatgaagttctgcaggcacaattgcatgtacttgaattcgaattctatttccttttccgagattgattcataagaagagttattatgcccgagataatggcaatgctctggccgttttttactttctatact

SEQ ID NO: 99230 - DNA, 383 bp, Glycine max
aactaagctttgcgctcggctggacaccaagggctccattcgctttctctgcgactccggcggcatcctcaaactccgcttctgcctcgataacgtcgctcgggaaaaagtctccaaagcaaagaccaaacctttgaaaaaaccgcgccacccaacttcgagctcttccttccggaggcggcccaatgagtccggtgagagaggcaacgcggtttcggatgatgggtcggagggaaaggtagagaacgagagagagggttgcaatgaggacgaggtgttcgacgtaatgacgctgagaagaatcgtgaggatggagcggcagaaggccaatgcggcgtgcgcagacctcgagaaggagaggacggcggcttcctcatctgcgg

SEQ ID NO: 99231 - DNA, 387 bp, Glycine max
  unsure (1)..(387): unsure at all n locations
agctntcacaatagtaattntaaatcttatataaaaaaatattattntgaanattgttctttcagccaaatttaanaaatgatagtaatacacatcttaatctacattttaaagaatgttttattttaaattaaaatttatcaaaaattgaaaaataattttaaatatcacttatgtgttaagaataaattcaattaatactccttccgtcccataataagtatcatcttaaattttcattattaagatcaagaaaagttaattaattaatagatgagagataataataatgttactaaaataaccatattattaatattacattaattgaaaacctacagtaatactctgtaagaatattagtgaaaatcactttaaaaactggat

SEQ ID NO: 99232 - DNA, 264 bp, Glycine max
  unsure (1)..(264): unsure at all n locations
ctctcaatgagctggtgaagaagaatgtggcatttacctcgggtgaaaaacaagagcaagcctttgcttcgctcaaagaaaagcttactaaggcacctattctagctcttcctgactgttctaaaactctngagctagaatgtgatgcctctatagtgggagttggagctgtattgttacaaggtgggcaccctattgcttattttagtgaaaaacttcatagtgccaccctcaactaccccacttatgataaagaagcttatg

SEQ ID NO: 99233 - DNA, 443 bp, Glycine max
  unsure (1)..(443): unsure at all n locations
tctaagtcacctgcggcatgcaagccttggtatttctctcttctccttgagtttctatttagatttcatatattacatttaanaaaatttaacagtgatttctgttttttaagtataatatctaatcatccatcacctgaggaaaattcctgtctctaattctcagggatgaaggagcaaatgcctcaaaactccttggaaagaacctactgccagattctatatctagtaaattcagtgcttgaaatctttcttctaatctcttctctaggacttcgaccttcatgaccaaaaaagaaagtggttgatggcttaaccaaaagacaaaaaaatacacttctttgttagacatattgagtttcccaacttcctatagtgcatcaaatgagctattaattgaaaaattaagaataatacacttttttgttctgatggatcctaca

SEQ ID NO: 99234 - DNA, 417 bp, Glycine max
  unsure (1)..(417): unsure at all n locations
agctngatggaggagttaaaagggacagattgagtattgaaccaaattcatatatagctatagagagagagggctagctaactaaccatgttagatggcctggcctgtctatcaccctctccttgttacattgctttttcttttatctttgtcataataggacgacaactcacctatttgcttgagtattcccatctgattaatcaaactatgtgcggcatctttcctagtttattttaattttaaatactactatactatacattatcatataatagtggatggatattttgattaccaatgtgagttgccttccccatttaggcttatgtcggccattgtatggtatggttgtgagcccctgtcttaaaaggccaagggtatttgtaaatagcatccaacgttgttggaatcacc

SEQ ID NO: 99235 - DNA, 426 bp, Glycine max
agcttcatccgcagatcccttatgtaagactacttttgatttatacagccctcttagttttagactaacttaaattgagtttcgtccgcagatccctcatgtaacactagactcacctcaagtagcttactaaagtttagcctaatttagtctaagctatgaccacagatccctaatgcaagactaggcttaaactaaacagcattattgtgacagcttaattaaaaccaaaacttagcccatagatccctcatgtgaggctaagcattaagcctgcttcaatcaagtactaaggcaacagtccatcttccaatgcttatgtcacctaactgtgcacataaatgggtgatcagaccgaaagcatacaaacattcaagcattaacggaagcatctgaaccactgaaacataactaattatatattat

SEQ ID NO: 99236 - DNA, 424 bp, Glycine max
  unsure (1)..(424): unsure at all n locations
agctntaagggataaaaacaaaatttggttctctacatataagggctttgcatgaaaatgatgaagaaatgagtagaaaaaaagagatttaagagcttctcaccaaagatttgagaggaagctcaagacactactatggagcttggaagaagatgaaaatggtgttcttttcctcctttgaagtctcatgcaagaagaagaanataaaggttcaagttttggtttttggagaggaaatggtgagaaatgatgcaaagctatgcctaatgctattgataagctcacttgatgagcttgaatggccatttgatggccatgttggaaaaggtgccatatatgagtattttgccttttngaattttaaacaaaaatggctaaagtaaacttaagcaaaaatggtaaaatctggttttgctaaaactga

SEQ ID NO: 99237 - DNA, 394 bp, Glycine max
  unsure (1)..(394): unsure at all n locations
ctaagctttgaatagccatgaaaggtattgaaacttaaaggatgatattggttatctatctatcaagtaaacatccgngtgaaaagcagaatcccaaaacttgagagttaaaaaatcataatgaaggtaagtcctgactcaattatatgcttgtagtttctttccataacaccatttagatgatgggtgtgggggcaaatcaatctgtgttgaataccacagtctaccaaacaggatgcttatggtctaaatatcctctctcaatcaatttgaagacttatgattttagtaataatactgaatttatccatagcttgtaacctgtgaaaaacatatgaggcttcacactttatatttaagaagataaatcctagtctatctttgatataacatc

SEQ ID NO: 99238 - DNA, 409 bp, Glycine max
  unsure (1)..(409): unsure at all n locations
nntgcagcttttgaaancatattctatttctggtaatcgataacacgaaactggtaatcgattaccagagagtaaattctctgggaacctagaaaaatttgagaaaactcttttgtaaaacaaaattgtgctatgcttggtttttgaacaatccttttcaatacttactttgggaagctctgacttggtgcttcttgatttcctctcttgaatcttgaattcatcttctcttgaatcttgagtcctctggatgtcttttcttgaatcttgaaatcaatcctgatcttgaacttgtcgactcaatcttgaatcattcatttgcgcttttggcatcatcaaaatacttgattcatatcatgaatttgctttaccataaggacactcaacccggtggaccctaatcctacct

SEQ ID NO: 99239 - DNA, 221 bp, Glycine max
tacgctttgtggagaatccttggaagatgagggcgcttgtcacccccgctgatgactaagcgcaccttcttgtgaagctttgttgcgaagattcgtcacgaagatagtacttagcttcacacacctctgtaataggggagctcacctccgcgtgacgagaaaatagaggtttggtacacaccacctattatagctgagttggcgcccatgtcccaatacat

SEQ ID NO: 99240 - DNA, 414 bp, Glycine max
  unsure (1)..(414): unsure at all n locations
agcntttaagtatgggtacattagtaatttctatatacttcagttttagtatatagatattgatgataattgattaagaagccgtaaaaggaaaacatatttacaaaaaggaagctgttacatgacataaagaagtgtcaatgatgtttatcaaatttttgtattgacttttgtacattgagacttaattcgattatactcttgatattttaaatgaataaaaaaatagtatttgattaataaaaaagtatttgctaacacataagtgatgagtttaatggatttatattgttttgatttgacttttagggtggttattatcaaattcaatagggtaaataatcatttttgtctctaaatgtatagagcgctgataaatttgttttcgaaagatgaaaattcatatattaattc

SEQ ID NO: 99241 - DNA, 289 bp, Glycine max
ttttttttcttgagtaatctctggggggttaggtgtaaaggaactgcaacgaattcacggcgtattaatcggaaattaatgtagctaactgcgggcttattcagaatgttagatcaaccttgcttaaacaaagtttcagcatccaggacatgtatcagtccattcatgaataattccaaacatgtatcgataccaatggtggaagggcgtaccgatacacatatatgcacccatacagagacctgacgtgggactcaaattaattaagagcacactggcaaaaataatg

SEQ ID NO: 99242 - DNA, 415 bp, Glycine max
agcttcgacgatttatatgtcgccggcgatatgatttaagtgggcatgagaagaggcaaactcgaatatcctgctttgatgaacacgatgactggggcatatgaagagaataagaccgagggaggaacttatgttgtgactgctgatgccacattgtcaaatttcccaccacctgaacaatatcaagactcagccaatatcagcccttctcattacccaccaccttattagacaaaaacacccaatcatccacaaaacctgctctgtgcatatccgataccaaacaccacccttaacacaaaccacaacaccaaccagtgaatgaatattacagatgagaagcctgtacacatcatccgctattcgatgccgtatgttgactcactcccctatctactcgataaagtgatcggag

SEQ ID NO: 99243 - DNA, 357 bp, Glycine max
caacacttgtccatgcattgggctgaacatactgacaacactcttacttgtcaaggctactatgctcgacacgaaaattatcctttgacactagacaacctctttcgctcgtgagctgactaagagcttatggggcttatgctctgtctagggtgcacataataaacgtggaaaactaccgggcactccaatacacatgccaaccctccatttcagccctaacacaggagcatggacgtctcgccctcagcatctgggctaccagattgacacgatagctgtaaccacttcattatatgaatatcgtgtaatctccttagctgatggcaggtattatatgatataagctacacatta

SEQ ID NO: 99244 - DNA, 407 bp, Glycine max
  unsure (1)..(407): unsure at all n locations
agctntcatatcatatggatgctttattgtttctaataagtcgaatgagactttctgatcctccacacccaattctaacttggctttccccatatctactatacagttggtcatggacatgaaaggacggtccagtattatgggaatgacaggatcctcctctatatccataaccacaaaatctgcccgaaatacaagctgcttgacctgaattaacacatcctcaatcactctatatggtctagcaatggagcgatcaaccaactggagggttatgcatgtgggcattatctctatctctccaagtcgctgacacatggagagaggcattaaattgatactggctcccaagactatgagagctttacccacagcaacctcgctaacggaacacggtatagtgacac

SEQ ID NO: 99245 - DNA, 296 bp, Glycine max
cccactcaccctcattaagaactagctcttttcttcctctattgcctttagttgaatacaccttcgtttggtgctctatttgtgtcttaaccctctcatgcatcttctttacaaattctgacctagattcccctccttatgtataaaagaagtgtcctgtgggaggggaatgaggtctaacggtgttaggggattgaacccatagacaaccttcaaaggggactccttggtggttctatgaaccctcctgttgtatgcaaactctacatgaggaagatactcatcccaagacttat

SEQ ID NO: 99246 - DNA, 143 bp, Glycine max
agcttggagccacaaccaacgattatttattcatactcggatgcccgacggagttcaacattatgtcgcgacactcaatattgcttgcgggcgccattcccctctttgggccagactatctatatactacgatggctcatgga

SEQ ID NO: 99247 - DNA, 377 bp, Glycine max
agcttctatcatattagttttctgtagtattatccattgtatacatgttatgagtgagaagtaagaactagttagaaagagatttaacctcattgccattaaagtattctagttgaccaagttgtttaagagaaaattttgagttgagctgagtggtaaggtgttgaatcaactaagaagagctacatttaatgatgatatcatctacatagattaagagattagtagtttgaaaagcagtcttgttaatgaaaagagagggataacactttctttcacacaaccaaactgaagatagtatattacagtcttttaaaccatttgttgggggccttgcttaagccgtacaaagcttattcactttgcactctaaagaa

SEQ ID NO: 99248 - DNA, 219 bp, Glycine max
acattcacaatgcgcgcataaacccaccatcctctggtgcccaccttcatctgagctcacgtatttccacgtagcccatatactctgttctctcaacaccgggttcccatcaatccttccaagcttccacaacatccaatctaaacaacattcaaacagcacatgctatcacatgcaagcaaaacagggcgtaggcagaaaactcttgtcaacacacca

SEQ ID NO: 99249 - DNA, 323 bp, Glycine max
  unsure (1)..(323): unsure at all n locations
agctttaatggactcttgtaatatctatgctcttgtcgcggtaaacacaacccgatctgaacgctccttttagtcctgagacgatcctacagtggtctcaatctattcttctcaaaaacaataggtaccgtacgacgggtctaccctatagattttaccctatataagaattgaccgtggacttacatagagtcagntctgtcttgacattgtacctcctaggccgtctgatgacgactttctctatcatattagcacatcgaatataggagtaagtcttactattgcatattggctgcgtatgaccactgcgaccagatctt

SEQ ID NO: 99250 - DNA, 231 bp, Glycine max
  unsure (1)..(231): unsure at all n locations
tttttcacaatgactaactcttaatcatctaacatactacatatacaatctcaacactaagtctnttctctcaagtctgtcaagggtgttgtgagatctcttttgaactatacaacaatttatagaaagctttgtgcagaaagactatgaatgaacagcacgagggtcgtgcgcatgtcttcaaagcgtatcggtattataggccttcttcaacaagtgtccattatctct

SEQ ID NO: 99251 - DNA, 372 bp, Glycine max
agcattgcttccacagaaagataccttggatatgtatgtatgtaacaaaaatacttcacaaaatatatatatgtatgtttaggtagaaagataccttggatatgcatgtatatagaaaaaatacctcacaaaaatatacacatgtttaggtagcaaaatacctcatgaaaagaaaaaaaacaaaaacaaacaaggaaaagagataaacacatgatagaaaggaaaagagaaaaaagaaaaataagttgtctagctaaaaaaacaacatgctcgtgaaaagagataatttccaacttttatttgaagaaagaattcactgatcataaccagcttttgaaaaatgtgtgtacacttgaaggatgaacgctgtgg

SEQ ID NO: 99252 - DNA, 324 bp, Glycine max
  unsure (1)..(324): unsure at all n locations
aatcatgggttaaggagttgtacaactgatggagatatattacacttagttagggatgcttttgaaaatgagaatgagataaatgtttattttcatcatgaagtagatccaattntagaagaagtcccacaaatgttgcactcggaatgtgatccaattcgaaaagctgttgagaatgaggatgatntanatgatgtacctgtngctggccatgaggaaaggtaagtttaattcatctgtacttggtccgacatnggttaccataattaataatatgattaatttttactttatcaccattgatgcagatgttggtgctggaga

SEQ ID NO: 99253 - DNA, 326 bp, Glycine max
agcttggttggtcaaatattgctataaattttttttgcaacaaatctgaaatatgaatataagcagttcataaataggtgggattctttgcaaaacgaatggtatttattggctaatcttattgggaatgacacaggtcttggctgggatggggagaataataccattgcacctagtgatgaatggtgcgaagccctaattcaagtatgtgttattcaatcaacaccattgctgccatcttttattcattatgtttgtatgagggacccttgattctgatttctatgtgtgactcaacgatactcattgcatccagtgttatgaca

SEQ ID NO: 99254 - DNA, 463 bp, Glycine max
  unsure (1)..(463): unsure at all n locations
tactagcttattattatcaagatcacctgccacagcgctttttatttcatttctgttctatgatgcattttgccttttctgttttggtgatatcttattctccttttaactcaacttcttgttgtgtaatttattctataataccaaaagtttctttcagtatccaaaaataaattattctttatggacatatctggtcaattcctaaatagggttttaactggttttatttattgtcaaatgttagttgttagtttttgttagcaaagggattcaaaccctatgacctctccctgctttccttctctttttgccaccaacaccaagtcaaccttatatctcctatatgtttagaactgtataattntttctagttttgaacactaattcaaataatatcccaaagtttttgatttcattgtttctggcatatatggggtgtctagactcgcctggctatctg

SEQ ID NO: 99255 - DNA, 338 bp, Glycine max
  unsure (1)..(338): unsure at all n locations
agctcgcattntaaggttgtgatgtaggattttctttctagtgagcttacaaatggaccgcttaggcttaacatcacttgctttacgtcatatagcgggtctattactcattgtgcacgttttcttatggaggttgacaactttcagatcttgaatatcattcatcctatactaggatttgacatatcctaggagaatgtctctaccgaatgaatcttatacacaatgcagtagcagaactcttaattggatgcgtattgatgtggaatcacatcatggcctgcctattttatcatctgatagtacgaacatagatgatgacgcatgatctgatatca

SEQ ID NO: 99256 - DNA, 453 bp, Glycine max
ttatcttatcctgtacaatcagacgtactagcatgtcattatttctctctgggtttgcttgggcatatttggatctcgaagaggtactcctacatatctagcaaatgatagtaatgctaggctgtgttgaaaaggtgcacattaagctgacatagtgaaacatacactactgtgccatacactcttgtagttatggatcgtcaatgtacgacgagtatgagtgatctacacggtgtgtcattatctgtatctgtgctaactgctaactcattatcgctcctggaggtcatttatgttagatgagggcaaattatcatgtcttgtgagtactgcttgctacaagtatttaaaagtgaaatcttttactcaaaagtgttgtttactaatatctttataatattcattatacacttaacatattcatgatttattatctacataacatactaacat

SEQ ID NO: 99257 - DNA, 354 bp, Glycine max
  unsure (1)..(354): unsure at all n locations
cctgaggctgcagctgcaaagctattatccgtatccctgttttttaattaacacaccgaaatcagatagatatgagtgcctacgtgaagtcatcttggttggtgactctctattctacgccaggatgatgtgggtctagcattacttaaaatcataactcccctattccttatgtatgtctaacaaatcatgtccctggctgttaatatactttcntgcccaactcttgtcatgntattcgcagctaggtgctagaataaaattgttgttgcacagaaagcagcgtgatgattaatttgctagaactcatgggtattattaacctctattctcaaaggaaaagacaacgaattg

SEQ ID NO: 99258 - DNA, 425 bp, Glycine max
cgcactgagtttacaaaaaataaatatcttaattctctcttatgtgttctcaggcaaaaatatttttaaggaataactaaatatcgtactataatcctaaaatgattatgccgatcaagcatacttttaaaaatctcttaccgaaaatctaagcaccccctttgttaatgaggaactctatccgcttgctattgttcttttgattgcttgatgatactttggttgcctatctaatcaacctcttttcgccgacagaaaccctatgctttagtgagctatattcccacttttcgctcgcatttttttacacccattacttacttttagtgcttatgcatgaactaccgttattacatctgtatcagaatatgagaacaatgagcattgcttacattattgtctagaccgcctaatgatattcacta

SEQ ID NO: 99259 - DNA, 371 bp, Glycine max
atgttgttgggatatttctcagattacctgggtcaactttatcagagagaaatcagacccctctgaagtattcaaggagttgagtctaagacttcacaagaaaaacaagactaggtggcatcacagagaattcaggagtgactcatggctagagagttttgaaaacagcagggttactgaattctgcacatctgaaggcatcactcatgagttctctgcagccattacacctcaacaaaatggcatagttgaaaggaataacaggactttgcaagaagctgctagggtcatgcttcatgccatagaacttccctataatctctgggctgaagccatgaacacagcatgctacattcacaacagagtcacac

SEQ ID NO: 99260 - DNA, 401 bp, Glycine max
ccatggcacatgaaaatggccttatgaagggagaaggacattctccttttacacaaaagcatcatgcattatataagccgcactacctggagtttcttccagaactatcactatccactgtgattataaagcacttgaatgaacatctccctggactcggactatcatcacactaacacacccgcggtattgatgcatgaaagctatcggcaaaaaacaactaagactgcctaacaacctttatttccagatattctttatacactcctgaaaatttttggtcagattttccatacttggagatgtctactgtattttctttgggaaaccaagaagaaagagaaacacatgtgtcttgagtgtttctttctcaacatgatcattgaggatgaacacttctt

SEQ ID NO: 99261 - DNA, 330 bp, Glycine max
  unsure (1)..(330): unsure at all n locations
agcttgccgttgaacaagttcgatatccgtttttatcaccgggcagtgcactcgcattggtacaaccttgagaggtttggctttggtgtgtnggagggtgacatgaggaatgagacaaaattctcaagtatgattcacctaacggtgtgtcttgagggtgcttatcatgtgcttgatgagaccacaatgtatattattgacacaaggcctactgctatacaactctggaaacaaccaattgggatacttgaagtggggatattgagtgcccatgggctccaatctatgaagaataacaatgctaaagggtcacagatgcttattgtgtgg

SEQ ID NO: 99262 - DNA, 455 bp, Glycine max
  unsure (1)..(455): unsure at all n locations
agctcgcccaggcgagcagggntgcttcctctataatcaacagccttctggaggaatcttctggagggcccaagtgggcctggttgctatttgcacccccatttatactaagtacaccccctgcctttttttggtgattcttttttcgtaaagttacggaaacttacgaatttcgtaacgatactggttttctttccgtaatgttacggaaccttgtggattacataatcatcccctttttgacttacgaaatattacggaacctcactaattgtgcaacgatgcttccatttgatttccggtgtgtcacggaaccttacggattgtgcatcaatattttcttttgttttccggcatgtcccggaatttcacaaattgcctaatgatgggtgccaagcacctcacaaggaccaaacaaaagttgcatgtcatcaagcataggtcctcggacgaaa

SEQ ID NO: 99263 - DNA, 447 bp, Glycine max
  unsure (1)..(447): unsure at all n locations
atgcacatccctacaatagagatatgtgatatattatcttnggtaagagaaatttccctcacatgtagctatatttttcctgcatataccaaaatctatcttagcaaaaaattgattccgtacttggtaaccgttggatcgttaaaacattctaacaccgtgttcggaattcatatgcgcatatctccaccgttgggattagtcaaacttgaatatggagagagaaacgtccctcgcatatagacaaagaaatggagcctcatatcccttctcctactctctaatgcttgaaaaccctagcagaacaatcaaagcataagtttgagaaaacataagcaacaactagagatgctactatatttgtcggactacacacgagagtccacttagatgtaagggatgagttgatcgcaattgtgtgtagaatgaacatctgtagggatcctt

SEQ ID NO: 99264 - DNA, 196 bp, Glycine max
attacatcaatctaggtattccattaccagacacaaacaaaatcaaactccaagtctcatcatacacaactcttcaacaactaactgtgtaatcgaccacacatttcaatgtattcgatatccaccacggcaattttataaatccatccaaaagtataccagcccaagaaattccagaacgactatcaaaggccta

SEQ ID NO: 99265 - DNA, 443 bp, Glycine max
  unsure (1)..(443): unsure at all n locations
gacctataaaactcagcttttatcttgcttaanagtgtgtgtgtgaacaaatattttattatcgcaaataaacacagttcaatatacgcaaataaacatgttaccttgttaaaagtgtgtttttcatctagtgcatgtcatcccatatgtggctagaggtttgtactctgtgttgtggccaaggcagattacgcactagtgttttccgatgaaacacttcaatttttccacggttagtgaagagtaatcacatacttgttattatcaaatacaggtacaactttagacttttggagaatcatctaatgttgttagcactctaaattacgtgaatattgatttgcatacttgggttgatggaatatgaactccctgtcatgttaccttggtacaatatttttcatggagaggtatcatatatcatgcattttacgcattcttat

SEQ ID NO: 99266 - DNA, 461 bp, Glycine max
tggagaggatgcttcaatggaggagaagaaagaggtgtttattgagagagggcggagcacgacattgaagaatgagatagagaagagaagttgaactttgaattgtgtctcataagaatttcattcatcaaagttacaataagtgttacacatgcttctatttatagactaggtagcttccttgagaagctttcttgagaaaacttccttcagaagctagagcttagctacacatacccctctcataactaagctcacctccttgagaagcttccttaagaagattcctaaagaagctaaagcttagctacacacacctctctaatagctaagttcacctccttgagatgagaagctagagcttagctacacaccccctataatagctaggctcacccatatgccagaagacatgaaaatgcaaaaaaagtccctactacaaagactactcataatgcccc

SEQ ID NO: 99267 - DNA, 410 bp, Glycine max
tcattaaactacttgcccacattatgaaattcctattaaggctagtcagattctttgtgatatggaaatactatcataatttgcaattgtggttaacattggtttggaaagaataccgcgcttttcaatctgtcggttgtcttttctttggaattatattacatacacagcagctttgcttctaatgtttgatcttaccacagcttagccatgtcataacttctgttttcaaatgttattcctcattgtagatttgcataattatatagtgactatggaagtcttcaattatatagtaactattttctgaatttagttgtgcaggcatgaattcagacttaagcatgatgattggatgaacatggtaagacctgatcttcatcctgttgtttcagcataattgcatgaaa

SEQ ID NO: 99268 - DNA, 399 bp, Glycine max
  unsure (1)..(399): unsure at all n locations
actgaaagcggntctaatgactcctctgcggcctccacataacgcatataggatgggcagttcaccaagatgtcttcctcgcctgatacgatgaccagatgcccttccactacgaatttcaaattttggtggagtgtagagggaacaactcccactgagtggatccacggacgccccaacagacaactgtaggggagttaatgtccattatttggaaagttacttggcatgtgtgagggcctatctgtactgggaggacgatctctcccctaacctcttggcgggtgtcgtcgaatgcacaaaccaccattgaactcggctctatgtgggaggcattgaatggttatttctccaaagtgctcttaagcatcacgtgtaaactggaaccattatcgatga

SEQ ID NO: 99269 - DNA, 329 bp, Glycine max
  unsure (1)..(329): unsure at all n locations
agctncatgctaacggcttaaaatannaagttttatcttcttaatagaaactttgccaattgatttttcccacttgcaatgcaatggcgcaagggagttcttatatgatagacacacatgtttacattagcaccaaattggagcaacaacttcaccatcagtgccctgccagaatgacatgccagatgtaataatgaccatccacggaaacacctctctgtctcagaagtctcttcaactctcaaacaggcttcaggatcatgctgatgccctttggcatcagcagcatggtgagactcattataatactctgtgttatcagatttgat

SEQ ID NO: 99270 - DNA, 467 bp, Glycine max
  unsure (1)..(467): unsure at all n locations
tcaagagaaagggaagagttgccgactgcaganattgattattcagagagagatggtgcgtgcgctctttctcttaagtataaatagcaaccaaccagcttctctctcattcagccacgctcgtcataataattaataaatagtattttagaccgtacattaaacagaataaattttattttatataattaaaatttataataaataaataatgagattgattggtgtattagttgaagaaagaaaatactcggtttaattttaacaaaacacaaactaaaactaaggttaaaacaagggagagaaattagcttattttttttattcacttcatttgtgatgattattaaatactatcatttttttctttaatgatactaatatttttaacataacatttatttattatcacaataaaaattggagatgtaagattatttcaatgattatcacaataaaaattggag

SEQ ID NO: 99271 - DNA, 311 bp, Glycine max
gtgtctgtggctgctgaagagatctggttctatgacgtggagatacgaaaagtacatgtacacatgtacaaacagtcaaaaagatttgaacaatttttaatgctaaaatttataattataattttgtgcacaagaattaaaagagagagtaaagtatacaccattccagagtaagggttgaaagctacttttttctttggagtgtggtggagagagaatcaacagtcacacaaacaacacaacacaaacgagggtgatgaatcaaactcaagaagaaatgaaagctaaacagttgttgttttttatcacac

SEQ ID NO: 99272 - DNA, 468 bp, Glycine max
  unsure (1)..(468): unsure at all n locations
tatactgagaggttccatganacctactacgagtacgtttctcccatggatctcgngttattccatgaacagtccagcgaaacataatgacatcctgtagaagccttcaaaaacatcctgccatgaaaccctagagcccagaatattgacttgtaatcctcaatgccaacgaacgtattcaaagggtctttaaatacgatatcatccctgaaagaagaaaaaattgtttgaattttcaaccatgcaaataaaaatgagaaaagtaaaggagggaaatgggaacctgtagaagtcgaaggagagttctctgtagaagaggccagggaaatcctctctcagagaccgaatagcataccccaaattcacgtagtattttagctttttttttttttcttctagcttcactggagcggaaaattgtccgtacgaacttaaattatgatccaaatccaaaatcctatcacgaat

SEQ ID NO: 99273 - DNA, 315 bp, Glycine max
cacctgcagcatgcaactgcgccactcgccagcagctagttgctcctacgaagcacaacctcctggaggaaacttctggagggcccaactgggcctggctgctatatgcacccacctctttaataaatgcaccctcttatatatatagaatattatttaacctgaacgtaacgaaactccacgaattttctaaagatgcttatttttcttccgcagcgttaggaattcttaccgattatgtatttactcttttttagcttcaaagaagcacaataacttactgttgcgcaaacacctcttttgatttcccaatta

SEQ ID NO: 99274 - DNA, 450 bp, Glycine max
  unsure (1)..(450): unsure at all n locations
ctaaactntcataagctgcttgatctgtgtctattcttacacgagggatttgcggacgaaattcagtttaaattagtctaaacctaagagggccgtctaaattgggcctagtccaacaagagggatttgaggacgaggcttggattgattcggtctgacgatggatcgaggtttattaatttaggttacaacataaaacacaagaacatgattgataaaagaaatatatttatatgcatcaacttgtttgttagaaagacccaacatttctacctactactgtcacttttacttacctttcatcttatagttttagcataaaggtttagtttaaattctgtttgaaattatcaatcatacatgttatctcaacaattcttcatttctgaacttaactcaggctaacattagttccctgtgttcgatactcggattcatccgctttaattt

SEQ ID NO: 99275 - DNA, 274 bp, Glycine max
  unsure (1)..(274): unsure at all n locations
tcataagaggagaaaacaaaggggaanatgaactaaaccatatctgaacaaactcaaaaacacatgatcaaataatcttatacacttaccttatataagaacgacccgagatttctcaccacttaaaaacaacttaaacacacttaccttatatagaaaccctcgcattaatacctccacacaccgaaatgcataagacgaacttaattcataggagaagcacaacccatgttgccatactattttcttcatcacatacaagcgcgacactcca

SEQ ID NO: 99276 - DNA, 466 bp, Glycine max
  unsure (1)..(466): unsure at all n locations
tactcangctngcaactcttcaagggatatctaccaatactaatatacaatattttctattattgatcaagcntgatatatgctattgatagctaaattaaaaaatattttttatattcctaatacaattttcataatcatctttttctcattctcaatatataaagtatttaagaatcaagtaaaataagaacatattcaaaacataactttttattatatcaaccaaaatctcaaattgtcttgtatatgacataatatcattaaaatcattaacttgaactaatttagaagtcatatctacaagttcaatggttggcaatgaaaaattcttatacagatagtatattaaaattaagctctgaataacattatattaaacttctatataaacagataaatgaaaggaaaaaaacaacttccctaaatggacaaaataatagaaatacacaaagtactgcctaat

SEQ ID NO: 99277 - DNA, 313 bp, Glycine max
  unsure (1)..(313): unsure at all n locations
gctttcaacatgcaggaagtcatcctttattctcacggactatcanagcgcagcaaaacagggcagatgcagaaaactctgccaaaacacaactcagaatcacagcttgtctcacttaaagaccccgctacaatttcatctttacaattccttaaccgtcggatcgactcgaacactttactggaagtctctagtacataagcctacattttgaccgttgggatctactagtaaacatgcagaactcattctgcactactctttccggaacacgcaaaagatagcattattctgcacttatgcaaattctact

SEQ ID NO: 99278 - DNA, 436 bp, Glycine max
  unsure (1)..(436): unsure at all n locations
ttataagcgcgggntcgggagacaaagggcaagctatctcgtattgcgaagatgacataccgagtactctggttgtggtacgaccatgctctcctgatttccagctgggatattggcgagtggaggaacgccccggcttttacgcatcaagcattatgttaacctttacggttttaaaagctctatagttgggcctacgctttaaagttttttccttttgttaaggcttcgtgtcttttgtttttgaatttataatacaaggatcgtgcttcatttggtcctgggctcttcccattctcattcatttgcatgtatacttctttttctgaaacgggagatccgatgacgaagtccccgaaagtactaatacctgggacccgtctatcaactttgagcaagaaatgaatcatacggaagatgaacgaaatgaggatgt

SEQ ID NO: 99279 - DNA, 274 bp, Glycine max
cagggtaatatcgtctagagaaaatcctcaattacgatctttcaaaagctctagctgccaaattaatcccacaaatgatgttgtttgtcatcaatttagaccctcagagatagggttttttgtcatcaacttactccctcaaagatgactcgttgtgattgctctagcacttcatagattggcacctaattgagcctttgaagatttaattggcacaaaactaagccctcatagtttctttggtcactacttctgtcttccttacggatagtgt

SEQ ID NO: 99280 - DNA, 459 bp, Glycine max
  unsure (1)..(459): unsure at all n locations
tgaagctggaatattctctgcagcatatacgatgttttgttatttataaatcccaaatgtccaataagaaatagtaattgcctagtatcctaataaaaattaacactcgaaatgaagttgaaactcatacaatttgtgtcaaataagggctaatattagcaatcttttgatcacattaatttttaaaatgaatatgaaaaattgaagaaaagttatacaaaattattgaggcctcccagtctgatagggaccaagttttacacaagaattgagaaacccatgaatcgagtgtagacaacacgataagcaaaagttttaacttcctaagcaaacaaagtttaaactaatttctccctcatcccaggatcataaaatataacaaaaatctgagcacaattgctccatgtatagatggcttaatttaggattnattgtaaattttctcacttctggttcttc

SEQ ID NO: 99281 - DNA, 292 bp, Glycine max
gatcctcagagtcacctgaggctgcagcttaaattaattagactttgtattatcgactaataactccgataaaagtatgcgttgactgctatatgtcacattcaatttcagcgtctcgatatattacgggactcaacctgacttcccagtaaaaagttattgtcctttgaattggcttataggttgaacattcatataccaacgtctcgatatattacgggacctaatcagacatcccgagtaaaagatattgccttttgaattgactcaaagatctacattcaagtttgag

SEQ ID NO: 99282 - DNA, 452 bp, Glycine max
  unsure (1)..(452): unsure at all n locations
actcagcttgagcanatcaaacgacataactgttactcttatttctgattgagtcccgaaatatatcgagacgctcgacattgaatgttgaacctatgagccaattcaaacgacaaaaactttttactcggatgtctgattgagtcccataatatatcgagacactctaaattgaatgttgaacctatgagccaattcagacgacattaactttttactcggatgtctgattgagtctcgtaatatatcgggacgctcgaaattgaatgttgaagcttagagcaaattctaacgacaataaccttgttctcgcatggttgattgagtcccgtcatatatcgagacgctcgaaattgatgctgaacctctgagcatattaaaccacaataacttttactcggattctgattgagtcccgaatattcgagacgctcgaattgatgttgaaccta

SEQ ID NO: 99283 - DNA, 379 bp, Glycine max
cccgggagcgactaagatgtaccaagaacttacgctgattgtttggtggcagggtatgaatacagaagttaatgagtttgttcttgtgcgcccagtgtgtcagaatgcttacattgaacactcgaagccttcatggaagttgcaacctttatagatacctaagtggaagcgggatagtatctccatggatttcatggtggggttacctatgacccccacaggtttatattccatttaggttattgtagacaggttgaccaaatctgctcacttcatcctaattaacattagatactccttagagaggttgactagcttgtatgtcaatgagatagttagactacaccgtattcattctaccataggctctgatagagat

SEQ ID NO: 99284 - DNA, 456 bp, Glycine max
  unsure (1)..(456): unsure at all n locations
tgtgagttgtgacaggtagtactaaaaatacccncacctattcctcttttcccgttatcacaaactntgtcgaatgctattgctactctagaacaatgatctttagttaatctacactcaactgtaattccatcatataattaccttgcaaaccctaaaatcagagaacattgagtttgttgtagctccatatgaagtagatgctcagttagcgcacatgtgtcaacttggagtagaaaatggtggagttgtagcggtgatcacacaagatagtgatctaatagcatatggttgtccagctataagaactcctccaatactgtcatattgtgcatgaaggtttactggttttttgatatcttgatttatttactatttcactattacgtttcatagaagtcatgcattntggattgtaatttgcagtggttttgaacaaattatttttaacattga

SEQ ID NO: 99285 - DNA, 453 bp, Glycine max
  unsure (1)..(453): unsure at all n locations
tcatgaggaatcaagagtgatacagagagttttgttgattactaanangacgacaaaaggctcaaaattcaagatcactctctgtatacacacatgatgatctcatgaatcaaagaatgagttcgagattaatagctagacacttcaatgtgtaaaaggaaatttgattatcagaatcaagaatccagtttctagattcatgtttcaagaatcgagatcaagattctagaatcatgagatgactcactctagatatgtattataaaaaaatttcataaaactgagtatgacatgaatttttctcaaaaccttttaccaaagagtttttactctctggtaatcgattaccagattatgggaatcgattactagccgctaaatggttctcataaagcgttcacctgatctacaacgttccaattgattcaaaatgttgcatcgatacaatgattt

SEQ ID NO: 99286 - DNA, 310 bp, Glycine max
agcttgcactttaagagttgggtatatcctctgttcatgtgcacagggaagatctcgatgcaaattgtccacccaatactacattaatatagtccacactagaaggattgcagtaactactctatgggttaaagtagttggttgctaatttctatgtgtttcgcaatatagagataaactctattctcatgatcaatctaaagcttataaactatcatatgtcaaaagttatcaaaatatgttacaactttgtagctgaactctattacaatggtagcaaacatataatgctctctgcactgaaatatta

SEQ ID NO: 99287 - DNA, 463 bp, Glycine max
  unsure (1)..(463): unsure at all n locations
ngccataagtgggtggtcttgcttttgaaattgtaacctttattggctatagtagacataggaaaaaatgataaaaactattttttgccaaactggtaaatcttatcttaaacatcttgattaatgtgctaacatcctagattattgtactaatctccctagggatatgtgtactcagagtaaatttcaaatagagataaattacaatgcgacttagtgcgcagttcaattcttgcacagatgaaaatatagttcaaatagtttttatttctctgtcaagcttcactaaactaatcacatgtatgtatgtatatatgtatgtatgtatgtatgtgataagcatgaaaaataagaattaaaaacatataatcactgcaattaaatacatacatgcatagatgatacaacatagagtctnctttgtcaacttgagttgtaatttgtgtcatgtgttacaggtgtt

SEQ ID NO: 99288 - DNA, 375 bp, Glycine max
  unsure (1)..(375): unsure at all n locations
aagtcacctgccgcatgcaagcttgttggattatggagcacccgtcatatgtgttactatgtggcgatcgggcgagggcgcaaatcaactctcccacttacactaatcaaacatgaacccaccatctccagttgcccaccttcaactgagctcacgtactcctacgtagcccttatccttgttcctctcagcatacggtccccatcaatcctctccaaacttttcataatatccaagcaattcaattccaactatcatgaactaccctataccaagaaaacagggcagaggcagaaaactctgcccaaaacatattcacatattacaagtttccttactcaaataccccagtagcattctctgcngttccaaata

SEQ ID NO: 99289 - DNA, 465 bp, Glycine max
  unsure (1)..(465): unsure at all n locations
ttagctctctgcccaaactcncttcacaatatctgatttttattcttaaataggtggccttgttcgtgctcgtgcgcttagcacaattctggaccgcttaacacacattagtgaatttcggcttagcgtgtgcctttctcacttagcggatggactgaagcggtgcacttagtgagatgaagcggtgtgcttagcaaaactgcacaactcatcttcttccagattcttccttgtgcttagccaatgagcgttgcgcttagcggacgctcgctaagccagcggattggcttagcgagaatgagaaaaacaacactttttgaagctttccaaattaacctgaaattgagagaaaatgattattaaacacacaaaatggcagtactaagtatttattacctatacttaacagaaaatacttataacgctacaaaataaccataaattggaggagtttgatacaattta

SEQ ID NO: 99290 - DNA, 243 bp, Glycine max
acacaaattcatgataaaaacaggatacaatcgcacttcgagctttcccacaagacatcattcatcaaagtgtcaacaacgtgtacacatgcctctatatataacctccgagcttccctgagaaacttccttgagaagctctctcgataaacatccttggaaagcttccttgagaaacttccctagaagcttccctgaaagcataagttagctacaacaccccccacataacaagctcacctc

SEQ ID NO: 99291 - DNA, 473 bp, Glycine max
accataaaactcagctagtaggtctcgacctttctatctgctccaatcttgtttcttgtgagtccatttacaaccaattggttgtatatcctttgaagcttcaactaaagtccataatttgttgatcttcatttattccatttcagattccatagcttcttgcaatttcttacaatctaagctttgcatggtctcttcatagcttcttggatcatcatcatcatgataaaactcatttgatgtgtcatctacgaccatcaagtttaatctatcaggtgcatgatgcactcaagtagatcttttagaagcctcatacattgggtttataagttgttaaattgattctaagattggttcattaacctaatcttgaactataactggttcttgaaccataattgttgaaggttcttgaaccataattgtttcattggttaattgagtttcatcaagctcaatctctttactatgac

SEQ ID NO: 99292 - DNA, 450 bp, Glycine max
  unsure (1)..(450): unsure at all n locations
atatatagagcatactagctgactngcattatttttctatannatcaagcatgtataattaagtatctccttgaaaagtattgaagatttggtccaaaataataataacgcatgtcttggcgtatgcatgatattcttaatggtacaacgcttgtaaaagtggcacttatgtggtcaaaataaacttgtagaagaacaaagttacgaccactgatgattggcatctttaatcaagtgtgctcaatacgttaatttcaattagtgctgctttttgtgtatcagttatgcacttaattggctttaagaatctccgtccaaggaaataattgtgggcgcgtctttgtgcaagtgaatgagacataaaatgattggagagcaagaatgaataacacatgctataattaattgttagaatgcttccatgttcacaaggttaatcatgcaccatca

SEQ ID NO: 99293 - DNA, 402 bp, Glycine max
  unsure (1)..(402): unsure at all n locations
gtctctcactatccctctgtgtgtgagatattaagatctacgggagcataacatgcaaggttgaatgtgangntnctatccttatgatccatcatacacagaacagtttattctctatgcagtgaaaagctgaatatccatgaatccccatatgaactgtatccaaaagaattgctgaaaggaaatcagtatgcatacaaaattccccaagagcactattcctattatcagtaataaacacaattaaaaccaactatccaaaatcataacctgcaataaaaaccaanannccaatagcaagaaagtgcctatcaacacacctgctaatgccatggatgacactctgtcacaactgcacagatattcgtgtttttgcaccgacaccaatcaagaatgaaattt

SEQ ID NO: 99294 - DNA, 371 bp, Glycine max
  unsure (1)..(371): unsure at all n locations
cgcaagctaatcaattgaaattgacggtgtgttattcttcctanactctactaggggcaatgttccttggcacccttaatcatgttcaattcgatggtaagtataagtcttttaatccaaaaaaggaaacttggttaccatgtgagagtaattcggatgaatgaaaatagatttggttgttatatgaatgagtatttccatgcttgtttgcaacaatgtattataaaaaagtacctaccacatagagagtggctatgcaatttggaatgcatcaagaagattcagattntgtgattgcattctctggcaccaagctattgcattgtaaaattattgcataccccaaaattttatcttttaaaaacattaca

SEQ ID NO: 99295 - DNA, 454 bp, Glycine max
  unsure (1)..(454): unsure at all n locations
tgtgattcctcaatacatccttattaatgggtnatttcttacttcttaaangcacgctatatacttgttataggaaccttataattctaagtatatatagttgtagtatggtgntcttccttaattgcatatgtagtatggttgtttgtgatttcttgtttttagtgatgctaatactctatagttggatgactcatattaagttatatttcataaggaatactcttttgatcgcaccttctaattctagtgcaacctatttttttttttgtgttgcgtgcttaagtcaaataaattgatttcacttgaaagcctaagtataattaattctttgtgttatgagactacatcaaacaattggattcctgatgtttctatcacaatcaagtgattgttcatgtcttcatatgagtgtacactgtggactagtcttagtggtagaatcattgaaata

SEQ ID NO: 99296 - DNA, 354 bp, Glycine max
tcataatcctcaggaggattgttgaaaggacactcccatacaaactgatgatatacagcacagtgaccagtgtctaccagaccgttatgaggtcctgttattgcttaagccagcaataaaaagatatctgccatataatgcacttagcaggagttgcccaccaaagcgaagtaaatataaataactaaaacacatgctcgtgtgatcattgatgtatagattatataggagtgatgaccacatacgcatccttttaaaaagataaggcaatagaccatagaccaccttattacttgacaaaaaagccattgtgaatgtaccttcacatgtccctgcattacactcccctcctgt

SEQ ID NO: 99297 - DNA, 329 bp, Glycine max
  unsure (1)..(329): unsure at all n locations
cctgcggcccgcagcttattgctactgangataattattttgattcacgcgcctcgcgatagcacctatctggacaccaatcccatgagaatgattcctngaatgacacatgaccactcctttaatcaagagaaagattcacgagatcgttcttcaagatgattccacattccggactctcccagatccctatttcagacttcatcgattctcgaatcaagagaagactcagtcccgataagtttagaacgtctatcatacattgagattccaatacgtttctcctactccctccacagaggcttctctctgtatcgataaccacacat

SEQ ID NO: 99298 - DNA, 448 bp, Glycine max
gaccttaaaactcagcttaaaaattaagttgtactatttggacaggacttttgtatccatagcattcctagatttttgatctcacctcttcttcagaagacacttgcttcatggatctacatataccctcaagcaactaacaaaaacaccatttaacctcacccgcacatcagcctgttgctaaaatctctattgaaagagatgttattaatcccccattttatagtttcagggtcatcaacccactgccatccatatgtaagcctcttatggtgttagactttcgcctctagttaaccatggtatggtaaaactgggtgtttgagtccccttctcgcaaccatataaccttcatcttctaagcaaagaccgactccagccttttactatactttcaaaaatcagccaccacccctctttgtttagaagacctctttgctgatagttg

SEQ ID NO: 99299 - DNA, 453 bp, Glycine max
  unsure (1)..(453): unsure at all n locations
tatgcgcctatntccttacaaacgttctcttgcacaagacacttaaccgaaaaacatgcgcctatntacaatcaaggcagcttcgttacctagattatttacacgtacctccaaggtgtatttgttacttacatcacacacatctcctcggctaaagtcacatacatgcatactcaaagcattttgtggcaccaaaaattgcacatgtgcacatcttggtggttctaatacctatacatacgcaaacttcatgatgaatcttgactacccacacaataaggtgctacatttcatgctctttttttcaagtttttgctacctanagccgcatgcaaattcaagcatattttcctttgctgactaaaattgcattcaaattaaaaggtatacattcttttggtaatgtatcttctttacataacatgcaacatatttatgtgtatatttttgtga

SEQ ID NO: 99300 - DNA, 453 bp, Glycine max
  unsure (1)..(453): unsure at all n locations
gtgtagcagatgccactctactcntaaatcttttttagatatgtgaacatggaagcactaatatattgatcaggataacatcatagtggaaggaaattgcagtgctgtgatccagaagatccttccacccaagcataaagatcctggaagtgtaactattccttgttcaattggagaagtcaatgttggaaaagctcttattgacctgggagccagcatcaatttgatgccactctccatgtgcagaagattgggagagttggaaataatgcccactcgaatgactttacaattagctgaccgctccattactaggccatatggagtaattgaagatgtgttggtcagagtaagacattttatcttcccggcagactttgtggtaatggatatcttctaagatcctgacatccttgtaatattgggaaggccattcatgttgacagcaagctg

SEQ ID NO: 99301 - DNA, 339 bp, Glycine max
  unsure (1)..(339): unsure at all n locations
agctctntaccgtntatttaagccattntcttacctaataaatgataaaatgaatttcaaccgatcatttgtgttgtaatctcgcttaatcactgttaaaacaaaatctaaccgatcgtttacgttataaccacggtttaacaaaaaaaaaggcacaataataattaaataatcaaaatatcttgataaaaaataataaaataatcaaaatatctttgaataaaataatcaaaataatcaatcggatgtttttctttggaagtttccttgaatgaattgactaatatccaaagtgaaactaaggctaaaatcactcacaaatcaagcttccttcgcaaa

SEQ ID NO: 99302 - DNA, 443 bp, Glycine max
gtgatcatgaattccgaaatatatggggagtaaacgcacattttatctatatacaattgtttgttgcttgcttgaatcttgatttcaggtattgtattgtcatcatcaaaaagggggagattgtagatgcaatttcctttgatgttttgatgatgatcatgatgatgtgttgcaattgatgcaaatgggcttttcaagattaaattcaagacaatacttcaagattacaagtcacaacatgaagatgatcactagtatattaggaagggaattcctaattgaattatcaaaggtttggccaagtgatttaaattaaaaagtgtttttcaaagagtttattctttggtaatcgattaccagaggatgtaatcgattactagtggccaaatatattttataacagctactaaaatttgaattcgaaattttagactgtgtaatcg

SEQ ID NO: 99303 - DNA, 344 bp, Glycine max
agcttactcaaagtctcaccaaacatttcttttgttatataaaactttgccaactacatatttagcatggaagttaagcaaaacattatcatatgcctacctactattgtataatcacacactatcattgattataaaatcactgggagccaaaaaatcctatcttgttttataatagttaatacttttcttaactaaattcccctcaatgaaatgaatggatttgcattgaataaacaaaacggttgtcgtcaacactatctaaacaaatctaatggttattaatatattttaaaaaaatttttaactgcaaacaatccgcgaaataaaattttggttttacc

SEQ ID NO: 99304 - DNA, 460 bp, Glycine max
  unsure (1)..(460): unsure at all n locations
cgtcaagtagcacacatggtaactgagttaggatgaaggatctatttttacatatattntaaaattctgaggatcaaaaccaatgaaaatatatattaaggccaaacaaaatttaatcaattcttttagaaccaaaacatatttaatcgtataaattattttaaaaaacttaaaaatcatcaagaccataataaaaaatttaaaattacatttaattctattttaaaaaaatatatatgtttaaaccttatttaagtttttgcccaccaaaaaaaaatgttaatgtgatttttatctatcatcaatttagccctctattgttgaaaccaacgatgttaattttatgattgaaacaatggtcttgcttgacactaattaagaaattaaaagagataaatttatattaaaaattatgtgagagcaatgttataataatcgattcagttcaattggtctaaat

SEQ ID NO: 99305 - DNA, 323 bp, Glycine max
  unsure (1)..(323): unsure at all n locations
tttgaagattctctatctntggcagtttatcctcatgactancctattccagtttaaagtgagtaggagcttcatttcattgcacaacctanacagtttgttatttaagaaactgtgtagatgctagatactcacatgacaaatatgtttttcttttaagggcttcaatcttatgttaatctgtttgaatgtatttgagcacctacatttgatatattgtgtatgttcttgaatgaatttgagtacctcagtttgataatttaattactagaatttaattatggtgttccttaatttaaattgtcttaattgccccccacaat

SEQ ID NO: 99306 - DNA, 460 bp, Glycine max
  unsure (1)..(460): unsure at all n locations
tgtcatcgtgagacatcagaggctagtattntaataaatgtgtgtatgttaaattcaccacatggatagagaanaatctaaaatcatacatcttaggcaaataaggcatgctagcccccaacattattgcattttgattccatctttggacattgtgattttgaaaattataaaacccaaagtttattatggcatttcatcaaacatacaactcccaactgatctggcaaaagaaatagtgagtagaaaatggaacttgcagacaaaaaacaaataaaagaaagatgattttctctttatcattcgcagaaaagaaaaattgaggaaacacactgcaaacaaatgtttagatttccttatgtgacattatactaactagtgaaaatttagcagttaatttaaagttaatagagatgcagaatgtaaataattaaaaaaggaattatgccgctttgatggt

SEQ ID NO: 99307 - DNA, 455 bp, Glycine max
gctaactacaacgattcttctaatatggcaaggaaacttcctctgaatcttcttcctttctggaccttttctcttgctttggcgagacctatccttggtttggttgagatcaaatagggaagaaaggagaaaattttttcacactttttgtgtgggtcccacacctctatttttctactctaattcatttttttttctattctcttccattattttttcttctctccaaccgaacaaccccttaactcattgtggcaagattccactaatgaacaaggtcttcatgttaagatttactatgccaaaatgaagcttcgttgaagcgattcttcttatttcttcacttgattttcgtcccttttcgttgtggcaaattggccactcggtgtggtgtgtttaggtatgcagctcttctttagcttttcctcaataaaaccttgaacaactaaatcaca

SEQ ID NO: 99308 - DNA, 461 bp, Glycine max
  unsure (1)..(461): unsure at all n locations
tgcattnctttaaccatctaaactcaccagttgacaccttttctcgagttattgtgcgcatattgcaacgaagattttcaattatgacgcaactgttacttttgagctatatgcatccaattattgacttcagaaaacatacaagatgacttggttcatcgtcaacgctataaaatgaatgtttgttttacccgcaataaaggcaaataatattctcaattgaccactctcaatacatgtcacaggttataagattaagatggcttctgagaaatgacaacaaagaccatgcaatttggatgaacaatatattggataattacgaaccaatagtttaatatgaaaatgacaacaaatataaacctcttgactctaattaaattgtaacaatagcatctccaacatggacaatatgcttctatacaaagttaaataataggaccacgttgtctaataggact

SEQ ID NO: 99309 - DNA, 350 bp, Glycine max
gatccttaagtcacctgcggcatgcagcttatcacggaaatgaaattttatttctcataaacacctttctagtaaccatgcatatgcaccatgacaattattttgtttcgccgttgtgtgtctatctttcaaaaatgggtttatgatcccaacatggctggctcatggatgcctatcacattcaactaataatgtatggtgaacgctctacccttccactttttttgtttttgttttgtagaggagtactcatggatgagcaaacctgaaaacaaaagtgatgcaattttgcagatcaaaaagtttgctgaccgcatatgcatgatatgccctgtctcatgcaaaatgtt

SEQ ID NO: 99310 - DNA, 438 bp, Glycine max
  unsure (1)..(438): unsure at all n locations
tcaacctttggccatcatttctgtccaaaatcgctttatgatggcatnttcggggtcgtgaagtgcgtgtctactagtgggacttctaaaattcaggtttgggtggacttctttctcctttgattctcgtgggtatggggtttggggagatatgatgggcagtcttgctaagtttctgctgtgtgatgattatttgcgaagacatttgctgaaagcttgttgaaattgccatgtttggatgagttacacatacccattctgttttacggtttttgtgatgatgtttgtgatgtttatatgctgaaattacttatggaaaactgttagagatgaaaggtagagttaacctacggttttaaagtgataatgtgatcgtatgagtggaaaaagactgaggctttgatagtttgtcgacaagtctgaatttctgggtcaatg

SEQ ID NO: 99311 - DNA, 353 bp, Glycine max
agctttgcctttagcgctatgcactttatctttaacctcatagtctctcacagctatagatatgtgagccaatccaatcctggtgttcggactctcacccactcatgatagccgtcgatgatcccattactgcttcccctaagctatctgtactttctttacgctgcatgccacgccttgcgaactccttggagtactctcgcgatgaggtcactaaaaccccgtgcgaagaaaggcgttatgcttctgcctaatggcgctcctcccatggggtagccaaatagtttatggcgagaacgggattacattaatacaaccccttgttcccatcaagggaaccactttcggacccc

SEQ ID NO: 99312 - DNA, 460 bp, Glycine max
  unsure (1)..(460): unsure at all n locations
tcaagtggctcattgactccagattgctacaaagaatgatagatatttgtatggtgatccacagaagaacatagaccacagactcttgcagcaggtgtagatntctgattcatggcaagctgggttactaggttgaccaaggcattaagttttccctcaagctttttatttttagtagatgaagatgaatctgtggccacctcatggactcctctaaggataatagcatcatttcttgcactgaattgttgggagttggaagccatcttctcaatcaaattcctagcttcagcaggggtcatatcaccaagagctccaccattggcagcatcaatcatattcctatccatgttgttaagtccctcatagaaatattgaagaaggagttgctcacaaatctgggggttaggatagctcgcacacaacttcttgaatcttttctagtactcatacaagcttt

SEQ ID NO: 99313 - DNA, 276 bp, Glycine max
tttttaaccgacctgacgagacaacctgagttgtaaccacctttgggagaaccttatacggggaaaagtttagacgactattgagacaaagcatcacgcttagatattggacattgttaacaacgtgtcacccgtctgaatgcataacggggcggtttccctgttctggctctgaacctgagagaacccacatatcatggtacctatttgctgccggaatttcccgttccggtgcacataaatgtcatgggatgcttcgcattatgacacgttatg

SEQ ID NO: 99314 - DNA, 334 bp, Glycine max
agcttatgcgtgtcgacgatgttctagacatataaatgccccactggctgagacatctgatagatattgctgcgtgatgacctgcaaagactatagctcagagctgagtgcacttctttcgcttgcgaggagcctgaggtgattgcgacatcttataggtgttagacacgtctcttccgcttggatttctcccctcattggtcatgtcctactatgtgttggacatgaggtgtcaggactatggaaaactaaatcctctgttggaacctggatggtggtcctgttgcaaatcttgtcttattccgtatagaagcgttgtgtaaggtatgggcaa

SEQ ID NO: 99315 - DNA, 399 bp, Glycine max
ggacctataaaactcagcttcacgcttatttatagaggcgaggatggcttcagttactatctagctaggatgacaccataccacttaatgtcgtttgtgcacctgttctacatcacatagactcgtaatataaccatcaggaatattggtctatggacatccccatattatgaagaccctcaccaataccattttcggtgttctagtctgaacatctctattgatatgtgccggggacgacttagaaagtaagctatgtgagtatttgtgatatgactattaatccatatgtatcaattcagtgggctcagacaataagacgtaatataatttgtatgagctggttatccgaccaacaatgcaatgagattatatgtggcataatctctggtgatactt

SEQ ID NO: 99316 - DNA, 318 bp, Glycine max
  unsure (1)..(318): unsure at all n locations
agcttctcaccttatttcctataaataggtttgataggtgaaggcgaaaaatgtccagcgcctcctggttaattgagaatcacttgaaattagtgaaaaaaattgtttccgtgaagaaatccaagccgaggcacttccataacgtttccgtaacgtttctgtgggtgatttcgcgaagattttcaaccggtcttcattcgntcttcatcgttcttcggtcttcaaccggtaagttcccaaaatcgaacttttcaattcattctatgtacccctaatggtcctcatttgtttcgcgaacatttattncgtttcatttac

SEQ ID NO: 99317 - DNA, 425 bp, Glycine max
  unsure (1)..(425): unsure at all n locations
ngctctanatttacatcgatgtttatgggaggaggttgtttgccatctttgctataagagtagtgtcccactggtaaaactaactttccaagtgtttgccttctcaagaaatggccccaaggaagcttgcctcaaagaggttcacgaaggacaaggcagccgaaggaactacttccgctccggagtatgacagtcaccgctttatgagcgctgtacaccatcagcgcttcgaggccatcaagggatggtcgtttctccgggagcgacgcgtccagctcatggacgacgaatatactgatttccatgaggaaatatggcgccggcggtgggcatcactggttactcccatggccaagtttgatccataaatagtccttgagttttatgccaatgcttggccaacagaggagggcgtgcgtgacatg

SEQ ID NO: 99318 - DNA, 341 bp, Glycine max
  unsure (1)..(341): unsure at all n locations
agctntgcacgtatcagtcaagtgtatggatcatatcttaccctaagagctcatcgataatggttccagttcaaacgtgatgcctaagagcacctcggagaaattaccattctatgcttcccacttaaagccaagatcaatggtggttcgtgtctttaacggcacctgccgataggttaggggagagatcgatctcccagtacaaataagccctcacacctgtcaagacaccttcccaataatggatattaaccctccctacagctgtctgttggggcgccctgggatccactcaatgggagttgttccctcacactccaccaacagttgaaactctgtat

SEQ ID NO: 99319 - DNA, 444 bp, Glycine max
  unsure (1)..(444): unsure at all n locations
gatgaggaagaaccacttagtgttgtgatcttctccttggcgaccaaggtagaggcatgaatggtcggaaatgaaaggttgagttcactagaagttcattatttttttggagattaacaaaaatcagagcatttaataattgtcaatcttttttaaaaaagcaatcatcttaatatatttttttcttgtagattaaaacctcctgcaaccaatcattttagtggcacagaggtgagggagttttggacttcaccctaaaattcacctgaatgaataatgtctcaaactctaataaaataggatcggatctggatcctcgtctcatgcaggaatcctctccatcaatctcatgggctcttagagaatctcacggctgaaactctctcacatctaanagcaaactaattgttgtcttgtaattcgcgttgtattctaagtttgata

SEQ ID NO: 99320 - DNA, 338 bp, Glycine max
agcttgttagagatttaggttcttcaaagatcgtgtatgccatcaaacatggggtaactttttcttcatcttcattggacttgtagtacttcttcttgtcctgagacttctccagttttggacattcaaatatgaagtgaccatgtttcttatatccatagcaaattatggagctattctaattgtctatattccttgaacaccttttctgggaattcttctatctggatccacctttgcttttccacatcttgcggatctttcatgagatgaacgcgagctcatattcatcaaacaattcctcatatttttatcaagggattttttatctttaaatg

SEQ ID NO: 99321 - DNA, 446 bp, Glycine max
tgctggactcgtttggcagtgttttttcttggcaatttgatgctcagaaacagcaatatccaccactccttcagttggtctgcccaggtatttgttgattacagcaggggagaatctaacacattttcctctgacaaacactttctgatactcatcactctttctgtttgttatgtcagagggaatgttgacaatgaattccctgactagactttcatagcaatctcccaacttggtgacagttttcagcagtccagcagccttgatgaggtccatgatctccttgcaatccaaggcatctcttcccagttctctttctaaggcaagtctgcgttgatatacaaatttccacctttcatcattgccaatggagtggaatgaaatgttgtccaatggtgcatcagggacatttccaggcaccttatttcctgatttcttggccctct

SEQ ID NO: 99322 - DNA, 466 bp, Glycine max
  unsure (1)..(466): unsure at all n locations
aagcnntagatncatcaagcaacantcanaagagagtctcacgactgttaaatttttcatgaanaccnctatgcacttctctaccatgtcagccaagatggctagcctgtacctttggaaagaggctagtgcatttcataacccaaatggcatccttctgtaggaaaagacacctaaaggacatgttaaagtcatcttctcctggtccttgggatccactgcgatctgattataccctgaatatctgtccaagatataatataaggactgtcctgctagccgctccaacatttgatcgatgaacaacaaaggaaaatgatctttccttataacctcatttggcgtttgataatcaatgctcatcctccatcttcgtgacagttcgagtaagaatagggtatatgatgccaggccagccttatagaactcgaagacttgctttcttacttctgtcttcatggatgga

SEQ ID NO: 99323 - DNA, 319 bp, Glycine max
ataactgttcatatttcggccgtcagcatgatgaatgttcaagaatctgcaccttcccttttagagtcaagaccctatggaaacaactaaagctttcaatttgttgttctactgcgacacttaaatagaaggcacccgatgagtcttgaactgaaaaaagccgacggtgagtcacttgggaaatcttgcgtttttatgctttgaacatgtgtcttatgcatagaccaagaacttgcatcataaaagagagtccatgcctttagatggctatcatgcgcacaatacatacaaacttttgcacccagcatagcataaaact

SEQ ID NO: 99324 - DNA, 327 bp, Glycine max
agcttgcatctagtctaatttctttcggtttaagccacctacgcgtgatacatctctgtttgtgcatgctacaccaacatttatcacctacattttgtgttatgtcgatgatatcattataacaagcacggtcacctttgcagttccaactgtgaatattaaacttcactctttgtattctctcaaagacctaagcaccttacatattcttctaggcgttgaagcccactccaccactagtggggctctcctcctatctcaaactcaaggtatgactgagccttatccaagtccatatgcatatgccaacccataaagactcctctg

SEQ ID NO: 99325 - DNA, 461 bp, Glycine max
tctcaaggcaagtttctcaagacagcttctcaaggttgtcttcctatctataaatagaagtatgagtaacacttgttgtaactttgatgaatgagagtcttgtgagacacatctcaaagttcaacttctctccctttttcttccttcaatttcgagctcccccctctctatttctctccctctttcttttcctccattgaagcatcatctccaagcttcttatccaaggctcatcttggtggtgaagcttcttcttccatggcttattccctagtggatggcgcctcctctcacctcttctcctttatcttccgctgcatctccatggtggaaaatcatcattaaaggacctcattgaagctcaaagatccagccttcatagaagccccataagcaagcttccatcaagtggtaatcagagcacaagagcttcatgaaggtgctccttaaacctttattat

SEQ ID NO: 99326 - DNA, 455 bp, Glycine max
atgagtccaaatcctgactcaccataaaccttgatcattttgagaatgtcaatccttacccttggaagcataacagattagatggaatatttgcaatcaaagagaaagcaaatagaaaagaaaggaaattcccaatcatagagtgggagaaagcaattagaatagaatgaaaatttccaatcgaaaaatgggagaaagtaataaaaagaagatgatgaagatgaaggatagaaagctcctgatcaaggatcgaaagaaaaaaaaaagaaatgtgcacaaaggtctttagaccagacaatatctgaacaatacagaattgtcaccaaatgaacaaaagatagaaaaggaaaccataacctaaaagtggtcttctccctttgattaccaaccaaaatcctgtgcgtcggtgacttgttcgcctcgcgcataaccataaatgataagccaaatcacac

SEQ ID NO: 99327 - DNA, 299 bp, Glycine max
  unsure (1)..(299): unsure at all n locations
agctngaatcggaccngagggggataagttttgacctttngaannncnncgacgctatcgacgattaatgtctagcatctcaacatataatgcgctcgaatcgaacatccgagtgaaaagatatgaccatttgagtttctttagagcttccgnggttcaattccgagcatctttgcatattatgtgccctaatctgacctttcggtgaaaagttatgaccatttgaattctcgagagcttgtgatgtttagtttcgagcgnatcaatattttgtctccctgattcctactcattgtgat

SEQ ID NO: 99328 - DNA, 422 bp, Glycine max
  unsure (1)..(422): unsure at all n locations
tccatcaagtggttatcagagcacaagagctncaattttgtgctctctttacctccattaatgttttttctttaccttctcttccatagctgattcttcatttttctccatgtatctcctcacatgtcttgttctaaatgttgctaacatgatactttataggttccaccgattaaacttgctatagaagttagatctgaatttctatggcccaaatttcttgttcttgctcttgaaccatgaattgtgttgagtctacgttcctttgagatttgtcttgttattttttgtggctgaaacctaaaccataaaattcttactaaaattctaatgtagaagaaaacctcataaatctagagtgacttgctcacctatctgagttntgtcatacaagtcatgtctagtcatgacacttgtcacat

SEQ ID NO: 99329 - DNA, 467 bp, Glycine max
ctccgcttaaggctaagtcttcatgttgctcatgttgttttcctatctcaacagtccatcatcaatcactttcaagatcccttggatttataaaggcgcataataatattatggacccttccttattataacatctcctcatttttgtctcttcctctcccaacgcccttaatggaagctctaatgacgactccaatgacacctccaacatgagcaatccccaactgccaccgcacacttatcctttctcctccgtccaaaaacaaagttaacacaaaagcatagtgacattgctaaactcaccaaaccaacaaatccacaatgcatgataacaaatagaatatattaaatttcaaaacgcatgaacacatgaaggttgggcattaatggagtacaaagttgttcacaataccataaaccatagttatctgatgaaccagttgatacgcattacacgccaagctcat

SEQ ID NO: 99330 - DNA, 325 bp, Glycine max
  unsure (1)..(325): unsure at all n locations
agcatataatatcaatacaagattacatgttttacgcntaggaaactaagctttggttctgaatgataaaaggcatgaatattacgacatgtttgagaggctgttattacaatttaaatctggctgccccatgaggaataccttgcacctaggtagcatggaaaatacctctcaacgggttgtatatatgtaaatatatatagcatggaaatgcctctgcaaatgttgaatataatgcctcgcagaaagatgaatataatgccttgcacaatatgaatatatatagcttgaaaatgccttgctaatatgaatatatatagcatga

SEQ ID NO: 99331 - DNA, 425 bp, Glycine max
  unsure (1)..(425): unsure at all n locations
ttgaagacatgaacaaggaactcacatgctttcattcatattctttatgtcaaaagatatttgtatatctatgtatagttctaaaaagctcttaaaacaccttgagcgctttgaggaaaaaaaactaagtgttgaaattgtatatccatcggttagacgattgagacttaattattgtgcaatcaaacaacaaatctatttgatttgtatagatacaacaaggcttggtaaaataaagaatattgngttgcatcaagcttggggtaaagcttgaagtgacagatgactaatacttgtaattagttaaagttaatgaaacttggtagttttgtcaataattgaacacaatttcagtggtagagatgaactagtataaatctttgttacttatatgtttccttgtgtttttctgcttaaagggacat

SEQ ID NO: 99332 - DNA, 289 bp, Glycine max
  unsure (1)..(289): unsure at all n locations
agcttatgcacngaagatgttattatgagttattcaagcacgaagaaacagcattcgctaaccaaccgtgcgttaggtaccacgaacaattattactgattgtagaagggtgcaatctttttcttagagatgggtttaataacacaacatgggtagttcatgatgactgactcatacctctaaaattgaaattgtgaatgtgaacactctcctctcttttgatataggctgtgtaagaaaaccacggagaatcgacttgaaacaaatggtatgctttttcaaaacaaaa

SEQ ID NO: 99333 - DNA, 410 bp, Glycine max
  unsure (1)..(410): unsure at all n locations
tcttatntngataggatgcatcggactatgtctctacctcctgctctccacgaatgaccactgcatgagtgatggcgcttaactgatgtgagactgacgccatccttgtaattaaacatcagggtccagttcgagtcttatgatcgacgtcttcgccactgtgaacctctagcgcactcttctacatatgactcattccattatactgatattgcataagcaggtgctcttacatctgatggtgtcgtcatctgacccataattacttaaagcggtctccgtcttcatacgagctctgttcaatgcctagccttgatcgatggcatatactatccgatcgctatggccctccacacactggaaaagttttctacatgactctattcacgcatgccaacacggatggacct

SEQ ID NO: 99334 - DNA, 350 bp, Glycine max
  unsure (1)..(350): unsure at all n locations
gcttacccctatggcttgcctccggacttctctctccgtgctgccctggaagatgtgagccaagcccctaccttcgaggggcaacttcctccttatgccgattatcccgtgcaagacgatgaggaaggagatacccatctcggccccctgctccacctcaaagatccatccctccatgaactaccccaaccaaacatagtctcgcacgttccatcttcacccgcacccataatcgaatccattcccttcgcagaggatcagggaaagaatgatgcgcttgaggataggctgagagtggtagagggcctcngtattacccattctcggatctagcggaccttattgttttt

SEQ ID NO: 99335 - DNA, 465 bp, Glycine max
  unsure (1)..(465): unsure at all n locations
ctcagctattattgtagggtttcttctgtaatggctatctaaactctcttgttgtggatttctactgaacatctgatgtaattattttcatatctaattgattgtgtttcttgtgttcaatggttctttcattgcttaaactctatatgcttttggtcttatcaaccatttgtgtgcctagttaggtgattttaacattggataatgtattgttgccttagaacttgaatgaagcataattgaaacttagttttacaagagggatctgcagattaagttttggttntaagtatgttgttgcaataatgctgtttggtctaagtctagtccaacaagagggatctgaggacaaagcttaggctaacttagtctaaactttcgtaagctatttaagctgagtatagtccaacaagagggatctgaggatgaagctttagttaagttagtctaaacctaagagcgctg

SEQ ID NO: 99336 - DNA, 314 bp, Glycine max
  unsure (1)..(314): unsure at all n locations
agcttctttgatggtttcgccattcgaatgtattattttaattntcaatcggttcccatgagagagaatgataaaagatgaagtctgggctttgtggtgagtgatttgggcaagaaatgagtgagatatggcagaatggagaattgggaacgaggcgtttccaaaaagtgagaaagtgcacatctctgactttgaattttgaatatataagagcatagacgcgctgtaatcgattaccgaatttggtaatcaattacaccttacttaactgcctgtaatcgattacactaatgtggtaatcgattactagagag

SEQ ID NO: 99337 - DNA, 454 bp, Glycine max
actacgctcttgctgcaaattcctttttgtaggagattgtttttgttttgtgctaaaggaggtcttcgtcattggaagtgcggtagacagactttgtggttgatttatggatggcctttgtggataactgggtggtggggtaaggaggaggtttgttattggctgactaatgacattgttgggttggtgggaaacttggccgtatatgaattggagtcacagcatgggtttctccctctttctcaccctcttcatttgccccaattttctcagttcgtctaataggatgatcaaatttgcctcttttcggatccacttcgatctttttgctggcgaagaccaaatctgtaaaacttgaaggtgtgtaacccaccatttttttataagagaacaccggtcacgtgtctactatcatttatataatctctttctctgtttttgggggtgctacttg

SEQ ID NO: 99338 - DNA, 276 bp, Glycine max
  unsure (1)..(276): unsure at all n locations
tggagtttctataagagtcctattagcccctgataatgtagataggtcaagtaagcacaaaatccaaaaataagcaacatttataactaagctcgataatttgtctaaaaccacaactgtgtttagtgtgagaaaatataagagttcaaagagagggccattataaactaaaataatactaaacttactatgcttaatgagagatgtactgtaattgcttacatgatatatacaaaataaaccatccctttttacatntatatacccatcatacct

SEQ ID NO: 99339 - DNA, 462 bp, Glycine max
aaccagctttgataaagaatgacgctgcagttatgcgattttattcattattactgatactaccctccacttaccttcattttgagtttgtcatggtattgaccatcacccaaaatgtcttttactgatccttctattcgcgggacgatcagatgcagatgtgaatgcatgcatgcctatgactaaatgttaagtacgacaattaaacaaatgttatttgtggtcaactttacttaaacgcttttacgacacccaatggatatgagccaatgaatcgagattcataaacaagagtgtataccctataaacaataaaagcacaacacacggaggtgaaatgcagatcattcatcctatgtgatggaagcttgcttgtggggcttctatggaggctggacctttgagcttcaatggggtcctttaatggtgattttccaccatggagatgcacgggaagacaaa

SEQ ID NO: 99340 - DNA, 433 bp, Glycine max
  unsure (1)..(433): unsure at all n locations
aaccccacctatgaacatggcctgctattgtgaattggtctcttcaaactgataatggacaagaaagttctcagaaattttgctctaccaacaacatctaagttgtccaagactgaagaattgaatttggcaaatgacaaatgacgagtcctgcgattgatctttgtttctttcccaaggacttctgatctaatataaaaatctccaccgactgatgtggctagatcatgcatgaggtcatgcatcacaaaacattngcgatgaggccaactacttgaactcgaacggtggaaaaacgatctccaaaccaaatcattataatacttctgaccaacctcttctaaagtcctaccttcccttggtctcttcataagatcttcagccatccacaacacgattaattcattttttcacattcgaatcttgtggtaca

SEQ ID NO: 99341 - DNA, 316 bp, Glycine max
  unsure (1)..(316): unsure at all n locations
agctnnatgatgaatcatgattgacncatattagttttgatgatcacaaaggtgatgaaataaagctccaaggtcacgaacacttattgagtacaaagatgatgatctccagagtcatcgatgagttcacgattgaattcctaacacttccaagttcatagagggaagttgatttccagaatcaagaatcaagtttcaagattcacgttctcagaatcccgatcaagattcatgacctcataatctggattagacttattaggattagtttacaaattttttcncttctgntnnccataattttcttcaacctttt

SEQ ID NO: 99342 - DNA, 369 bp, Glycine max
  unsure (1)..(369): unsure at all n locations
agctcgagatgaggaagtgtngaagggtgaaacttcctgctttatttattatccagagcnggacctgcagatatgtcgcggtggtcaggagacctcggggacgtcaggtggggtgctattgcccaaaaccaagcttgaccaatcccgacccaacccgggcataatctgtcagtgataacctgtgatgtacctaatcaggcgagctcctggcagttcaccgacttaaggaacacaagaccacaaaacacggacgcttgtggtggctggccacctgtgaattttgtgtaatatgtgagatatcgcctctggtaatcgattaccaacggtgggtaatcgattgcaaggcttaaaaatgaagacaggacgcta

SEQ ID NO: 99343 - DNA, 368 bp, Glycine max
cttgacttctatagataaccacccatcccgaggcgagccttcgataaggctctgtcgagcgggtcgactcattgtcatccctaccttcatgtacacacgatcttgtgacgaaggactacagtgcggaaccacacataagtacgactaatctgagtacacaaattagcaacggccctgtacggcacacatccttatagctgctgaattacacgcaccatacaaaatagctctagggacggaacctatgaccgctgatgacggaggatcgacatgacaactgatatgcggcagacgcatttcatacgtgttctgcgttcgtatgccatgaatacgggcattatgggcgattccttctaaacattttcacg

SEQ ID NO: 99344 - DNA, 359 bp, Glycine max
  unsure (1)..(359): unsure at all n locations
agcttatgggaatatatctaatgtttatattataagttatctattaatccatcactaatctcttatagttctgtacaatcttgaagaacaaaatgatagttagtcgaaacacanaagcattgtattgaggagatatgttgttaactaattttctttataatgctaaaaattcatttcttgtaggtaagaaaaaaatttaatctgaccaagagggaaacataatgaaaaaaatattaatgtgattagagcatattatgaagtaataatgttcatagtttaaacaagatattgaaacaagataatggtcagggaaataatttaagaaatcaaccgtcaataacttggtacttaatattaat

SEQ ID NO: 99345 - DNA, 436 bp, Glycine max
tctggtgggacatcttgactggctgtccaatctgacattcaccacaaattctgccttcttctattttcagattgggaatgcctctaacagcacctttgtcaatgattttcttcatgcctcttaagtgcagatgtccaaacctttgatgccatattctgacttcatcttctttggaggatagacatgtggaggagtaactggtttcttgaggtgtccataggtagcagttgtcctttgatctgctgcccttcattagaacttcacacttctcatttgtcactaagcattctgactctgtgaagtttacattgaatccttcatcacacagctgactgatgctgatcaagtttacagtcagtcccttcaccagcagtactttgttcagactaagaagtccatcatggactatcttttccattccaatgatccttccttt

SEQ ID NO: 99346 - DNA, 322 bp, Glycine max
  unsure (1)..(322): unsure at all n locations
agctagaaggacgtagagaacctttatgtttctatggccaccagcatgtgaacaaacctctgctatctaggttctaaacaccatttcaagccccaattgctacttaatctgatctcgcaccacacttcctctggctggtgagtgtgacaatcttggtgagatactcaacttcctgactcagtgcgctgcattgccagaaactcatacaattttctcaaaggctgaagatgcaccttcctttatgtttatggactagatgattttttacagaatgtcccatcttccttcacgtgccgntctgcatatttcatatcccatcctc

SEQ ID NO: 99347 - DNA, 415 bp, Glycine max
aagctctgataccttttgttttctagtggcctcacatatcttgagaaggggggggttgaattaagatattccaaactacttacccaattagaaatctatttcactgtttattcaagtatgaattcccttaatgacaatcttctgaaatcttgattcagataaaacaatctgaatatgaatataaagcactagtaaataaaggagattaagggaagagaaagcgcacactcagatttatactggttcagccacacccttgtgcctacgtccaatccccaagccacccgcttgagagttccactcatcttgttaaatgccttttacacaggtctagaacacgccaaagacacatccttacttttgtgtttagaattcctttacaacaagagactcacggactcttaatcccttagag

SEQ ID NO: 99348 - DNA, 316 bp, Glycine max
  unsure (1)..(316): unsure at all n locations
aagcttctgaaagacacgtctttatatttatttttttaggtgcaatgggcctatgtatatagttggtcagactttgcacagtgacagacgagattttaagacagaacttattggtcaaatacttcttaaaccactattgaccaaacacttgtaaatcaattgagaattcgtccaggatcttctactcgtattatcatctctaagaaagagaaattcttctgtacattcaaagacattgttgtgatcaagagagtgtttggnttttgacttgttagaatctttactcaaggaaatgaatccatcgttttcaaacctc

SEQ ID NO: 99349 - DNA, 407 bp, Glycine max
agctatttatgtttattttagtccaacaagagggatctgaggatgaagcttactttaagttagtctaaacctacgagggttgtctaaattgagcccaatccaacaagagggatctgatgatgaaacttggattgattcagtacaactagggatcgaggtttattaatttatgctacaacataaaacacataagcatgatcgattagagaaacaatcttatatgcattacctgggttattaaaaagacccaacacttctatctactgctgcaatattatttacttgcattgatactgattgtatcctacacctagtttaattcagctttaaaccatcaattatcaatgtatctttcacaataccctcattcataatttacccggcttagactagttccctgagttgat

SEQ ID NO: 99350 - DNA, 379 bp, Glycine max
tactaatcgagctttcatcaagaagtactgcgtcctcaggcaggcgcaaggcgaaacaccatcatcagctgtggatggccggtagcgggcaacaaacgcaccggcatcacctctagagttcacctctgctcatacacaaaaaggcttgagtattgcctacaccacatggccgaccaataggcgaccaacttcatagccggaggtaagctaatgactatgttattgaccgactagacatattgcgtccagctcacgacgtttaagaagcgcttctatgaagcagcctagtaccttgtgaatgtatgcttgttatttgatcactctttatagtaagacgcacctagttgccatgattctgagaattaatataaacaagcgc

SEQ ID NO: 99351 - DNA, 343 bp, Glycine max
agctagagaaacacttcttgacttcaacttttatttgaccatgactagaaatacgtcgtggaagataagccccaacattgtgtatggccttgccatgtgacttattaatggtaattgcaaaacttaatttggcaggaactgtgtcctaagaaggtcttgcactatctattgtcttattgtcaagacaacgcaagagaactattctttcagcctggtaggatttcaacatcaacatgttcataaaattgaccatgactagaaatacgtcgtggaagataagtctcattacacggctagattttggtctatgtttacaacaacataacggagccacttatttttt

SEQ ID NO: 99352 - DNA, 454 bp, Glycine max
  unsure (1)..(454): unsure at all n locations
ngtgctgtaactcaagaacttgtaccatgttgttctatttgtactctcacctgaagggaatcaaatgcagactaaatggactggcccttcataagagtttgcatgccaacctttttcgcaacctgactccaattaccatattacgccttgcactgtttctgcattttctatccctaggacagtagaaataccatgtctttctctcctgtggtggccaactctacacacataataatcataaatctattatataactaaagtcattaaagacctataaaaaatagcacaacaatatatatagagaaagaagttaattaagtttagtgtaatatgaactaagagaaaggtatgtgtcttaattggaagatcccaagtgtcanatttgtagatatcaacctgcttggtccatgccagatgacccggtttacttcatgcttaaaaattttacaacctt

SEQ ID NO: 99353 - DNA, 314 bp, Glycine max
  unsure (1)..(314): unsure at all n locations
agctngaccaggaattatttgtatgggttgtatgttngaattctggtgtcctggtgtggagatgatggtacagcgggtgaaccanaagcggaagtttcttttggtgaggaagccatggaaaaacagagcgtttggaatgatttcgtaaatctcagataactattgggaaatgctggtgaaaacaccaatgccacgaaaatataaatttgaatgaggaatgtacagggccgtgtgaagcaacggtcgaatttgccttggttcagtantgaacgtgctattaatgttaantgattcntttgggcacgtcaaatatc

SEQ ID NO: 99354 - DNA, 444 bp, Glycine max
  unsure (1)..(444): unsure at all n locations
ntannaattgaattanaatattcaataactgctggttatctattaccatatatgtgtaatcgattacacagtgcaaattttgaattcaaattttaatagctgttgtaaatcatttttggccactggtaatcgattacatcctctggtaatcgattaccatagagtaaatctcttgaaaaagactttttatcttaaatttcttggccaaaccttttgctacttcagttaggaattcccttcctatttaatatacccttcctaagactctagagactgtcttgatcatccatcttgaatatctctaatttctttgtcttgaataaagctttgagaagcatgtgatcctttggcatcatcaaaacattcaacttgatcctttgtctacacaaagccttacaaaaggcgggcatgattccacgcggcggacacaaagaagattcatgc

SEQ ID NO: 99355 - DNA, 340 bp, Glycine max
  unsure (1)..(340): unsure at all n locations
agctacccacatccgcacttggaaggatcttattttcttctttcttaagcagnatcaatacaactctgatatggctcccgatcggactcatctgcagaacatggttaaaagggaaatcaagtcctttaaagagtacgctcagcgttggaggacctggaagcgcatgtaacccctcccatggtcgaaaaggaaatgcttaccatgatggtagataccttgcatgtgtattactatgaaaaattagtgggctacatgccctccagcttcgcagacttggtatttaccggggaaaggaacgaggcgggcttgaaagagggaagttcgattacgtctcctacac

SEQ ID NO: 99356 - DNA, 480 bp, Glycine max
  unsure (1)..(480): unsure at all n locations
ggaccttaaaactcagctggacaaagctngattgaacagtgcatntatattatcctgtatttgattnttgatnttggaattcagtgtttgtgattggtttgaattgatcaattgtatgatgtgagtgaatcgaaatgcgtaaatcatatgctttgaatgagcatgaagtcattagaagagaaaaaacatggaattaggatcatgactgaaaatgttagttggtttgtcaggttgattgcgaaggaacacgttagccacaactcggtgagagtgtgatctttaattgtgagagaacaactagcagtaagtaatggtttttgcatgaatctctgaatatggaatgaatgaatgagtttgaagatgatgaaggccatgtttgaattgaaagttgccatttagccagaaagcttaccttgtgtatgaatgatttatcccttgcacctaatttgatttgaaagtatgattgtttgattgaacctt

SEQ ID NO: 99357 - DNA, 333 bp, Glycine max
  unsure (1)..(333): unsure at all n locations
agctttantcgaatagtataatccacaaatgtctatgatttgtgcgnagaacaagcataacaagactctctgtgattggtttaaagatacaatctttgcatatgagaatgcttcacaaacattaagaaagctagcagatgggctctaaaaaaatgtataactcggcaaggatacgacataagcaagtattcattctacacaataactcaagatgactaaagttcaatgcataacaacggggtcaccctaagggcagaatctcaacactttgcttgtgtgaatgacgccaatcccaatgtagcatccatccctactttgggtgcattgatgaaa

SEQ ID NO: 99358 - DNA, 464 bp, Glycine max
  unsure (1)..(464): unsure at all n locations
aagctcgcgtanncttcacagaaggngcatgcatgaagacccttacttgtttaccgcnnaagaccccacacgcaggaaagtcactagtggtacaaaaaagcatcgcacgcatgtcaaatgtccccttgcgaaacgcatcaaacactaaaactccctcgtcccataactttctcacgtcttcaatcaacgaacttatatcaacatcatcgccataccttggctgtcttgggcccgatatcatcacagacaacatcacgtaattatggcttcatgcacaacccagaaggcaaattgtaaattactagcagaactggccatgaactgtgttgagtgcttaaagtgccatatggattcattccatcattggctagcctaagtctaaagattcttggctctctcccgaaatccggatacaaaccatcaatcttcttccactgcgagccatcagccggatgacacacata

SEQ ID NO: 99359 - DNA, 295 bp, Glycine max
agctcggcaccgacacagtcaacatcacacgaactgactggcttgtttctctgtccttaaagcatacaccaagggtcggagttcgaatcaaacatcttaatattcttttaacagttattaaacgaacatctcgttggctaaaaaccttgcacgtagagcatacacagaacatgatgtcaggcttgaacaccactagatgtatgagacacgctcataatgctcgatattggggtctgggcatcctcttgacatactcattcatcctaagataagcttgcgtaacctacccttcggc

SEQ ID NO: 99360 - DNA, 369 bp, Glycine max
  unsure (1)..(369): unsure at all n locations
agcttctatggtttctagaatagtcganatcatattgtggaatggannatttcgaaacatggatagctcctaaggttccatacaaaatctaatcgattacaatatgagataatcaattatttcaaggtacaatatcacaatcaatatgagaaatagtgtagaaaactcttaccaattcagggtagatgtgccctctatctccacaagcttcttcaacccatgatactcgaagagttctgaaaaaacaaaacctttagtctttagccattccaagtttagaaacatgaagtgaatcaactccttctaacataattgtacacgtaggacacttcataattgtgtccttttgaaaaaaccatgatagtgacc

SEQ ID NO: 99361 - DNA, 460 bp, Glycine max
  unsure (1)..(460): unsure at all n locations
ntntcttaagctnttgctacaaccgttttctcctcttttggatcatcaaanagccaaagaactcggaaatcaacacagttataacaatggagtagcaagatataagtatcagagtattaaatacaataagccaaactcataatcaagaaataatcaaaccagaattcaaataacataaaatgtcaacaaccacaaaatatccaagactgaaatttaaaaacacaagataaataagcaaagtacttagcataataatgtaaattctaagaaactaaaagccaaaatacacggcttataaaagataaataatcagaatctaaaatctaagaagacggaggaggtggtggaagatcgaaactctgacgaatgtatccgacatcctcttcaagctgtgtaagacgaatgtccataccggcaaagcgtgaatctaacgagtcaaagcggtcaccaacatacgaac

SEQ ID NO: 99362 - DNA, 402 bp, Glycine max
tgctacgcccgcgatacaacataagcacacactaagccttgttctcgtgcgctaagggcgcgatctacacgcactgatcgagggggtgtcgcgctaagcgcgcctacgaatgcccagagcccacttcaacagctataaatatagagtctatccaggggggaatacgcatcacaccacgaaagaacccactctcctaggagttacatttactctctctctttctttcaccccttctcattggaaagccctctatggtcatgagtggctaaacccttatttagggaccggcagacctacaagccaacgccatgtgtgatgtacttttcactatttatcaatgccataccatgcttttcttggctactttcatttctgtgttaacctgcatactcatcttatatt

SEQ ID NO: 99363 - DNA, 245 bp, Glycine max
gccctaaaagccttgaggggaaatgtaggcttaaccaaatacttttacttggccagcaagctacttcactaactattttacccctaatatgtgtatttactctaagtttaaatgaaccaatcatgtcctcttattttcaaaattaaacaaaattgatattattatcaattcttttctaaataaaactacaattattatatttttttctaattaaatctattaacatgttttactcttattttatc

SEQ ID NO: 99364 - DNA, 441 bp, Glycine max
  unsure (1)..(441): unsure at all n locations
ntagaaaatgtgtgtgtgggaaccacacatgtcattcttattgccatattttcccaccatgccgagtgttgcttcggngaggcaaatatgatttgcggtggacatgatattgcttttagccacatttttttaaatcctattagttaccattcggttaccattctgtggagcaaaacaaactaattattgttcgtgtctagtctattctattggtacttatcattctatgatttttcttttgtttttggttattaccataaggatactcttttccctctaaatatttaacataactacatacattcaaattcaggactcaaattcataaccttttgttaagctaaaaaaatctcataccaattgattccctgcgcttgataatatcattctatgattttcatttcctactttctttaaaaagtttaaatataaaataacatg

SEQ ID NO: 99365 - DNA, 433 bp, Glycine max
  unsure (1)..(433): unsure at all n locations
gacctataaaactcagctgagctcgtaactgacaagctctaaatttaatatcttcctnggcaccttcacccgatgaaacctgacagaacttatcttttctttctgacaaagctagtaagctgggggcaagtaaatctgctttccatcacaccttggatgcaactgtgatcgtattcccatatcagctatatcttgacgcatatgtcagaacatcttcgtcctgcctagaatgataaagagtgccccaattacactatcacacacattgttcttcacatgcataacgtcaacacaatgcctaatgtttatatcataccagcacggacaagcaaagaaagtggacctcttgtttcatatgcgagtcctacttttattcttcgtttgggtgtatcccaatacagcattcatgtgtagaaaccgctgatatacctgc

SEQ ID NO: 99366 - DNA, 368 bp, Glycine max
agcttctagcgccattgtttgtaagaagatttaataagaggctatgaagaataggaactacaggaacaaggatatgtctcacttgaagacaataaaatgatgattatatcgaggaaaaggaggaccattcatgtcctttcagctagaagcttagcctttccagatagttagtatatgacaattatatttggtagatttattttagcatttgaaaagaaaaatatattgcaaccagtaaccaccatgctttcctccattgaccgcaatgtcaactcgacatttgtatggtggattttaggcttgtactatctactaataataatgccgaacttctaaatcacatttgagtcaattcaatgcctcctgct

SEQ ID NO: 99367 - DNA, 421 bp, Glycine max
  unsure (1)..(421): unsure at all n locations
tagggatggaatacttacttgttggtgatgaacataagttcacaacggaatcaataaaagcgaaaaaggatgaccctagggctgcaaattcgtcaatcccgtgggtatggcttttgaaaggggggaaaagaagtttttgaatgtaaaaacgccccccctttcgtcatttatataatttggtgcaggggtggctcgcccaggctcgcctagctcgcccaggcgagctaacctgcactttnttttttttttttttttttttttttgaggggaacattaaccatgttcccttccttcttatggattagcattttgcctaacttgaacttacttaagttagaaataggcgtcgattacttatcttattattactcttgttctttttaaaacaaaccaatatgtaaaaaaagctactaaattcaaa

SEQ ID NO: 99368 - DNA, 327 bp, Glycine max
  unsure (1)..(327): unsure at all n locations
agcttgagctattccaagttcattaatcatatccttaagccagaatgcttccttcacaccttcagctagggccatgtattatgtttcagttgttgaaagagcaacaactgattgttgatttgctttccaactgattgatgtaccaaacaaagtaaacacatatcctgttaaggactttcttgggtctacatttcttgcaaaatctgcatctgcatagcctgtgactactgcttcatgtgttggcttcttgtactttaaaccagctttcaaagatccatttaaataccttantgtccacttcacaactcccaatgtgcgctgccagga

SEQ ID NO: 99369 - DNA, 445 bp, Glycine max
tgtattgttgcgtatgatattggttttgcgtctttgattataaagtcaaacacatcaaccagaatgagaggaagaatcccttttgttttaattgattgtgagaggagtgaaaaatatatagtatacaagaaagatttagtatgaatggtgactagcactagaaaatgtgggtctccctttaagccacgagtgaaaccagtattgggaggtgaagggtggatgatcaacttgacatgtgggacttataatcatgcattgactaagtcattcactagacatccatatgttggtcgactaattgaggatgagaatattattattgatgatataacaaagtccatggtcatattaaagaatattcttctcactttgaaggagcacaatgccaacaattgtacaacaatgaagcaagtctacaatgcaagatatgcatatctttcttcta

SEQ ID NO: 99370 - DNA, 158 bp, Glycine max
gaatcacctacgatgagcctcatttaaagacgacatcatttacccagattaagaaagcaatagcttgaacagcagtcttgttaatgaaaactgagggataacactttttttctccacaaccaaactgatgatagtgtatcacatgctttaaaccattg

SEQ ID NO: 99371 - DNA, 463 bp, Glycine max
tgtaggattatgaggtacccatcacatgtggtactaggtgtgtattcttcgatggtgcacaacaagttgtccacatccacaatgcgcgcataaacccaccatcctctgttgcccacctccatctgagctcacgtattcccacgtagcccatatcctcgtttctctcaacaccgggtccccatcaatcctcccaagcttccacaacatccaatcaaaacaacattcaaacagcacaagctatcacagccaagcaaaacagggcaaaggcaaaaaactctgctcaacacaccaaccaaaatcacagcttttctcactcaaagaccccagtaacaattccttcgatccaattcgttaaccattggatcaactccaaaattttactgcaagtctatagtgcataagcctacattgtgacgcgtgggatctactagcaaacatccagaactcattctgcactactctt

SEQ ID NO: 99372 - DNA, 362 bp, Glycine max
  unsure (1)..(362): unsure at all n locations
cttaagncacctgcggcatgcaagcctatgcgcatatttccttacgaacgttctctttcacaagacattctattaactaagagaaggcacccatatacaatcaaggcagcttcgttacctagattatttacacgtacttccaaggtgtatatgttacttacatcacacacatctccttggctaaatttacatacatgcatactcatagcattttgggatatcaaaaattgcacatgcgcacatcttggtatttctaatacctatacatacacaagcttcatgatgaatcttgactatctacacaataaggtgctacattccatgctcttttcaagttttgctacctaaagccgcatgccaat

SEQ ID NO: 99373 - DNA, 463 bp, Glycine max
cggagagggtgcttcaatggaggataagacatagagagagatttatagaggcgggagcacgacattgaaggataaaaaagaggaagagaagttgaactttgaagtttgtctcacaagactctcattcatcaaagttacagcaagtgatacacacgcttctatttccttgagaagcttctttgagaaaacttccttgaaagcttagctacacacacccctctaaaaactaaactcacctcctttagaagcttccttgagaagattcctaaagaagctagagcttagctacacatacctctctaatagctaagctcacctccttgagatgagaaactagagcttagctacacaccacctataatagctaagctcacccccattccgaagatgcatgataatacaagaaaaaataagtccctactacaaagactactcaaaatgccctgaaatacaaggctaaaac

SEQ ID NO: 99374 - DNA, 374 bp, Glycine max
atattaatcatggcgttaggagttgactacagacggagataaattacacttaatcacggatgcttttgaagatgacaatgagacaaatggtaattctcgtcatgaagtacacccaattttagaagacgccccacttatgttgcacttggaatgtgatccaattgaaaaagctgttgataatgaggaagattcataagaagatcctgttgctggccaccaagaaggggagtaataattcctctggacttggtgcgacgtggttacgatacttaattggtatgattaattttgactttatcaccaatgatgcagatgttggtgctggagagcacagagatgcttgtgagcagatggatgctcgtaacctgagggat

SEQ ID NO: 99375 - DNA, 278 bp, Glycine max
  unsure (1)..(278): unsure at all n locations
ggatcttaagnaccgcagctgcaagctggactctgttttttttatttctaacacttaaaagtgtgacttngaaaaaatctttataaacaagtcacttgaaaaattgtgacttttggaaatgtatttctcgaaatcagacactgggtaatcgattacccattaaaggtataaatcgaattacacatccaacagaatgtgacttttcattttgaattctgaaaattaataacgtttaagaagcttctggcatcacattacaagtgttgtgtaatccatta

SEQ ID NO: 99376 - DNA, 456 bp, Glycine max
  unsure (1)..(456): unsure at all n locations
ggccgctggagctgacccattaactgacctaactcctttatactggtggtccctaggctcttcaccttgatttgatagaacctctttttaagtgaaggcatttgacttgatcttatgttttactaaagtgaacaaaaatcggtgcgaattaaaactccagcatctatcatgggtggaatgaatgaatgcatgaagaaatgcatatgacacagatgcaatttatgaatacgggagcccaagaaattgtctccttcttagatacaacgtcttgggggtagcaaagtgcccgacgtatgtatttaagaaggtggtaccgaccctccgttggtatgacaaagagaggggaccaaaacaaaatccgtgcgtgatgcatatgcganaggcgcaacacgggagtgtacagtatgacaatatttacaaaatatatgcaaaagggtaaatgacccttatgcatgg

SEQ ID NO: 99377 - DNA, 316 bp, Glycine max
  unsure (1)..(316): unsure at all n locations
agcttcatccgcagatcccttatgtatgtctactcccganctagacagcccctctagattttgactaacttaaattgagtttcgtccgtagatccctcatgtgagactagactcagttcaagtagcttactatagtctagcctaatttagcctaagcgttcgtccacagatccctcatgttagactaggcttaaactaaccagcattattgtaccagcatactttaaaccataacttaacgcatagatccctcatgtaaggctaagttataatcctgcttccatcaaggtctaaggcgacagtacatttccaatgc

SEQ ID NO: 99378 - DNA, 441 bp, Glycine max
tgcccgcagctcgcgcaggcgagcagggttgctttctctataagcaacagccttctggaggaatcttctggatggcccaagtgggcctggttgctatttgcacccccatttttactaagtacaccccctgcctttttttggtgattcttttttcgtaaagttacggaaacttacgaatttcgtaacgatacttgttttctttccgtaatgttacggaaccttgcggattacataatcattcccttctttgacttacggaatgttacggaacctcactaattatgcaacgatgcttccatttgatttccggtgtgtcacggaaccttacagattgtgcatcaatattttcttttgttttccggcatgtaccggaatttcagatattgcctaatgatgggtgccaagcacctcacaaggaccacacaaaagttgcatgtcatc

SEQ ID NO: 99379 - DNA, 338 bp, Glycine max
  unsure (1)..(338): unsure at all n locations
agctttaagggatgaagaacaacattcttgtacctaacatataagggctttgcatganaatgatgaacaaatgagtatataaaaagagatttaagagcttctcaccaaagatttgagaggagtctcaagacactactatggagcttggaagaagatgaaaatggtgttctttttctccttgaaagtctcatgcaagaagaagaaaataaaggttcaagttttggttcttggagaggaaatggtgagaaatgatgcaaagctatgcctaatgctattgataagctcacttgatgagcttgaatggccattgatggccatgttggaaaaggtgccatata

SEQ ID NO: 99380 - DNA, 436 bp, Glycine max
  unsure (1)..(436): unsure at all n locations
ctngaaatagcgcatgataaggtatttcaaacttaaggtatgatatgggtaatctatttatcaagtaaacatccgtgtaaaaagcagaatcccaaaacttgagagttaaaaaatcataatgaaggtaagtcctgactcaattatatgtttgtgttttctttccataacaccattttgatgatgggtgtgggggcaaatcaatctgtgttgaataccacagtcaaccaaaaaggatgttaatggtctaaatttccctccccaatcaatttgaagacttatgattttagaattaaactgtaatttttccatagctttaaacctttgaaaaacatatgaggcttcagactttaagtttaagaagataaatccaagtaaatcttgaaaaaacatcaacaaaggttatgtagtatgaaaaatcattgattgaggaaacatg

SEQ ID NO: 99381 - DNA, 207 bp, Glycine max
acttggcccctccacaagtagagaaatctcttttggaaaactcaatcgtgctctgtctggtttttgaaatatccttacaatcctttctttgtgaagtctggacttggtgcttattgattacttctctcgaatcttgaattcaccttctcttgaaacctgaccattttgatgtttttcttgaatattaaataatcttcatctttcttt

SEQ ID NO: 99382 - DNA, 400 bp, Glycine max
actaagcgcacctccctgagaagcttggttgcgcacatacctcacgaagatagaacttagcctcaccctccttgctaataggtgagctcacctcgttgtgatgagaaactataggctagctacacaccccctattgtagctgagttgaggcccatgtcacacaacatgaaaaggtaaaaaaagttcctacttcgaagactactcctgatgtcctgaattacaaggctgagagcctgtactactagaatggccgaaataccaggccccatagaagggaaaacctattctaatatatacgaagataagcgggcttatacttatgccatgggcgcgcagtctacgctcaagctcatgagaaccatacggcctatccttggatgtctagcaccatatacttgga

SEQ ID NO: 99383 - DNA, 254 bp, Glycine max
  unsure (1)..(254): unsure at all n locations
agctntnatgctaatcagcggatttatgttcatttttaaattnggatacaggtttcgacatactcttttccacactggtcccctaatatgagggaggcatttttgtgattacggtgggataactctataattctgggtagttttgggccaactatactgacacaattatggcttcttaattcatgttatatacccttgtattagggcaccatattactgctcaatatatctcccatgtgtaagtttcacagtac

SEQ ID NO: 99384 - DNA, 446 bp, Glycine max
tagcgcttctctctacaggtctagttctattctttctattcttgatgcacaactgtttgcttttctatacttgttcatcaattctctttgagtctttgatgccctctttatactaagaggctcatagttatggagaggatcttcaacattgaataatatgaccgctgctgattttgatcttgtttcccaatctagacaaatattgcatgtctttgtctaatactagattagaactttccatagttgtcattcataactaaacatagttgttagacatataaaaggaaatataagatgcattcacacatatgttccttttaatagaaccatataatatggcataaacagatgtattcaagtaactgtgcatattcaaaaggatggactggactagtacttcttgcttccattatacaaagtatccattcatggataagtcttacctc

SEQ ID NO: 99385 - DNA, 261 bp, Glycine max
agcttctagccaaaggacttaccttgaattaattcctttgatagcccttttgagtcttgtttccttttccttgttttgaagctcactacatgccttaagtgaaaaaccatgatatcaccatatccttaatgaattttggagctttggaattgttttgggaataagtgtgggggggttttgtctcattggataacatgttttggtggtatgcttcatgatcgatttcgggccatacttgattgtaattgatattggtaaatg

SEQ ID NO: 99386 - DNA, 382 bp, Glycine max
gcgcttatggacgacctaaggaattaatgattgcattacttccattgcttggggtatataacgcttacatttgttattctacgtgcatgttatattgggattttgacttttctacgagttgaagtgagtgctggattaaaacaatgaagtcaagtctcccagacagtattatgcagtccgtaccaccatatgatacaaaattaagtattgtcaaattctttgtgagaatacctatcaaagctgaacatatattaatccttctgtgtcccataatacgtactgcataagaaaataagtgttaatatagagtgttcatgccatgatgatgactgttcttatcactaataccccttataagaaaatgtcattctagtcttttaaa

SEQ ID NO: 99387 - DNA, 338 bp, Glycine max
  unsure (1)..(338): unsure at all n locations
agcttgcatgaattacatcttcttctttcttaagcanattcttcttgatatcatcaaaatcttcgtgatttacattctccccctttttgatgatgacaaccacctgtaggttatgagcaacaacaaagaaaatatctatttgcatatagtgtactcccccttggttttacaatgattgcttatatgagacaattgaagatttcatatttttcatatataaaaagttgtctcataaaacaatagataatttttcttactattttatcttttatctttctctccccctttgtcaacatctaaaacaatcatgaatatagaggagaaagatgttacctact

SEQ ID NO: 99388 - DNA, 449 bp, Glycine max
  unsure (1)..(449): unsure at all n locations
tcaagaaaataagatcaacgattatcgtcatggtcctctctctacatcacagtcactttcttccctacccncgccaccaccttctcaccccgtgggaccttctacaggacccatttcccaaattccttttaagagactcacataagaagaaatggtggttcatcacgacaaaggcctctattaccactgtgaggataaatggattcccgaccaccgttgcaagcctcgacttcacatcctcatcatcgacgaggacatggactcagtttctttgtcgcccttgccagattaccccactcctttagaccccaaccccacgctgattcctcatatcaaccacaacgctatggaagccacaccggcacctgagacctttcacctttntggctctatctgacaccaccaggtcatgatactggtcgacagtggaagcacgcacaactttatta

SEQ ID NO: 99389 - DNA, 149 bp, Glycine max
  unsure (1)..(149): unsure at all n locations
aagtgaatatagataattaatatgtaataaagatagataggtaagatatatgttgagaagattgagaattttgatatagntattgtatctctttctattctccttcctcaattnnnatcanatanattaattctcntctcccccccccc

SEQ ID NO: 99390 - DNA, 414 bp, Glycine max
  unsure (1)..(414): unsure at all n locations
tgaggctnaacagtggtgtgactatagatgtcctttcttatcacctctcctccgcatcagacaacaatcgcattcgaacatccacgccctacttgggagtgatagatcaactctgggagcttgatagattgcactaaagcgcctatgttaagtgccaggggtgatgtaatcgggtgccgcaaccgaatagggattatgtttttagaccacaataaagcgagttacatggatgaaccttttgttatggcccatcggtcgaaacacgggttctacatctaagatccttgcaattcatgagatactttggcacatcccaagggtacccagtgagttatatgacacacatgacggtccgaagcttgtactttgagacacacctgttttggacataacgtcaatgtaacagatacacta

SEQ ID NO: 99391 - DNA, 425 bp, Glycine max
  unsure (1)..(425): unsure at all n locations
tcatcatccatccataattccaatcattcatgctcaatatgatgcatgcacctgacatcaactctcatatgcaatgtggtatcatccccaaggaaatagcctaagcgtgcccacatgacactttcacttaggaaaactaagcagtaagtgtcgaggtcaccctgtcgtgcacagggcaactcccccacacgggtgaatcagcatgagtcttaaggggagtntcaaaccgagtgacatgccccctagtacaagtattcctcctcatgagaaactacaagtacttactgacaaagtttatactatntccatgtcatatgaagtatgagacatgggcaccatcaaatgcactgaccgtgaataattaaatattctaagccatccccttccagagatgcttaaaactctttaaccactatatctccccc

SEQ ID NO: 99392 - DNA, 463 bp, Glycine max
  unsure (1)..(463): unsure at all n locations
agcttctagccaaatggacttaccttgaattaatttcttttgatagccctttgagccttgtttccctttccttgttttgaagctcactacaagccttatgtgaaaaaccatgatattaccatatccttaaggaattttggagctttggaattgttttgagaataagtgtggggggtttttgtttcattggaacaacttgtttgttggctatgcttcatgatgtattttgggccatacttgatgtacattgtatattggttaaatgttggacatgctgaatgaaatgttgtttctcaaaggctaaaaaaaaaaaaaattcgaaaaaaaaaaaatcgaaaaaaaagcaataaagttgagtgaataagatcttaaatggcataagaatgatgaaactcttggttctactcttcatggttaattnntatctttaccttcttttaattttntcttaatatgcacttat

SEQ ID NO: 99393 - DNA, 446 bp, Glycine max
  unsure (1)..(446): unsure at all n locations
cttatagtgcggttggagacaatgtatttgtttctatatgcgaagatgatgttccgagtactttggatatggtccgaccatgccctcctgatttccagctgggaaattggcgagtggaggaacgccccggcatttacgcaacatgcataatgtaaacctttacgggtttaaaagctctatagttgggcctaaggcttagagttttcattttgttaaggctttgtgtcttttgtttttgaatatataatacaaggatctttcttcatctgttcctggtctctacccattctcattcatttgcatgtttacttctttttctaaaacggcagattcgatgacgagtcccccgaaggtactaatacctgtgacccgtctatcaacttcgagcaagatatgaatcanacggaagatgaaggagatgatgatgtgggactcccttcggaact

SEQ ID NO: 99394 - DNA, 435 bp, Glycine max
  unsure (1)..(435): unsure at all n locations
ttaatgangtcctttaatggtgatttttcactatgtatatgcaatggaagacagaggagaagaggttttatgaggcgccatccactatgtaataagccatggaagaaggagctttaccaccaagatgagccttggagaagatgcttcaatggaggaaaagatagagggagtgaaagagagagggggagcacgaaattgaatgaagaaaaagggagagaagctgaactttgagttgtgtctcacaagactctcattcatcaaagttacaacaagtgttacacatgcttctatttatagactaggtagcttccttgagaagctttcttgagaaaacttccttgagaagcttctttgagaaaacttccttgagaagctagagcttagctacacacacccctctcataactaagctcacctccttgagaagcttcctta

SEQ ID NO: 99395 - DNA, 450 bp, Glycine max
  unsure (1)..(450): unsure at all n locations
cgctcacttatgacatgccaaggcttttaaattgaaatacccttgtaccatctgggcttgtgttatgctntgttgncttatgtgaaactgtgtatcccaatctattgattggtattttcggttataaatagcagcaggattttttcatttctgtagcgccatttttttcgtaaactttctgtcacttaatgtaatntgttttcgttaagggtagtttggaagcgtatttggtctctagtggtgtacgtgcgtttgttaagagtatatggtaattttttgccggttttcgtcattggagaagaaaaggtaagcaaaaaaaaatggcatgcacatacggatcaacaatctgtatgacccatacagattggaggtccaatacgaattagcaatccgtaggcccaatatacgaatcaccaataatggtccaagaagggatcgaacttgtgtcac

SEQ ID NO: 99396 - DNA, 370 bp, Glycine max
  unsure (1)..(370): unsure at all n locations
tccctgttattactagctatcttgaattctttagttcctgaatgtacaaaccttcaattgttgctccatcccctctttgagaatgaggacgatcttcataggacttcatccagctgatgttggttccagtttcatcatccacccacccttttccttctgtgcgctatctcaaacgtttgtttggtggggaaacaccatattntatgcgcttctcccgcttcatggtcttgttttatcacaactttagctgaatctcctatgcttaacataatagaatctcctgttatattctccaatgacacactttgatggcccgtgtattttattttgtatgttctagagccttagactctaagtgcatatagcaatc

SEQ ID NO: 99397 - DNA, 352 bp, Glycine max
  unsure (1)..(352): unsure at all n locations
gcctggttgctatctgtacccccacttttactaagtacaccccctgcccttttgttggggattcttatttcgtgaaggtactgaaacttacgaaatttcgaacgatacttgttttctttccgtaatgttacggaaccttgtggattacataatcatccctttgtgacttacggaatgttacggaacctcactaattgtgcaacgatgcttccatttgatttccggtgtgtcacggaaccttacggatngtgcatcaatattttcttttgctttctggcatgtcccggaattcacacattgtctaatgatgggtgtcaagcacctataatgaccaaacaaattgcatgccatc

SEQ ID NO: 99398 - DNA, 350 bp, Glycine max
agcttggtaaaacaaacatataattattttatttcactcaattaatacatttgctcatgtaagttattcacaaacactcatttcatatcaaacaaaccactgaaacttgattcaatcatttcactgttcaaacaatctttttgtacaagcaatcaacactaaaataactggaatttaaatgactgaaatttaaataactgaaacataaagcataaactaaataaactgatcaaaataaactgttcaaaatgcaagacaagaagaataagatcctgccaatcctcctgcgggtgatcctctgcatcctcattaagatccaacactggagcaactgatggattctgaacaat

SEQ ID NO: 99399 - DNA, 466 bp, Glycine max
  unsure (1)..(466): unsure at all n locations
gcatgcaagcttataagaacaaaatngcctcaatcatttccaaatatgcatgtgaattaggacgcatcaacaataatcaagccaaggctattgtgcaagcaatcaatggggcaaaacacaccaaatgattatgatgatggatggctcaaattctcaaaaaggtaaactcatcactttcaaattgagctttcaaaactatcatgacatgtagagaagaatcaaggatgcatgtgaattangacgcatcaacaagaatcaagccaaggctattgtgcaagcaatcaatggggcaaaacacaccaaatgattatgatgatggatggctcaaattctcacaaaggtaaactcatcactttcaaattgagctttcaaaactatcatgacatgtagagaacaatcaaggatttcaagtcacaaaatgtcaagaacttttattntcaaaacaatnactcatttcttgacatat

SEQ ID NO: 99400 - DNA, 451 bp, Glycine max
  unsure (1)..(451): unsure at all n locations
tcagcttccatcacccaaccctctcttcttatgttggtagacctatgtaagtctaatccaagctttgtgtcattttactaccgtatagaagggtggcattgtgcatatctgtaatgaataggaagacgtgcaattaatgagaaataaactaagaaacatgatgcataatttgataaaccatattactacatagacaattgcatatgcctttgttgagctgtgaaacatgatgcatgatttgataaaccatttactacaatgacaactgcatatgcctctcgtgagctatgaaacatgaagggtggtagagaaactaatcaaattgttgcctagataatgtaaaagccaatggaagagattgtgaattctngttacttatagtctctatgatgtagcctctatgacattgggtttcatatttgcacgtgtaccgttgtgcttttatcctttg

SEQ ID NO: 99401 - DNA, 414 bp, Glycine max
ggatctgcagccacctgagctgcagcttccaaaaatttctcttcttttggttcagcgtcgggaactctcatttcatgtttatttcgagacataaactgattctcaacaatgtttctctcattaaaatataccaacatcaccatgcttgaataacgtgcatacttctctattgctacataccatcacttgctcgtcttctgacctgtcctctcaaggaacaaagattgtctttttattatgtgtgcatgatgaactatatcttcttgcgcaccttacaaccttacttggaactaacaaacttgtaacattctccccaccaaagatgttatgttcgcgaccacatgaggcacccatctcacattattgtttggatgacaccatcgtgaaacttcattctcgaactcttaatattct

SEQ ID NO: 99402 - DNA, 389 bp, Glycine max
  unsure (1)..(389): unsure at all n locations
agcttggatngcaatataattaacaattattagttttggccataggaagttcgattgtccttatttttatttcgattttgatttcattatgtttctttaattntgtttcttacgtaaacaaagcaactgccaaatgcatttccctggacaaattttatttgaatatgtctttgggtttgttaaatcaatttttaacttttagtagacttacacaaatatgttatgttatccaatgggcatatgtaacgggtctaaagattagacaacgtatattcttcattaagaaaaaggaaaaggcgattataattntgacttangaagttgttttgattctgtttactgattcaaaagttggctgattggtttttaagtttctactgattttatta

SEQ ID NO: 99403 - DNA, 464 bp, Glycine max
agcttgtacttcctgctaaagaaactagttactgaatatctggatcattgacatgccgaaagaaattctggaatggtataactattaaccataacccaagtgggtattccttatttaaaaatattaaccttaaggtgcattgaataagtgaagaccacatattaaatagtagaaaatcatgcttaaaaatatgatgtggacacaatttaaatgggtttttttttcatattatgtatttaaaaacaatataaagactttgggaaaaacaggtgcaagagaaaagtacgaagtcgcctattttatgagctgctactgtaaactgatcacgtgcagatgactagaccaatacagctctttttattgaaaagtacttactgtcatcagatgacagttataataaaatttcatgtgcccttctaaaagagcatccatcctaaagctttgcatatacttacacaatgaaa

SEQ ID NO: 99404 - DNA, 458 bp, Glycine max
  unsure (1)..(458): unsure at all n locations
agcttctagccttcaactaagtaaaatacatgctatatgcatcaaactccaactatggggttgtaggtgccataaaatgcganaaataatccagacaataatacaatagaatccaaggctctttgccagatgggtagagaacagccaagtaactttaggtgaaatgtggctggcataacaaatgagagcattgcacataaggtgctccctacaaatgaggcaaatacagaaaattctggcacaaatgaagctatgactgccaatccaaccaccacaatcgcccggctaacgtatatgcacatattttctagtcccattgaatcattattgtttctgaggatgattnntgagttcccttccacaatctcattaattgggtgaaacatgactgggagtgtgaatgcaagccccacacataatcctacctgtcaaatgtagcaaaaacttgaagataatgg

SEQ ID NO: 99405 - DNA, 459 bp, Glycine max
agcttatatttcttatatatatatatatatatatatatatatatatatatatatatcttaaaaggcaaaatatgggattggaaaagaaaataccgagttcaaaaaatggcagtcgaatataaatttcttgtccttcgtcagtgtgatttctcatgtccacaatgtcatcaaaccaatgcaagtagccattcccaccacctatgacatataaatttgcatatgcagtatacaagcagtttctcaagcataatgtctcacattccttaaggctcaagctcttgttaaaccaagaagaagatatgtctcgtaacttcattcctgagtacttcagaaacctatctccattatgacaattaaattttttttcttctcacacacccaccagaccaatcatgtgaatcccactttgcatgatactttggtatgaaaccttgcaagcaaacacatattggaagatcg

SEQ ID NO: 99406 - DNA, 448 bp, Glycine max
  unsure (1)..(448): unsure at all n locations
agcttgatttaganatcatattgtcgaattggtgtttttggaagctatcaaaagttgaattccttgtacagaaaacttcaaatnntgcgttgaataagtaattcagttttgcttcaaatgaaaaatttcaaccgttataaataacttaaatgaaacttgttggaataaggcaagcaagtcacggcttcaaatatgtcttgaattacaggttgggaaagaacaagttcccttgatactctctctccatgacgacaccaaaatgtgtaacttttaggaaatagtttacagaccgagtggtcatacacttcttgacaagttctccacttcctaaagccacgttgatcgcatggacgtattattgtacctacactagcgctatgttgaaaggtaaaatctanaaagttattcaatcaccaaatattttggtgtattgcgtggaaacttgatc

SEQ ID NO: 99407 - DNA, 478 bp, Glycine max
  unsure (1)..(478): unsure at all n locations
ttaagtcacgcggctgcagctttatgtcnttaccaaaagtcaaactaatatatcttgacaaaaagatatttcttttttccaagttgaaaacacataatcaccaaaagttttacatagttcacaaagaaatttagcaaataaagaaaaatcaagtgttaactacgaactaagaagccataacacatttatttccattttgaaagaaaggaaattgagtcaggagtggactgtggattanggtcgcgtcttcagagtttgttttgggcttgcagacaaggtttttggctttgttaaaactcacgtacagtagtcccctggatttttaaaatnttactctattggtttttaaaatatcatagtcaaatttctttggttttactctattctttntaatggttacttatggacttgangtttcttctaataggcctaacaatnagaatttgacttctacttcatgccacttttcaattttagg

SEQ ID NO: 99408 - DNA, 459 bp, Glycine max
  unsure (1)..(459): unsure at all n locations
agcttgtgactcttggcaatntcttagtctcttaaaaagttatgacttttgaaataatcttcagaaacaagtcacttgaagaattgtgacttttggaaatgtatttttcgaaatcagtcactggtaatcgattaccattgaggtgtaattgattacacatcaacatatgtgactcttcattttgaattttgaaaatcttaaagttttaaaacactagtaatcgattacagctttgtaaatcagtttgaaaaacaatgcaagctactagtaatcgattactaccttctggtaatcgattaccagagagtaaaactctttggtaaaagattntgtgaaaacttcatgtgcaactcaatgttttgaaaaactttntagtacttatcttgattgagtcttctcttgattcttgaatcttgatcttgattnttcttagatcttgattcatgaatcttgaaactt

SEQ ID NO: 99409 - DNA, 427 bp, Glycine max
  unsure (1)..(427): unsure at all n locations
agcttctggaatcatatcctacattatgatttcntctactataaggacacaagagttcttaagtgctttggaactaccaacaatactctattaccatccctccaaataggctcttgaagttctaccgccacagaatcaagcatacggtaagcagttggccggcttggcgtattaatagatggctgcagtgttgactcaggtgatctctttatcccgacacatngatcattgttggaagtaatgaatatatcctttacaggagaactttcgtctgagggactgtcatggcatgaaccatgagaagtaagatttgtgctatcctcacttgagccattcctaagtctagaccttcttggttctctcccaacctctcgagtgtacccacctgtatcattaattactttctcaagattctgtgctcttcctc

SEQ ID NO: 99410 - DNA, 432 bp, Glycine max
  unsure (1)..(432): unsure at all n locations
agcttggtcaaaacaaacatctaattattctattccactcaattcatacatttgctcattcaagtcattcacaaacactcatttcatatcaaacaaaccactgaaacttgattcaatcatttcactgttcaaacaatctttttgtacaagcaatcaacactaaaataactggaatttaaatgactgaaatttaaataactgaaacataaagcataaactaaataaactgatcaaaataaactgttcaaaatgcaagacaagaagataaagatcctgccaatcctcctgcgggtgatcctctgcatcctcattaagatccaacactggagcagctgatggatcctgaacaatangctggtctggctccgatgctggtgcanatggctaggaatcctcangaatgggtgctggagagatatgaactggagaagt

SEQ ID NO: 99411 - DNA, 455 bp, Glycine max
  unsure (1)..(455): unsure at all n locations
agcttgccaccattctcaacatggatacgttcaatgctctcttgcagcacctaaggctattntcagccgagtatcccaatctaaaggcaccctatcctctcctcttttgcctgaaattttcagaatgcagaatggcttttacacgcaaggacagtgtataaaatgtagtcgtgtgtataatgtaccaaactagcattttcaagacaaattatttatttacatagtttgaatcttgaattcttttgcaaaacagaaaatatggtgtgtaaggtacactgagagtgagaaaatgcaagatgtttttactatgggggcattaaagttatacaagcactcaaatatttgaaaggcacagaagtaccaacatatttactttccttctgaagcttatatgattntccgatgatcaatatttgataagcgtacataatatgaagcttaacagtcattaacat

SEQ ID NO: 99412 - DNA, 456 bp, Glycine max
  unsure (1)..(456): unsure at all n locations
agcttgtagctgaagttcttgagatgtgctttaattggttangcaatancgaaagacacattcccctgctttcctttactggaagttcaaaggtacttcatctctctcttattttgattaaacattgtaatctttatttttatgtgtttacaacgtacattacattttcatgatagtatttttatgttacgacctctactagttagctaacaagtgtaatttattataattttttgtaattcattttttttgttggttccattggtttttattctaaatacctattcttattttataacatatatggtagtagctgtaacataaaaattggtattgaatcttaggttaagcttcttcccccaccaattattctttntagttagaataattattatagntcttcttcttaatttatattataatnttgtgggggacttatcttcttataatacaaat

SEQ ID NO: 99413 - DNA, 382 bp, Glycine max
  unsure (1)..(382): unsure at all n locations
agctttagtgcccttatatttgaagcaatatttgacatttccataatgtattccctgacatttcttttgccttgatacttcatggaaatcaagttctgaaggagagtacttgtttccgccttatcgctttttgcaaagcgcttttcaatttcagcaatgaattctttggcactggttatatcatctgaaacaacgcccctaaagacctcaggaatgccacgcttaatgatatatctcatcacaagattcccaatgcaccattaatatcaagtctttggacaatgatattaattgctaatgaaatccttgttgtaagttcaaacattgataataaaagcatgtcanataacaaacccatctcaatactagaaaaatgcaattt

SEQ ID NO: 99414 - DNA, 300 bp, Glycine max
  unsure (1)..(300): unsure at all n locations
agcttctctaccaccccatttttctccccctttggtaacatcaaaaagccaaagttcgtgagaatcaatatagataatataatgaagtggaaaaagatcaatcataagtcataaccaaccaaaatcataaataagtcataacccanatattatccaaacagtcataattcaaaaacacataaaatccaatcataaaagactaaagtccaaataccaaaagataaataaagtgcagaaaatgataacttaaataccatagccaaaatacacggcttaaaaagaaaattataaactaaactc

SEQ ID NO: 99415 - DNA, 444 bp, Glycine max
  unsure (1)..(444): unsure at all n locations
agctttaatacacttctttcaagatagcttggccggagccgcggtagtttggtacacntaattggaagcttctcgtatccgtacttggaaggatctgattactgccttcctaaggcaatatcagtacaattccgatatggctcccgatcgcactcagctgcagaatatgttcaagaaagagggcgaaacctttaaagaatacgcacagtggtggagggacctggcggcacaagtggctcctcccatggttaagagagagatgatcaccatgatggtagacactctgccagtgttctactatgagaagctagtaggttacatgtcgtccagctttgcggacctagtattcaccggngaaagaatcgaggtangatngaaaagaggaaagtttgattacgtttcctccacgagtgcgaatgccaaaagaatcggngcaacaggggc

SEQ ID NO: 99416 - DNA, 386 bp, Glycine max
  unsure (1)..(386): unsure at all n locations
ctatctcatcctctnttttatgtgtaggngctgctactggtggaggtacttgaatttggttgctagacctcaaggtgatggcactcacatttttcggattctgcacagtttatgaaggcaatttgtcagaattttgggactgagcttggttcatctaagtagccatctgccccatctgatntgtcagactctgaatggaggctcttgtctcttgctgaaattgcatattctggatggtcattttcctcactaactcttctaaggaaggttgaggaggagcttcagttgcttgttgtctttgttgtgactgttgctgtattggaggaggaacatatggcttgcttggaccaacaacattctggaaaggaaggacatgctgttgttgt

SEQ ID NO: 99417 - DNA, 464 bp, Glycine max
  unsure (1)..(464): unsure at all n locations
agcttaactaatcaaatggtgagaaanggttttttttctctgatttgatgaagatcgagaacgtgttgagaacactaactcctaagtttgatcacatagtagtagctaaagaagagtcaaagaatcttgatgagttgaagattgaagaacttcaagcatcgctagaggctcatgaactgagattaaatgatagaagcaagatcaaagacaagtcaaatgaaagtgcagctgatcaagctctgcaggctcagcatcagaagaaaggaaagtataagaaaggcataagaaagaatcagaattctaagaactcaaatgaatgaacacgcctatgccatgatcacagttctcaagaaggaaattaaggtctgaagaagaagataaacatgaaagatgttccgtgttataattgtcagaagtggggtcactttgcagctgaatgcatatcttagaatgttccaagagaa

SEQ ID NO: 99418 - DNA, 459 bp, Glycine max
  unsure (1)..(459): unsure at all n locations
agcttgagaattgaggtgacctagcctaatgtgccttatatatacagagtcaggcacaatattattacaatcaacagaagaaacagtgtttatgcaagctggagaagacatatcagatcaaaactgaagattgggaaactggtactagtcatcagattcaacatctccttgaagaatgatttattggaatcctgagatttaacaaaaccacgattagcatgaaagtcaaagaaaacatgattatctttgacaaatttgcttacactaattaggttcttagtgatttgaggaacaagaagcttgttttaagaataagtttgacattagaactgaaaggggaaacaaaattggaatgaccagaggctgagatattcagaccttgtccattaccaatgaagatctggtttggnacccaaaaaaggagaagtttgctagatgttctgagttattggtcacatg

SEQ ID NO: 99419 - DNA, 442 bp, Glycine max
  unsure (1)..(442): unsure at all n locations
agcttcaagtgctaatataaagaatatatgttggcattagataaatactagtaccgatagtgatggccaaagaattaccactacatcccacaatactattnttattatcataaaacatgcatgctagatgtcgtaacctaccctacaaccggacgatgaaaggaaataagacaaaagcacgttcatctcctatggagaaaacgagtgagagtcgccaccaacgtttatttgaggaaaatgttagaaaaatcaaaaagaggtctacgaatttgaaaagaagggttcaagagttgtttaatcgagtgtgcaataaaaataacgtgactacaaaattaattatttttcccaagaacggtgaatntcttttcttttaatatattatttntatttatttaataatttttttttgaatccacaaaggtgttgcccttgctcctacata

SEQ ID NO: 99420 - DNA, 453 bp, Glycine max
  unsure (1)..(453): unsure at all n locations
tgcagcttgttaggaataacacatttattctttgtcgtgcaccaacaaagaataatggactcacacggtttctctgtatctataccagcagcacaaatacagtttaaccatgaaacccaaccatcatctgctgttcacccttcgtgcgtatatttctaagtgtaaagcaaataagcaagctatacaaaaaagccaacccttaccaactccttcaacattcacgtaagtcctgtatcatcatatcaatcgatctcctttccttcacaaagagatcgaaacaatcataacgttaaacaattcaaacaagccctgggattcatctcccattcacaataagagaattttcttcctttccctttcgcattaatccatgcccaagctctatgntttgccagatcccatgcggccacacaacacagcttcccaattcccattggcccctctaaagataca

SEQ ID NO: 99421 - DNA, 416 bp, Glycine max
agcttaggggatcagcaataggattatcgtctgctatcataagtggttgagagtctaaacacaagagttggattggctcccaaagctaaaggctgcaagaaaggaagaggttgaaacccctgaagagagtgaggaggtgcaagccctaaaggtgaaacttgaaagaacacaagtagtcaaagagaatttcaagacaacggccatcaaggtccaaaaagaatgtgatgagttaagggacatcaatgtggccaccgccgaagctttggaacaggaagcaaagagggctcgaaaggaagaacacggccgaaacaagtttcgaggagctctgtggggcagcaatagtgagcttaacctcagaagagccaagagggatcagtcgtgggtcgaaggcatgatcttacaagacaagtttcaag

SEQ ID NO: 99422 - DNA, 458 bp, Glycine max
  unsure (1)..(458): unsure at all n locations
agcttgtatgagtaatgggaaagattcattaaattgtgtggaagttgtcctcaccactagatttatgagcaactccttcaatatttctatgaggtacttagcaacatggaaaggagtatgattgatgctgccagtggtggagctcttggtgatatgacccctgctaaggctaggaatttgattgagaagatgacttccaactcccaacaattcaatgcaagaaatgatgctattgtccttagaggagtccatgaggtgggcacggattcatcttcatctattgaaaataaaaatcttgaatgaaaacttgatgccttggtcaacctagtaactcagcttgccatgaatcagaaatctacacttgttgcaagagttcgtggtctatgttcttctgcagatcaccatatagatctntgtccttctttngcatcaatctagaatcaataagcaacctgaac

SEQ ID NO: 99423 - DNA, 380 bp, Glycine max
agcttctcggctcatgccgggaactcctctatttcaacacccgtgcagcctaaggcacccacccagagggaagctccccaagttccaacttcgaacacgaatcgaccggccagtaatttcaacacgacaaggaacttccctccgaagccattttctgaattcaccccactcccaatgacgtacgaagatcttttgccatccctcatcgccaatcatttggccatggtaactcctggaagggtcctcgaaccccctttcccgaagtggtatgaccctaacgcgacctgcaagtaccatgggggtgtcccagggcattccgttgaaaaatgcttggcccttaaatacaaggtccaacatttaatggatgctggatggctgac

SEQ ID NO: 99424 - DNA, 357 bp, Glycine max
  unsure (1)..(357): unsure at all n locations
cagcttgggatagtttttttttgtgtttatgaaagtnntttaaatgatgttaatgaagaatatattccatataagggaaagtaaaattnnaaagtatttgataacatngaagacatttttntttcttttacacaaaatatgatcccctagacttaatttgcataatatgtactaggataccatgccgatgccaccaaaaacgatcccaccgactggatttacgcaggaaaatattgagataacatgaaaactcattaaccctatgtggagtaaaagcatgctaatgccaccatagatggagtggaggaagagtcagtgacacacacacatcaaatcgacaagaaacatgcaatttaa

SEQ ID NO: 99425 - DNA, 429 bp, Glycine max
  unsure (1)..(429): unsure at all n locations
agcttgtangattatggggtacccatcacatgtggtactaagcggcggtcgggcgatggtgcacaacaagttttccacatccacaaagcgcgcataaacccaccatcccctgttgcccacctccaactgagctcacgtactcccacgtagcccatatcctcgtttctctcaacaccgggtccccatcaatcctcccaagcttccccaacatcaaagtaatacaaaattcaaacagcacaagctatcacagccaagcaaaacagggcaaaggcagaaaactctgcccaaaacaccaaccaaaatcacagcttttcacataccaataccccagaaacatttccttcgttccagttcgttaaccgttggatcgactcgaaaatttactggagatctctatacataagcctacattttgaccgttggatctac

SEQ ID NO: 99426 - DNA, 452 bp, Glycine max
  unsure (1)..(452): unsure at all n locations
agcttgttcttggatttttgaagttctttaacaaccttagaaaaatatacttgtccttcatttaactgcctttgggcttggcgaccacgatcaacaaagtactttcgacacctactatatgtggatttcaccaaagctgttatcggtgataggttgcgacaatccttcaataccttattaacacattctgagaggttggtcgtcatgtgaccatatctacgtccctttntatcataagtcatgctccatttttcctttgaaatgcgatcaatccatgtacatatggttggactcaactgacaaaacttttctaaattatgatcaaatgtatgtttgcaaggagtgtagcctgcatcagaaggttttgttagcaacaacaatttgaagtatatgtcaaacatcaattaacatcatatttataaataaatncttacccaattcttcaacatttc

SEQ ID NO: 99427 - DNA, 388 bp, Glycine max
  unsure (1)..(388): unsure at all n locations
agcttgcccagagaaggagtccacggaggatatgctgaccacctcaaaagactggaaagcggtttctaacgattcttctgcggcttccacataaggcaaagaggatgggcagttcaccaagatgtcttcctctcctgacacgatgaccaaatgcccctccactacgaatttcaacttttggttgagtgtagagggcacaactcccactgagtggatccacgggcgccccaacagacagttgtaggggggtttaatatccattatttggaaggtgacttgacaggtgtgagggcctatntgtactgggagatcgatctctcccctaacctctcggcgagtgccgtcgaaggcacgaaccaccattgaactcggctttaagtgggaagca

SEQ ID NO: 99428 - DNA, 452 bp, Glycine max
  unsure (1)..(452): unsure at all n locations
agcttccatcaagtggtattatagcacaagagcttctgtatgtgctccttaaacctccatatantttttgctttaccttctcttctattgttgtttcttcatttttctccatgtatctcctcacatgtcttgtgataaatgttnttaacatgattatntanagtttccactgattaaatttgctatagaagctagatntgattttctatggttcaaatttcttgttcttgttcttgaaccatgaattttgttgagtttaggttcctttgagttttgtcttgttattttttgtggctgaaaccgaaaccataaaattcttacaaaaatattaaagtataagaaaacctcanaaatctagagtgacttgttcacctattgtagttttgtcatagaagtcatgtctagttatgaaacttgtcacataagaattcttatgttgngcctgaatttat

SEQ ID NO: 99429 - DNA, 470 bp, Glycine max
  unsure (1)..(470): unsure at all n locations
cttaagtcaccgcggctgcagcttactactatctgcgggaagactttgttattgatanactgaatattattggctgaatttacatatatagcccttntataacatataaacctaaatactntaataccggcccaaaataaaatctcatttgtatggaaactgataatcattataattgagaaatttgtaaaaatacattattaacaatatntacaatgtgggacacaattaccacaaaacaaatattattcataggtaagatacattcaaagtagctacaatttttcagtctccaaagcagtgtataacagcaatgactaacatggaaatccatttgaatacagaaacaactcaactcaccaatcatgctttcagaanaataattcagaggagtaatgcttctaaattctaatcagttgattcttcctaatacatttcacattaaagcctagaaaccaacagaaaagaca

SEQ ID NO: 99430 - DNA, 460 bp, Glycine max
  unsure (1)..(460): unsure at all n locations
tgctgctgcagcttacaccgactactggtgctgatgtggaactcttttttttatcatgtatnttttnttcattcacaagatttcatatttttttaaagaaaatttaatcttgtactaatgaccaacaaattattaataattatgtaaacctctaatttttattattcaataatattaatatttttaaataaaaaacactatctctaatgacgactaagttgttagctagtctaacatcaaatagaataagaagtttaatgtgatagtatatgcgtcatgagatactctcttatattagtattccctccgttgcatttgttattcacaaaataagtttaagaaacttttagtatnttcaaaataagtgttgcatgtaagggaaaaaattatctcacagtgttatatttgatttttgaatggtacattaatntcttctcattaatatccttaataaatgtca

SEQ ID NO: 99431 - DNA, 447 bp, Glycine max
  unsure (1)..(447): unsure at all n locations
agcttcccctaagaagattcaccatccagttgtggattttcttgtgctggacatccagcccaatcagaatcactgtatgcttgaagttgtgttgatgcaccagtaggaaagaaaagaccacaactagaattaccaagtagatacttaataatatgatgtactgctgaaagatgcaaatgccgagaaaattgcatgaatttgctaactgtgtggacaacaaatgagatgcttagtctggtgatggttaggtaaataagacttccaaccatcttacgatagaaagttgggtcttgtagaaggtcaactccatctcattgcaatttcagattaatttccattggagtgtgaacagaagcagaattagtgagaccaactaattgaattagatcttgaatatatntgtgctgattgacaaaaatgtctttttgttgaaagtgtacttctaat

SEQ ID NO: 99432 - DNA, 455 bp, Glycine max
  unsure (1)..(455): unsure at all n locations
agcttcttctctccacaattctccgcaattaagtttataatttagtccttctcttgattcattaactatcactatatcatttgcaaaaagagttaaatgaggcactggctcttggatgtgcaatttgagaatgtcaaataccaagttaaaaaattatggagcagaagtcaacctttggtgtaaacctattctcatagattaaaagttagatagaatgctgatcatcagagttatgggatttggagacaatcataataaaataattgaaggcctgtaaggaaatggctaattctgttatcactagaaactgaccaaacaaataatcacaatggtggattcagcacagtttataatagagtgaatgaactcagaagttccaaatcgctcagggttntgaatattntatactacctccgatcctatttataagaaacaagttgtactgcattntacac

SEQ ID NO: 99433 - DNA, 460 bp, Glycine max
  unsure (1)..(460): unsure at all n locations
agcttctaanagttagtggaggcgctccatattcgccatcctctcctttgtgtccttcgcacatgacatttccagcgcttcatccatttctttcttcgattagatttgaagaagagtgaaccaccttcttcagagcccgttgctcgagtcgagttcaatgttcctaaggtcaaggtcttcactgtcgtcaatgcatgttcattgcagcgatggaattttagggttctttctctactgcgagtgtgagcctgagcgtgaatgagtgtgtgaatgaatgagacgcaagtagtttcgttggaagagaaatgaaactacgacggtcttaggaaaaaccgtcgtggaacacaagtttttaatacgggttttatatacccgtctnttgttaaagtcatatatattacaacaatatcaccgcaatcaactttaagacgatgccatcaactntaagacgattcaatgg

SEQ ID NO: 99434 - DNA, 452 bp, Glycine max
agcttatgagaccaaaatatgacaaagaacgtttctaacaatctaattctcacgctaatctagtaaatcttgttcataaatcaaacgaattatacaaaaatgtttctcacaacatggggagtaaaacccctaaaacaatttcacatactcatatcaaaattaaaggaatcaaaatcataggttcaaaatacaaaaacaccaagagcactcaattttatcaaccaatttgcatcagggcatcaattggcctgtcaaacataagaatctcatgattataatagtaaaggaagaattacaatatagtaaaaatccaaaaataaaccccaatttgatcctttaaggatccatatacatgttcattttaaccacaattgtgataagctcatcccttacctctaagcaggctcactgtgtagtttggcaatgatagcggtgtctctagcgaatcccta

SEQ ID NO: 99435 - DNA, 451 bp, Glycine max
  unsure (1)..(451): unsure at all n locations
agctgctaaggatgctctctgttactcatcntgtatgtataacaacggagaaaactattgttaagaattaaagaacccgatgagagaaaaagaaggaagcttccactccattaacatgtataaatcttccactgacaattaaataaattgaccttgttgtatataagaaatgagactccacacgaatcgcatgaatgtctataatctttggcagccatcatgtaactttcataacttcctgctctaatcggtaaagcatgccattgtcatgtatttttcacatgataagttttttcaccatggtgctctctattctgatatttctttctgtcaaaactttgaataatgccacatgattgaatcaaaatgccacgagcaatcacctaataattgttcttccaagagatgatgctccgatttcactatcagtattctgcatcaatggtcacgt

SEQ ID NO: 99436 - DNA, 452 bp, Glycine max
  unsure (1)..(452): unsure at all n locations
agcttgtcccnccctttaatgatcataccttatgctacttgtgccaatgtgaatttgaaacttgtaccccaatttaagtagagcgaaagcacgggttaatgaggttaatacatatgagcctgtctatcggactaactcatcgatgtcctcccataggtatttggatgatacaacctgaacccacagcttattatggtgatgaagcacatgccaaataagctttccaagaaattccacattctggaaatgagcccttcttactgccagacaaccatcgttcttctccctggtgataatatgccagcttacaagatgaactcttcgctcttgattatcactccaaataaattgcatgcttactcaaaggtattgcatatccgtngaggcacccattgaatgtgcatggcgtaagtggtgatagatgcaaccactaaattcacatgggttactct

SEQ ID NO: 99437 - DNA, 441 bp, Glycine max
  unsure (1)..(441): unsure at all n locations
agctntataactntacaaaatatggagaattatcttgagaagagagaacttgatatttcaaatattagcacgtaggtttgtaacttcaactntttaaagcttcttgtatttataggacttcttcaataaatgattgttgtctctaaatggttagatttattcactggaagcttgtgtctaaaaaagtgttggagcatttaatgcttgcattaaatgcacgtcctctctatgctgagaaaccactttctttagcttcctttcagaataattcagtagaaaaccatgcacttttggtcagagcagttctatcatagtagggataacatgacacgactcttgagattgtttgaactgaaagcgctgaaagttcttatgctccataggactttgatagatcctaagaagaaatattttaagatagttcttacaaaataaatctca

SEQ ID NO: 99438 - DNA, 380 bp, Glycine max
  unsure (1)..(380): unsure at all n locations
agcttatgcatggaaaatgtaattataaaattgagatgcccgataaaacaccatttcttagttaaccatgcattangtaccatgttcaattattttgtttttaagtgaaacgggtttatgaacccaacatggttggctcctaacacatganactaagaatgtagtgtgnnnnttcacgcttcccccttctttgtttgtgttttgttgaggaaaacgccaggatgagcaaacttgnaacaaatggttgcaattttgcagataaaaagtttgtgaaccatatgcatgatgatccatgactcatgcaaaatgtgaggctggaattgataacggacatatgccgatatgtccntatgatgttngaagacangctttgctatctt

SEQ ID NO: 99439 - DNA, 474 bp, Glycine max
cttaagtcacctgcggcatgcaagcttcccttcaacagtgtcatcagggttgttcatgttgatgcactgtagttcaacatcagctacagcttcaacaaaatctaccccacggttactgcaaaacagctcaggctcacccatggtgttggccaccatttcaccagcaaaagggtaatagtataccagagcctgagccagtgcatttttcagtgaccccaacatggttccaaagcaataatatttatcaggcaaaggttttttgtagcagaagaatacactcacgtccactgggggaatgagtagatcaaggtttgatagtggcagccattgctctttcattggaagctctggtaccactatctcctccttggtcacactcacaatgaattctccttctccaaccttaccatcctattttcaggattattagaactgtacgtagctagctaggcttgttaattcacgagtactact

SEQ ID NO: 99440 - DNA, 359 bp, Glycine max
  unsure (1)..(359): unsure at all n locations
tgcagcttggacctttgtntactatcagacatgtacatgtgtcttctctaagacagcccgacagaagcttatccataaaactttgaagaggtaattccaatatgcatctcggctgcttctgtcaactctatacctatcattaatgatgacatctttgcacactttcatatctgttggcctaagatctagcacccctccgactcaatttttgcaaggtcccggagtggaagttgaactttgtttggtaagagaaacatatggtgtgtgctgtggggccagagctaggttatcgatcattccatcttgatgagcccctatttgttgacttgaaatatgctggggtcaaggatgggtacaac

SEQ ID NO: 99441 - DNA, 454 bp, Glycine max
  unsure (1)..(454): unsure at all n locations
agcttcttcctaatggatngaaaagtcgtatcttgtccaccaagaattcctccacagcatcaattctcgaagtgcccaagagatattcatgaaatgcaaaaggtttcctaccatatgtaatctcgtaaggtgtagaccccgaacccacagtccaagacgagttatgagaccactctacccaaggaatgaatcttccccaattccttggtcttccatggacaaacgcacgcaggtactgttcaatcacgcgattgagcacctcagtttgaccatcagtctgcggatggtaagctgagctcattcgcaggacagtgccgcttaatcgaaataaatcctgccaaaaatggctaatgaaaagagggtctctgtctgagactatgctctgatgaaacccatgaagcttgataacgatgtntaagaaaagtgaagctaccatgtgagttgtatgtgaagt

SEQ ID NO: 99442 - DNA, 471 bp, Glycine max
  unsure (1)..(471): unsure at all n locations
ttaagtcaccgcngctgcagcttttatcagctcatttgtggttaatcttcttttnnncatgctattccctagtggatggcgcctcctctcacctcttctcctttgtcttccgctgcatctccatggtggaaaatcaccattaaaggacctcattgaagctcanagatccagcctccatagaagccccacaagcaagcttccatcactatttcttcatgtgtcccgacttcttgcagaagtaataggtaaattcctcatccttcttctatttcttttgctgagaagtcccttccgcatcacccttagtcttcttccttttcttattctgagaggtcgaagtcaagtgagcactttcagttctatctctctgcagcctctccttcttttgcgcacagtgagatataagctcattgagggaaccattttccttctgagtgtttgatgtgccatcattttctcctatttcttaac

SEQ ID NO: 99443 - DNA, 453 bp, Glycine max
  unsure (1)..(453): unsure at all n locations
agcttgccacccagctcgcccatgttagcattgttgcttcctccagaagcaacagccttctggaggaaggatctggaaggcccaagtgggccaaattgctatttgtacccccctttttactaaatgcaccccccttctattttttggtaattctttttccgtaacgttacgaaactttacgaatttcgtaatgatacttatgttccttctgcaaggttacgaatccttacgaattatgtatttactcttttttagctttcaaagaagttacggaaactcacggattgcgcaaaaacacctcttttcgatttccgccacattatggaatttcacggatcgcgcaagcctacttccttntgatttctgacacgtctcgggacttcatttattgtgcaacanaggacaccaagtacctcanagcagctaaccaaaggttgcatgtcatcaactaat

SEQ ID NO: 99444 - DNA, 452 bp, Glycine max
  unsure (1)..(452): unsure at all n locations
agcttggagaggatgcttcaatggatgantagaaagagggagagaaagagagaggggggagcacgaaattgaaggaagaaaaagggagagaagttgaactttgagttgtgtctcacaagactctcattcatcaaagttacaacaagtgttacacatgcttctatttatagactaggtagcttccttgagaaactttcttaagaaaacttccttgagaagtttctttgagaaaacttccttgagaagttagagcttagctacacacacccatctaaaaactaagctcacctccttgagaagctagagcttagctacacacacccatctaanaactaaggttacctccttgacaaaatacatgaaaatacaaaggagaagtccttactacaaagactacttaaaatgccctgaaatacaaggctaataccctatactactagaatggtcaaata

SEQ ID NO: 99445 - DNA, 442 bp, Glycine max
agcttgaggcgagtggaacgaaatttttcttgaatatgcctaagtatcaccaaaatgttttcttctttcttggtcaattctgcctcagatctctcaattttctagattgacccttgcattatcataagattctctttggccttttgaaaaccttctcgagcttgaactaacttatttcggtcctgctctataaaagaatctatctcaacaatatcagtaatgtgttgactatgtaatcgatgagctttgaaggcattgttgaagatattaaggaaagactttatttccttttgaatctcatcaaccaccaagtcattaaactcaaagacctcatttattaactggtgaagttgtgacttgtaatttggattagaaagagattcctcaaagggtaatttgcccatattggtagctcaaaaattgaaccatgattgattatgtc

SEQ ID NO: 99446 - DNA, 437 bp, Glycine max
  unsure (1)..(437): unsure at all n locations
agcttccatcatgtctagtatgattagagatgtgtcaactatgcacaggtatgtaaactaactatcaaaaggaaaatcacatgagtaatgatgtgtaaagacaaatagacaacacgttggtcttcctattangttcctgatgttaaaaggatattctcaactaaacaatgctcatgtgttctatggcgtctcctgaaatgctaaaccccgatttctcattatagtctagcctaatcctgatcaagcatcgtcctcagattcctcttgttggactaaactcgaccagaaccgcattaagacaaacatacaaacaactaggttaccgtaccccgatccctcgtgataatatgataaactagccctgtcctatcattgtttaagaatcagaccagttntcactgttgaatgatcttaacaaagcatacatctacatgatc

SEQ ID NO: 99447 - DNA, 453 bp, Glycine max
  unsure (1)..(453): unsure at all n locations
agcttgaaggtaactatatgccttggttatcctggtaacccaactggccatgaataanaaatctgcacctgtcgccagactttgtggtttatgctcctctgcagaccaccacacagacctttgcccttctgtgcaacaatctgaagcaattgaacagcttgaagcttatgctgcaaacatctacaatagacctcctcaacctcagcagcaaaatcagccacaacagaacaattatgacctctccaacaacaggtacaatctcgggtggaggaatcatcccaaacagcagcaacaacaatcttattttcaaaatgctattgccccaagcagaccatacattcctccaccaatccagcaacaacaacagcaacagccccagaaacagcaaacagttgaggctccttcgcaaccttcccttgaagaaactgtgaggcaaatgactatgcanaacat

SEQ ID NO: 99448 - DNA, 418 bp, Glycine max
  unsure (1)..(418): unsure at all n locations
agctntattaattaattctgcttctaataattaaaataattaaaatatgtagcatatcatatattttagcaatagcaataacaatatcaattagagaagaaaaatataatataatagtaattataaccaattaggggaatttacagctaatacatttattaataggtttgtatattatagcaactagagtgggtgatcggtaccatgtacggataaataatttttttaaaggaattaaaattagttatgtattaagtaatgtagtaatttagataattattataaataatagttcaatcaatataatttaagagtttctagtaacatattatatatatatatatatatatatatatatatatatatatatatatatatatatatatatttgatgaaataatatttttaaattcacaca

SEQ ID NO: 99449 - DNA, 461 bp, Glycine max
  unsure (1)..(461): unsure at all n locations
agcttgtggcatccttganaaaggtgattctttcagttggttgttcttataagacaatcacatctatgataacaaaatgatgatactaatagaatatgttggtagagtttcaaaagttgaacttttctaagtcccacgttatctgaaagaagatccatttttgtttgcttgattacaaaaagaagagtcttttttgtaacttataaaaatatctgtgtttggatgaaaaaatntaaaattctgagaaattntaaattctaagaatttcaaatacttcatatgaaatntttttatttttaaaattttgtggttggataaaaaaaattaaaagtatgaggataaaaaaaatgaatganaaaaaagagaagatatagttggtgtgctagttatacgtgttcctttatgctcacacccgatcaatattttaggagttcagacggtgtttcttggaaaagactata

SEQ ID NO: 99450 - DNA, 348 bp, Glycine max
ccacatataggttaagttattatagattacaaaagatctatgtatgatacgctgagataatttactaatattttgaaattaacacgttatgtcaaaagcatgcataactcataagcacaaggtttaataaacttacagttggtacaatcgagttctagatttcattccataagggaaatcaactaatgaactaagaatgcaattaatttgggacgaaccttaatctttgatatagtggtccaatgtctttgaagaagttcctccaatttctgcaattcttttattgtcaatccttggaactctttcgcattcaactgactgcattaaagatgcatttatggaaaccat

SEQ ID NO: 99451 - DNA, 445 bp, Glycine max
  unsure (1)..(445): unsure at all n locations
nnagctcaatttgagttatttgctccatactctttgtaatcctctgtgaaaatacaagaaagacgactcttgcaattatggcagtattccccccaaatcacaagaaagcaaaacccttaaatttcatacgaataaaatcctcacagagttacaaatccgaacaacagagaaattgaaattaaaaaaaatagaaaaagaaggaagaaactcactgaatattanatcgtggtggaaacggtgtgtgatgccgctgattatttttctatcctctgtttcgtgctacagagagaacacagaagaagtgatttaggtaaggcgaggaatatatggaccaccgaatgcatcctatacgtgtcgaaatatcattggacatactctcctgaataaagtcaacatttaagttgacccaatggttttctgccacatgtcaaatgaggtggacaca

SEQ ID NO: 99452 - DNA, 181 bp, Glycine max
  unsure (1)..(181): unsure at all n locations
agctgctagatntggttcatgacctccgacatcttctctctaatagctgntgctggctccacgcgcgaaagatgtctgcaactctactgcgtccttggttacgcttaaccctgctaagagatgaaatgatcgcggttcactatctctgccgttcctaaactcatcctcccaattatctatc

SEQ ID NO: 99453 - DNA, 232 bp, Glycine max
  unsure (1)..(232): unsure at all n locations
tgtacatggagagctcgcanatgctccaacttatatattgaatcaggaagagtctcaaaggtggaatcacttaaatctaaaacccgtaggcatttgtatcttgctatccatgtatccaaaagagcttcactgtcaacacccactccatcgaccggaaacaatatagttctcactcttctggacttgggaaacaatgcatggctaaatgaatcaatttcaacaattgataaat

SEQ ID NO: 99454 - DNA, 458 bp, Glycine max
  unsure (1)..(458): unsure at all n locations
agctntaagcgtcttnttgctaactatgactacgcanaagaccttacatggcatgcaaatggaaggatttctaatggactggtccgtcatccgactgattgctcacaatggaagaagattgatggtttgtatccggattttgggaaagagccaagaaatcttagacttggcctcgccagtgatggaatgaatccatatggcaccttaagcacgcaacacagttcatggccagttctgctagtaatttacaatttgtctccttggttgtgcatgaagaaaaaatacatgatgttgtctatgatgatatcgggcctaagacagccaggaaatgacattaatgtttatctaagtccgttggttgaagacctgngaaagttgtgggactagggggttgtagtgtttgatgcgtttcgaaaggagacgtttgaaatgcgtgcaattgcttttgtaccattaat

SEQ ID NO: 99455 - DNA, 450 bp, Glycine max
  unsure (1)..(450): unsure at all n locations
agcttgttatgctcacacaagagtcactctctgtttccttcaacatcgnttcgctgagtagcnaacatcgttctaaactgaagtcctttcttctcctgtgttgtaatcccattctcttcactcatgtatgttgagattttttgttnttatttttttatctctttggttaatttcagaaatccaataaggttcatttgattttcgatttcgagcattcgcatgaacttgagtaggtgtcgcgcgcttctcttctctcttttgttctgtacgtttttttaccttattttgtgatgttttatttgtcatgttaaagtgtataggctatatcttattagtttgaaatgtgaggtctaccattacaagtttttacaaaattgataaataattaanaaagaaatatgacatgtgtagagaatggtgctttttggttcatctgacacttatataatc

SEQ ID NO: 99456 - DNA, 458 bp, Glycine max
  unsure (1)..(458): unsure at all n locations
agctntagtaagtgtagttnttcaccttctctctaagccaatctgctggcttagcgagcgtctgctaagtgcaacactcctgggctaagcgtgaggaagactctggaagaagatgagttgtacaggtttgctaagcgcatcacttcatctcactaagcgcaccgcttcagttcatccgctaagcgagaaaggcgcgctaagacaaaaatcactaacatgcgctaagcggtccataagtgcactaagcgcacgagcacgaacaaggtcacctatttaagcctaaaatcagattttagaaggagattttgaactgggattcagagctttgcatgtataaggtttctagagagacaaaggtccaagttctagagagntttgagagattttgttgtgtgaagatctatanagaccacagcttggagcanaagctgggttgagagcttgagatgagttgtgag

SEQ ID NO: 99457 - DNA, 424 bp, Glycine max
agcttggtctcgttctcctccaagaacacatacttcatgtgggtgggtagaatcttcagctccaccttggtcttcacctacaggaatgtttccttcatgatctaagtcttccaagcaagcccttagatccttctcctcttcactggttagacaatccacaacattgatcaaagctttctccatgaagtctgtgtggtttgaagagcaccgacgtcttctttatcgacctcctccaccttgaagcactttctatcttcctctgggtatttaattgcttcaaaaaacattgaaggttaccttttggtctttgacgctcatttccagattatcattccccatatccactacatagttggtagtccacatgaagggtctgcctatgataaaaggaatcttcgtatcttcttctatgtccatgatgaca

SEQ ID NO: 99458 - DNA, 356 bp, Glycine max
agcttattactgcttcttagatggatactctatgtacaattagattgttgtggaccccaaggataaggaaaagatggccttcacgtgcccttttggtgtattttcctacagacggatgccatttgggttatgtaatgcacctaccacatttcagaggtgcatgttggccattttttgtagatatggtggacaaaagtattgaggtattcatggatgacttctccatatttgggccttcatttgaatgctgcttgaagaatttagagatgatgctacaaagatgtgtggaaacaaacctaattctgaactgggagaagtgtcattttatggttcgagaaggcatagtcttgggacac

SEQ ID NO: 99459 - DNA, 451 bp, Glycine max
agcttgcaagtgaagtctaattacttgactttagcacgcatcacacagaatagtttgcactagaatcataaggtacggtcaaaagagtattctttatgaaatatatctcgatacgagtcctcgaactattgaatatcagcattgctaagaacaagaaatcacgaacaaccatactatctatgccattaaggcaaaacaccatactacaagcatatccagaattataaggttcttataataagtatacaacatacatataagaagtaaaaattaaatagttaataaggatgtattaaggaatcacaaacttcaaccactacattcacgactacacacaaaataaagggagttaagtagtcatgcatttacacatcaagaaagacacactcatccaagacatatatatgggtcaaagggttccacaacactaatccacacatcaagatagaaa

SEQ ID NO: 99460 - DNA, 370 bp, Glycine max
agcttcttgatcatccaccatgatatgagttcttctttttccttaccacctcaaattacaattccttttaaaactgagcatattatagggcgcgtgtctaatcagatcagatcacctttaaactttcatcaagaatattacttgagtgaattcaaacaaattattagtcatgtgcactttcttagagacaattattgttggagatcaacgttggacactagctatataactaaaaatgtgtataagtagagacaattcagtgaactagtctttaaagttaaattaagcttaaatccagatcttaagcatatcttagtatctgtccttgaacttatgtcatctattaattggagcacttaaccgattttaa

SEQ ID NO: 99461 - DNA, 458 bp, Glycine max
  unsure (1)..(458): unsure at all n locations
agcttgcctgacaaggtaacctctgacgtctgataatggaccaaagcatcnaccttgtaaatagtgacaacactcacccttaggacgtcatttgcataagtcacattgtgtatgcaagatgagttggcatacacttttcctaatgccactaacatagtagtctgatcttctactacgtacaagcctattatgtcgacaccaacatcagaagggtctttatgtacgccttttgtctttggtgcagtgcaactacccttagtgctaacccgtgtagccaaaacctaaaaatctggcgactctgccggtgctggctgatgtgacgcaatgagacaactcanacttgattgacgcttctagttattgcttcattatctgcaaattgcgtatctgctcggcttcaaattccctcttccatgactccttcagatgctngtcttctttctcaacctctcttcgta

SEQ ID NO: 99462 - DNA, 239 bp, Glycine max
atgagggttcatgagagaaagggagatcttcacggccctcgaagtgcgtagaggagcccctcttctcacacactgttttgctgaccatctcttcctatgtcgcacggctaatgttaaataagatgatatccttcaccagcttctcggtgcttttgagaaagcctcatgtcgttccatcatcttgcagaaatctgaattttgttagcagaaacacaccacccagcattcagcaacaaatc

SEQ ID NO: 99463 - DNA, 434 bp, Glycine max
  unsure (1)..(434): unsure at all n locations
agcttntacatgcatgtgcacaccatatatactattctttgatcaactgatacaatctagttgattgaaaagataattatactactcttctaatgtagtggacaactaatattaaataatataatagaagatactgctaaagccatttcaatcaagtaattntgaatctcaccattactatcacgcatgtcaaagagaaggagaatcatacatcgttatgcgtaacacaacaaaacatttaaagaaaacatgcttcctatagccaaccaaggtaaaaatgtattcatatttcgtgaactctttcaaaattataagacacatataaccatatataaaaacatggtggaacaatctgaccacatgcactacacagaccacacattatttaagaaaataatttgtaggaaaaatataatgcactgctataacaccgt

SEQ ID NO: 99464 - DNA, 407 bp, Glycine max
  unsure (1)..(407): unsure at all n locations
gaatctacgcagctgcagcttgaagcatattctttaagtgaggcagactcctttatttctgcatctcanattctctaacaagattcagggcttgcattcccttaatcctttcatctccttcatattcattcttgaggaaactccagatttcatatgctgatttgatggtcattattctagtgaaaatttcttttgagacaacaacaaataaagaagctcttgcctttgactttcttgctctcctctccttttgatttgttatctgagccattgttggattggttggtaaaggaagaactttgtagtcttcctcaactgcttcccagagatcatttgcctacaaatgtgcctccattcttgctgcccagatatgataattatcaccatcaaacacacgtggtgctagt

SEQ ID NO: 99465 - DNA, 434 bp, Glycine max
agcttgaccaatcccgacccaactctggcttttctgtcagtgagaacctgtgatgtacctaagcaggcgagctcctggcagtcaacagattaaaggaacaaagaccacaaagcaaggaggcttgtggtggctggccagctgtgaaacttgactgatatgtgagatatgatctctggtaatcgattaccaagggtgggtaatcgattacaaggcttaaaaatgaagacaggaggctaagatggtctctggtaatcgattaccaaggggtgtaatcgattaccaagcttgaaaacgaagtcaggaaacttatggagcctctggtaaatcgataccaccctgtgtaatcgattacacaaagggatgggtcactggttatcgaataccacgcatgtgttatcgattacacagtgcattattgcataattcatgttctg

SEQ ID NO: 99466 - DNA, 409 bp, Glycine max
  unsure (1)..(409): unsure at all n locations
agctngatcacaacanagactatacattctagtccactcaattcatacaactctcattcatttcaaacacaaccattcatttcaaacaaaacacaccactgaatgtcaaattcaaccagttcactgttcaaacaagctttttgtgcaagcaaacaacactaaaataactggaatttaaatgactaaaatttaaatacctaaaattaaataactgaaacataaagcataaactaaataaactgatcaaaataaactgttcaaaatgcaagacaagaagataaagatattgtcagtcctcctgcgggtgatcctctgcatgctcattaagatccaacatcggagcagctggtggatcctgcacagtaggctgctctagctccaatgctggtgcaaatggctgggaatcctc

SEQ ID NO: 99467 - DNA, 444 bp, Glycine max
  unsure (1)..(444): unsure at all n locations
agctngcatttggaattgcgaaagccccactctcatcattaggattagtacctgacatctcaaacaaacaaatcaaacgtaacaagacaattataggtgctgtttgaatacctcacccactcaagtgtatcacacaattatggcttttctctaatgaaacactcttgccttttaccactctaattccccttgagttcttaggcaattcaagagattatggccacaacaaagaacaattcaccaatatgtgtaaggtaaggctagagagacaaggaataggtttaccaagaaaaaggcttacaatggttttaggcacaaatgaaggaaataaaattcagaatttaaggaatcaagtaacaatccttcatgcaaccaatatattatcttaaagaagattattttaaaggtcttctagcatgaccattcagcccatttttttttttt

SEQ ID NO: 99468 - DNA, 371 bp, Glycine max
  unsure (1)..(371): unsure at all n locations
agcttgtaagataatagngtgcccatcatttctgcatctatggggcggacgggcgtatgtgcacacacattattactccttcactatgcccacattatcgcatcattcactgatgaccctcttcgactgagctcacatgctcccacatacaccatatgctctcttatataaatgccgggtacacatcttatctccaatgcttgccaacatgctcatgacacaggcctcgaactattctatctatcgcactcgagcaatagcataacctaggcaaaacactctgctcaaacacgaagatgaatcactacttattctactccaagaccacaatctccattccttcgatccgatataatgaccctaggatctac

SEQ ID NO: 99469 - DNA, 414 bp, Glycine max
ttcaggcacctgcagctgcaacttaagctcatttatcttttgttgttttatgaacatactctgacttctttaggacataaactacgcctctgatagagagaaaacatccatagcatcaaagaaacagttatcattgttgtcacaactaccatctccctgatcatgaaatgcatcgtcaccacgatcaacatcttcttgagctgcttcttttagaagaagccaatggccgggtggtattcttaagcgaagtgtggtgccatcttgagtgttatcactcctctcaattcttttggcttgccaggtgctttcttccaagaaaatggaaccctttcacttgtattatggattggaccaactgaatatgatgagcaagaagtatctgcgacatttggactaccgagacccctcgttgac

SEQ ID NO: 99470 - DNA, 140 bp, Glycine max
  unsure (1)..(140): unsure at all n locations
ctgcagctttaaggagttatcttatttttatatgggncggagggagctctacttctcaagaagcttctcaagacgtagcttatttttagagggtgtgtgtgctaatctctacttgtcaggagttttctcaacaaacttat

SEQ ID NO: 99471 - DNA, 307 bp, Glycine max
  unsure (1)..(307): unsure at all n locations
agcttgccttcattaacatcttattgggtttattcgtattaccttagaaccaagtcgactatcaaaaagttacttggctcaacccgactattgtatcttttctcaacccctttctagtacaacttaactctcatgtggacttacttggaggtctctttatccagattgagtgcctcactaggcatctcattattttcctcctcaacaaagtttatgttttggagagatggtactccgacttctactggtatcatggcatctaaaccatgtgagagttcanaaggggtctcgcccattgatgattgtg

SEQ ID NO: 99472 - DNA, 461 bp, Glycine max
  unsure (1)..(461): unsure at all n locations
gcaagcttgtaaccttaccaaatcaggcacattctagattacttgtgacagcaatcctcactgctttggtggaaataccttggccccatacttggcaactatggcatagtcaatatcaaccctacacctgtcatctcctgttccaggagacacagacacaaacccgctggttacattgtcaacgcatatggaacgagtccatggatgaagactgcacagatctctaatgacacacagcgcttgctctctccaaacagaagtgtcccatcgagtgtgaaatcatatacatcgctcaattttaatgttcgcaaggagatatgcgacacgccattgccataccatgtgatttttctcgtatgttgtagacttaacanacttcgtattatttctgatcatctatattaaatattgtactcatcgatatgtatctcacagatggatcgtaatacatatctcaacac

SEQ ID NO: 99473 - DNA, 457 bp, Glycine max
  unsure (1)..(457): unsure at all n locations
agctntanngatatgtaattatatnnnaagatatctatgttatttngttttggcccttttattgccttagtaccatccttttgcattatctcatattgattttttttgtttcttcattctgtattagatatgacagtgactggaaaaaggttgaagcatttgttgtatcaaagacagtcatccatgtaatttcaaatgcaagttgtgactggatatntacattagctgttgtttctgggttgttatccataaatgttgtggattgaattangcatcttatagttattgaagtgtgtntgattatgttacattaagtattttggcactttccanataaagaattggttattggcatgaaatgccaaaaaaaagaacatttcaggacatgaagtgcttccattagtcaattcacctattttggtgtccctangtggcttggtgaattcattctataaat

SEQ ID NO: 99474 - DNA, 456 bp, Glycine max
  unsure (1)..(456): unsure at all n locations
agctnnttaaaaaatgaagataaaataaaatagtgtgataatatatagatgtctaaattatttaatacgaaatattcaaaatataaaataaaagtttcttgcccgtagaacaattctatttaattcaaataagagtacatttaatagaagatacacaccatttaaacaaaaacaaaaatttatagatggacaattagaaactaaggaagctatagctagctaagctactacatattaataaagaacaaaacactacaagaaaaggaaataattaaaaaaggtagataaagaaaaaagtgaggtgaatgtttcaaattatgtgcggttccaggcttgcaaaccaatcctccagaaaggaattgttgagaaaaagtaatgggtttccttcaaagccaaccaaataaataaaagtttcttgtccgacagcaaaaatagtgggttctctctctcgttgga

SEQ ID NO: 99475 - DNA, 427 bp, Glycine max
  unsure (1)..(427): unsure at all n locations
gctgcagcttgcatatacatcatttctttctacataaaaaaagttgaaagtcactgaaattggaatatatattcaatctagaacaaaaatagtgttcattacaaatttcaatcaagacctgttcgatagagtgtctgtcctctgtaagatgcccactgacgaattaactccttatcttcttcaagataatcactttttactcgttcattgaaattggcccattcatctacagtacattaatgacatacagtaaatgagtgcacatgtactaaagaagggtagaaatgtatggaagcatataaaatactcaccangatatatctttttcaggtagaataaaattgatattccatcctcattntccttattgagttcctcatcagaatataaaacatcttctttgaaatagggtgtcagaacactgaag

SEQ ID NO: 99476 - DNA, 485 bp, Glycine max
  unsure (1)..(485): unsure at all n locations
gatcttaactcgcctgcggcatgcaagcttctttgagagaatntccttgagaagctctagcttagctacacacactcctctaataactaagctcacctccttgagaagcttccttgagaagattcctaaagaagctagagcttagctacacacaccccctataatagctaagctcacccccatgccaaaatacatgaaaatataaaaaaaaaagtccctattacaaagactactcaaaataccttgaaatacaaggctaaaaccctatactactagaatggccaaaatacaaggcctaaaagaaggaaaaaccaattctaacatttacaaagaagagtgaatccaaccttgacccatgggctcaaaaatctaccctaaggttcatgagaaccctagggccttctttagtagctctagcccaatcctcttgcagtgttctatccaatacccttgggggtagggatggcatcgctnctccaccttgg

SEQ ID NO: 99477 - DNA, 309 bp, Glycine max
agcttggattgtaagaaatgacaataagctattgaatctaaaatggaatcaatgaagatcaacaaagtatggactaacttcaaaggatataaaaccaattggttgtaaatgggtttacaagaaaaggattggagttaattggaaggtcgagacctacaaagcttgtctagttgccaattaatatcatcaaaaggaaaatatagattatgacataactttttctcttgtggcaatgctcatatcaatttagattcttcttgctataacaacatactatgatcatgaaatatgaaaaatggatgtggaaaa

SEQ ID NO: 99478 - DNA, 373 bp, Glycine max
  unsure (1)..(373): unsure at all n locations
agcttganaaccacgtaaagcacaatctactgctacaacataatgaaaccccactttacaatcctgatggatacttttatatgggtaggcgagtggacaaaatgaccctattatttgataagaacctttggacaatgcctccgctctgattaacagcttaataagaagagcaaccaactaatggagagctcataccttgtgaactggcagcgtacaaagctttgagctttgagcacccacgactgttccaagagcattctacggttttcttacacccacagaaccaacaacaatgtgtggatgtcttgaacttttcttcgatacgacgttctgcgggttccagcgtgagggttccgacaatattgaaatgaat

SEQ ID NO: 99479 - DNA, 372 bp, Glycine max
gcttggaaggattgtctcttcatgctttactcttatgagtgggatgtgggataactggtgtattgagggttgcatcataaactccatccatacatgtgtgcgtcatgcatgcatcatgatgagtgagaataacaggtctgtggctagaaaacttcttcactgtggaaagctctatgttttaatcgattacaagcatgatcgtaatctgttacacaagtgcctgtagcttgcagagaagtttctcatattggcttaatcgattaccacggagaccgtgtccattacaccgttcagatgagacaatgattggctttttatgagtctctacttttatcgattgccaggagatcctaatcgattacttgtcttttc

SEQ ID NO: 99480 - DNA, 388 bp, Glycine max
agcttgtgatgacgttatatctgacttaattattatcgaggtgaatcttccagttttcgtaagaaaggattcttttctgaattatctaattacagcaataatttttttgttagaataaagtatcaatgtctacgttaagtttaatcgagcgagccaacagatttttgttttatttttatcattcacaccatatgtaatccgaagtaatacattgttttttatagaaagaaaatctgaacgtgaagtttaagcgtattaattcttgtaattaggttgtctactttgaagttattttaattatgtctaattattttcaagccctcgttgatggttttttaggccttacaaatatttacctgatatccttctagttgtgtatgttacaatg

SEQ ID NO: 99481 - DNA, 262 bp, Glycine max
  unsure (1)..(262): unsure at all n locations
ttacagagcgatgcttataaattccctgacatgatcatggggagtgattgctgatgtaataggcctgcctacatcctgtctgggttgtctacccatccctgattttccnnttcagcgcttttcttttgagacaacgtgcgtatatcatgattgtgtcaaaaatgtgacgggatcagatcaaaaatcctttgtttacttgtatgatcaccttagggtgctctattgccacttgcatcatggtgacataattctatgcttcctt

SEQ ID NO: 99482 - DNA, 442 bp, Glycine max
  unsure (1)..(442): unsure at all n locations
cacctgcggcatgcagcctgtaaaaaaagncatattggataaaatatttaactgagcttctaaggttgaaaattggcctcttttctcactatgacattcctacaatggttaatgatcacatctgaaagttaaaaaataaaataaaattaacaattcaaatttctaatctcaaaatatataaattaaacttatttcaatatcttttgagaaatatgaagagttacatgctcaattaaccatatatatgtgttatacgtataaatcatatttaatgatatgctatcgatctgatagtttttntttttttttggagaagtctgatagatttagtaaccatttgtctcgaaaaattatgccaacctaactatgtggccggctataaatgaataattattcattcagcgaaaaaaatgaataattattgggaagatattcttttata

SEQ ID NO: 99483 - DNA, 425 bp, Glycine max
  unsure (1)..(425): unsure at all n locations
gtaactgctctaatacaattgtttatatgggcccatccctccttagcgataagtccaacagctcttatacagcatttggtccatgacatagatgttctttaacgtatntgtacgtctctccgattattatcattcaactaatttctgaaaattgtcagncttggattattctagttagacattttgaatacgaatcatagcggcaatcataaccaaaaggagtagtaatactaatactacttctgctcagttgtagaaaaatattacctcaatacttataaaagagcttaatctcttttattctttgactgaaagctaagctcctttttagcatgaccatatccattttcctaactgtaaaagatatttataaatattattgttacgttgcccataacctatacatgccttccatgcctttatgg

SEQ ID NO: 99484 - DNA, 356 bp, Glycine max
tggatcttaaataggggccttaaacagtgttgaactggtggctgaatctaaaacgtagaggggaatcgcaataaaagggagggagaaataaaagggacttccaatgacataagacatacgctgtttttttactagaggaacgagaatgacgattattttcacataaaatctttgcattttcattccctacttatccattgtacatttaaaacgtcctccaaatcgtctggatgtactctaaataaatcactctccttattcaaaatatcaccgggacattctagatgttattatatctcttagatatcgcataaaaagattttatagtgctattattactgcataaaacatctact

SEQ ID NO: 99485 - DNA, 482 bp, Glycine max
  unsure (1)..(482): unsure at all n locations
actaagctcgtatgacctgttggtgcataaattatgtgtncatatattgtatgagttgtttcactaatccaagatcaagtcccaacagttctataataaagctattctaagatggtcaaaaataggatacaacgacagtcgttgaatcccatgttgtggaaacttaaaactttcaacaacgggtcaaaaaacaccatcttaaaaagcgaggaactttcaaagatggtgcttacgtaagcaccggctatgaaagttagcattttaagatggtatttacgtaagcaccgtcttataaacgtaagcaccatctttgatagctagcattttaagacggtgtttacgtaagcaacgtcttataaaattactttcaagacagtgcttattaagcacggtacaccatctttgaataaaactatatacatattgaatttatttgcttactatccttccacaacatttattattatcataattatatttct

SEQ ID NO: 99486 - DNA, 452 bp, Glycine max
  unsure (1)..(452): unsure at all n locations
ctgaaagtttttctgcacatcttttctccctcctgaccgatcttgtgcggctctgccgctggttcgggttcttctcttctcttccttcacaaatttccttcagctctgccatcatttctatttctttttatgcttcctgcatcttaatttcatttacagtttacttctcctctcccctcacaaattctgctctgcaccgccgccatttctatttcttttatgttttgtacatttgatattttcccagattctggtcggctccgccattcgttctggtccttttatgctgttttcattttaagtttattctagtactcgtttaacggcgcatgcattttagtttcattcttactttctattngtccgtttgatctcttacgcctgatctcttgctcatatatatatatatatatatatatatatatatatatttatatatatgtacatatata

SEQ ID NO: 99487 - DNA, 484 bp, Glycine max
  unsure (1)..(484): unsure at all n locations
cactctcaatactcaagcttgtgcattctatattctgatgaggggtggccatatgntctcattactagtctaattcattagctgcccaagattcatggtcttgcatgtgaagatcctcataagcatcttaaggagttccatattgattgttccaccatgaagccccctgatgtccaagaagatcatatctttctaaaagcttttcctcattctctggaaggagtggcaaaagattggctatactaccttgctcctatgtccattttcactccggatgacctttagaaggtgttcttggagaaattcttccctgcatctaagaccactgccatcacataagacatttcatgcatcaagcaacttattggagagagcttgtattattatttggatagattcaagatatagtgtgcaagctgtcctcaccaccatattgctgagcaacttcttcttcaattattctatgatggacttatcaacatgg

SEQ ID NO: 99488 - DNA, 462 bp, Glycine max
  unsure (1)..(462): unsure at all n locations
agcttcttacataacaaacaaaaccattcaacttctttgttcctaggacaaataacaaggaatggccaatgacccctacattggagaacaatagttagtgataatgcaaatattatttaaatgcattagttaaatnttacttatccattcaagtatgttcctaggaaatctctctttgttattgattcaaccatgtttcaatgtaaagttgacattcatcgcatccatcctttgcattgtgtatggactgaggcaaggaatccatacacaaaaccatgacccaagtttattgacaacttatttggaaaaccgttaatcatattacaagtaattagttaatgaattaaccttgaaataaaatatacttacatcatccacaactgcaatatagagatgtcaaacattggtggtttagaatatttatttacatcacttagcttattgaacaagggaatcatcatt

SEQ ID NO: 99489 - DNA, 424 bp, Glycine max
  unsure (1)..(424): unsure at all n locations
cacaactctcgtaaatgggagagaaatgttcatctaaagcatacaagtccctaatattatcacattctaaaatttgagcttctaaggagcaaaacaatgtgtgtctcctatagagggcatcagctaccacatttgtntttccctcttttgtatttgataacatatggaaattgctctagatattctacccaatttgcatgcctcttgttaacttgttngccctctaatgtacttaattgaatgatgatcactatgaatgacaaattcctttggaacaacgtaatgttcccaagtctggaaggctcttattaaggcatanatctctttatcatatgtggggtaattgagggtggcactatgaaagttttcactctaaataagcaatatggtgcccaccttgtaacaatacagctccaactcccac

SEQ ID NO: 99490 - DNA, 439 bp, Glycine max
  unsure (1)..(439): unsure at all n locations
agcttgaagtatttattggtataatatgcctgttctcatttgctcttaangnctttaaagggtacttcctcgttgacatcttttgttttgaatggaattgccatgaccatgtttgttgtactgtctttgatattcggcagatgatattgtgttgcgggaggtaattctgattggattaactcaccatccttcacttgccaatttgttataacatttgttgttggatcacctatgatgtctttgttccaagggtaatctatatcctttccgatggcctaagcatgaaaccattcaaagataagacattaatttgactctttcgacaattcgtagacttgacttgatttgtttatgttgtaccctgtaatgttggaaaacatttctttgaggttattctcagaaatanaatcttctaaggtttcttacatgctaagttgca

SEQ ID NO: 99491 - DNA, 454 bp, Glycine max
  unsure (1)..(454): unsure at all n locations
actaagcctggaggcgtgttcccggcagcattgaaagatgcaatgaattcttctttatccttgaatatcagtaaacgatattgcttctctgcagcatccttatataccttcccatatatcttcatccactgctcatgtctttcggacatggatgcctcatggagagtgcgggacattacttgggaagtgcagattgagagaaggagcacaagagcctaaatgtgctgctttttgcccatggaacccatgctctttctcaacaatgtatcaatcttgattaatagtttgtatattgagtattgtgtttggacattaagtaattggtgtgctctgaatgcaatgtntcgaatggtatatatatgagtgagaacttttttaaccagaatcagaatgaagttttgtttctatctgacgaccccaactatgtaagtgtgctgtgacaaaatatatatct

SEQ ID NO: 99492 - DNA, 401 bp, Glycine max
  unsure (1)..(401): unsure at all n locations
gtcaccgcggctgcagcttncattctctcgagatattatttgttttgtttcttaacttgagaatcctcattgcttccttctccttttcctttagaatctttaccatgaatgtgcatttcttcctaagaatgtgagatgtcatctagaatatcctttcttggaagaatagcattagactcatcaaaagaaacatgaatagattcttcaatagtcatagttcttttgttatatattttatatgctttactctgccatgaatatccaagaaagataccttcatcagacttagcatcaaatnttcctgaatcgtcttttccatgtgttaacacatttgcaaccaaatacatgaagatgtgaaatgttggggtgtctatcattanacaattcatatggagttttct

SEQ ID NO: 99493 - DNA, 330 bp, Glycine max
taaaggatccccacatattccagacacaatgcaaatgagattggaacttatgcaaactggcatgcatgccctatgtggacctaagtgcaaattttatggcatgtgagctaggctaagattcatcctcatttagtcacccaagttccaaaatgttttttatcatttggcatcttcgagccatttggcgtcgggaaatcacagcgtcacctccggtgtccaatttttcaaaaccactatatcgcgatttcaaagaaagtggagtcatctttttaaagctgttggtttagcaacactatttctttctttgctcctttctactgcttctttcct

SEQ ID NO: 99494 - DNA, 432 bp, Glycine max
  unsure (1)..(432): unsure at all n locations
agctttcttgagaaccttccttgagaagcttctttgagaatacttccttgagaagctagagcttanctacacacacccctctcataactaagctcacctccttgagaagcttctttaagaagattcctaaagaagctagagcttagctacacatacctctctaatagctaagctcacctccttgagatgagaagctagagcttagctacacaccctctataatagctaagctcacccccatgacaaaaaaaacatganaatacaaaaaaaagtccttactacaaagactactcaaaatgccccgaaatacaatgctaaaaccctatactattagaatggccaaaatacaaggcccaaacgaagaanaaacctattctaatatttacaaaggatagcgggtcatgcttagcccatgggctcgaaatctaccct

SEQ ID NO: 99495 - DNA, 472 bp, Glycine max
  unsure (1)..(472): unsure at all n locations
taagcttagaccagggcactcaanatctaggtatctaaaacccctctatctagtggatatcaagggttaagaagtgaaaatgagaatggggtaaatatggagcaaactctcacctcacacaagtctataacattaatctaaacttgctcaaactggttttacacctaaaattccaccgaatcaaaatgtgactcctcaacacccaattttaccctagaaatgacccttgttatcactatggtcactcatactcctcatttgcacagtctaagctttctcttaagtcctaaatgacatttcaaactaggattaactcactttaacccccaattaccactgaattcagatttagccttccaactctcaaagcctcactctttttccactcataacaccacattctcactttcttacactanggttactctacccttctctctagcagtgttcataatcaattcagcacacaaca

SEQ ID NO: 99496 - DNA, 355 bp, Glycine max
  unsure (1)..(355): unsure at all n locations
agctntactcgatgtgatacaaaacagtctgacacaatttagtggaaatattatgtaaactacataataagttggtaccgcacatgaccccaataataatctcccatctaaagcatgagacggagtagagatagataaaaaaaaaaaagaagcaataattcacaagagttgctcctcaacggccaattcctcaatcatgttgccatggttgagagggttgaaggcttgaatctcggaacactcgttaggtaggatcatagagccaacaaggccttgctcaagagagtgatataatttacgtgctatgacaaccgagttgatgacctcatcggaggggtgggacacagagagaacc

SEQ ID NO: 99497 - DNA, 438 bp, Glycine max
  unsure (1)..(438): unsure at all n locations
gcttgttcatagagttctcagatatctttccaatatatagaagcgaagttagcatattatgtttctttcttggaattggtggtaatacacggaggtccgaaggaataatatctacaacaaggcaagttgtatcatccttgaggcctcttgaccttagagcttcctggaaaaaaagaacaaaacaatgaatgtactaaatcacgaacatccattcctagcacgggaagaatgccagaactaatcatcaccttaaccactagttntgcagcaagctctgcaggtagaccccgacaagacttagcagccatatcagatgataaagcatcccaaataccatcagaagctataataagccttccaccagcatttgatagctgagaaatcaatagacaaatgtntaagagcagtgaaacttataactaatagctttacataaac

SEQ ID NO: 99498 - DNA, 369 bp, Glycine max
  unsure (1)..(369): unsure at all n locations
tgcaagcttgtgatggtganatatatatatatatatatacaaaaaagaaaagaaaaccccctgaggttcgcacttgcacatttgagaagaaaactcattggaccaaaagctcatgggaaaagcccgaagacaattgcgatagtagggtgcatttgatgatagtcgctcatgcagactccttatgatttctttngaatccaagggatggcctttgtatataaattctttcatgatcagcccatgtcataaagtttcagcgggatcgatagaccaatggcatcactctatgaccttaaatcaagaaagtttcacttggtcatataccanagtgtaacaatccattgtcattcttcaacggtgcatgcgatc

SEQ ID NO: 99499 - DNA, 411 bp, Glycine max
  unsure (1)..(411): unsure at all n locations
tgtagaagtccttctgattctatttatgcatttctgacttttggcttgagatgaagttcaaagattggacctcttgctagttnttattgatgaatagcttaaacacttgtgcttgaatgaaacaaaagttttgagactgtggtttaagctgctttccttgatatatgtcttatgcctaacttcatctaattgtacaggttacattttattcttctctttgaacaactgcatgctttgtgaaagacaagtgatgagggcattttggttcatccttttatcatgcaatcaatcaaaactgtaaatttgggggagttcttagtcgatgaatacgactaactnttgtgtataaaacctgtgtaaattgtatcaaaatcctccaatctatgggtattttgtagtgtcgtaattact

SEQ ID NO: 99500 - DNA, 377 bp, Glycine max
agcttatagtatgaattgtgctacatttataacatttgaaaataagatgaaaaaatgaaattaaacttcgtgagaccaaaatgaacgccccatatgttttcaatttcattgatctaattgttttcatgcatgtataatcttgtgtgaaaaattatgatagagttttggattctatttttcttttggtcttccactcaattgaattttaaattgcacgatttaatatctagtaataaaaacattgactacaatatttatggttgatacatattttggttaagaactatcaggtacagtacatttttagtagttgactagaaaggtaaaaagatggaagctaagtcatatttttttttttcaattaagcaaatatatgc

SEQ ID NO: 99501 - DNA, 461 bp, Glycine max
  unsure (1)..(461): unsure at all n locations
gctggaatcatttatcctatctcccaaagtcaatgagtgagtctcgtccaggtagttccgaagaaaaccggcctcatcgtgataaaaaatgagaagagttgattcctactcgggtgcagaacagttggagagtctgcattgactataggaggctgaaccaggttaccaaaaaggaccattttcccctgccattcattgaccagatgcttgaacgcctggcaggtaaatctcactactatttccttgatggtttttctggttatatgcaaatcactattgctcttgaggatcaggaaaagaccacattcacctaccccttcgacacttttgcctataggaggatgcctttcagcctgtgcaatgcccctggtacattccagcggtgcatgattaagtattttagtgattttntagaaaattgcgtagaggtgttatggatgattcactgatatggatctctt

SEQ ID NO: 99502 - DNA, 437 bp, Glycine max
  unsure (1)..(437): unsure at all n locations
cacctgcggcatgcaagcttgtcatcgtgagacatcagaggctaggattttaatatttgtgggtaagaaacattcaccaaattgatagagaaaaatctaaaatcatacatcttatgcaaataaggcatgctagcccccaacattattgcattttgattccatctttagacattcaaaattgtgtttatttttcctgttatcttttcctttgccttagtctaaatttcaaacttacaattcggnatctctttcttcttttgtttctcctcatttcttaataattggatttgcatcacttaagtacaaccaaagtccctctggatttaattgttgaacttcaatttcaatctttactacttgtgataaaattangacacttgtcaatctattaaacaagttttggcgttgttgatggggactnntggtttcgtacttgg

SEQ ID NO: 99503 - DNA, 470 bp, Glycine max
  unsure (1)..(470): unsure at all n locations
ttcagatgtgttatgaaatattaaatttgnttacaagcaagacttatgagttcaaccatactgtaccataagtattaagtagacttctgactaaaaacaaaagaagtactggagtaatgagacaagtttaaaataataaatgtgaagtttaaaatggagtgtatgagatgggaagaagaaaaaaaataaagaaagaagaagttagaatatggtaagtgtgataaatgatgagatggaaaaagaagatagatattaagaaaatgggttgaagttcatgggttggattcaaatatgtttatgataaaaatcaaatgtgaatacataatatttaattggatcagatcgattcaagttctaaaaaaaaaatcagctaaagtctaatatgtgttgtcacattgaaaaataaatctaaaaattgaaccaattgtaattgggttggttcaaatttgaagttgaagcatattaatgat

SEQ ID NO: 99504 - DNA, 443 bp, Glycine max
tggatggatgttctagccttattttggcttacctattctatgaaaatttaattatactacactggtttactattttacaaactacaccaatattgatatgaaaattaatttttttacttttcattagtgcattttttgccatatttattttttgagaaaatgtgaacccaatttttatggacaaagattattcttttgcaatattttggtattgtataaccaacaatgtagtttgataggagggtatgtaatggttaaaatgggcctatttttaataatggttaaattaacaattgttgtgctgcttttgaaggtttctacctgattagtttgtttttaaaattaatttttccaattaaaccaaatttgtataatgtttcaactcaattagtacacaacaaattttgtaaattaattgagaactcttagggagaatataatgt

SEQ ID NO: 99505 - DNA, 381 bp, Glycine max
  unsure (1)..(381): unsure at all n locations
atactcagcttganaaccccgacccaacccgggcatagtcggtcagtgagaacctgtgatgtaccttaacaagcgagctcctggcagtctacagatgaaatgaacaaagaccacacaaccatgaggcttgtggtggttggccagctgtgaaacttgattgatatgtgggttatggcctctggtaatcgattaccaagggtgggtaatcgattactaggcttaataatgaagacagggggctaagatggtctcttgtaatcgattaccatgggatgtaatcgattaccatgcttgaacacgaggtcaggaagcttaggaaccctctggtaatcgattaccaacgggtgtaatcgattaccaggcttaaaaatggaactggga

SEQ ID NO: 99506 - DNA, 468 bp, Glycine max
  unsure (1)..(468): unsure at all n locations
tttgctggcaaattatcattctgcattgataaattataagcctgaggaaaatggagagaataagaagaatggaggaacccatgttgtgactgtcgttcatatatggccaaatnttccaccagctcaacaatgtcactactctgccaatatcagcccttctcattatccaccaccctattagccaagaacacccaatcatgcacaaaggccaccccatatcagccactaagtctgcctgccgcacattcgataccagacaccacctctatcatgaaccataacaccaaccagggaaggaatttttatcaaagaagcctgtataatacaccccaattctggtgtcgtatgctaactaactcccatatctactcattaatgcaatggtagccataacctcagccaaggttccttaacctccatttttctgagaattcaactcgaacgctacatgtgcttatcatggaggag

SEQ ID NO: 99507 - DNA, 376 bp, Glycine max
  unsure (1)..(376): unsure at all n locations
acagcacctggagcagcagttcttcctccagcttccaagaaagcttcaagccttcgactgccttcaccaaagattggtttttttgatggggtgagttttgctttgtttatattcaatgtagctagtaaccgtgtgggttagtggttggttagtaccactttcttggaaaagtatacaaatttcatatcattatgactttggtcacacactatttagtgggttttccaggtggaatatgtgcttcagcaacttatgatattttacttttcctttgtctntggtgatctctctactacactgcatttgttgtgcatgtgaagcccttattgcgcactccacatgggtctattgtacctggtggcttgccaaaacatgg

SEQ ID NO: 99508 - DNA, 178 bp, Glycine max
ccattgagcaccattggcatgaggaatggtgattgaaacgggaggtcaagaatttctagtgaaagatatccatcattggctgagaatggtctgccttatcgctgtttctctgaaggatctttgccactcttccatgaactttatctttgtgtcagattaatggaatgatatatttgcg

SEQ ID NO: 99509 - DNA, 389 bp, Glycine max
  unsure (1)..(389): unsure at all n locations
agatggagccaaacccagtcgccctcattaagaactaactcttttcttcctctgttgcctttagttgaatacacctttgtttggttctctatttggttcttaaccctctcatgcaacttctttacaaattctgacctagattccccttctttatgtataaaagaagtgtccagtgggaggggaatgaggtctaatggtgttaggggattgaacccatagacaacctcaaaagtggactgcctggtggttctatgaacccnccctgttgtaggcaaattctacatgaggaagatactcatcccanaacttatggttgcctttcaaaagagcccttanaagtgtggatanagacctattcactacctctgnttgcccatcagtttgtggat

SEQ ID NO: 99510 - DNA, 398 bp, Glycine max
  unsure (1)..(398): unsure at all n locations
ggctctanantacattgaggtttgtattgatgggaggaggttatatgccattnttgctntaagagtaacgtcccactggtaaaactaactttccaaatgtttgccttcgcaagaatggccccgaggaagcttgcctcatagaggtccaggaaggacaaggcggccgaaggaactatttccgccccggagtacgacagtcaccgctttatgagcgttgtacaccancagcgcttcgaagccatcaaaggatggtcgtttctccgggagcgacgcgtccagctcatggacgacgagtatactgattttcatgaggaaatatggcgccggcggtgggcaccactggttacttctatggacaagtttgatccagaaatagtccttgaattttatgccaatgc

SEQ ID NO: 99511 - DNA, 374 bp, Glycine max
  unsure (1)..(374): unsure at all n locations
agcttgtnatagtcttagatataggtgtgagatttatttcttgagcggaatccctcttttgaggataaaattagtatttttttttaggtaaacataaatccatctttttgtgaagtccaacaatggcgtggcaagttgaaacccaatgatgtagttggtccaactgaggctcggattgaatccagtgggatactacaagattgtgaaactcaacggttgttggtccagtcttgaattggttgtgttagtgaaatctcatctttaagagtgagtgtcacaccctaatttcgtctggggaccattgattgtcggcattcgaccttcgtttgaccacttaataatagttaatacccattgtcatggaatccataaag

SEQ ID NO: 99512 - DNA, 424 bp, Glycine max
  unsure (1)..(424): unsure at all n locations
atgtatgagtgtccacatcgatgtatgcatgatcagctttttcttttatttctaatcatcattgctatatgcttgtcatggaaatggtttggggaattcccttattcttgaaccgcttgttcaaacaaatataccaacatatatgtatgtttatgtagcaagataccttagatatgcatgtatatagcanaaatatctcacaaaacatatatatgtatgtttaggtagcaagataccttggatatgcatgtatatagcaaaaatatctcacaaaacatatatatgtatgtttaggtagcaagataccttggacacgcatatatatagccaaatacctcacacaaatatacatatgtgtaggtagcaaaatacctcctggaaaaagaaaaacgaaagaagaaagaggagatgaacaaatgatata

SEQ ID NO: 99513 - DNA, 262 bp, Glycine max
attattcaattcgggcaagaaagaaaaatcccaaagataaacgtccgatttgattttttttattattctattaaaaatatatttttttattattattatattacctatattgcctcctttttggctttaaacgttgttaccacatgacagaacggtccgatattattttaacacaaattaaaagatgttacaatttacatgatcggtggaaattattttattcttgattaggtgaggaaatgatttaaataaatgtctttag

SEQ ID NO: 99514 - DNA, 402 bp, Glycine max
agatgatgacgcaaagctctaaagaatgatttctagattgagtcaacaagttcaagattaagatgaatttcgagagaagaatctagaagattctagaatcaagagaagcttgatttcaagattcaagagaagaaatcgagaagacctcacatgggaagtattgaaaagatttaaagaagataaacaaacatagcacagttttgtttttcagaagagtttttctcaaaattttctaagttaccagagttgttactctctggagatcgacttccagtttcctggtatcgattaccagtggaaaagtttgatttcaaaagcttttaactgaatttgaaacgttccaattggtttttaaatggtgtaatcgattacaatatattggtaatcgattaccaatgtatc

SEQ ID NO: 99515 - DNA, 326 bp, Glycine max
aatgtgaatgggtgatcggagctgttaactctcatagatgagtgaggcgcacatgagacactcactacctattggcgaaatactcttgtgttataatggaatatcccagtgctactttcaaaataaagtaccatattatctcccaatcttatatctctgcgtcctggactaatcacacatatgggttaggttgggcaccttacaatcatgaccctaactgtcctcctagctcacatattcacgaagagaacgtcatatatataacacagaccgctagagaagaatgagcagaccctccataccttatttggtgcacttgaaaaacg

SEQ ID NO: 99516 - DNA, 467 bp, Glycine max
  unsure (1)..(467): unsure at all n locations
agcttctagccaaatggacttaccttgttttaatttcttngatagccctcttgaaccttgtttccatttccttgttttgaagttcactacaagccttaagtgaaaaaccatgatatcactatatccttaaggaattttggagcattggaattgttttcggaataagtgtgggggtttttggttcattggataacatgttttgttggccatgcttcatgatatattttgagccatacttgatgtacattgcatattgtttaaatgttggacatgctgaatatgatgctgtttctcaaaaggaattacaaaaaataaaattattataataaaatcgaaaaagacaaaacaagtagttaagttgagtgaataagatcttatatgacaaaagaatgatgagactcttggctctactctttatgtgtaaaatttatctttaactccctttttatttcttatggtttcttaat

SEQ ID NO: 99517 - DNA, 412 bp, Glycine max
  unsure (1)..(412): unsure at all n locations
tccatgaagtcccttaatggcgagtttccaccatggagatgcatcggaagacaaaagagaataagtgagaggaggcgccctccacttaggaataattcatggaagaaggagcttcaccaccaacatgagccttggataagaagcctagagaggatgctttaatggaggaaaacaaagatggagagaaagagagatgggggagcaccaaattgaaggaagaatataggagagaagttgaactctgagttgtgtctacaaaactctcattatcaaagtacaacaagtgtacacatgcttctattattgactacgtagcttcttgagaagcttcttgaaaaactccttgagaacttcttgagaaacctcctgataactaancttagctcaccaccctccatactaactcatctct

SEQ ID NO: 99518 - DNA, 427 bp, Glycine max
  unsure (1)..(427): unsure at all n locations
gcttgctaaatctggttttgtggaatatttattctggcttgtttttggtgttgttactctacacaacctttnttcatcagctatttggtattgtcagtttttccttttggctttggagattgttatgttttctcttctgttttgaggatacattttgtcttttctgtgctgttatactttattgtcaatagtgttttatttctattttagaaaattgacctgatttgaaaatgttgactcccaaatatcctggtatttaacatggatatgagtctttgttgttacttgttgacactaggcattgctagcagaattataattttatggaggtcattttatggtaaaataggattaactatggttgcaccacgttagctctttggagtcaaggaacgcattacataaattctgccacacacataactat

SEQ ID NO: 99519 - DNA, 417 bp, Glycine max
  unsure (1)..(417): unsure at all n locations
ctcagcttgtggattacccccattccggcgtttatgctatactgctcccatatctacttaataaagcaatggtagccagggttcctcaacctctattttttcgaggatacgactcgaacgcaacatgtgcatatcatggaggagtttccggacattccattgagtactgtataacctcgaagcgtaaggtgaaaagtctaattgatgcgggctggctgaaatttgaggagaatcgcttatgaattctaaacattgacaagcgacaccacacatgggacaantttgaaagctgttgttagatgtctctaatgactcatcaagaatttcaagtttataccattatcgtaaaccacagttacaatgctaaataaaatggataaatatgacatctttgtccctcatcctctcgtaattaca

SEQ ID NO: 99520 - DNA, 410 bp, Glycine max
ctgcagcttaccaacaatattttatggttatgcatccggagtatatcctctcaaacgtcaaaatctttgcctatatattcaacctttccatcactggcacgtggagtgaatcttccttcatggtgcaatattaaagttatattgtcattcattctacacaatcagaaaccacaaacattgtcatatattaggaaatgataaacctaactcaaacataggcacatcacacaacaaaatgcaatgtcatctattaaaacagagcatcatcaatcaaaattataaattaccatcaacctcactgcgaaacgcgaagacaatgcaaattgaaacccttcaacatatataaccctcaattgaattcgccaataccatgcatacataaatgaacacatatcaaccacgaacctgac

SEQ ID NO: 99521 - DNA, 466 bp, Glycine max
ctcagcttatgcagtaatttcagtagcactttacttgtttttctaacaataataatgtgtgttaagaggagtgtgtcactaacacaactccttatgaaaaaaatgcaagggcattgctattggcactaccaaaccttatcaaatgaccattttacccttctggctattcctacaccaccaacccttctcctttcctttctcacttctctatcataacacccacatcatttctcttcctctctcacactattttcttcccctccttttctaattgtaatcaaattatgataatatcataatttgatgtgattactattaataaagggtagtcaaataataattaatatgggtacgtttataaatggtaactttcatccaattaattcaattttaattaaaaatattttgataccattaaaagataattatattgcatatttgattctttaaaatatactgccttaag

SEQ ID NO: 99522 - DNA, 474 bp, Glycine max
  unsure (1)..(474): unsure at all n locations
gcagctntccatgagcataactttggaatgaaacatttgtggttttaagtgagtcaccaaattttaaaaagggaataaaagaaagtttctttatgtggaagtctcctaactactgtgctttagtatatcattggaataattattgcccatggaaaagccaaagcatcaaatctctgttttaatttgtttaatcaggatcaagcactagttattgtagaatcagattctatgtgtgacaataaaagggtattatgcattgataaaaaatttaagcaaattattcatcacaagctagtggttttatcccacacatttcataaattaaaataatataattccaatgtaataaacaactttaaaaaacactgtacaatanaaactaatgttaaaatgtatgaaatntatttaaataattattattttcataaatataataatacaaatttatgtacataaatattggtcctacaacat

SEQ ID NO: 99523 - DNA, 488 bp, Glycine max
  unsure (1)..(488): unsure at all n locations
taagccgaatcactaaaggatgtaactttccatccattttcatatggactctaaacaaagnttattgttttgtgcancctgattatgatgaagctcaagatgatatgaaaactgcatcacgtcttgttaagaagagaaagcaacttcactcatctggcctgagtgccactcaaaatcgttatatggttggtgaaaaggatgaaaaccagtaaatgtacacaacaagtgtgaaagttatgttaatgttccaatgtagtgcatgtttggaaactcgtcaaaaattaagaatctcgtcaattttgcccaaaaacgtgaaagctataactattagcttctggttaaagatggaaagtcacatcgacaacgtgcaaccgaacacgttagtaatgtttgattatctgaatttctgttgacatatgaaatttcatgttgtatacttgtcagcagctcaatgcttcacaaagtngattaagatgtatatgtcacgt

SEQ ID NO: 99524 - DNA, 446 bp, Glycine max
  unsure (1)..(446): unsure at all n locations
tcatattgaagtgtctttngaaattcgtaaagaactcacccaacaagtatgtcttgcccaatgagtcgatcacactttgaagtgacaagacaaaagatttgggcccgatataaaatgacattctcttaggattgacataaacttaaggttgtgtgcgatgactaaagctcccatctacctccatctttcattttcctccattttccttcaatttctctcttgcattttgtaatattaaggtctctcgtgacaatgagaagttagttcatccattgttggggaatttgtacactaagtttacttttatgtagttaatctttatatttattcaatgtttattcccgcgctattgggttcttttatttgatggttgtttatgggttgatcgacttactctcttgttttatatcatanaacatgcttgaaactgagtttgacacaacatc

SEQ ID NO: 99525 - DNA, 395 bp, Glycine max
taatgtctaaaacatgactgtcgcatatttatgaacatgaaatgcggacacttgaagtcgggtccactatatgagcttagacacactacaagatagataattcactcgcttcaggatcatcttctccatattcttccattctctaccacaccgcttattttctctttgtacgtgataatccttcatgacaatgaaaggttaaaccattcatcgttggagctcatcaaccagacatcctctttgtaatgactctaaccatctattccactgtaatttagatattaatgcctcttttttgtccttaataacatgcttattgtttgatcccccatgctcatgtggcgctacaacgttgatgcattggaaaagttatcctttctaaccttaataaaaca

SEQ ID NO: 99526 - DNA, 399 bp, Glycine max
  unsure (1)..(399): unsure at all n locations
tatcgttaatggaatacaatcctacctaaaatggataaaattattatagaagatatttataaattaatagggtattgggattcatgacttactatcagtattatttaggacgtatttcactctatggagtgaaaaaaattatgtaaaatgagaaagaattatggatgtgtctactattaatataaataaaatatcctataaacagaatccaattaaattaanaaaaataaaataaatgcacctttcttttcactctgtacgcgcttctcaccttttacagcaaaatagaagatctaaaattatattanggtgaaagtagtagttctaatttatattcagtgatatttaaagtggataaagtaatctgtcgtttacctaaatatacatgcatcagcaaca

SEQ ID NO: 99527 - DNA, 447 bp, Glycine max
  unsure (1)..(447): unsure at all n locations
agtttgagtacttcttataattttttttttntgatcctttgatcaaatatattatatatttaacaaattaatttatcatatgtataatgtatgtacttataccttatcaaaatcaaaataaaccattaactcaaattagtaatnttcaaccctgtacatgtttagttcaatttaacttattttctttaaataataattcattntttagtttaatttttatatatttttaaggttctcactgttatatgttatttntaaaataatcattaaaaaatcaataattntcaattatatgaaaattcataattaaaataataacgttataccttaattaaattgtttatttttattaatcatcttgaatatctntttttataataattaaacaattccatgttgataggagttatntgatttagtctcagctcttntattatatctatacta

SEQ ID NO: 99528 - DNA, 382 bp, Glycine max
  unsure (1)..(382): unsure at all n locations
tgaataggaagacatgccattcatgagaaattaatttagaaacatgatgcctgatttggataaccattttactacatagaccactgcatatgcctttgttgagctatgaaacatgatgcatgaattgatcaaccattttactacattgacaactgcatatgcctcttgtgaactattaaacatgatgggtggaagtggaactaatcaaatctgctgccaggatatgtaaaatccagtagaagagactgtaacttcttggtacttctagtctctctgatgtagcctttatgcccttggttttcatttttgcatgtgtacctttggctatatatgcttngatcaagctttttaatgtacatgtactattgaaaacaataactgg

SEQ ID NO: 99529 - DNA, 371 bp, Glycine max
tactaagcctgtagtggtcaatcattatgttggtagagttgaggtggtgtcttatcttattggacatgtgaatatgcctcttaaacacatggagaatgaacgagaaagaaagtgaaagaagaatatgcacatagagaaagaaaaccattatcacatgtgtgtataaactcttggttgacgaatgtatgtggttattatgtgattgtagattttgacaagaaagcaagctaaaaagattggaagggtgagagtatataataacattcttaccccccacccaaagatagtggtaatgatgaggtaaacagagtggaaagggaaacctgagaagagagggtgaaagatgactaattgtattgaaaatgcatgag

SEQ ID NO: 99530 - DNA, 381 bp, Glycine max
  unsure (1)..(381): unsure at all n locations
agcttaaggctaagtcttcatgtntctcccctatctcttacaccaactaggaaggcccattgagggtcacaacaagcctggataacggagcatacagactacaagaactggatggtaaagcaattccaaaaacatggaacgccacccacctgaagttcttttttagttgacctaaatgcaaacccaatcttgtactctttttcctactcaagtcttttgttccaaaaatagaaaaactaaggttttggcagaggttttaacgaggcacatttggaataacaaagggaagttgtactcaatcaaatacattgaataaaaattctacaccccttccttttcacatttctcttatccagacaagagcatccatagtcgtagctc

SEQ ID NO: 99531 - DNA, 439 bp, Glycine max
  unsure (1)..(439): unsure at all n locations
ggtgaaggaccctcagagctatatatgatagcacattattccttctccatagcaagatcaccagtcccattantcaagttggtgaggcgtctgtgaccatctcgcgtgtggaaatatgtcttgcagttgtgggactccgcgtggtatacactaaccatactatctggcataatatacttcctcgagacattatatgtatcactgttccaagcatcaagcgaatggaaccgcctattatcctattgagcaattggccttgcgcccgtgctcttacatttcctggaggcccatttgtgcacacacgatcccanaatagttgtgttaccaccacttattcatattgataaacacaccaaattgactgctcagagacgatggcaggtttaccagacatggtccactcatcttgcctttacaagatacactctacctcttatcg

SEQ ID NO: 99532 - DNA, 319 bp, Glycine max
  unsure (1)..(319): unsure at all n locations
cacctgcagctgcagctttaccaagggagatggacctttcagtgttgaaagaatcaagacaatgcttcaaagatgagctgcccgcgagtataatgttaattccaccttccatgtctctgatttatctctttttgatgcagatggagaatcccaattgaagacaaatccttctcaagagggagagaatgatgaagacctgncctcaagcctgggcaaggatccactttgaggacttggagggcgtttgactgggctagagcaaggaaagccaaggaagctcttcaacaagtgctgtccatactatttgaatacaagccct

SEQ ID NO: 99533 - DNA, 411 bp, Glycine max
  unsure (1)..(411): unsure at all n locations
cttgaaattgaacaacggaagctctcgagaaattcatatggtcataacttgtcacacggaagtccgattaacgcgcagactatatcgagacgctcgaaattgaacaacgaatgctctcgagaaattcatatggccataacttgtcacacggatgtctaattcaagcgcataatatatcgagacgctcgaaatctaacaacggatgctctcgacaaattcaaatggtcataacttgtcacacggaagtccgattcatgcgcataatatatcgagacgctcgaaattgaacaacgaatgctatcgagaaatncaaatggtcataacttgtcacacggaatacagtggagaaattcatatggtcataacatttgaaacggaagtttgattcacgcgcataatatatcgagaagc

SEQ ID NO: 99534 - DNA, 256 bp, Glycine max
gtgtatgtagatgctggagctagaagctatggctcatacattggaagatgtgtcaagaaacagtacccacagcagagtagaacctctgagagctatgcaattgacgctgaataagcatttcatgaatagtatagggcaatgagaggggtcacatatgttgctctatgcagtctgggtgatgaatgacacattgttctttgagatcaccagagacccaatctataatgtgatgattagatggacacggacagggatg

SEQ ID NO: 99535 - DNA, 438 bp, Glycine max
  unsure (1)..(438): unsure at all n locations
ctgcagctttgctctatggtcaggaattatttctctatatccaaacatttgttgtggcattgtgcctgctgcaatttatggaagatgagaaatgatgcttatgatgggccaaaattacttcaacattctaagattatatggcttgggcttatgatggatggcctgtgcaggaaccatatgttgtccgatgcaagaggattgatggatctgatgatgaggaatggggtttacccagatacaattgcttatagtactctcttgcctggatactgcagcagagggaagggttttgaagctcanagtgttcttcatgaaatgataaggaatggttgtcaacctaatacttacacctgcaacacattgctccangaaatggttgagtaagagtcttcaacttataatgcatgatccgatatttgcagtataacaatatatcac

SEQ ID NO: 99536 - DNA, 487 bp, Glycine max
  unsure (1)..(487): unsure at all n locations
tctanactntgtacaagaatgaagctctgatacctcttgttatacaagtggcctcagatatcttaagaagggggggttgaattaagatattccaaacttttctcctaattaaaaatctatcttactttttacttaagttatgaattcccttaatgacaatcttcttaaatattaattcaaatgaagcaacttgaattatgaatataaagcaataataaataaaggagattaagggaagagaaaatgcaaactcagttttatactggttcggccacacccttgtgcctacgtccagtccccaagcaacccgcttgagaagtccactaacttgtaaattccttttacaagttctaaacacacaaggacaacccttcctttgtgtntagagattctntacaacaagagactcacagtctcttaatcccttagagaatgagaagaagaagaggaacaaatctctctagaaagagatgggatttacaaatga

SEQ ID NO: 99537 - DNA, 395 bp, Glycine max
  unsure (1)..(395): unsure at all n locations
agccctgatgtgctttaacatntatccctatagatatgtttactctggggtggtgagttcattgttttgcaagntttttacataatcttggctcctgggtggtgggttcatgagttggtgggttcacgagttggtgagttgttgggttcgtgagttcctgagttggtgggttcttgggctggtgagttcattgattaaacctattggctttgtttgctgcaatgattgttattggtgcaccattttcttgtttgctgagtgccattgttttgttntggggtataagaaaacaagacgtagtttgcattggatgtttgttttgaacaatgtgtttgataaccctaaccctaacctaagactttgttgtctcactcctgtgcacattaagtgattga

SEQ ID NO: 99538 - DNA, 408 bp, Glycine max
  unsure (1)..(408): unsure at all n locations
ctttatatatataaatatatatatattccatatgtataattattcactatgcntttatgcantttggtgtcaaaattaatttcgcatacgtatcgaatttcattatgcaacagaactggctgccaagaagagtgatgagtgcatggcgtgtcgctggaatattgcatgccttataaggttggaacgtcaatgagtgcggaaatgtcatgtttagcgttgagaaaataaggcaagcaagtcttcaacatgggtttaggccattaaagattaataatctcatttctgcttcagttctaaattaattaccatgatataaatctaaatcaatgtgtgtctataaatgtatcaacaaattaatcaagtagctagctagcttgtgatattnntcaattacatatcaaatttgat

SEQ ID NO: 99539 - DNA, 403 bp, Glycine max
  unsure (1)..(403): unsure at all n locations
tggacatgtgagaaggatttattggtttatgtgtttcttaatcacataatgacagctctgtgttaattttcgctcagtaaattaatttcggggtggattaagtggnngaatcgattatggataaattctcgtcacctatgataagagacttgcttttgaatcaaggggaaacaacatgctttagttctgttatttttaatacaagattgctcgccgtttaaatacaaaaacaaacaacccccctatttcgtactgtttattactataattataacgtttgtttgccattggtactgggagacgaccaggacacttactgatactgcatttattgttatatgattgggtcggctccgacctatcaagctttgtcatacttcatcgctttttacttcttaaactg

SEQ ID NO: 99540 - DNA, 434 bp, Glycine max
  unsure (1)..(434): unsure at all n locations
ctggctgcgcagcagctctgatttcgngagtatttatagaatatgacgcattgtaatcgantacaggtattggtaatcgattacatgcccaataaaccttctggtaatcgattacaggatgttgtaatcgattacaggctgcctgttcatgtgtaatcgattacactgattggtaatcgattaccagagcctatcctaggctagtttctaagagaatatctatatttatgctcaaatacatcctatatgtctaattttcactactaatacactaaattcaatcattcaattactatatacacaagaaatcataaattctatcataaaaacaagaattctaacaagatcaaacataataatctacaatcaaaaggtgaaaagtgaatcaaccaatcaatcaaccaatcaatcaaccaatcaaatcctatttttct

SEQ ID NO: 99541 - DNA, 359 bp, Glycine max
  unsure (1)..(359): unsure at all n locations
tctaagagagcattcatccttagatcaactcttttccttttcattccagcttcaattacgtgccttttacatttaaggcacttagcttcaaataacaacccacacaactttntattcttgaaatttcttcttcttttttttttattttagcagcttttatttactgcttccaaacaaatttttgtgtgggtgttatttgtcttaccactattatcatcacccaaaaatcttcaccaaatntgggacaaattttctttgaaccatgatgctctcctacaacctaangaaaagtagatggagattatgacttaacangctcaaggttcagctcaatcaatcaaaaaaatgaagctcaacat

SEQ ID NO: 99542 - DNA, 478 bp, Glycine max
  unsure (1)..(478): unsure at all n locations
taggaccttaaatctcagcttctcagggggtgagcttagttattagagggtgtatgtagctaagctctagcttctcaaggaagtnttctcaaagaagcttctcaaagaagttttctcaagaaagcttctcaaggaagctacctagtccataaatagaaccatgagcaagatgctccaagaagatagggctagagctgctgaagaaggccctaaggttctcatgcaccttanggtagatttctgagcccatgggccaaggttgggtccaattatctttgtacgtattagactacgatgtcattatattttggccttgtatttanggctccatattgtatgtagggtaccctacaaatataagatatttcagcccttgtatttttgggcacctagactagtttttgtattatgggtagttttgtaattcacatgcactaagtggattttgatggtgtggtggaactaaattaattgaatt

SEQ ID NO: 99543 - DNA, 358 bp, Glycine max
  unsure (1)..(358): unsure at all n locations
agctntntgaaaacaaaacatgccactggttatctattaccagagagtaaaatctctttggtaaaagcttttgtgaaagcttcatgtgctactcaatgttttgaaaaacttttttgtacttatcttgattgagccttttcttgattcttgaatcttgatcttgattattcttggttcttgattcttgaaaacttgaaacttgaaacttgagcctacaaggtgctcgtcccccccagcaaggtcatgccatagttacataggtaagtatgcacttctctcaattgatttatgattgcatctattggttgcagggattgcgcctgcaagacacccagtggacccagagaagtccaacagg

SEQ ID NO: 99544 - DNA, 446 bp, Glycine max
  unsure (1)..(446): unsure at all n locations
ntacaactaagttatgaganagtaaagaacagaaacaataacttttacataaagtaagcagaaataaaaagtacacagcggaaaataaagagtgtagggaagaagaagacaaacacaagatttatactggttcggccacaacccgtgcctacatccagtccccaagcaaccaccgattcttgagatttccaataaccttgtaaaatcctttacaagcaaagatccacaacggatgtatcctcccttgttctctttgaacaaccaagtggatgtacgctccacttgaactgatccacaagagatgtaccctctcttgttctcagtatcacaacccaagttgatgtacgctctacttgtaccacaaaggatatacgctccaatgtgttaagacaaagaattcttatgcggttagtcccttgaatctttgaaggtggatacaaacatat

SEQ ID NO: 99545 - DNA, 470 bp, Glycine max
tgcttctacaacaatatggttgtatatagcactatataacactctctcattcaactattgtatggttataatcccgtgactcctcttgatttgttaccattgcctaacatttctaattttaagcataaggatgcacatgtttaagttgagtatgtgaaacgattgcatgagcacgtgaaggctcaaattgcaaatgagaatgaaatttatgccaagcatgccaactataacaggaaggaagtgtgacttgaaccaggtgattgggtttgggtacacatgatgaaagagatgttccctacacaaaggaaattctaacttctacctataggagacagacctttccatgttctatataggatcaatgacactgcttacaagatcgatatctatgtgagatggagaagttctcatttaatgttgtgcttgactcacttgtccatgtgatattctataatatatggcaatctttc

SEQ ID NO: 99546 - DNA, 415 bp, Glycine max
actcagctgtaaatccactcagtggtacattattctaacagtctttgtgtttctatatgctatgtcaatccacatctgcgtgtgggcagagtactcttttacgttgctggacacgggtaaagtatatgtcgctcaatctcttacacagtgaggtatattcttatcgtctccattcaaattggatttagcagttgaacaatcaggaggatatatatctttcctggtagcagttgaatgaataagattgacggagccattaaattttgtgtctctcaccacagatccaggagcattagcacccttttcgaaaccaagagctttagaagaagacaaaatttgtccacgcatacgatcaaggtaccttgttccagtaccttcactggtgtaactgttcgcagcaacatctatactatgt

SEQ ID NO: 99547 - DNA, 63 bp, Glycine max
caaccctacttatcaataaagaggatgagctgaaagctcttgctataagatattctaacgcgc

SEQ ID NO: 99548 - DNA, 327 bp, Glycine max
  unsure (1)..(327): unsure at all n locations
agctnnntttatttttntaattattgtgttaatttataataaggatttatnnggagntntttctaattcatgataggtataatgacgagtttttacgttggggttttctgttcaattatctgattctgttacactacctgcaaccaatgccttatttcttaattctaacaagtggcgaaaaatcctatgactgtccgcaatacgaaattctggcttggtaaaaatttaattatcttattatgctttatgctactatcactggtttacatggagtgcttactagtttatcctaaagagcgtttaatgctatgagctgagccatgtttc

SEQ ID NO: 99549 - DNA, 502 bp, Glycine max
acactatgaatctcaagcttaaagaatgtgctaagatttgttcaaacataagctcttattctatgtatgaaagctggagttgctgcacatgatgtccaacgttatgtcgacgaatcatatcgggctgctcaatgcacaaggcaagataaaatgtcaaatgaagaattgaagttgcaggatccacgatgtcggatacaatgtccaagacatcctgcccgaaaatgcacaaggcaagataaaagaattgaagctgcatgatccacgatgtcggatacgatgttcaggacatcttgcccgaaaatactgggcacataaatactgtgtattttttacagattattgtgcactaatccaaagattagattatctatctttatgaacgaatttaaagataattaaggttgaattacaaacttaagaattccttcactgatttaagattagagataaaaactaaaatgcaaactgtttctttagttcttaagtgccatttttcagatta

SEQ ID NO: 99550 - DNA, 446 bp, Glycine max
  unsure (1)..(446): unsure at all n locations
tacggacctatgaatctcagctgctccnagcacaatggttgcttacatgtaatggaagggatgtctatatgttctgaaagtangaaccaaaacataagatcacctagtgaggtaaaagcgtcaagcaaatgacgttaaagaagcgcttcctaagaggcaacccagttttaaattctactatttttattttttttgttttatgcatttaaatcatttggaacttgctatatagtctatacataggagtatatcatccaatctttgaatgcttaacataagggtttcaatttcatggaaaaaaggactgaaaaataacttagaaaaatattttttgaaaaaaaatagtcctttcgctaagcgcaagcctcgcactaagcgcatctctgttcatgtgttaatctacgagtctcaagcgcttagcgcccaacctttgtatctgaagctga

SEQ ID NO: 99551 - DNA, 336 bp, Glycine max
cacgcgctcaactcacccacacttttatttggtcttaaccccattaaggaatgctggctcagatgcgaattctaagagaaatttgaacgactccaccttcacaagtcaaactcaatctaaactgttaaactggattcaccagaatccccgataaaattgaccctcacacccattttgcctaaaatgctcttggtcactcggcatatgtttctcttgccacctaccttctatagtcctaatggcttcagctggataaccattaagctctttcttaagccaagtaccttcaattaagctactttttcctatcacaatcccttcacccagaacctcttc

SEQ ID NO: 99552 - DNA, 485 bp, Glycine max
tccttaagaagattcctaaagaagctagagcttagctacacatacctctctaatagctaagctcacctccttgagatgagaagctagagcttagctacacaccccctataatagctaagctcacccccatgacaaaaaacatgaaaataataaaaaaaaagtccttattacaaagacaactcaaaatgccccgaaatacaaggctaaaaccctatactactagaatggccaaaatacaaggcctagacgaaggaaaaacctattctaatatttacaaagataagcgggctcatacttagcccatgggctcgaaatctaccctaaggctcatgagaaccctagggcctttccttggatctctagcccaatctacttggagtcttctagccaatgcccttgcggggtaggattgcatcattcccttcaccttggagaggatttgacctcaaatcccgaggttcttcatactctggggctccttcctc

SEQ ID NO: 99553 - DNA, 437 bp, Glycine max
  unsure (1)..(437): unsure at all n locations
cactttttggggtgggccattcttggatggccctgattttctcacggtccacttggaccccatttctaccaactacaaaccctaaaaaaactatattatctacacaaaaagtacacttctctatatttgcatagagggtgtttttcctaaagactgaaacaacttgcctgagatgtcctaagtgatcatctaggctcctactgtacacgaaaatatcatcaaaataaacaactacaaatctacctatgaaatcccttaagacatgatgcataagcctcataaaggtgcttggtgcattagtgagcccaaaaggcatcactagccattcatacaaaccaaactntgtcttgaaagcgggttccactcatcaccttntcatcctgattggtgatcccactttaagatcaattttgaaagatatgcaccatgcactcatc

SEQ ID NO: 99554 - DNA, 476 bp, Glycine max
  unsure (1)..(476): unsure at all n locations
acatcttggtgaatcaacatggtnactttgcttccacaatctctcttcttttgatgatgacaaacctgaaatgaagagatgcatacaagctattttctagtcattcactcactttattctccccttttctttttgagtttaagcttcattttaagttaagttaataattgtatgaattcttgatttaaataaccccaaaattttctccccctttggcatcaacaaaaaggctaaagtgcattgtaacataaaatcatacacaaatggataaacatacaagagatgtattcatacaagagaaaaagagaaacttataaaaatcaaacaagataataaattatccacaaatcataataaaagcatatgtatcaaataagtcataagtcatcaaaagtaaccaagtagaaccataacatatagctactaacaagttctaaaattctagaagatagagtactaatatagtttcaaaacat

SEQ ID NO: 99555 - DNA, 415 bp, Glycine max
  unsure (1)..(415): unsure at all n locations
ttttaccagtgggacactactcttaaaacaaaaatgacatacaacctccttccataaatacaaacatcaatgtaaatttagagcaagcttatgcgcatatttccctacgaacgttcacttgcacaagacatcctattaactaagaaaaatgcacccatatacaatcgagggagcttcattacctaaattatttacatgtacttccaaggtgttattgttatatacatcacacacgcctccttggctaaagatacatacatgcatactcaaagcattntgtgggaccaaaaattgcacatgcgctcatcatggtatttctaatacctatacatgataaaacttcatgatgaaatctgactacctacgcagtaagtgcatcagtttatgcttcttttcttcaagtttagctacctaa

SEQ ID NO: 99556 - DNA, 388 bp, Glycine max
  unsure (1)..(388): unsure at all n locations
actaagctnatatacctcgatacgctcgaaattaacatcagaagatctctcgaaattcatatgggcataacntttcacccggatgtccgattctggcgcataatatgtcaagagtctcgaaattgaacaacggaagctcttgagaaattcaaatggtcataacttttcacacggatgtccgattcatgcatattacatatcgagacgctcataatttaacaatggaagctcttgagaaattgatatggtcataacatttaacacggatgttccaatcaagcgcatcacatatacggtcgttcgaaatggaacaacggaggctctctacaaattcacatggtcataacttttcacactgaggtctcgatcacggttataaaatattgat

SEQ ID NO: 99557 - DNA, 460 bp, Glycine max
  unsure (1)..(460): unsure at all n locations
tcttctancttatgattgagtgtctgggttaagggttcggcttcaaatggagggtggcattggagttccaacgtccctacaaacactacgtgacatggatgcagaccatgatgcagaaaaagtaatgaaagagctggaaagacttacacaattaagggtgttgggcttgaccgatgttcgtcgagaattcataaattctctgtgctccttgataaacaagttgcaacacctggagaagctatacattaatgcacaatatatgcttggggtcaatgatttgcaatttgatgtatgtgcacctgtacttcagaaagttcgcattgtagggaggttaatggagttcccaaactgggttgccaagctccaaaatcttgttacgttgtccttgagtaagtcccgtttcactgatgatccattgccactacttaaagatctaccaaattttgcagttctctgtctc

SEQ ID NO: 99558 - DNA, 496 bp, Glycine max
  unsure (1)..(496): unsure at all n locations
cgtaaagaaaaatgatgacatgattttaacccaatcacactatgttgaanaactgtttaagaagtttaattattttgatgtgaaacttgtttctactccttatgactcatccatcaagttaaagaaaaatttgagtaaaggattttcttcacatattctcaaagtatcggttctttattgcatttgacaaacttctctaggcttgtctgatattgcatatgcagttggtagattggaaagtaattgagagatttaatgatacaaacttgaagttcttattttgatgaaataaaattgacaagtggttatgtctttgctttagatggttgtgtagtatcatgaaaatctactagacaaattattatttcacatgacagcaaaaattattgctttagatactgctactagtgaggctgagtttcttaataaattgttatgtgatctaccattgttgaataagcctatacctccaattccaatgcattgtgataatcaa

SEQ ID NO: 99559 - DNA, 402 bp, Glycine max
  unsure (1)..(402): unsure at all n locations
aaaaaagtaagtatttttggtggttaaaagtggtaaggggaacacaaaacaaaagggtatttgaattgaagctgacatcggaaagagctttgtgagtgaggtaaagagtggtaacggaagttgggtcggcggcatngttgtccttcaagacctgatcggagctcaagcgagccattgcctccttcaagacctgctaagcgtaatcaaaacttctaaccaatatatgctcccttttagttctatcgcatctcagaaccctacactttttcaccctctttttaaaatgttggtaattttctaataagagttatctgaaaatatatgattaataattntaatcttaatttatatcaagtaatcatatcactattatattgatagttttatacagtccaaaaaatc

SEQ ID NO: 99560 - DNA, 428 bp, Glycine max
  unsure (1)..(428): unsure at all n locations
agcttctaaatggatctcatctagctcacttagttgcaacttcctttcctctccaacctgatcaatagagaagttgcaggtctttacagcccagtaggctntatgctctatttctacaagaagatgacatgccttgccaaagacaacccaataaggagacattcctatgggtgctttgtaggcagtcctatgcgcccaaagagcatcatccagcctggtgctccaatcctttatgttcgaatgcacaatcttctccaggatcctttttatctccctgtttgaaatctcaacctgcccattagtttgggggtggtgaggagtggaaattctgtgcacgaccccatacttttttagctaggcatacatggatctgctcaaaaatgggtgccttgtcactacaatggctctgggactccaacctgtaaaca

SEQ ID NO: 99561 - DNA, 426 bp, Glycine max
ctaagcctgagatgaggaagtgttgaagggtgaaacttcctgctcttattgttgacttcagagtggtacctggagatatgtcgcgggggtcaggagaccttgtggacgtcacgtggggtgctattgcccaaaaccaagcttgaccaatcccgacccaacccgggcatagtcggtcattgagaacctgtgatgtacctaaacaagcgagctcctggcagtcaacagataaaaggaaaacaagaccacaaagcaaggaggcttgttgtggctggccacctgtgaattttgtgtaatatgtggatggtggcctctggtaatcgattaccaacggtgggtaatcgattacaagggctaaaattgatggcacgaggctaagatggtctctggtaatcgattaccaacgggtgtaatcgattaccacgcttg

SEQ ID NO: 99562 - DNA, 433 bp, Glycine max
  unsure (1)..(433): unsure at all n locations
aaagccccactccatctttatgattagtacctgacatctcaaaccaacaaatcaaacgtaacaagacaattatagttgctggttgaatacctcacccactcaagtgtatcacacaattatggcttttctctaatgaaacactcttgccttttaccactctaattccccttgagttcttaagcaattcaagagattatggccacaacaaagaacaattcaccaatatgtgtaagggaaggctagagagacaaggaaaaggttaaccaagaaaaaggcttacaatgtttttatgcacaaatgaaggaaataaaattcaaaatntaggaattcaagtacaatccttcatgcaaccaatatattaccttaaagagaatttttnnntttaaagttcttcaagcatgaacccatcacgcccaattttttnttttttaat

SEQ ID NO: 99563 - DNA, 419 bp, Glycine max
tctacttatgtggcagggcgggcttccttcactttcttgtctctcacgcgagctttgaccactgctctttcttcccgcgatgcttcttttcatgtccgcctgagtgggcttatagcctaaaccatacttcccacgatttccttgggcatttatcaagctagttatgccgccgttgtctttgcctaaacccattccgggttcataaccgttccccaacataactcgggccatcattactgctgcatcggacagacaaggctgcccagagaaggagtccacggaggaaatgctgaccacctcacaagactggaaagtggtttctaacgattcttttgctgcttccacataatgcatagaggatgggcagcttaccaagatgtcttcctcgcctgacacgatgaccaagtgcccctccacta

SEQ ID NO: 99564 - DNA, 429 bp, Glycine max
  unsure (1)..(429): unsure at all n locations
gtcacctgcnggctgcaagcttgtgttctctgataccaatagatttaaccttgttttataagctnctatggagcctggatctttgagcttaatgaggtccttcaatggtgattttcaaccatggagttgtagcaaaagataaatgagaaaaggtgaaaggaggcgccatccactatggaataagccatggaagaagaagctttaccaccaatagagtcttgtataagaagcttagaaaagaagcttctttggaggaaaagaatgggagagagagaataaaaagtggcatgggaatgaaggaaagatatggagagaagatgaactttgaagtgtgtctcacaagactctcattcattaaagttaccacaggtgttacacatgcttttctgtatagcctaagtagctttcttgaaaacaagtattacaccc

SEQ ID NO: 99565 - DNA, 338 bp, Glycine max
actcagctctaagggacctgaatttgtaaatgggacctcatgtgattaagaaataagtgatcattgcatatcctcagccaggggagcaattatctttctgtgcttatgggatgatatatagtggcttctttgaccttgcatgctacatgaacaaacatatgcaagagatctttggctcaagatcctggtgaggctttttgtgtggggattcatattcatagagatgacatccatacacttggttatctcaaggctacattaatagagcttaagtgtcatatgcaaatgtaactgagattccattgcaacatacaatcacaagaccattcctaatgaat

SEQ ID NO: 99566 - DNA, 300 bp, Glycine max
  unsure (1)..(300): unsure at all n locations
gcttgctcgcaaagggaaagttncagcttgtttgtaagtgtttctaagaaataactctccatagacaatgccaatgttgtgacattgatcttaagactatagacaaacttagtcgtgaaggagaaattctagctattcgacagagatataagatggtatctttctatanctggtgccaaatgtgtgatgttgtcacgtacgagacgattcataccagagacatggtggagaacacactcgttcgtggtagacctcaatatataacattggtgatgacactcgtggagactctgatgctca

SEQ ID NO: 99567 - DNA, 396 bp, Glycine max
ttgaaacttctgtgctccgagtgagacgaaatgcttctttcttcacttgagaagatgttccaagcttggctatgaagatggttccaactgataaacattacgtgtttccattggtttataaacttattgagctaactttgatattgcccgtgttgtcagcatccgtcgaatgatctttctctgcgatgaagattatcaagtctatattgcgcaattagatcaacgatgtgtggttcactgacttgatggtatgttacaccgagcggtagatattcaagcccttgatgatttgatataatcgacattttccgcttagaatctctaagagcacttgcctcgtactttattcacccgctcttgtacattatgtcctctctttatatcaaccttattttg

SEQ ID NO: 99568 - DNA, 421 bp, Glycine max
  unsure (1)..(421): unsure at all n locations
agctngtggtatgtgaatttgngaatttggttggtcttggccctaaggtcattgttgtaggacctactgattctggaaagagtaccttgtcgaggatgcttcttatttgggcagctaaacaaggttggaagcctacctttgttgatctggatattggccaaaggtctataacaattcctggatgcattgccgccactccaattgaaatgcccattgatcctgtggaaggcattccacttgaaatgcctcttgtttactattatgggcacgccactcctangtgattagtgatgtaacttctattttaagttggcaacattataataattttcattggtgtgaactcttgtaatcattgcgtgcaaatgaaggaaatgaaaatncaatcaccaaacgtatttgttttngcagtaacaatgta

SEQ ID NO: 99569 - DNA, 507 bp, Glycine max
  unsure (1)..(507): unsure at all n locations
gacacttaaaactcagcttaatacccactcggtatatctgtgtcattatatttcttatgccttctgaatggctcgctntntggtactgttatggcttaagatgaagacattgacggagtcgattttattataattgctagtggtggcctttggaatgtcatattaaacaaggtgagactatcttggtaaagttggccctaaacaacatagatttatctttctttttctagatttttagtagacacatgatcttgtgaacttttatttatttcagactcttgtttgaaaattttctgataatttgttactttgttattcattggtttgcttactacttngtaccaacgccataccttttttattattcatgaaagtataaaaccattactcattaatttaatagcaagcgtctttgtcctttatatatttataatcacatgtttcatctgtatgcattttcacggcacttatctaaaggatatgaatctataataatatttnttatat

SEQ ID NO: 99570 - DNA, 450 bp, Glycine max
  unsure (1)..(450): unsure at all n locations
gctttaagaataggagttgtttaatgttgtnctttttttcagaantagtgggatgtgcggaataagaaagacaactcttgatcgtgctttatatgaaagaatctctcatcattatgatatttgttgttttattgatgatgtaaggaaaattaatcaagattccggtgcatcattgacgtccaggagaaccctgatgccttggaaataattgaataagtaattatacttgaatgcgtagtaattctcttggtaggcctttggtgccagttccaacatgttattgacgctttattagatagtataagtagtgtcatcccgttctactactattacgacaaanaanaaatataaatgcatttgcaatattttacatagttttcacgaagtatttgatcgtagatttctattttgactttaacagctttttctgtacctatctgctgatatgca

SEQ ID NO: 99571 - DNA, 411 bp, Glycine max
  unsure (1)..(411): unsure at all n locations
agcttgtcctttggttaaacatgattggtacatgttttgtattcaattgggcaanaatggatgagggaaagagtggttttcgaaatctgcactttatgcagaattntgctgctgaaatgtgcaacataattttgtacaagtgcagaaaaatgcttatgtatggctggttgtgaaaagggtagtacatatggggttctggacattttctagcagatcccaacggtcaaaatgtagacttatgtactagaaacttccagtaaaatcttcgagtcgatccaacggttaacgaattggaacgaaggaaatgttactggtgtatttgtatgtgaaaagctactatgattntgagttggtatttgtgcagaagattctgcctttgccctgtttagcttgggtttgtagtccatgatg

SEQ ID NO: 99572 - DNA, 279 bp, Glycine max
tacttatacaagacaacctcggcgtctacttcacgattgacgtgcttctatcaggcttgtcttacttcattccggaaactggacatttcttccttctatatgtatcccttggctcgctcgcgcaactcttacatgctactgaatgggtacttgcacacattgtctgtgaactctgtcaaagcatactgcgaggagcatggaatgtaatgctacctccgagttgagattatggatctcgacacgctgtgtgcccaaatctgtccacgaatattctgctca

SEQ ID NO: 99573 - DNA, 304 bp, Glycine max
cagagtggtacctggatatatgtcgcgggggtcaagagaccttggggacgtcaggtggggtgctattgcccaaaaccaagcttgaccaatcccgacccaacccgggcatagtcagtcagtgagaacctgtggagtacctaaacaggcgagctcctggcagtcgacaaataaaaggaacaaagaccacaaagcaaggaggcttgtgtggtggctgaccacctgagaatcttgtgtgatatatgggatatggcctctggtaatcgaataccaagggtgggtaatcgaatacaaggcttaaaaatga

SEQ ID NO: 99574 - DNA, 456 bp, Glycine max
  unsure (1)..(456): unsure at all n locations
ctgaaggcgcgtagcccaccattttccatagtagaatactggttatgtgtctactatcattgtcatcgnntttttttgtcattgaggtgccactttgagctgccangttctccacctttgagcgtattctttgaaagatttgtgccccctttttgcacatgttctgtagttgcatcctatctgaagacattatactgacactgcctaacgaaggcaaccactaggtccttccaagaatggactcgggaaggttccaagttagcgtaccaggtaacagctacccagtaagactttcttggaaggaatgtatcagtaattccttatcttttgcgcatgcccccatcttccgataatacatctttagatggttcttggggcaagtagtccccttgtacttgtcaaagtccagcaccttgaacttggaggggtgatgatattgngttctatgaacaacac

SEQ ID NO: 99575 - DNA, 411 bp, Glycine max
gcttggccactcgtggctgtcaagtgtggaacaacttttttgtcttgactgagtcatggcttcctactggaatctcgcgccttgaatcttgatctcgactcttgagatcttcagtcttgaatcttgatcacgattcttgagatctcgagtctatgacctcgatacttgaatcctgaccttgattcttgagtctcttgagatcgccactgattcacttgagctacatgctcatcactgtggtcatcatcctctgttgtcatcattgtaatcaccaaaacacctatgaatcattgtagactcatcagtaagctatgcttccacaccaagccatgagctatacactcatctttgagacaatgccagagaacttcatgttgtgatctctcccaatttttatgcttcctttttaaa

SEQ ID NO: 99576 - DNA, 395 bp, Glycine max
  unsure (1)..(395): unsure at all n locations
atcactntcttgggatattccttgatctggntaataaatcacccatgttaaaaaaatgcacaacgaanaatattggttagcaagggtagccctggcatttgttataggtgtaatggcccaaggtcatggttaccactgttagaatgggcccaattcttttttaaagtatataattgtacatcgattattttattctattttttataaatagattgattttntttctcgtttcatgtactttttagcccaattaaaatgtgacagataattagagcaatatatataatcctcttactctcttatatatcaatatctagggtataatatatatatatatatatatgggatgaccttttgtgtgtgtaattnttctttggttaattaatattttatct

SEQ ID NO: 99577 - DNA, 490 bp, Glycine max
  unsure (1)..(490): unsure at all n locations
nngaaacanatttcctaatagtaagactaactnttgtcatgcttgttcaatatttcaaataaaagttcgtggatgaagtatcaaacaataaagttggttgtccagaccaacatgcacttggagaagcaatgttaaccactaaaattgtccaaattattgtcataccagcacatgatatacattataaaacatcttccctttcaaagctataactttaaaaccacttaaacgttttgttttgtttgttttccatctgttatgcacagaatatggaggaaataggaaaagaaagcattcaagaggagcctgtgtcagaggaaactactgtaaaaacttcatcatctggtgtagatagcattaccttgagtagtggtgtggcaactcacaacgagtccagtggcatggacatacttgcgaaagattcctcaagtggtgaacaagatgattagctgaacgaaagcacgacaagaataacaccatgtataatgat

SEQ ID NO: 99578 - DNA, 380 bp, Glycine max
gcttattaatgatgtgattaattggttacaggctttgcactcctaattctgatctatgtaagaaaacaatgtgaacctaaccattggacctataatggaaggtgccacgggtaatgaataatgagactacgtctcttttgtcgtcaagatatcaattgctctctatgatttgtcctattgaaaactctggaatttggagcatgtaatcagacaaaaaaaggcttgacttttgggtttcgggagattacgctacgcacaaataattctcatcttttttatcatgtcttcaacaagtgttaattggtgttctaaattcatatgaattcgttcttggtaaatttatttatcttacgcaagccaccttctacatcaagagttcg

SEQ ID NO: 99579 - DNA, 466 bp, Glycine max
tactaagctagccacccagctcgcccaggcgagctaagttgcttcctccataaggcaccgttttctagtggaacttcctggaaggcccaagtgggcctatttgctatttgcaccccctgtttactaaatacaccccctgccttttattgctgattctttttctgtaatgttacggaactttacgaatgtcataacgatacttgttttctttccgtaatgtcatggaatcttacggattacgtaatcatcccttttttggctatcgaaatgttacggaacctcacgaattgtgcaacaatgcttccttttgactttcggcatgttacggaacttcacggattgtgcaacaatgggtgccaagtacctcgaagtggtcaatcaaaggttgtatgccatcaaacaatggtccccagacgagattagggtatgacaacatgcttcacactgattgatagatattcaagct

SEQ ID NO: 99580 - DNA, 326 bp, Glycine max
caagcttgcttggagcttcaatggagaatggatgttaatgatttacaacgtgaggaagagggagggagagagctgctctgaaattgggctgagtgaagagagagagagggttgcttttttgggttttaataaaaggggtttctctttttctattattttattcaagctctgccacatgtccctatttgattggagcaaaagggcccactttctcttcttgactgtgacccatactcagtcacaaaagtgagaaaaatctgacctttgaaacgctaaaatcctgcctcggtttgcgtgtcggttctctgattccagtttctcgcgtt

SEQ ID NO: 99581 - DNA, 381 bp, Glycine max
aactaaagttagtgaactgtggacatcctattctacagttactgacggaggagctggagtggatgatgaagggatgtcctccgttctagctctatatcttgattccatctgtaactaaaaagaactcaaaattccttagaccaaaatcgttcaagttaaacaacaacaataaaggctaaaattaacaatatgcgcttagcgggatatatctcgcccaacgcaccatgagaaacataacatgttggtttagctaaagcttagctcgcttagcctataagttgccatgatgaaatgcgcttatctcaagtatactcggcttatcgcaaggcttacaacacaaaattttccaagttactttggcttagtgattcaacctcgctt

SEQ ID NO: 99582 - DNA, 336 bp, Glycine max
tgtactctgcattaatacacattattcctgtcggttgttaataacacaacaccacaccatacacatcacacaaatctcattgacaaactataaacactgtggtcatataacatcactcaatattccaggtgagtaagtgggttagtaatttattataatcttcgcagaggagaacgaaaaataaagcaattttccaacatcagaatagcaagcataaccctattaattaagaaaatcctattaccagaggaaggattgacatttacctagttgaacagatgctagaacgaacgagccatcttcattctaacccatcttcaagacttcaacactata

SEQ ID NO: 99583 - DNA, 403 bp, Glycine max
tcaacaatcacattcatgaatacacacaaaagattatagttattcaatcatgcgtttacacatcaagagagacacactcatccaaggcatatatacggttaaaaaggtattcacaacattaatctacatgtcaagagagagataagcaagttatacaacatacgcaccataagataagggctcattaatgtattatcaatcaatatcaagactacctgcatcacctaacggcttgccataatgtcctacaacacttcacgaattataaagatggttggctgtttggcttccgacaagtgcaccagatcgcacaagtagtataaaacgataagaaccgagtatcgaactctccgggaacttgtgttatttggtaagctatttcagcaaatcagtgtctaatgtg

SEQ ID NO: 99584 - DNA, 485 bp, Glycine max
  unsure (1)..(485): unsure at all n locations
taagtcacctgcggctgcagcttcggaatatatcgactctacatcgttttttctaccgngcctttttcgtcgttttatattaagagaagagcatttgcaatgggaaggactaaaaatattattgactgaaaatttgaagcttagttcatgtgtgatattctaagttttgtccctttggtttcttcttcctttacattaagcgtgagggaggagttgtaaaattcaacatatataaacaaaggataatgttgaatttttctatggcgattatgactgttgaattattacctgtggatatatgacttgagaaacctttccacgcaatatcttaatcttctcatcaaccgcatcacatggtacaacatttgttccggtttagatttataaagacacaatcttctactgaaatttaatttaactaaatcttgaaagatcagtaaacaaattttgccttttgattattttcatgtacatgcatatgtaac

SEQ ID NO: 99585 - DNA, 390 bp, Glycine max
cttttatttaatgctagacccacgtttatgtttcgtctctgatttactgactggcctggagtgtcatactttaaactcttagcttactaaggtgattgctacacgtgctggattacataaaagatgctggtctttatgcccttgctgcatcatgtaaggatcttacggagttaacggtgtgtccgtctgagccgattggttacaaccaaatgtttattgacagaacaaggcctcgtctctgttctgaatgttgcccaagcttcaatcgtttatattttgtcgacaatgttaatgcaccctactcaattgccggaaacgctaattgactctttacgtttgatattgatcctcactctgatatctacctgaaccctgaatctgtttggactt

SEQ ID NO: 99586 - DNA, 366 bp, Glycine max
tcttctctctcttggggctgggatatatgtatcatcttgaaatcaataaaagctaagagagaaagagtgagattttccttcaactcaccttagtcttcaagttggcattaaagcgggttccgtctgtcgtccgccaccgcactgtctgacgccgtcggtgtctccggtcgtttttctccggcgaggccagggttaggatcgccttcaaaaatgtgacccacccctaaaagtcgcaccgccaaaggagctcccactcgtcatctttgtctcgcaagatttctggcacgtgaagcccatgcctcgtcgcaccgccgtcggaagctgacccgttggtcccgacagcttcatcatcagttcctgagcacg

SEQ ID NO: 99587 - DNA, 486 bp, Glycine max
  unsure (1)..(486): unsure at all n locations
gacctataaaactcagcttgtaactcttctccaatggtcctttaaaatttctacaaaacatgaaaaaaaaaacccaagatcaagcataaaaagtagaaaattagaaaattctaaacaaactaagcttttattcaaaacttaagaggaacacaaagctcaaaaacataaaagatagttcataattgcccccaaaataacaacaaaatgtaggaatatatgacaattatcactctccattctcatatagcatttatcagttcagaaattggcttanagacataataatgataaaaaaaaaaccattttccctcatttaaacgaatttagcttttagttcaagtggttcgttggcaagttgcaagaaggaaaccatntagattgacctgtattaacttcatcaccacccaagtgaaatagctcanatgggaaaatctntctcatatctacaaaatntataaaaagagaaagatagtcagtttatgtgtg

SEQ ID NO: 99588 - DNA, 338 bp, Glycine max
  unsure (1)..(338): unsure at all n locations
agcttgtagaatggccagacatgatacatgtcatggtttggtttggttcaaggataaaagggatgccccacattatttccatgacacaaatgcaaaaatgatgatttggaaattttatgcaaaactggtcatgcatgcacctatatggacgctcaagtgtcaaatttttatggtcatgtgatgctagggctcaggattcattccctctattntaaatcaacccaatgtttccaaaatatgttcttttatcaatttgtgcattcatcctagtccatttcaggcgtccggggaaatttcacagcattcacccttcaggtgtaaacacatttttcaaaaat

SEQ ID NO: 99589 - DNA, 391 bp, Glycine max
tcctaagaaaaatatctcagagtctacttgtattatgagatcctccaaggcataacaaagcacaaagaaaagaagaaagcatgcatgcatgcaactaataacattcacaactttacaaaaatagtttgataaaaaccttaaaaacacattttttttccaacatgcaatgcaatggaggttctctacatcatggtagcctcctcccaaaggaaaccatgggctaggttcatcacaaagaactcccccttaccaagtttttagttcacacgaaaatgaaaaagagagggtgaagatgtatgcttcctttgcatcagaaaggtaccaccaacaaaaatggaagagaaaaattttgggtctccttctcctttatgtgctcacaattttggttgtg

SEQ ID NO: 99590 - DNA, 314 bp, Glycine max
agcttatgagaaccctaaggtgttctcttgtatctctggcccaatcttcttagagtcttctatccaatcttcttgttgagttggtttccccttctcacttgagtcatagaggtctcatctgaaggtggtgcaacttttcgtttcctgaagaccaaaggcctatcatcctcactcttagtctcattgattgcccttaggcattgagcagtagatgaaggcttttgttgttgctttttaaatgcaagcctcttggtgacactttccatgacactttgtgctttatgagcaatgagaatacgaggtggatggtgttt

SEQ ID NO: 99591 - DNA, 393 bp, Glycine max
gacctatgaatctcagcttagcttctcaggaagttttctcaaagaagcttctcaaggaatgtcttttaagaaagcttctcaaggaagctacctagtctataaatagaagcatgtgtaacactatgaaagtcttatgagatacacttcaaagttccacttctctccctcttttattccttcaatttcgtgctccccccccccccccttctctctttcttttcctccattaaagcatcctcttcaagcttcttatccaaggcaattcttggtggtgaagctccctcttccttggcttattccctagtagatggtgcctgccctcttctcttctcctttgccttccgctacatctccatggtgtgaaatcaccattgaaggacctcattgaagctc

SEQ ID NO: 99592 - DNA, 446 bp, Glycine max
  unsure (1)..(446): unsure at all n locations
agcttggaaacttgcagagaaaggaaatataatcttgatttgttactgaagtgtaaaaattagttggttacatgctgttatggtagctatatatacataagttagttggaataactaactaactagagttctaaccattaaccatgatcaagctaaactaagcatgtgactatgctaagattcattaaagatatcatcaccactatntgtcaaaaaaaattggaagaatcaaggattagatgatgttaatcactcgagtttcattaaaccatttttttcattttaatggtgtactaagtttttatattgatacttctaaatattggaagattatctntattatgttgttgacattgagtatnttggtatttttgaaatttacttgtttcgaagaattatatattagtatattttttatgatgcanaaatatatatgcatctgatat

SEQ ID NO: 99593 - DNA, 448 bp, Glycine max
  unsure (1)..(448): unsure at all n locations
tattaactgcatcagctgattggccaattaattgactgcattcacggtcccaaagcanggaatttgtgctttcatttccctcgttgatcatcaccttaagcctatacctgccaccatatgcaccaatagtcaaaaaatgatgaaggcataaaaaatacacaacattttaaaagatcacaatcacctaagcacaacttccttattgtgtttgccgtgtgcacatgtaaagggcgccatctctgcatcacttttnttatggcactgaatgcaagctgtataacaccatgaatgattgtccagaacaatcctagtaattgtgccaacagtgacacatacaatntcctgcatgaaacaacatagacatcaaataataaacttcagataatgcacgacaaagaattaaaatctatataagatcattacttcagagatggtgtaatctcaacat

SEQ ID NO: 99594 - DNA, 365 bp, Glycine max
  unsure (1)..(365): unsure at all n locations
agctttcatctntacttgttgtctaagtaatttggttgctattgggatgggtagtatggtgtctaaagattagagctttgatttgcttgagttgagtttgccacgtgacatgtcggcagcgtcgccgtcgccggcgacatcaacggctgcgccaccgtctcatacaccaccttcttccaacaatactagttcttcaccgtccaccgctaccactccaccgttgcaacaaacctctcctttcacttcaccgacacaacaaccgggtttttcgtcgcgtngaccccttctccggcgaatccgccgtccgcatcaccacctaattcttcgcctcctcccatgtcaggaaccccaccttctttagtacc

SEQ ID NO: 99595 - DNA, 428 bp, Glycine max
  unsure (1)..(428): unsure at all n locations
ctntcgctgcagaattcattnctaggtttgtgttnttgtttgtgctacacgtggtgtttaacattgtctgtgtggtatgtgggttttgtggttgatttacggatggcctctgtggataactggggtgggtaaggagaaggtttgttattagctgagtaatgacattgttgggctggtgggaantttggccatgcaggaatggcagttgcaacatgggtttctccttcattctcaccctcttcatttgccccagttttctcattcatcaaagtaggatgattaaatatgcctcttttcatacccactttgatcctttcgctggcgaagaccaaatctgtataacttgaatgtgtgttacccaccatttttcatagtataacaccggtaacgtgtctactatcattgtaataatctctttctctgttatt

SEQ ID NO: 99596 - DNA, 469 bp, Glycine max
  unsure (1)..(469): unsure at all n locations
gctgaagttcttgagaggtgctgaaattggttatgcaatatcaaaagacatattcccctgctttcatttactggaagttcaaaggtacttcatctctctcttattttgattaaacattgtaatctttatttntatgtgtttacaatgtacattacattttcatgatagtatttttatgttacgacctctattagttagctaacaagtgtaatttattataattttttgtaattcattttttttgttggttccattggtttttattctaaatacctattctctatttataacatatatggtagtagctgtaacataaaaattggtattgaatcttaggttatgcttcttcccccaccaattattcttttaagtagaataaatattatagntcttcttcttaaattatatntataattatattatncttaattaatagttttaatacaaatatactatgtatatatcatag

SEQ ID NO: 99597 - DNA, 429 bp, Glycine max
  unsure (1)..(429): unsure at all n locations
ngagccganggccttgaagtgcatgtttctggggtacccacattgagtgaatgggtataagttatggagcatggagaatgggcatcctctcgtcttgataagcacggatgtcgtgttcaacgagtctaaaatgtatcacttgaaagaggattcaagtaaagggaaggtactgtggacgtatgagagtgtccaattggaagtggagattggtgcatgatcgtccactgcacgaaggggtcatccactacttgggtcaatangtgctgaagtggagcgtctatagcacgggtcgcctattgcctaagtcatgatgcaaggggaggaacaagaggctgacatcatgccgtcaaacttgtaggagtatctcttataacgatatatggaaagaatggtctagtacacactacaccggtttgggtatgtttacat

SEQ ID NO: 99598 - DNA, 398 bp, Glycine max
gcttgcatcagaatggctgataggcatataatgactgtcatttatcaaccagcgaagacagcataactcctgcagaaaggctctaaattgttaaccaacaattgaagaccagaaaagctcatctacaaactgacaatcccatacatctctgatatcaaagacgtgtatatgtatacttacttatacactccaagttcaactttcccctctttcctcaactcaacttcaactatctcctctgctccctccaaaacatgcacaatatctgaattaggaagagactgctccttggatttggatgaaagaattgtgctgcaagattgtctatgattatggtaagctgaatcaatttcgttcaatggagagaattctgtattataagaaattggaaagtcagc

SEQ ID NO: 99599 - DNA, 425 bp, Glycine max
tgtccttcacggcaaacatgatagcactggcatgttctgcagcattgcctacaattggaagcaagatgacagaaataaaagccactgacatattcaatgactcagatgctccctgcaagagaccagaaacacaatgtcaatgaatgaacttatgatgcagaatttatggataataggaatattgtgaatgtatgaatacagagttttgatgatgtcaaagtaaaatcaaacaaggttgtttcaacaaacattattgctttaagattaattcaaggtcaaacaaataagatcaagaaaaagataaggtctcaaataatctcactggttgattgatgtttgccttataacaaattggttccaagagatcaaaggctctagtattcgattactaggcaatgtaatcgattaccaggagacaagtttac

SEQ ID NO: 99600 - DNA, 417 bp, Glycine max
  unsure (1)..(417): unsure at all n locations
agcttcactaggagcaggacagactggatntttttacattataacagaactttgaagaggtgttgtgcgtaattagaaaaaatctcaaaggtgttaacataatttgctcttctttttttaatgaaaattaataggtaaataatatatgtatggtccattttctctaaaatccatttgatcttaataacaaacgaataatacttagtctttagtagtttagcggatagacatattcggagccatatntttctagcacgaagacatcccttgcaatcgagaatagattcacgcttgttacaacgttttcaacacattcgaaagctactcaaaccaccatcatatttcaattagttggtaggcacagcttaatgatgagcatgacaaaaatgtaaccttttttttccccanaatttgatc

SEQ ID NO: 99601 - DNA, 496 bp, Glycine max
  unsure (1)..(496): unsure at all n locations
actcagcttcaggtanatttaattcacagtccttaattatgtcttggttgtgctattacacagtcacacacatacatctatgctttcctcttgtgtcctttaatatgtgagggattttctgtgatgtttntattttttaatttctccatcagttagttttttaatccaatttttatcttttggataggacctgcacctgtttggtgtgtccccatgccacctcctggctccattagaggaccccatcctaggcactntgtcccatatcctgtcaaccccacacctcagccactgcctccagaaactgtaccattgaggactagtattgtaaaacagatagactattattttaggtaagtaattttattgttgaccatggcttctatatcatagttgatcttaatctgttcttttatctttcatctgcttatctatatctatatggggagaatgatgtntccaactttcgattgaatgacaatatactgttattatg

SEQ ID NO: 99602 - DNA, 153 bp, Glycine max
atggctgcgcttagcgcgagatggcatttcccaaaatattctaagttatctgggcctagcgagataagcttgcttatcccatccggaaacacacaataaattttcttagttaaaacacaagaagatgaatattcctatgaaagatgaactccc

SEQ ID NO: 99603 - DNA, 498 bp, Glycine max
  unsure (1)..(498): unsure at all n locations
ngagctggatggttactntccgaaacatatatnttctcttagatccaaatccagcacctacagtgttcaaaaaaaggtcacatgtttagatgaaaaataacacattttgcagggctattaaatggactaacaagaattagatctaacaaaaaaaagtgcaaaattagatctaataagaattagttcaaaagtgatttgtaaagacttctcatcaccatgaaatagatatgatgtaaaggagctgctcactccacataccttgcccaaaaagcatattccttgggaatcctttctatccttatttggtagatcaaattttgtggcattgcagacttcatcctgcagatgatgtggcaggagataaaaaatagattaaatatttctttaaaaatagtgttaacaaaaatcttcattaagaaaagtttaacatgttagcattcataaaattgtgatacctggttaccttagtaaaaataacttttcatctattttgattta

SEQ ID NO: 99604 - DNA, 306 bp, Glycine max
agcttccacttgtatactgcaaccataataaatgttttctgtttttccctcccgtggatgaggcctctctccaagcgaaccacggagtcgggtgccccttctttctcatattattatctttcacctttgctgcacaactcggtgtgtttgacataatatggactgctgcatcatcctgccgttgatctctgcttgatcgtcctcactgccataacaaactatgaagaccttctttgctacattggttactcggcccgaaaagtgacttttagcattactcttgaaagaattcgaggacatttacct

SEQ ID NO: 99605 - DNA, 412 bp, Glycine max
  unsure (1)..(412): unsure at all n locations
acccattcaagttcatgttgatgttgggatcataaattctcttgaacccaagctcccttttcaagttcataatcacttcttgcagcaaggaggacatgacatctcggaagacatgtggggggcgtgtgatagtagcaacaaagttgccgctaagagtaagaaccttgctgtggactctatcttcacaatatgggttaaaatctaagatgttccgacgaggtggatggtcatgtattcgatatattggagagttggaaacgatactgcgaagatatngcatgaagattgttggtctaattgtcaagtataccaatttgcataagtaataattaaaatggtaagttcgagtattgtgtgcagaaggaatatgctatacttatgaatcgatatatagtctgaagcattctcattt

SEQ ID NO: 99606 - DNA, 487 bp, Glycine max
  unsure (1)..(487): unsure at all n locations
ttaagtcacctgccgcatgcaagcttcttatccaaggcacattctntgtggggaatcttcttcttccatggcttattccctagtagatgacgcctcctctcacctcttctcctttgtcttctgctgcatctccatggtggaaaatcaccattgaaggacctcattgaagctcaaagatccaacctccatagaagctccacaagcaagcttccttcacaaaagccccgcttttgttgaccaccccaagagatcgttaatggtccaacaccttaacgtttctctcctttcaaaaaccaagagatcgntaatggtcaacaccttaatgtttctctcctttcaaaaccaagaaatcgtttatggtccaacaccttaatgtttctctcccttgtcaaaatcaaaagatcgttaaaggtccaatgccttaaatgaactttggtcggttaaatatatcttttgaaaaaataaaacaactaaccacgtttatttc

SEQ ID NO: 99607 - DNA, 426 bp, Glycine max
  unsure (1)..(426): unsure at all n locations
ntactatgcaaggaataaccaaggaaaattccttcattngacttatcatcaaactttcctaagttttcttttccattgtttaatacatagcatttgcaaccaaaaacatgaaggtgtgaaatgttaggttttctaccattaaacagttcatatggagttttctttaaaatgggtcttattaaagccttattcatgatatatcatgcagtattaatggcttcagcccaaaaatgttttggaagaggagtgccatttaataaggttctagcaatttcttccaaagatctctttttcctttcaacaactccattttgttgaggggttctatgtgcagaanagttatgttcaatgccatgattatcacacaataattcacaatctttattntcgaattcacccncatgatcactcctaatagatataaat

SEQ ID NO: 99608 - DNA, 390 bp, Glycine max
gaaaaatttttcgctttttttcttagaaaaccaataacgctaaaaatacccttaggttatatcactcccatgaccgctttgcagttctattccccgctgaatatattttgatcatcctatttgaaatgtactgctggttatatctgccatactttttttgagcatagttcttttgcctttctatccgccgactctacttacatttttttatacatatctgatcgaacattactttttatccaagactactaatttttcttggcttcaaataatacatcctatatctctcaacacatacacaataatactttaccatctacattaatttttatccatactactacaaactctttccataaaaaatttctccttgttactataaatccaatt

SEQ ID NO: 99609 - DNA, 347 bp, Glycine max
actactgctttctatttgtcaacatgagcaaatgattttatgcaaacaaaatcctaacaacctgcaatagagtttgtggttttgcaaatcgccatgttttgatcaaggcatcctgacggagaacaaaatttctgacttcttgtcacaaaacaatttgaagcatgagaactaatggctcatctgtgcactgtgacatcactttttttgctttcactcaggaatcaattgcctgacacaaagagttgtacatatgtatgatcttaaatactacaccaatctgatcagtgattagatactacaaaacttctataaccttaatgcgggacaatcatccggtcatgactttc

SEQ ID NO: 99610 - DNA, 393 bp, Glycine max
  unsure (1)..(393): unsure at all n locations
agcttcctaaaatgtgtatattattatttaatatcttaatatcattgggtgacttttgtcatatttatgttacttatcatgatttctaattggctgctggtgtattaggctaatatataaaaatcaaactcaataattaacatattgtgtctagcaaaagagaaatgggatctgtaagggatcttaagtcgatgttgactgcaatgtgggtggaaccaaaatagacttggtactagaaattaagaatctaattatgtgtaaagctactatgtctttatttcattcctgtaaaaaatctactctaaattatgtggcagcacatcatttaaatagtcaaaattatgaacttctgcatatctataggttctgtanattacatatggaccataacac

SEQ ID NO: 99611 - DNA, 452 bp, Glycine max
  unsure (1)..(452): unsure at all n locations
ntatgaattctgtagcaccaacaggtatgtgttatttttgtttgttntaattatntgcactcataatcatataaaaattcgaatgagtttctctaatctttgttttatatatttaagtgtgaatatatttaagatctacttgcttggctctcctttgatttgcttatatttgagatttgaggtgactatttttttttggaaaaaaatacccttttttgctgttttattatttctccacatgacttcttgaatcttatttcgtagtgtgagtttgtggattntgtaagttctactggcttgagaagaattttcatatttcttttttcctatgagctggagttgaagtaattaattaatctttcaactctgatatgatcttttgaatgtaagattgtaagatctggtgatgtagatcatgatctgganaatatgtgtgatgcttttgtttcttg

SEQ ID NO: 99612 - DNA, 359 bp, Glycine max
  unsure (1)..(359): unsure at all n locations
agcttcagaaaatgccagaacaccaagggctgtctctacagttaagaatttatgctttcagaggccattttatttaatatatcctttgttaacgtggtttaagagaaattaattgaagttaattttaaacagctttgtggaagataggcttgcaatccttaagaatgtcgtcaaagagccagagttagataactggaatttatatctangtagaattgttctctcatcccattgtaatctctttcagtctctatgttttgaactatttgtatttttatgagttgtatatttgctaagcttgattgtttggattattgaattggggggtcaacactcataaagagagagaagaagctgaa

SEQ ID NO: 99613 - DNA, 449 bp, Glycine max
  unsure (1)..(449): unsure at all n locations
actaagcttgttaaaagcttatgatntatggaagtgcttagttcttgtaattattttatacacatgaattatgagtagcttgagattntatccgtgaatcttctgaatttctaatcttctaaaggatttcagtaagcttctgattaccctaatctttctttttaaacttcctctagtctttactctttagacattgtctcacatacttaaaaggtgattgatgatatgtagcggacataataacaatattggtctcaaatgattccttcatcaaattataagtcttctttctcaagcattaaaagcaaatcatccgaataacagtttaaaatacttaaaaattattatatctaaaagtgtgtgagtatcaagaggatctttttactcgattcctcttgtaatagaaccccaaaaattcatgttagcagtgaaacttgatatgtgaattt

SEQ ID NO: 99614 - DNA, 244 bp, Glycine max
taaatctcagcttacaatggatgttgaaagaatagaggatcatgatttgtcattggaagctcaaagaaagtctgagatacataaggaaactaagatcacatgcttacatatggaggtctgatcacctaatgtgattggatattcgactcacactttgctggatgtgtggatacaagaaaaaccactcttggctttgtatttctctgagccagaggagcaatatcgtggaagagtgcaaaacaat

SEQ ID NO: 99615 - DNA, 391 bp, Glycine max
accccttgatgatgcgatcaatgcaacccataccctaataggctgtaatttaggagggatggtgaccaaaattaacgtgattttccaacaatgaatctaagatatgctttcataccatattagaatttcatcttaatgcttaacttaaaaaatcctcccttaaatgctagctgtcaagaaccaagccacttaagtaaatccaatactactcaaacttgatgtgggatttatgaaccccatattacctaagtctctatcacactacccctaatatccgatgtcctagttactgctcaccacaacacttcccttactcttctagccgttcgttgtgtcctaattaactaataaagacataactttataatgaaaccgtgtccttacttaccaa

SEQ ID NO: 99616 - DNA, 405 bp, Glycine max
  unsure (1)..(405): unsure at all n locations
ntgttattgtcagtagatgaagatgaatctatggccacctcatggactcctctaaggacaatagcatcatatcttgcggcctcagatgcatgttgtctttgttgttgctgctgctgtattggacgaggaacatatggctngcttggaccagttacattctggaagggagggacaagctgatgttgttgtggacgacttgtccatctcacatatggatgattcctcccacctggatcgtatgtgttgcttgaaaggttataataattgtgctgttgctggcttttctgccgaggggatctattatacatgtttgcagcatgagcttcatgtagctcattgactccacatagtggcanagaataacaaacatatgtatggcgatctgcagaagaacatataccatat

SEQ ID NO: 99617 - DNA, 98 bp, Glycine max
gagatgtatttagtcaaatcatgataactatgagacctattttgaggttctcattctaaggaaactttctgatgagaattccgaagacgcatcatata

SEQ ID NO: 99618 - DNA, 400 bp, Glycine max
  unsure (1)..(400): unsure at all n locations
tctggtggtcgaagggacgcacttgtttggaccattatatactttctcagagccacaaatcaatggttcacgagagacacaacctntgcccatcccatcgatgtttccaaattcaaaggatgcaatcattgcgccttttttttaaaacacatgaaagcattgaatgcgtttgaaatggatataatagttggcaagatgatactctgagtgtctctctactcgaactcgacactgactggtgaagccccccttcttacaactaagtgaaaagcttagtgaaagaggacacccttctcgaattcgactacaaatctaattgacactcgactgatagatagcgagtgggctacttggactctgagaatatgatagacttaaataaggaaagagaaaatcttta

SEQ ID NO: 99619 - DNA, 449 bp, Glycine max
  unsure (1)..(449): unsure at all n locations
tgcagctgtgcacctcagaggtttgaccctttcatatttggatagacagtggccaaatctcatgcacttggtgttcttttacaataaccttcctcaccaaactctgaaggacttgtccctcaattcagtgttctccaacttgaaatctggcttggaagaaaccttgactctgtggtatcctagtgcaggtaggcttgggacaaatcaaagtgatggcaagctcaatttgtggtgcaacnaaccaggtgcagttctggcagaggctgaaacctgtgttaaaatatcacaacttggaaacctctctgagtacaatgaattctttgagaagctggtttataagccagattttgataagaatttctcatacatgcctctgatngttgctcaggtgagaaacatatatataatctgtgtagaatataatattgaagcaattaaatagtagaata

SEQ ID NO: 99620 - DNA, 187 bp, Glycine max
tgctactaggactagtgagaaaacgggggcttctaccatgggtcaagatgatggagaaacacatcctttaacatgcatatcaagactgtcttaactatccacatcctgacaatatctgtgatattacaattacaagacctctcgattgcgacgactcggtcttcacttaggctatctctgggacaaa

SEQ ID NO: 99621 - DNA, 400 bp, Glycine max
  unsure (1)..(400): unsure at all n locations
gcgatctctaagtcacctgcggcatgcaagcttgccgtggcggaactngaatagaaatattgttgtgagccaatataagaattggattaaaaaaaaattcctattttttctatttaatcatttcatttaaattttctaacttttttttctagtttttgaattattttttaccgaattccttgccctatcatgctaaaattagaccgaagatataaggttgacctaatggttgggaaagggtgaagggaaaagggaaaaggggagagggagaagtcacgggtttgaatcctccaactaacatacatttctaacaaaatttaacaaactagcatttgtcaataaaaaaattcatattaatcaacccaatttttttaaaaaaaaaatcagaanaagttagaga

SEQ ID NO: 99622 - DNA, 476 bp, Glycine max
  unsure (1)..(476): unsure at all n locations
ntaattctgganatggacttctcatgagcacttcatcctcccaagtggcctcttcacttggttggcctttccagctcaccaaccattaagttaccctcttccctcctttagagacctttctaacctctagcacagcctcgggtttagctatttccatagctccttcttccactacactaaacctaagagagaagaaaaaaagaaagaaagagaaggaaaaagtgaagcacaaggaggaagaacgaagaaagagttactcaccatccttgctagcattaatctctcatccttatcacctattctctntattctctctntgagagacccattntggtaagggggttcttccttggggacttgaatngagtggattgagaggtctcaaccatataattgcatgttgtctctnaattatttgttaaaatggatgccatgttgatttgttgggtgaaaaccctctgtgtgcatattctgga

SEQ ID NO: 99623 - DNA, 427 bp, Glycine max
  unsure (1)..(427): unsure at all n locations
atggggtacccatcacatgtgtgtctatgtggcggtcgggcgatggtgcacnaacaagttttccacatccacaatgcgcgcataagcccaccatcccctgttgcccacctncaactgagctcacgtactcccacgtagcccatatcctcgtttctctcaacaccgggtccccatcaatcctcccaagcttccacaacatccaagcaaaacaacattcacacagcacaagctttcacagccaagcaaaacagagcaaaggcagaaaactctgccaaaacaccaaccaaaaatcacagctnttaccactcaaagaccccagtaacaattccttcgttccaaattcgttaaccggtggatcgacgtccaaattttactggaagtctctaatacataagcctacattntgaccggtgggatctactagtaa

SEQ ID NO: 99624 - DNA, 493 bp, Glycine max
  unsure (1)..(493): unsure at all n locations
actcaagctttaaatgggtaaaaggctcacattcactttcttctacatcatattcaaacttgtccaaataaataataaagtcatctcgactcanagaaggtcatctaagtctcatacaattaatataaaacctatattctaatgtcacatcctatcagagcatggtgttcccgtgtcctctagcatgatgttcttcatagtcatccacctattcatctgctcccccgaacacaaagttcaagatcatcacaggattcaaacacaaacaacaaaccgggagtgagttatcacatttctaactactagagagaaacaacacaatatatagtagccaaatacaatgtacttagcatatctcacattatttcatcactttgtcattcatcaatcacacttttcatccatcaatcacacctttcaatcatcaatcactatacacaggaatcacacactccaatcaagacataataacacatcaatttcataataaaca

SEQ ID NO: 99625 - DNA, 434 bp, Glycine max
  unsure (1)..(434): unsure at all n locations
tagcttgtttaanacggatgtatttantttctattgcgaacgagatgaagatgaaagctcaaaacaaagcaagaaatgaattggaattttcggattcgaacacttaccaggtgaagaccgaagaacgaacgaataacagacgaagaacggtgaagaatggcagaaaatcttcacggatttgctcaccaaaacgtttcagaagcgttacggaagcacctcggcttggattatctgcatgaaaacacgtttttttcaccaaaaacagctgaaatgcatatacataggggtcagggacccttgaaactcagcctgcttcccctatttataggagaaatggggaggtgcttgccgcccataggcttctttgtagaagcaagcttcatgatgatgaatcaagtcgattcaagttgttttgatgatgacaaagatgatga

SEQ ID NO: 99626 - DNA, 276 bp, Glycine max
taatgatcagcaataccctaatttggggtttgggcagagtctctattgaccttgctgatcacggtgaaattattggtctttgatcctagtcttcaatgggttgtgatctggatgttgttgaacttcctcgatcaacaccctcccgttgccgttcatcacttgctttacgaatggtatttttggaacggaaaatctcggagccaaatggtttgggttttggatgaacaatttactctattgctgggaattaatcattgagttaatgaactgaaacat

SEQ ID NO: 99627 - DNA, 476 bp, Glycine max
  unsure (1)..(476): unsure at all n locations
ggatccttaagtcaccgcggctgcagctcaagaatatggcctcacaaacttcttatttccagaaggaaattcaatcaatagacctccaatctttaatggaaagggttaccactactggaaaacccgaatgcanaattttattgaggcaattgacttaaacatttgggaatccataaaaatagggccttatatacccaccacagtagaaagaaccacaatagatgaaagcacaacaagtggaagcacaacaatagaaaaacctagagatagatggtctaaaaaggatggaagacgagtacaatataatttaaaagccaaaaacataattacatctaccctaggaatggatgaatatttcagggtttcaaattgtaagagtgctaaggaaatgtgggacactctacaagtaacacatgatggcacaacagaatgtanaagatctangatanacacattaactcatgaatatgaactat

SEQ ID NO: 99628 - DNA, 444 bp, Glycine max
  unsure (1)..(444): unsure at all n locations
taggaccatgaatctcagcttacatcanatttagtaatgatccactaacctagtattaatttaacttaatgccaataacctagggaattaaaataacttaatggctgagtgtaactgaaattgtggcaaccaaaagtcacccccaacagccatcaagccagccaccatttggtctcccaaaaggttgatgcctangttgccaattgggcccttattacaacttgaactaaaccaaactaaagcccatttagttgattaactcaaaacatattnttggtcaaccaactttacaaggattgggccattatttagacaaactaaacactctaaatatgagacaaagtggtgccatttagtcctcttccatttgggccatgatacaactcacaaccttggacttttctccttgaaacttggngcttgattcaaataatatggacaaca

SEQ ID NO: 99629 - DNA, 446 bp, Glycine max
  unsure (1)..(446): unsure at all n locations
agcttgtgtgaagagatagacagaanaagactctttaaatatgttgcaattggctatctgctaagtgctaaccttgcactaagcgctcagtcttcaagcgctaagccgagcttgctcgcactaagtgcataaacccctgatgggttggctgaataggtcaactaagtgcacatcactacgctaagccccacatctttgcggtgattgaattttaaccagtgggcttagcgtggatgatgcgctaaatgccacttcttctctggaaaatttttattgtagcagggctaagcgcgctgtcctacgctaagccccaaatgcattttgtaacttgagtatttatgttgggcttagcgggctatgaggcactaagtgccaatctcttacgggttntgaattcttggaagtgcgcttagcgtgactgttgtgctaaccctaaatagtctctg

SEQ ID NO: 99630 - DNA, 477 bp, Glycine max
tgtggggtaaagtctcacgactgtcacgtgctcatgcaacaattgttttctctggctatacgagacatcttgccaaacaaagtcaggttcacgataactcgcctgtgctttttcttccatgctatatgtagcaaagtgattgatccactaatgtctgatgagttggaaaatgaggccgcaattatactgtgccacttggagatgtattttgcccctgctttctttgacatcatgattcacttgattgtgcatctggtcaaagaaatcaaatgttgtggacctgtttatctactgcggatgtacccggttgagcgatacatgaagatcttaaaagggtatacgatgaatctatatcatttggaagcatctattgttgagaggtacattgcataataagccattgtattgtgttcagaacacttatagaatactaaagcctgtgtgcttactgagtgttggcatgatgacataatgggt

SEQ ID NO: 99631 - DNA, 413 bp, Glycine max
tggaaggtacaaagggcaacttattactgatttatttgctctctttttttgtttgattcccaaatcatttattatttaaagcatatatatcaaatattggactctttgttcacttcaacgtaagtgttgttgcattaataggctggcaactagttatgcacccattatatgcttgatgcatcccatcggaaatactaaagtacctgaatggactttttaccagggacggagacggaggttacccctggttttttcaaatattttttagtataaaattatatcttataatactatagtcattgcttttatttattgataaagatgattttaggataaaaattatattcaagctattatattttcttaatttgagaatatttatttccttttcaagctctggaaataaaattttt

SEQ ID NO: 99632 - DNA, 377 bp, Glycine max
  unsure (1)..(377): unsure at all n locations
tgctgccacggagttttccgactatgctcttgtgtggtggatcttgctacaaaaggagagagcaagaaatgaagagccaatggttgatacatggacagagatgaaaaagatcatgaggaagcggtatgtgccggctagttactcaagggacttgaaattcaagctccaaaaactaacccaaggcaacaagggggttgaggagtatttcaaggaaatggatgtgctcatgattcaagcaaatattgaagaagatgaggaggtaactatggctcgatttcttaatggtttgactaatgatatccgtgatattgttgagctgcacgagtntgttgaaatggatgatttgcttcacanagcaatccaagtggagcaacaat

SEQ ID NO: 99633 - DNA, 399 bp, Glycine max
  unsure (1)..(399): unsure at all n locations
agcttgtaggcctaggatcttcttcatcaatggattcctttgcttcttggaagaagaatggcagcggaatggagatagaagagagagaggagaccccncttcaaggagaagatgagtctagaagaagctcaccaccatatgaggccatggataagagcttggatgaagaaagagatgaatgaacggagagggagagaagagcacgacattntgtgctccaaatgagctttgaaatctgaagtttaatattcaaatgatcaaagttgataaaaatgcacacacatgacctctatttatagcctaagtgtcacacaaaaatggagggaaattcaaatttcacttgaatttgaaattgaatttgtggagccaaactttggagcccaaaattcactaattatg

SEQ ID NO: 99634 - DNA, 412 bp, Glycine max
  unsure (1)..(412): unsure at all n locations
tctcagcttgaaaatgtngtattcaccttctcgctaagccaattntctgtgcttagcgagcatccgctaaacacaacactcatgggctaagcgcgaggaagactctggaagaagatgagttgtataggttcgctaagcgcaccgcttcagtccatctgctaagcgagaaaggcacgcgctaagccaaaattcactaatgtgcgctaagcggtccataattgcgctaagcgcacaagcatgaacaaggccacctatctaagcttgaaatcagattttatagagggggtttggactgggattcatagatntgcatgcctagagattctagagagagaaaggtctaagttccagagagttttgagagatcttgctgtgtgaagatctgcagagactagagcttgaagcacgagcc

SEQ ID NO: 99635 - DNA, 140 bp, Glycine max
tcacactacaagattcaatatggtaaagcaattccaagaacatggaacgccacccacctgaagttctttttcagttgacctaaatgcaaacccaaacttgtactctttttactactcaggtgttttgttccacaaaaaaa

SEQ ID NO: 99636 - DNA, 389 bp, Glycine max
  unsure (1)..(389): unsure at all n locations
agcttataagtgcgggtctgggagactaaagttttgtgttctcnatatgtgaagatgatgttccaagtactttcgatttggttcgaccatgccctcctgattttcagctgggaaattggcgagtggaggaacgccccggcatttactcaacgagcataatgtaaacgcttacaggtctaaaagctctatagttgggcctaggctttagagatttcattatgataaggctctgcgtcttttgtttttgacattataatacaaggatctttcttcatctgatcctggactctacccattctcattcatttgcatgtttacttttttatctgacacggcagaatcgatgacgagtcccccgagggtctaatacctgtgacccgtatatcaac

SEQ ID NO: 99637 - DNA, 417 bp, Glycine max
  unsure (1)..(417): unsure at all n locations
tgtgcattgaagaanatgaaaaattattgtcatagttacaatgtctatgtggccaaattccaacaaagaagacaaaagataaagacaaaggcaacctagacacatgcgtcacacttgctccacaacaccctgtccttcatcagcagcttcctcctcctccgtagcaatctgctcttgatcaagcaaaacaccatcattcacatccttgaagggatcgaagagacccaagtcaaggtccttcataaagaatatggcctgtctgacaaccttttgaaagcctttatcatgctgctccatggcctgcttcttgtacaaaatcaactcttccttaagctccttgctggcctcctttccttggcagcccgcaacttggactactccagtctagactctgactccttaagtcgggcctctaac

SEQ ID NO: 99638 - DNA, 341 bp, Glycine max
  unsure (1)..(341): unsure at all n locations
agcttcccgcatccacacttggaaggatctgatttctgtcttccttaggcagtatcagtacaactctgacatggctcccgactgaacccagttgcaaaacatgagtaagcgagaacacaagtcttttaaagagtatgctcagtgttggagagacctaacagcacaagtggcccctcccatggtcgagagagaaatgattactatgatagtggataccttgcctgtattctactatgagaagttagtgggctacatgccctctatcttcgcagacttggtattcgttggagaaaggatcgaggtgggtttgaagaggggaaagnttgattacatctcccccg

SEQ ID NO: 99639 - DNA, 404 bp, Glycine max
  unsure (1)..(404): unsure at all n locations
ggcctgtccgatgcagcagtaatgatggctccagttatgttgtggaacggttacaaacccggaatgggtttaggcaaagacaacggcggtataactagctagataaatgccataggaaatcgtgggaagtatggtttatgctataaacccactcaggcggatataaagagaagcatcgcggaaagaaagagcggtggtcaaagctcgcggttgaggcaagaaagtgaaagaagcccgccctgccacataagtagaagctntataagtgcgggtctgggagacgaaggtcaagtggtcgcgatatacgaagatgatgtttcgagtacattggatttggtacgaccatgccctccatgattccagctgggaaaatggcgagtggaggaacgccccggcatttacgc

SEQ ID NO: 99640 - DNA, 448 bp, Glycine max
  unsure (1)..(448): unsure at all n locations
agcttgtagaatggctagacatgatacatgtcatggtttggtttggttcaaggataaaagggatgccccacattatttccatgacacaaatgcaaaaatgatgatttggaaattntatgcaaaactggtcatgcatgcacctatgcggacactcaagtgtcaaatttttatggtcatgtgatgctagggctcaggattcatttcctctattttagatcaacccaatgtttccaaaatatgttcttttatcaatttgtgcattcatccgagtccattttgggtactcgggaaaattttcacagcattcacccttcaggtgtgcacacatttnttnttcaacaactagctatgatcagccaattttttcaaagaaagatggaagtcatctctttcaaagcatgttggttttcagctagacacataattttcttttctctttttttttatt

SEQ ID NO: 99641 - DNA, 394 bp, Glycine max
cgcatatatggagtcttaccgtgctttatatcagcttatgcaggcaaagcgcttcacagatgacctgtccgaatatcttttataattatattcatcagcgtacaacacatctttttgtccaactcgctatacaaactcgtggaaatagtttatactttcatttaagatttcttcatccaaaaatgaacacttgagatagatcttttctctatgttgttcgaatgctaagggttgatttgggcttacattcttcattgtaggaaccctagtctgatattcctttatgttttctgcacaatgctctaatgttaaaattcaacatgaaataaaaaattgatatatagccaaccttgatcaaataaagctccaacaggtcagacaggagagaatgagt

SEQ ID NO: 99642 - DNA, 454 bp, Glycine max
catgcaagctttatccgtcatcacaacatgcgacatttttgtattgtgtcacgctttaactttaaatgatgcgttgtcaattatgataacgacacatcatacatgcgtagatcattttagatgcacagacacaattttgtccataacgcaacacataattaatgtctaacgaatcattattatacaacatattacatttcataatcaaacagccataatactgaatgttcagtctttatatatgggcacaaattctcttctaaatgtaataagctcatgaattgctgcatcctaccaatatatgcagttggacactactttgcctgatgaggacaatgtcttgaccacaacaacgctacatgcgggaaaggacaatgctccttcaaataatcctgtttgtttgtgaacaacattttaactccaatgaacgaccccacccttgataattgtaaaa

SEQ ID NO: 99643 - DNA, 238 bp, Glycine max
cttctagccaaatggacttagctggaattaattcctctgatatcccctttgatcctatgtttccctctctttggtatgaagctcattacaagccttaaatgataaaccatgatctcaccttaaccttatagaattttggagctctggaattgttttgggaataagtgtgtgtgtgggggggggggggtctacctaactcttctttcaacaatactgatctttttccactctattaaag

SEQ ID NO: 99644 - DNA, 445 bp, Glycine max
  unsure (1)..(445): unsure at all n locations
caagctggttacanatataatcaatgtgagactgctttatatatttggtgaacacatccaccagacggtcactaaagctagtcagtggtgatctcttctaagagattttctctctcacgagatgacgatctatctttatgtgtttagtccattcatggaaaactggattggatgcaatgtgaagagctcccttgatattaacaaataaacttaactgcccatgggtggctcccaattggagctgctggagaagatgcccaaccatgtaatttcactttcagctgcctccatggcatgtatttagcttcagcactgaaactaacaaatgtaatttcctcttgcttctcatggaataagaacccccacaagaacacatagctataagtgaatcttttgtcgatggtgatcttgtctcattgcttctgagtaccaacaattttgaatt

SEQ ID NO: 99645 - DNA, 388 bp, Glycine max
  unsure (1)..(388): unsure at all n locations
acctcctgaagtcaagngcactacaggaaggagaggtatgactttattctcgaatttagctgcaaagagatgagctcgttccaacaatatgatggtcctaaggactctaaccttcaccagatgattttaaaatattaaaatccataaatacaatataatttcagtgtaatattattatcacattgctgattgattaacaaatatgaggtatcaacataaaacatcccanaaattaattaaaaaaacccacacaacagtattcaaattttcatttttaatacaaaggccaataagagtatacttactcaatgngtatttttacttccaattaataagctggtaaactacctactgtggttagtaattacattgttagagtaagacagct

SEQ ID NO: 99646 - DNA, 436 bp, Glycine max
  unsure (1)..(436): unsure at all n locations
agcttgcttgagaagctcctatggaggctggatctttgagcttcaataaggtctttcaaaggcgatttttagccatggagttgtagcaaaagataaagaagaagaggtgagaggaggtgccatccactacagaataagccatggaaggaaaagcttcaccaccaagagagtgtcttgtattagaagcttaaagaggaagctttcatggacgaaaagaatgagagagagagagagagtggcgtgaaaattgaaggagaataaggagagaagtntgaaattgaagtgagtctcacaagtttctcattcatcaaagntatgacaagngttacacatgcttctatttatagcctaggtcactaactaaatgaaagcttcattgagaagcttccttaagaagctaaagttaactacacaccccctctaataactaaactca

SEQ ID NO: 99647 - DNA, 333 bp, Glycine max
ctcctccacctctagaacctcacaatcactcatagactcatctcatgctctcaggatggcttcctcttctcgcttagttctcttccagtcttctcactacaaaagctctaaaaactctctagaacttggacctttctccctctagaaatctctaaacatgcaaacgcttcgagaatttcccaaactccctctccatttctgatttcaggcttaaataggtggccttgttggtgcttgcgcgcttagcgcaactctggctcgcttagcgcacataagtgaatttcggcttagcgctcgtattctcacttagcaaatgcatgcaagcggtgcgct

SEQ ID NO: 99648 - DNA, 393 bp, Glycine max
  unsure (1)..(393): unsure at all n locations
agcgttcatccaagaggacttaccttgaattaattcctttgatagcccctttgagcctattttcccctttctttgttttgaagctcattacaagccttatgtgaaaaccatgatatcttcttacccttaaggaatattggagctttggaattgttttgggaataagctgggaataagtgtgggggggtatgtttcattggaagatatgatttttggccatgcttaatgttttattttggccatgcttgatgtatatatatatngcttagttctttctttaatcttcaatntcatactgttcaataaaaaanataaaaaaaaatgaaaaatgaacaataaagaaaagaacagaagtgaagttgaataaataacgtcttgatatgagaacttgat

SEQ ID NO: 99649 - DNA, 345 bp, Glycine max
  unsure (1)..(345): unsure at all n locations
atgaacctcaggtagattctgacccatggcccaggtgggtccaatatcttgtcatatagactagatgcattatattgggctttgattaacactccataatgangagggaccttaaaataangattttcagctctggtattttagggcacctagactagtttttgtattaagggtagttttgtaatttcacatgcactaagtgaatatttgatgtgtgtgttgggaaataaatttaattgaatngggggaggtgagcattngcttactacagcccattatcacattatatagtcacactttgtgcatgtgcttcatgttttacatgcctcatgacacctaagcaca

SEQ ID NO: 99650 - DNA, 430 bp, Glycine max
  unsure (1)..(430): unsure at all n locations
agcttcttatccaaggctcatcttggnggtgaagctccttcttccatggcttattccttaatggatggcgcctcctctcacctcctttcctttgtcttccgctgcatctccatggtggaaaatcaccattaaaggaccccattgaagctcanagatccagcctccatagaagccccacaagcaagcttccatcaactagtacccaaggtgccacccttatgagaaagcaagagatcgactcatcgagagggctggtcatcccaaatccacaagatttggacattagatgtaggaaatctatgcagttaacatgatccttatggatgcagatgcatgcaacctttgtcgtgaaacttggtaaatgcggacttcatatgaaacaatgcaatgtaatggaaaagtgacaatgttcatgacattctttccctat

SEQ ID NO: 99651 - DNA, 452 bp, Glycine max
  unsure (1)..(452): unsure at all n locations
actaagctatgctgcnacattacaacagacctcctcaacctcagtagcanaatcaaccacagcagaacaattatgacctctccagcaacagatacaatcccggatggaggaatcaccctaatctcagatggtctagccctcaacaacaacaacagcagcctgctccttcctttcaaaatgatgctggcctaagcaagccatacattcctccaccaatccaacaacagcaacagccccagaaacaacaaacagttgaggctcctccgcaaccttccctcgaagaacttgtgaggcaaatgactatgcagaacatgtagtttcaacaagagaacagagcctccattcagagcttaactcgccagatgggacaattggctacacaattaaatcaacaacagtcccagaattctgacaaagtgccttctcaatttgtcctgaatcccaaaatgtga

SEQ ID NO: 99652 - DNA, 445 bp, Glycine max
atactcatagacacctgcggcatgcaagctgttacactatcaaagtatattcatttttctcgtatgaatttgctgtgcatcttatgcttatgtgctatgtgctccaactgttattcgcgtttcctaattcaattagtttgttgtttgagcagttgtcaacctaactttgattgatttacctggattgactaaagttgctgaaagtatgatttgcattcaattgcttactgtaaataatgtgatattttttttggataatgtgatacttggtaagttttgtactgattaacaactgtcattttcagagggacaacctgagactattgctctagacattgaaaatatggttcgatcttttgttgacaaggtaaaagaaggtgtttgggtatgtatcttaatacctgctcactctttcaaatgaaaaattttgttgtacgatacatca

SEQ ID NO: 99653 - DNA, 387 bp, Glycine max
  unsure (1)..(387): unsure at all n locations
ctgaattcggaccttgaaactacgctgcagccccacctgacagggtgtttggtgttgtgtaagtgccaggaggacttgatgcatctaccccaaggcttggatgaagactcaaaagatgngccagagatgcagaaagaccctaggttctatgaccttaggtagatttagaccatgggctaaatatgagccccttatcttgtcatatagataaggtntatatttttgggcttgatttaggcttatagtgagggagggtccctagtaatgtggattttttacccttgatttagttacttagactagtttgtatgggtagtttataattacatacatcaatatatatatctgatattatataggaaatgatgtaacggttgaatataaatc

SEQ ID NO: 99654 - DNA, 111 bp, Glycine max
  unsure (1)..(111): unsure at all n locations
tcccagtcgacctgatgcatgcaagctatgcangcgacgtagcttgtggaaaggatatangttgcaaggccaagacctcacgtcaggtcttcggtgtgagccttgatataa

SEQ ID NO: 99655 - DNA, 86 bp, Glycine max
atctcaaggctcacaccggatacccgacgcgaggtcttggtcctgtaacctatctcccttccacaggctacgacgcttgctaagct

SEQ ID NO: 99656 - DNA, 398 bp, Glycine max
  unsure (1)..(398): unsure at all n locations
agcttcanacattgaacatataatgaacttgtcttggtcatcgaacataaaaagggcaacattgaaagattgtatcaaagagaagatacccctctaattacataaaacttctatgtaaaccaacctcataattaggctgatcttgttgatgaacaccaaaaacatcttcataaagtggacggccatactgtttatgtgcagacaacaaaagtggtcaatgaagtgaaaaggggtgggagagccctctaataaaaatgaaaattcagaaacccataataattcaaaaatcaaatgatgaacagaagagtgaatataaaaaatgtacttcatcaacaggaagcttgccccagccaccgggatggtaaccaaaactagctccatggggaatgggagcattc

SEQ ID NO: 99657 - DNA, 418 bp, Glycine max
ttattagaatagacaagagttataaagagatattatatgtttttatatcatctaacacacgattataaaactaattgacattaactaaagttatttaatagatatataacttatatcatgataagagttagatgatgtgagattttctaactattacattaataattaaaataaattaatatcacaacataatttaatgataatatttgatgataaaaattaaaaaattaacacataaaaacaaaggactaaaaaaaattttgatgaaagactaaaagtgaaaccttacaatttcaagaagtaaaaacatgattcatccattttaatttcaatttcaattctatttatgatgttgcagttgccctgattcctacacttagcattttgatgggtgaatttagagaaaccataaattaat

SEQ ID NO: 99658 - DNA, 426 bp, Glycine max
  unsure (1)..(426): unsure at all n locations
agcttgtgactgaggttggtaagaatggattatatgtcaangttgcattgatagactactacttactcattcattntctaagttacttctctttcatgtatatgtggagagaagagaaaaatattggtaggttgcatcttttacccttgtgtacacagcagcaacaagccttccttcatgatttagccttctgatccaatcaagcaacatgattttcacatcagagtatgtgacatcaatagcccttcatccagaaaccacctccaacacaacaatcacagagttgaacacatcagattttgaggtagcaatgctccttctctggaagctccagtggcaccagctagccaggcttctctatagttaatttcttttaatttacattttcaccctgctagtgtaggtcccatcatggattatcggact

SEQ ID NO: 99659 - DNA, 321 bp, Glycine max
  unsure (1)..(321): unsure at all n locations
acaaacaaaatgcaaaaggagccctaggctgcaactcgccattccatgggtattggcttttgaagggggggaaaataaagtttttgaatggcaaaaccgcccctccttcgtcattctataattggtgcaggggtggctcgcccaggcgagctaaccctgcatttttttttttttgaggggaacattaaccatgtcccctcctttctcatggattagcgtcttgcctaacttgaacttacttangttagaattangcattgattacttatttttacccttttttaaacaaatagtaaaagaaaactgcgaatacaaaggata

SEQ ID NO: 99660 - DNA, 362 bp, Glycine max
gatccttaagtcacctgaagctgcagctagactgtgttaaaagaaattcgtccacagcaagcgagatgcaggaatatggggccatcatcgatgagcgaaagagaagctaacttaacggcgactcacgagcaaatgctacaggatgactcctcccagatatcaatataaaggaaagctacgtgaaaggtaattgattccctgcaccaagacggcacaatgaagatggaccgatttgctcttacttgacacgagtcaagaactttcccgattgtagccaaggccaaagcaatggcggacacctactctgcctccaaggagatccacggactattgagctattgtcaggctatgatggacgtaat

SEQ ID NO: 99661 - DNA, 336 bp, Glycine max
  unsure (1)..(336): unsure at all n locations
taaggatatcanattccgcctgacaaataataaattatgttntattgttatattggtagtaatttataaattttggctaataaagaaaatcaaagatgaaaactaaaatacctgaatatcctcccatatcaaatccttttgagcagcagggacttccttccaagtctcgtatgtcacgtcgaccttatcacgagtgacaatcccaaaatatgttcttaatttcttcttgtggggaccgtcgaccttcccgatcgtaggatcgacgtggaccactagtctctctgccccaggtggtctagtggccaaggaatatagccgtgtggctttacgtgtccg

SEQ ID NO: 99662 - DNA, 455 bp, Glycine max
  unsure (1)..(455): unsure at all n locations
catgcaagcttgcatcagtataacccttcantgcatattagagtcttcataaatgttgaattganctttagttcttcttaagtacttaagtatggtcttaaccactttccaatgttcctcaccagggtttgcttgatattgactagttacacctagtgcacaagcgtcatcaagacgtgtacaagtcatggtgtacatgataactcccactgcactagcatatggtaacctactcatgtgttcgctttcttcaggagttgttggacaattctccctactaagagtaattccatcacctacaggcaaatagcctcggttggaattatccatgttatatctctttaagatagcatcaatgtacatagattgggagagtccataaaccttttagatctatctctataaatctntatacctagaatatagactgcttctcccacatacttcatggagaa

SEQ ID NO: 99663 - DNA, 414 bp, Glycine max
  unsure (1)..(414): unsure at all n locations
aatcaagaacaagcgngncttacatcgttctcgtgtatgacatccactccacacggttgagtagagagacttcatctattcccacgggtggcaaaaatggcaggtacttgaagggcattattgcaatgcggaagattctgcgcttactataccatgtcccatattattgcagcttgtgggttcgtgagccttgactactaccaatatatagatgttgtttatacaaatgagcacatcttaaaagcttactccccacaatggtggcctcttggtgaatgaagcgactattcctccttctaatgacgcatggacctaatccctgacccaactacaattcgtgcgaaaggtctgcctacatcaacaacgattangaatgagatggattgggtcggaccatttgaccaccgacaaaaa

SEQ ID NO: 99664 - DNA, 268 bp, Glycine max
attcgtcagaacgcattgcatctttctccaatacgcacatcgcatccctttctggtcgacggggtgaatctctattaccctcgcactctcccacacgttaggatttttttgttttctttgttcctcgctaaatgaaattaaaatatccaacttggatttctgggttaaacgttaaattgttaacgggctttgggtgggtatctctttccgcttttttggatacagatttgcgtgttttggttccaagtgttcactgacagacactgat

SEQ ID NO: 99665 - DNA, 428 bp, Glycine max
  unsure (1)..(428): unsure at all n locations
agctntcttgaaaaacttccttgagaagcttctttgagaatacttccttgagaagctagagcttagctacacacacccctctcataactaagctcaccttcttgagaagcttcctctaagaagattcctaaagaagctagagcttagctacacatcctctctatagctaactcgcctcttgagatgagaagctagaacttagctaacaccccctataatagctaagctcacccccatgacaaaaaaacatgaaaatacaaagaanagtccttactacaaagactactcaaaatgccccgaaatacaaggcttaaaccctatactactagaatggccaaaatacaaggcccannacgaaggaaaacctattctaatattttacaaagatagcgggctcatacttagtccatggggctcaaatctaccct

SEQ ID NO: 99666 - DNA, 425 bp, Glycine max
  unsure (1)..(425): unsure at all n locations
ctttaaactcagcttttatccagacactctcttggtggngaagcttctccttccatggcttatattccctagnggatggcgcctcctctaacctcttctccatggtggaaatcaccattgaaagacctcatttgaacttcaagatccatcctccatagaaagcttctcaaagcaagctttctcgaatggtaatcaggggcacaaaagattcaagtangtgctccttaaacctctattaattttcaattntaccctcttcttcattggtgggtcttcatttntctccatgtatcttctcacatgtcttgtgctaaatgttgtcaagatgattctttataatttccatcgattaaaattgctacagaagctagatttgattttctatggntcaaatttcttgttcttgttcttgaaccatgaattat

SEQ ID NO: 99667 - DNA, 393 bp, Glycine max
  unsure (1)..(393): unsure at all n locations
atgcaagcttctcgatatattatgcgcctgaatcgcactctgcaacttaatagntatgaccaatccgagttgctcaagagcattcatggttcaatttccagcgtcgcgatatattacgcgcctgaatcagacatccgagttaaaaggtatgtccatttgaatttctcgagagctgtccgtgataatattcgtgcgtctcgatatattatgcgcctgaatcggacctccgagtgtaaagttatgaccatttgatattgtcgagagctatcgttgatcaatttggagccgttcgataatttaagtgcatgaaacggacctccgagtaaatagttttgacctttgggagcggttaagagcttgaataagccactacacatcatcattatatattat

SEQ ID NO: 99668 - DNA, 215 bp, Glycine max
cttgcacataaaatatcaagacgcttcgaattgacaatggaactcttgagtattcaaatgtcataactttcactcggaggctgattaggcgcataaatattcagacacttcaaatgaacacggaatctgtggagaattcaaatggcataccttttactccgagggccgaatccagcgcctttatatcgagaccctcaaattgacaatggaagctc

SEQ ID NO: 99669 - DNA, 454 bp, Glycine max
  unsure (1)..(454): unsure at all n locations
agcttgcactagaataatctggaaaagatctatcctgacaattggagaaatctgcatattaagctggtccatgacacccgcaattacctgctccagttggaattaatgcatgttaaaatgcattaaagtatatctgtatttattcctaatggcaactcaaaaccaagccacttatctacctcaaactgaaaatcttaggatatgaaaacataagaaaatttttgaataaagaaaatagataaggatagataatttgacatgccatggtgaaaaaagagctgaactgaatgattgcttaatttctttcttctttttaggaaaaaagagctccatgattgtatttntaatgttgttctcatggaatgatagtaatgtgcacacctgtgtctaccttaaatcaccaacattaaacatattcatactagaataatatttttgtactattaatataaaa

SEQ ID NO: 99670 - DNA, 402 bp, Glycine max
  unsure (1)..(402): unsure at all n locations
tatttattcanataacatatatatatacaaataggagagagacagcttgacaagctttgacaagacagtacacactgctgtcttcttcaacaagataaaatagggaaatctactctaaagatacatctaataatacccataattataacactccccctcaagctggagcatataaattatatgcaccaagcttggaacatataaactgaattctaggcccccttaaggacttagtcaaaatatctgctggctgatcattggaattaatgaattcagtgacaatctctttagacagtagcttctcccgaataaagtgacagtcaatctctatgtgcttggttctctcatggaagaatggatntgaagcaatatgcagagcagncttgatatcacaatacaact

SEQ ID NO: 99671 - DNA, 441 bp, Glycine max
  unsure (1)..(441): unsure at all n locations
agcttcttatgggccttgaacaggcaactatctcctctntcaaaaccatgctatgtgctcgcgactggtccctttcttccttgagttcactattgctaccccatagagctccgcgaaatttgttccgaccatactcttccttgcgagccctcttggtctcttgttcaagggctcttgcggtaattgcattctcttcccgtaacctggcacactccttccgaacgtgtgtagcggccaacttgaacttctccttggcaagttttgcctttcctaactcgctnttgagagcttggacttcttcgtcctcttccagtgcttcaaagctctctttgctgacgacttttaacttggcgagccaatctaaacctcgtacatgaactttcagccattcgtggtacccaccaatgatgccattacgaaatgcctctagctcttgatctt

SEQ ID NO: 99672 - DNA, 428 bp, Glycine max
  unsure (1)..(428): unsure at all n locations
tttgagtcactcaagacagctctatgtttattcaattggngtctttatagaacttggcttttcttaatacacttaagaaaactcataaataggcattaattgaaaaggcttattgattttgtttaaaaaggttggaataattaaagccatcagggttttggactcaaccaatttcccattaaataagatgtaataacaattatcanagagacatnggagaacattcaccataaaaggatagagagcacatatgaactaatcaaactgaatggtacacatattgaaataataagggactaaacaataaatatctaaacttcatataaccggttaaaattacctgctacaacaagtcaattttggtgattcatcgtgcactgcccatttcaaacatttctaaaactatgatggngtgaaggggtacattg

SEQ ID NO: 99673 - DNA, 433 bp, Glycine max
  unsure (1)..(433): unsure at all n locations
agcttaaccaatcagatgggacaattagctattctaattgaatcaacaacagncccagaattctgacaagctgccttctcaagctgtccaaaatcccaaaaatgtcagtgccatttcattgaggtcgggaaagcagtgtcaaggacctcaacccatagcaccttcctcatctgcaaatgaacctgccaaacttcactctattccagaaaaaggtgatgacaaaaatctacctaacaatttctgtgcaggtgaatcttcttccacaggtaattctgatttgtagaagcagcacattccccctcttccattccctccaagagcagtttccaacaaaaaaaaggaagaggcagagaaagagatctcggaaacgtttagaaaagtagaggtaaacatacctctgttggatgcaatanagcanagtccaagatatgcc

SEQ ID NO: 99674 - DNA, 446 bp, Glycine max
tacttgagaagggaaatactcaataaacatatgagcacatactcattatagcaatcaaacaagacaaacaaataaaattgtgttagtcatcatataaacaagttaattgaaaggaagagttcaaccaacttaatttaaaagaatatggatttgatgttacctttttcatgatttaagtgcttagatctttatagatggaagtcagactctggctttttgcttaatctttcttgagagatgttctcatcgctctcatagtccttggatagaaggttgatctccttctgtgaaccatcggatgagtcattgtcatcccaagccatatacgccttcttggatcttctttcttcatcgctgttcttctcattctttttggccatgaatcatatgtggggcagtgtgccttatgtgactgggtcgaatacactatagcatttaagtggtgg

SEQ ID NO: 99675 - DNA, 448 bp, Glycine max
  unsure (1)..(448): unsure at all n locations
agcttccgccatcgacacctactggttctttttctactaccgccttccccttttttttcggttagtaattggttaatttcaactgattgggtttatttgcaccgcctagtagtagcagacacagagaagaagaanaatttgggtttgtctttgaaaggttaaatattttatgttatatagaagtactaacattgtgaaaatgggtcccatatntttcaagtttatctaaaatctcatatgggtgaaatataatattgtatcatactgataacttcaataaatttcattataaaaaatatttactttataatatattntgtcattntgtgtgctgctaagtgtcagattaagctactacacatcaagattcattggttataaaagttntattgataagtcaaactaaagtgtgtatctagtaatattataagcatatagtattatttat

SEQ ID NO: 99676 - DNA, 405 bp, Glycine max
  unsure (1)..(405): unsure at all n locations
aaaacaagaatcttgcatgttataacatttatcanttcttttgcanaaaactctgtatattcttgtaaagttggaaaaagcttccaaaataccattgagagaaaaaagactaagcattgatttgtatatttgtctgtaagacgattctagatttaatatctgagcaaactttaaccacaaatctaatttgatttgtttagagtcaatgatggcttggtaggaaaacaaacactaggtgttaatcaagcttgtggtagaacttgatttatggagacagaagtggccgtgacacaatacttgtaacttgtgagaagttagtggaacttggtgttttgcaataattatacatagtctcaatgtagagacaaatantataacttcaatgctgatatcaattgtttcttc

SEQ ID NO: 99677 - DNA, 445 bp, Glycine max
  unsure (1)..(445): unsure at all n locations
agcttgtactntaatgcttgtggaagacttgttatttaataaggaagccttgcacccatcgctacgtatgcctagtgttcccatcccatgtattacaattacaataataaaataaaataaaatatatattgaaactttgatgaacatagaattctttatactctatactgtgatggaatgagataaggaaaatgaaagggaatatggagacgtgaggaagtgcgtatactgtattgcagcaaagcaacggtaaaggttatcttcttgcacgcttgtagcagattttgtacatcctagttctatgcatgttcttttccttggaaagggtgagttttgacatctgagagtgcagaggagtaagggaccactttaaaaactttgntctttntattcatttgtccgtagaaaggataggaaacttngtaaacaaaatacagaaaaatat

SEQ ID NO: 99678 - DNA, 330 bp, Glycine max
  unsure (1)..(330): unsure at all n locations
ttttcatttctcacgctcacaggaggttttaactattagatgctataagattttttattgatgtgcaatatctattgtattcttaagatattcagatggaaatttgcttaccatgtagtttatgactgacataattatgtttcccatgtgttactntacttcatataactgttatggggaacactctgctgctggttgacatcatataattattaatattgttgcgttactcgagatggaaatgtgaatttcagaaacacataaaatttattacacgtcagaagcgtgctgacgcaaagaagcttctcatagtcttcttacaataatgga

SEQ ID NO: 99679 - DNA, 450 bp, Glycine max
agcttccttgagaagattactaaagaagctatagcttatctacacacaccccctataatagctaagctcacccccatgccaaaatacatgaaaatataaaaaaagtccctattacaaagactactcaaaatgccctgaaatacaaggctaaaaccctatactactaaaatgggaaaaatacaaggcccaaaagaaggaaaaaccaattctaacatttacaaagaagaatggatccaaccttgacccatgggctcaaaaatctaccctaaggttcatgagaaccctagggccttctttagtagctctagcccaagcctcttggagtcttctatccaatacccttggggggtaggattgcatcacattgagtaatgatgtttgcatgaatatttgaaatatggaatggaatgtatggaattgagaatgatgaatgctatgattgtatgaaat

SEQ ID NO: 99680 - DNA, 441 bp, Glycine max
  unsure (1)..(441): unsure at all n locations
agctnttacatgcatgttcacaccatatttattatacnttcgatcaacngangcaatctatttgattgataagaaaatttatattactcttctaatgtagtccacaaccaaaaaaaaatataacaaaaaatattggtgttcttttaaagggaaatcaaatggcagatgcacannaaataataaatttaaatgtcttttatttaataattatttattttatagaaaaantatttcaaatcaaatatataatgtatggaattttaatacttaggtggncttcagccaacagtgcctaattctaagagtcatttcaagcacaggtacaggtctttgctttcaaagtaacatggggatcaatgctctcaacacaaaccctnttgcnnaataataacacatgaaaaaggatatagtaagcatggaaaataactaaactctgttata

SEQ ID NO: 99681 - DNA, 382 bp, Glycine max
  unsure (1)..(382): unsure at all n locations
taacaatgaaacttgccttttctcttttttcngctacaaaggagctttgctttcttcatatcagaatctttgtaagtcaagttttctatgaatgaacaggcttccaccaataatgtggaccttatatttactataagaattatgattccaacaaggagaaattaccaccatatacatcttgtgtaacacccaaattttgcgtgatataattaaaaaagattctatttaaaaataaatagagttctatgaaaataatgagattttcgtaatttaataaataagaaaaacataatttattaattaaaataatgattttacggtaaataaaaattatatgctcctataaataaaatgatatttaattattcattgattggagtaa

SEQ ID NO: 99682 - DNA, 434 bp, Glycine max
  unsure (1)..(434): unsure at all n locations
agcttgatcacaagttcaaaatggatgctntgcacaagagcatacaacagcttaaaacaagttttcacaaaagatanttttaacaatttgtttgtccaatagtaagatagaagcaattgaagataaacaagttataatagaagctagagtaaaaatacaaggtaaggtttatattggtttactcaaactttngagctacgtctagntntccttcactttcttgaagggttccactaatcataaacttattacaaacaagtttttatcctgccacatctaactacaacaagtattctctaggccacttctagatcacccttaatctccccttgagattaagaacacccaagtattatttgatcattaagtcactcctgactttacaaacaacagtttgaatgaatacaatattcanatctagcaaagagagagta

SEQ ID NO: 99683 - DNA, 396 bp, Glycine max
  unsure (1)..(396): unsure at all n locations
tggttgggcaaatattgcagataaattcaataaggcaacttatttgagatatgaatataaaaaattaagaaataggtgggattctttgaaaaaggaatgacaattatgggctaagcttattgggaaggacatangtcttggctgggatggggagaagaaaaccattgcagctagtgatgaatggtgggaagccaaaattcacgtatgtattattcaacgaaaatagagtttttatgcaggccaatcttttgtttttttattttttatgtgtgattcttgactntgcggccaaaattgcagttgcagaatgttttttagaagcttgcgtctgaaattttagttgataattagatttgttattacttttgtacatgttgcaattgaggtaggttacat

SEQ ID NO: 99684 - DNA, 342 bp, Glycine max
  unsure (1)..(342): unsure at all n locations
aactgttgatgatgtatataatgcatatgaggcgggcttcaaccattgcctttggcaggtgatgcacttgtgtgaagtctctgacccaagtgtgtttgacatcaacaaagatgtctacaatggggggttgatgatgattaacaacattctagaggatgctgcccctatgccaaagaggctgatgacctcaacgaaggacttacatactaaangtgttggggtaaggatgaagaccatgtaaggcctataggtattgagtnctctacgtttacatgtacaacttttttgtgtatcttttctgtaatcattgctgcatttntcaacttaatattaatggaattt

SEQ ID NO: 99685 - DNA, 418 bp, Glycine max
  unsure (1)..(418): unsure at all n locations
cttctagtagtcagccttctgagcctggtggatggtctagttcccttgtataaccttcagaggattatctgaatatggtggggacattagggtgttgcatgacctccaatataaacaaaattcagtatgacaaagtagttatgtatacgcaatagttgaaattaattacaaatttatgcattacacattatgcgacatnggaatangtatatggtactttatgcttacgcagttacgtaggaatgttctcctataaaccctcgtcatgatcaatatgatttacatatacatcatcctattggtgttcatcattaatcgaaggcatgtctttggagaaaggcagcatgtcagtgacatcaactgttgaaccatcaagatggtgactgctagaaattgttctcccttgcaaaaccactga

SEQ ID NO: 99686 - DNA, 446 bp, Glycine max
  unsure (1)..(446): unsure at all n locations
catgcaagcttggaacaaagataatctaaaccttgtctatgccaattatctaactggtnatcntccaaagttaggctcactattgaaaaaagaagctaaaaagcagatcagccagagaattngactttcctaccttggcatgaatgatgtttttttttttggggttgggcaaattcataacatcatttgaagactataatctgcaaaggttaaacttggtctccacaatgttgaaccaattaaaaattactaaaaagatgacatagtgcaccccatttttttgactaattcgggacaagagagatagttatagttttaggccttacaggaataatgtgatgagcattctcatttttcttcaccactaactaataaaaagcaatatagcctccacatgagcttatagatgatcacatatttatagaaacatttattagtaagccaaa

SEQ ID NO: 99687 - DNA, 442 bp, Glycine max
  unsure (1)..(442): unsure at all n locations
ttcaccttgtacttagtaatagagccatctggattctcttttactcgaatcacccacttgcaactgangacagatacggaagtatgtaactcaaccaaagaccatgtaccattgctaagtaaagcatcatactcaacctgcatagcttgcttccacgtagaattagagagtgctgttttgacattcttatgttcagcgtgtgctaacattaaagtgggattgagtctagacttcactatgccagatttggccctaatgcacatggggtgcacattaacctctctcaccaagggtcctgaaccagaatcatcagaaatggatgctacagaggtggatggtgaagcttgagatgtattataggaaacctgaccacgggagggttgacgcaatatangtgaaggttgaggtatagttggtgaatgaaagcataagctcctgactg

SEQ ID NO: 99688 - DNA, 451 bp, Glycine max
  unsure (1)..(451): unsure at all n locations
catgcacgcttattggtcttttccatgntatatnnttttattagaagttataattatgncggacnacatgattattgagactctcttcgctgtcaaatttggtagtgctaattatgacatttaataaatcatcaaaaataaaatgattgttttggtctgcgaggttttaaatcttcagagattccttctttgttcttttggcgtaaaagatcaaattaatgaatgccaataaaatacggaggaaccgaaattgtgtttctaatgtgaagaaagctctcacccctgactcataagagaagaaagaacatgtttgggtgaaatttaattcaacttatctcaattttctgggttggttcttatagatgtatcatttgtttttgcagaaatcaagtcaatctaagaagctaaaattggagactttagtctcatgctcagacgcttataaagcacc

SEQ ID NO: 99689 - DNA, 443 bp, Glycine max
acttccttgagaagcttctttgagaaaacttccttgtttgctatagcttagctacacacacccctctaataactaagctcacatccttgagaagccttcttgagaagattcctaaagaagctagagcttagctacacacacctctctaatagctaagctcacctccttgagatgaaaagctagagcttagctacacaccccctataatagctaagttcacccccattccaaaaatacatgaaaataaaaaaaagtgcctactataaagactactcaaaatgtgctgaaatacaaggctaaaaccctatactactagaatggccaaaatacaaggcccaaaagaagagaaaacctattctaatatttacaaaagaagaattgatccaacctttgcccatcgactcaaaaatctacccctatgttcacgagaaccctatgggctt

SEQ ID NO: 99690 - DNA, 264 bp, Glycine max
ttcgtggcaattcagccttttaatattatgcgcccgaatgaacatggtggaatagttgatagtcggatgatggagttccgtgcttagtaaacgattcaatatatagcctgaacggacatcggggaaagtatgagccttgaatttcagagcttcgagtcaattcagctttcactatatggcccgattgacatcgggaaagtatgacattaattctgaaacttcggagtaaatggacgttcatatttatccctgatcgacatcggg

SEQ ID NO: 99691 - DNA, 370 bp, Glycine max
tatccttatctaggagaggattctaattctgaggatcaaaaacaccttggttgtataaaggacttttacaaccttttgtgtgttgccctcgctggaaagagagatacttttctttctttcatcttcaacccttgtcttttcaaccacaaattccagaatatccacctctgcccagaaatatctcgtggccataactcccattttacgcactcaaattaagtgattcttgagcctaaattgaatttcaaaatgagagcttccacctcgttttggaatcacctcatttggagcccggcagctttcgttatagcctttttatatttctgtccagccaccacttaacctacgttttacatcccattatccattt

SEQ ID NO: 99692 - DNA, 415 bp, Glycine max
catgcaagcttgccgcccagctcactttatcgagctatgttgcttcctccacaagcaacagccttctggaggaatattctggagggcccaagtgggcctggttgctatttgcacccccctggttactaaatgcaccaccctttctatattttatggaattcttttttttgtaacgttactaaactttatgaatatcgtaacgatacttattttccttccgcaaggttacgaatccttacggattatgtatttactctttttagccttcgaagaagttacggaaacttacggattgcgcaaaaacacctcttttcgattttcgccacattacggaatttcacgaatcacgcaagcttgctccctttctatttctgagacgtcttcggacttcatttattgcatgtcatcaagtaat

SEQ ID NO: 99693 - DNA, 349 bp, Glycine max
  unsure (1)..(349): unsure at all n locations
aaaaagagggcggcaaggtttttttttgtgaatcacaaagaccggcatctttaaggagatgggccccaccgtaaactcaatgcaattttaagaggaatagactaatatctggaagcctataaatgggccttatttacccaccacagtataaagaggttcaatagatgggatttcatctagtgaaagcataaccatataaaaacctanagatagatgggcttgaagaggatagaaaacgagtacacatcaacttttaagccgaaaacatataacatctgccctgtgaatggatgaatattttacggtttcacattgaagagtgctaatgaaatgtgggacacttcttcat

SEQ ID NO: 99694 - DNA, 433 bp, Glycine max
agcttagcagatataatttcttagatggaatatactctaacataatttatgcaggtatccatcacaatccagaagaacattgatgcttctattaaagatctagaagttcaagttggacaactgtaaaaataactatctgaacatggaagtggatctttctcagcaaccacacaggtcaaccaataggaacattgtaatttaattacaacaaggtgggggactgtggttggtttgaaggataataatgagaaaaagaataaagaatgagttgaataggaaaacgagaaaaatgatgatgtggtgactagtgaaaaagtggtaagtgaagaagaatagaagaaatcaaatgaacaaaccactaataaaagtagatctatagtaaatcatccaccaattgagcatctttcttatccacatgctctgtcaaagaaag

SEQ ID NO: 99695 - DNA, 404 bp, Glycine max
  unsure (1)..(404): unsure at all n locations
agctttgtgatngaattcttaatcactnttttccttatgcttgncgtatccggggttgccactgataacagagcaggaaaagttcttattccatcattaaaatttgttttttttgcttgcttgtttggttacaattagcttttattttctataatattttttttattaacacgtgtctagccaaattggctgtaattggctaatcacgtccccaaattctgacataaaaaatggagtacataaattgactagttgtctaaatatatttgtagcgttttggatcacttggaagaatgcaacacgtttacaccacacgacacatcttatacgaaacaaaaatccatataacatgtctgaatatttgtctttcttggacctcaattccatggatttcattttattat

SEQ ID NO: 99696 - DNA, 354 bp, Glycine max
ttgtaatgatagaaaaacagacctggcccacttggatgctccaagactttggcttatgtcttcatctgcaccaaagacatttgtcaataggatataggaatatcatggccattgttgtaaacctaacactatgcagccagatacatgtgctcatattctatgactctcctccctccccattttctccttttattagatttgcaaaaagattaacttattcttttccttcattgatgattcctcatcctcctgctacgccttttatcagcaaattattattatttaaccttacataaaaagataaattggcagattggccaacaaccaaaaacactgagaaatcatgtgcctatt

SEQ ID NO: 99697 - DNA, 397 bp, Glycine max
  unsure (1)..(397): unsure at all n locations
agctntatgacaagtataatacaagtatttgtattattataatctattctcacaaatgtaaatacttttttgtaacacatgttaaataatacttagatcgacaacatttaccagcacaatagtatgtttgttacaacacaaaacaaaacatatataatcgaaatcaataaagaaaggattatagaaagaaaaataggtatagatagaagaatgtgttatcaaaggaggagtcatagaaagtagaaatagatgaggatcaaaatcaaaaataatagaaataggcaaaagcatacatgtttccgtagaaccaaaaagtcataagtgcaacaaagttggtatacaacaagtatctaaatgttcataaccaaataaatagaatacattcttgcctatatat

SEQ ID NO: 99698 - DNA, 389 bp, Glycine max
  unsure (1)..(389): unsure at all n locations
agctcttcgattcattntatgcacccatggtggttcacattgtgtgtcgggcatttttattctcgtttcgcttactttttataccccctgttgacgtgcttaagccattttacttaagtcatttctcgcttaactaaaaaataaaataaatttccaccgaacgtttgaattgtattatccattaacttcggttaaaataaattccgaccgttcggtcgtgccgtaaccacgttggaaatcaaaaagaggtaagagaaataatattataatcaaaaaaacatcttttaagtaaataaagcggaaaatcaatcggacgctttctctttgggatttctcattcttaatcgaattgattaataactaaagtgaaaactaaggctaaaatcaac

SEQ ID NO: 99699 - DNA, 335 bp, Glycine max
  unsure (1)..(335): unsure at all n locations
agcttgtgttatattatcctattggcgagtgatctccagggtgaagataaaatacattagtcaaggcactgatgactggttttggctttatcnggtacccaaattgttgtctagcgagaagtgggttgtagctaattccgacacgcatacccaaaagaggtacgttgggatattcaccacaactcacaataatctctccaacgtcactagctgctaggtcccaaacgatgtcagatgggtcacgagtcatgattcggtgaggccacaaaacgttgtcatcattggtcttgaatgcacaggattgatgttagtgggaggtcaaccacatatagagt

SEQ ID NO: 99700 - DNA, 295 bp, Glycine max
accttttacatgagcgtgtctatgatgaattcttggagaaaataaagaaaccagcttttagacatgtccgtggtgaatctttcaacaaaagtgttgaacaaggccatgtaattttatgtttatagtaaccactgtgatattgcatgtactcgacaagattgtttttcttgttgttcctccttaacaatatgacttcatgggaaaagttaaagttgtgagtgcatgttaacatccgtttttgggaaaactgatgttgtatgtaaacatcaatgtcggtttttagtaaaaatcgttg

SEQ ID NO: 99701 - DNA, 441 bp, Glycine max
agcttttatttcatgaacttttggtatgaagtctttcagccccgtaccagttcagatgaagttttcttatggttcctcaagcaccaccccattcccatatacgcctctcttcaataaggaaagttgcgtcagcattacacttcacaagtcttggtggaggacaggcccaagtcgtaacttcttgagctttctgcttgcaagcagtaccactcatgataatttgcacctcttcccattgagaaagacaatcttgtactacgaaaacaacaatgttctcgggttcctttcttttgttttcccaaactttctcatttctagccccccataaactccacgtcatcacaatacattttcagagtttagacatccccattttctcaaaaaacaaaaagatgagctccacaaaacccttcacttggtccatcatataacttatctttt

SEQ ID NO: 99702 - DNA, 407 bp, Glycine max
  unsure (1)..(407): unsure at all n locations
tgctctcccaacacctcacttgcaagtgcatgggttgcatgagcagttnnggccacattagcagccatcgttcttagcgggcacacccatttcagcaccctcaaattgagccttaacaggtgccactcccatgaccaaagtctcggtggtggttgactcaatgtagctcaagtctgggtacatcttgcagctgcagaacaagtagaaaaagaaaacacgttttagttgaaaattacataacacacacacaaaaggtgtagaagcttcttatgataaaatttcacatgaacatctcatgtgaaaattgtgtctctctcttncttaaagtgaacaattttttatatgattatatccaaacatgaccaagtgaattatttctanaanacatattccctgaaaataaaacc

SEQ ID NO: 99703 - DNA, 439 bp, Glycine max
  unsure (1)..(439): unsure at all n locations
gctgcagctataagtttagcatagttttgggttagtttttgttangctcaattcaagaagtattgtggtaattttttactgtgaaattcatacattgaggatccccatttaatatcttaatattaacatttttactttagatgttagcagctgagatctccttgggagtctaaatggtattaatcacacaaaanatgcgtattgtgttcaaggcattttctctcttataaagctgaaagtcctctacctcgtaataaaatcttagataatgccttttgagaacttagaatagtcaatagtagtgcctggtaattttgtattatttaaatatttggaattcatgcctagtaacacataaaggagagtaaagcaatatcttcacctcttcacttttacaaatgatcataatattagatgtccactgttacatagagatcta

SEQ ID NO: 99704 - DNA, 417 bp, Glycine max
  unsure (1)..(417): unsure at all n locations
ccacaagacanaatataacattggtattcagggcactctctaatgttcaaaaaagggaacagttgtgaaatacagagacctcccctatctggcgcgtcagaccttgctgtaaaccaaaatcatgtcccgccctggacaacnctaacaaaaagaaatncggacaacacttgtctaggcttgggggcttgacaagcttgacagacctncaattctcacacctgtncaatttaccactcttaacactggacaataattttccatgcttgggggctcgacaaactcacgaccctcctacttgtcaaggctactacctcggacatcagacaatctccattgtgcactatctatggtccacaaaatacatgtgtcaaaanatacacgtgtcaagctatgtggcattatgagtcacacataaac

SEQ ID NO: 99705 - DNA, 421 bp, Glycine max
  unsure (1)..(421): unsure at all n locations
agtacccaataaaaatgattttataataactgcaataaaaaggtatattttatgtgtataattataaataaataaataaatcctactttggttgtataaaaggtataaaagataaataaataagtttttaaaataatcttaaaacataaaccaactaaccctaaatcttcacaaaagttaaaaagaagaggtataaaacaaccacaattaaaatctacataaaaatgacaaaaaaaaaaattggtcactatgatttttctaattgatactttatttttagaaaatgttagacaaattttatttccactcccttttatattaatacactttctttnttctcttaaaaaataaccccccaaaaaaattcttccacatcattattaatatgataaatactaactattatccttangatattggt

SEQ ID NO: 99706 - DNA, 456 bp, Glycine max
  unsure (1)..(456): unsure at all n locations
taacgtcagttattaaggactntcaacatcgattattttcttatgttgaaactatcataaatcaatgttgttttcttctcaccaacatcaatttttagaaaaactaatgttgttttttggatttttataacatcctatctatttttttaattaccaactataattattcatatcacaggctatcattccaagttgtaaaaaactctaaaaataaaccgaagttataaacaaaatatacccccaaaagttataaacaaaatataccaccaaaagttatcaccaaatataccactaagagttataaataaatataccaccaagagtacttataaacaaaaaatttcccacaaatgttttcatgatgttccaagcatcatttcgcacaaaatataccaccaagagttataaacaaaaaattacagatattagtataagacaatgtactttaattacaaa

SEQ ID NO: 99707 - DNA, 420 bp, Glycine max
  unsure (1)..(420): unsure at all n locations
tttatatagatgtgaataatcatatcatgtgcattactntgtnnnaggtaaacaacgttggagtaaactacagacagccaaccatcgagtacagtgctgaagaatattcagagatgatgacagttaatttaaactcggcattccatctgtgccaacttgcatattctcttctcaaagcatctggaaagggaagcatcgcgctcctttcattctgttgctggtgtgaccagcatgggtactggatctgtctatgcagcaagcaaagggtagaaccatacttgtcacctttttctttcatatacatatgaaaaatgaggagggattaacttattctaagaataactttaaaagaattattttctattataattattaatttctttgaaatctaatgattaagaataactactcactataact

SEQ ID NO: 99708 - DNA, 448 bp, Glycine max
  unsure (1)..(448): unsure at all n locations
agctngtctctcaatactatagaaatggtcttcttcaagtcttntgtgagaatatccgcaagttgcatttcagtactgcagtacttcaagtcaagctgttttttgctcacttttttcacgaagaaagtgaaatcttgtctctatggttttttaccttccgtgtgctactggattcatgttcagctgataatgaatttgttgtccacatacaatttgattggcctctgaatntccatctttaattcttcaagtaaagagtgtagccacattgcttggtatgcaacatagcatggtgcaatgtactcagcctcgcaggaagataatgccactacaagttgtttttttgatcaccagcttattggtgcacctatgaacttgaagagatatccagtagtgctttttcttttcaccttgtctccacaccatctgagtatgagaaactcatcaa

SEQ ID NO: 99709 - DNA, 261 bp, Glycine max
  unsure (1)..(261): unsure at all n locations
attccttcgtttagaatttgagttgagactgtatagtggttgttcaattgtgtatgaaagttttcttttatttgattaattcattgtgatgcttacaaatacagatgctgttttgaatgtgaatgtttggtttttgggtttatttgaattggtggaatatggagcaggtgggggggggggtgggtttcntttaaaaaaaagtaaattccccttttcctaattggtagtaatatttcataaaagaattgatatgtcttctaa

SEQ ID NO: 99710 - DNA, 438 bp, Glycine max
  unsure (1)..(438): unsure at all n locations
catgcagcttncttcattggacttgttaaatattaccttcctttccatatgtatcctttgtgcttctgatattgttnttccttttttaaacactttttccccattgcaggacgccatagaaataccaggcttctatcagcgccaatggctaccaaattatcctgaaattgttgaatttaagtatgatggggaaacctatgaaattcaagtcagataacacaaaggaaaacttttctttgctgatggcctaacaagattgaggacagaactgcagatttatgaatctgtcacgataaatttcctggcctgcgaccacccttcanaatatgacctccacttcactccaccattagaccagcagaaatgcaaaaggcgccgtgcaacaagaaaacacatctggacatatgaaatcacccaatcaatgctaggcgcaccata

SEQ ID NO: 99711 - DNA, 350 bp, Glycine max
atataataagcttgtgaaaactctctcccgacaatcaggcaaattgtgtagcaacgattgccattttaaattgtaatgacaaagaacaatatgaagaataagaaaaaataaaataaaggacatatacagtgtttaaagttcggaatttcaataccaatccaaatctaatataattataaattaccaaaataagaaatctaaaaaattgtaatttttttggtgtaatctgatttttatatcttattatgaaaaattgagccaaacaaatcaaactgcatgtaataattatattaatatttattgtaataaaatataataaatattaaataattattacttttctttgttat

SEQ ID NO: 99712 - DNA, 415 bp, Glycine max
agcttaaggatcctcatgacattaaattaaactgctggctcaaagaaagataggattgttattttgactccaactattcaatttcctcttaaagcgtgcatggtgcaactagtttttgtttcactttcaacccccttcatgttaattccacactgaaaagacaaaatgtgtggcccctttttctctcaaagaaacacatgcctcactatcccatattaagttgaattggaaggtactactaagttcttgttacataactatttactcttgtctgttactagcctaagttggatagtacaatgcatcaattcttaagggtcctacttgaatgatacaggtcaatgtgctcacaagcattgatctttacacttgatgcctagaatctttcttcccttggtggtctttctgcataatt

SEQ ID NO: 99713 - DNA, 443 bp, Glycine max
agcttgtaggattatggggtacccgtcatatgtggtactatgtagcgatcgggcgatggtgcaaatcaactctcccacatccacaaatcaaacatgaacccaccatccccagttgcccaccttcaactgagctcacgtactcccacgtagcccttatcctcgttcctctcagcacctggtccccatcaacccctccaacctttcacaatatccaagcaattcaatatccaaacatcatgaactaccctaaaccaagaaaacagggcagaggcagaaaactctgcccaaaacacattccaatgccacaactttccctactcaaataccccagtaacattctctacgctccgattcgttaaccggtggattgactcgaaaattttactggagggccctagtacataagtctacattttgaccggtgggatctgctagaaaatgcc

SEQ ID NO: 99714 - DNA, 450 bp, Glycine max
  unsure (1)..(450): unsure at all n locations
ncaagctttgttgttagaaaaaataattgntgtgacttttgtttatgttgcattatttaaaaataaaacaataatttatctgatataaacaataataccatacatgtcatacactggattatgtttattttctctaattttgtctctttcaagctccttcattgccttcaccacccgtcagagccggccaatcgcctccatcaccatctgcggtatatcaccctgttttcattggtaaaaataaaataaaataattaattaaataattagaagagtgtttttatatttaataaaataaactagaaaaaataggaatgagaattaggccatcaaatttctcattgtataaaagaacttttaactcctagagcagttttacaaaatattttttgttcttttttctcaccagaaatgcaatcattaccaacggaggatgttngagcgactaca

SEQ ID NO: 99715 - DNA, 423 bp, Glycine max
  unsure (1)..(423): unsure at all n locations
gacactctcgaatactancgcttctgcatatattgtatggaaacatggaaatgtgtaaaatcttctcgtcttgtttttattcatatatctatatgaaagaatttctgtatgcttgtttatggtaccattttgtgttaatgtgataattagcatatgacttatgcagaatccacggtttctgatgagtttataagattangcagagaaatggttgcaaagtgtgctggtctgcctttgactatcattgttcttggagggcttttggctacaaaggagagagttagtgactgggctacaatatgaggagaggtacgtgaaaagcgaaaagtagaggaagtcttggatttaagttaccaagacttgccttgtcaactgaaaccatgttntctctatttaagtcaattccctgaagactctgagata

SEQ ID NO: 99716 - DNA, 413 bp, Glycine max
  unsure (1)..(413): unsure at all n locations
tgatacatganttgggacttgtaggaattcaattgggcaanaatggatgagggaaagtgtgatttcnaaaatctgcactttatgcagaattttgctgtcaaataggtgcaacagaattttggctttgtgcagaaagtgttgtgtaattgctggctgtggaaagagtagtatagattgggttctggacgttttctagcagattccaacggtcataatgtagatttatgtgctagagacttccagtaaaattttcgagtcgatccaactgttaacgaattggaacgaagagaatattactggggtatttgaatgtgaaaagctgtgatattggtttgtgttctgggcagacttttctacctttgccctantttcttggctgtgttagtttatgatgatntggatgttgaatactt

SEQ ID NO: 99717 - DNA, 247 bp, Glycine max
  unsure (1)..(247): unsure at all n locations
catctgttcnnctgaatgcnncctcttcatttatctcatttttcttggatacgagtggttataggggtgcccttggtgttttcttagttatgatgaaattcccaaagaaataaacaatggtgagtatgccaccaaaacatgaatatgcaaatgaatgatcggagcacttggatccaccccaagttttttagataacatgatgagttcagaacttctcattnntataaaagaacaaagctttcatcta

SEQ ID NO: 99718 - DNA, 431 bp, Glycine max
  unsure (1)..(431): unsure at all n locations
agctttgagccaattctaacgataataactttttactcggatgtccgattgagtcccataatatatcaacacgctcganattgaatgttgaagctctgagccaattcaaacgacaataactttttactcggatgtccgattgagtctcgtaatatatcgacacgctcgaaattgaatgttgaagctctaagcctattcaaacaacaataacgttttactcggatgtccgattcagtgacgtaatatatcgggacgctcgaaattgaatgttgaacctctgagccaactcaaacgacgaataacttttactcggatgtctgattgagtnccgaaatatatcgagacgctcgaaattgaatgttgaagctctgagccaattcaaacgacaataactttttactcggatgtctggatgagacccgtattatatc

SEQ ID NO: 99719 - DNA, 324 bp, Glycine max
  unsure (1)..(324): unsure at all n locations
cattaatttgagcgttncatatttatgcgatttttcagacatcngagnaaaaagttattggtgtttgatatggctcacaggttcaacattcaattttgagcgtctcgatatattacgggacttaattagacatccgaggtaaaagttattgtcgtttgaattggcttaaaggtttaacattaaattttgagcgtctcgatatattacgggactcaatcagacattcgagtaaaaagatattgtcgtttgaattggctcagaggttcaacatataatttggagcgtctcgatatattatgggactaaatagacattcaagtaaaa

SEQ ID NO: 99720 - DNA, 406 bp, Glycine max
  unsure (1)..(406): unsure at all n locations
atcatctaattcttctcatatagaagataaggngtatgaagaggatggnggaggaccgactcttctctattacatgtctataacatttatctaaactcnctcaaactggttttacgacgaagactctacccgatcaaaatttgactcctctacacccaatctaccctaaaaatggctcttgccttcactttgggtcactcattttcctcctttgcacaacccaagctttcccacactcccaaatgacatttcaaactatgattacctcactctaatctccaattaccactaaatccagaattggcttttcaaatcctctaaacatcacacttgttccctcatatcactacatcctcactttttaaccctatggtaactctaccctacatctctatcagttttccat

SEQ ID NO: 99721 - DNA, 391 bp, Glycine max
  unsure (1)..(391): unsure at all n locations
gctgggtttgggcaatagcaccccaccctatgtcccatattctcctgacccccgcgacatatcttcaggtaccactctgtggtcaacgaataaaagcaggaaggttcaccctttctatacttctcatctcaagcttgtaagattatggggtatccatcacatgtnggactangtggcggtcgggcgatggtgcacaacaagtattccacatccacaaatcgcgcataaacccaccatnccctgntgcccacctccaactgagctcacgtactcccacgtagcccatattcttgtttctcttaacaccgggtccccatcaatccttccaagcttccccancattccagtaatacaaaaattaaacagcacaagctatcacagccaaccaaaa

SEQ ID NO: 99722 - DNA, 332 bp, Glycine max
tggtgcatgcccccatttataaacccccctgcttttgggatctttttgaaagtacggaacttacaatttcgtaacgaacttgtttctttccgtaatgttacggaaccctcgtggattacataatcattcccctttttgacttaccgaatgttacggaacctcactaattgtgcaacgatgcttccatttgatttccggtgtgtcacggaaccttacggattgtgcatcaatattttcttttgctttccggcatgtcccggaatttacaaattgcctaatgatgggtgacaagcacctcacaaggaccaaacaaaagttgcatgtcatcaaac

SEQ ID NO: 99723 - DNA, 107 bp, Glycine max
aactatactcacacccaacacttacgtaagcattcatccctccgtagcgttacccgtgtgttcccccgatggcaaatttactaaagccgccgtccacattcccacca

SEQ ID NO: 99724 - DNA, 317 bp, Glycine max
ggggggggggtttttatttttttttttttagaaggaagaaagagggggtagtaagtatatggtaatggtatagaattgggaggatagtgaggaaagagtataagttagaagtgtaaagaaaggttaaagtggggaagggggaggttgtgaggtgggatgagagtggagagaaatgtgggaagatgggaaatgttaggagaggagatgaagtggatagggggggagaggattggaagaggtaggtgtatgtgaggggaaagaaatggggtgtatgggagaagaggggagagagagatgagttagagggttggattgaa

SEQ ID NO: 99725 - DNA, 445 bp, Glycine max
  unsure (1)..(445): unsure at all n locations
catgcaagcttnctcggtgccattcctgcgaaggcaattatttggattgnntagtttagggggacattactcttaaagcaaaaatggcatgtaacctcctcccatcaatacaaacatcaatgtaaatttagagcaagcttatgcgcatatttccctacgaacgttcacttgcacaagacatcctattaactaagaaaaatgcacccatatacaatcaagggagcttccttacctagattatttacatgtacttccaaagtgtatttgttatttacatcatacacgccatcttgtcaaaatttacacacatgcatactcaaagcatttcggggtaccaaaaattgcacatgcgctcatcttggtatttctaatatctatacatatacaaacttcatgatgaatcttgactatctacacaataaagggctacatttcatgccttttt

SEQ ID NO: 99726 - DNA, 439 bp, Glycine max
  unsure (1)..(439): unsure at all n locations
cctcttaatcttggaccttgcataggacctctatcccattatattgatcactaaacagagtgggtgcacctctatcaaactaactccctaactaactaatttccactaatacatacagttactacttagaaggaagtgatgagccttgattaggcccatctaatctacctaattaaactaattacacaaagcaaagttcaaatttgcagcccaattattcaagtgcagaggttttgactttcaagtccaatttgactcttgagatagtagaattggcctaagcttatttgtgacaaaattgaatatctttttcttatctttgtagggactactcacaaaatccatttagaattctctagtgtcctataagccatgcacaaggtagatnagttcaggaaacacaaaaatccataaataaccacaattgtcattaagctca

SEQ ID NO: 99727 - DNA, 180 bp, Glycine max
catgcagcttctaactttatacaagaattaaactcttatatcacttgttatacaagtggcctcataaatcttaaaaaaggggggggggtgtgttttttaatctctcataactaacttattatacacatctatacacctcaattatcactattatattctttcttaaacattccttattac

SEQ ID NO: 99728 - DNA, 382 bp, Glycine max
  unsure (1)..(382): unsure at all n locations
taccctgatgaggatgtcccatatgttcttatnactggactgattcatttgcttccaaagtttcatggccttgtaggtgaagacccgcacaaacatttgaaagaatttcacattgtctgctccaccatganacccccagatgtccaagaggatcacatatttctgaaggcttttcctcactcattagagggagtggcaaaggactggctgtattaccttgctccaaggtccatcacgagctgggatgaccttaagagagtattcttagaaaaatttttccctgcttccaggaccacagccatcaggaaggatatctcaggtattatacaactcagtggagagagcctgtatgagtactgggagagattaataaactatgtgc

SEQ ID NO: 99729 - DNA, 334 bp, Glycine max
  unsure (1)..(334): unsure at all n locations
gaaataaccggcctcatcatgataaaaaatgagaaggaggagctgatttctattcctgtgctcaacatttagagagtttgcattgactataagaggttgaaccangtcaccaaaaaggaccattttcccctgccattcattgaccanatgcttgaatgcctggcaggtaaatctcactactgtttccttgatgggttttctggttatatgcaaatcactattactcctgaggatcagganaacaccacattctccanccccttcngaactttcgcctatagaatgatgcctttcggcctgtgcaatgcccctggtaccttcaagcggtgcatga

SEQ ID NO: 99730 - DNA, 383 bp, Glycine max
  unsure (1)..(383): unsure at all n locations
attcagcaaaaaattattatgtataataaaaaatattaatctttataaaattatcttaaaagtaatatcggcaataatttgaaaattataagaaagatttattcacttgagtacatctccgttaaattcttgactagtgctttcttaggtttcttggtttggtttagggtcagatgatggtggaggtagatcttttcttttggtaagtagtttgagtttgggttggctaagtttagactaagtcgagggttttgacttggcttaagtttgctccccttaagtctgttgagacaatgctttagactcctgatcaattggctgcttcttaaccccttccctttgtcctgccacagactatggnttctccttatgctttttctaac

SEQ ID NO: 99731 - DNA, 433 bp, Glycine max
  unsure (1)..(433): unsure at all n locations
agcttgcaagggtgntttcatcagcagttgtttttcctaaaactggggggccagctgttatacctcctgaacttcatgtcaaagaatatcctgacttcatggagaagcctgacaaacccacatacaaatcgcataacgtgataggaaagctctttagggaagtgaaagaaatatcaacaagtgccggctcaattacatccttcacaaagttggttgcgagagactcttacgaccatgaaatggaagttgatggcttcatggattatgttgatgatgctttctatcacaaaaccaattatgactacaagttgggaaatctgatggactactatgggatcaaaactgaagctgaaatcctcggtgggaatattatgaaaatgtcacaatctttcaacacaaggagggatgcagaagcaatcaatatggctgtgag

SEQ ID NO: 99732 - DNA, 418 bp, Glycine max
attaaattcctaggactatgagcaactatgtgtgttctgctatgactcgagaaacaaaagtgatcaaataacaagcacagatttaaaaggtactatgttgcctcctagtaacgtcctgagctggacgcgtgatggcttgtcggtcacagacctagtactttgcttacctttggctttggacttggtcgcctattgtgcggccatgggtcgtaagcaacactctaacctttttgtggatgagctgaggtgaactctataggtgatggcagtgcgtctgttgtccattgccggccatcctcaggctgctgttgtgttttgccctgcgcctgcctggagacgcagtacttcctgatgaaagcctaattagtagggggcctgatgaccttgctgggggcgacatgcactctcgataactgac

SEQ ID NO: 99733 - DNA, 423 bp, Glycine max
agcttggagaggatgcttctttggaggattttattgagggagagaaagagagaggggtggagcacgaaattgaatgaagaaaaaggagagaagtgaacttagttgatctacaagatctattctaaagtacacaaggtacacatgtttattataacaggtagttcttgagaacttcttgaaaagacttcttgagaagcttctttgagaaaacttccttgagaagctagagcttaacaacacacacccctctcataactaagctcacctccttgagaagcttccttaagaagattcctaaagaagctagagcttagctacacacacatctctaatagctaagctcacctccttgagatgagaagctagagcttagctacacaccccctataatagctaagatcatcctcataacaaaatacatga

SEQ ID NO: 99734 - DNA, 309 bp, Glycine max
  unsure (1)..(309): unsure at all n locations
aactaactgcctaactaactaatttccactaatacatacagntactacttaaaaggaagtgatgaaccttggttatgcccatctaatctacctaattaaactaattacacatagcaaagttcatatttgcaacccaattattcaagtgcagaggttttgactttcaagtccaattcgactcttgaaataatagaattggcctaagcttatttgtgacagaattgaatttatttttcttatctttgtagggactactcacaaaatcccattagatctctttagtgtcctataggccatgcacaagggata

SEQ ID NO: 99735 - DNA, 411 bp, Glycine max
tatttctagaagggaagactatcaatagacctccagtctttaatggagaggattaccactactggaaaacccgaatgctaatatttatcgaggcagtagatctaaatatctgggaatccatagaaatagggccttattttcccaccacagttgaacaagtttaatagatgggagttcatcacgtgaaagcttaaccttataaaaacctagacatagatggtctgaataggatagataacgagtactatacatcctaaaagccaaaaacataataacatctgccctaagaatggatgaatattctatagtttcaatttgcaggagtgctaatgaaatgtgtggcactcttcgattaacacatgaatgaactaccgatgttacaagattcacgttactgcacttactcttgat

SEQ ID NO: 99736 - DNA, 341 bp, Glycine max
ttctcatcattttctctacaaaaaccaaaacttggaccttcattcttcttcatttgcacgagacactcaaggagggagaggcctccattttcatattctttcaagctccatctttgtgttttgagacttctctcaaaaccctgtgtagaagaacataaaccccccctttggtcttaatttttatatacattttgtgccaagtgtttactttaagtaccaaatatagatttcatcttttgaagcttgagacttcaagaactgagcttttctttaggaagcttacttcaagaaggggagtgttctacttttaaaccctaacttgttgtcttgaagctagctta

SEQ ID NO: 99737 - DNA, 435 bp, Glycine max
  unsure (1)..(435): unsure at all n locations
agcttgataacaaaangtgtgtatttcattcttttctttctacatttggacctcagtttcttgctctttaataaacgactcattattaagtatttttcatcgtgctttgctttcactatgcattcatacaaggggagctcttgactcttcctaaaggcttactattagtttcccacgaaccaagtatagtcaacacgacacctggaccccacattagcgggaatacattgagggcatactccatgggtgataatgaagttgatcttttactgccgggtactgcaaggttagtttctatgattctttacaactggtttctcttgtgcagtagtgagtagactgcatgttatggttgtttcatttgtcaagagaatcttanacctacacctttacatggagtttcatccatcatagtatgtaattcagatcctcata

SEQ ID NO: 99738 - DNA, 354 bp, Glycine max
  unsure (1)..(354): unsure at all n locations
ttttgtttgaccaaatatttcgaatgcttcctatattcatgtttcaatttcttctttctcttttcttaatgtgaatatgattctcagctaaagtgttttaacacattccaacttgtggggggtattagacataaaattaatttagttacgtattagaagttatatgtgtaaactagttggttactcaagttatagttactagaagctatttgagtaagttagtgctggttactctagatagntattcttcatctttgtataaatacatcaattttgtaaactttaatgaatgatgaatcgatgaatctaaactactttcatctatctccattttttctttccaataagatgtat

SEQ ID NO: 99739 - DNA, 434 bp, Glycine max
  unsure (1)..(434): unsure at all n locations
agcttgagcccacttatctntgtacatattttattaagggttcattattttcgggccttgtatttagggctctataatgtaggtagggtaccctagaaatgtangaattttcagcccttgtattttagggcacctagactagtttttgtattaggggtatttttgtaatttcacatgcattaagtgaatatttgatgtgtgtgttggaaaataaaattaattgtattgggagaagcccaatccaattaaattttagagggggaggtgagcatttgcttgctacaccccattgccacatcatatagtcgcactttgtgcatatccttcatgctttacatgcctcatgccacgtaagcatatttagtggataattttgaacttgatctntgattagtgggctgaaccatagctaaaattcactaataataattagt

SEQ ID NO: 99740 - DNA, 439 bp, Glycine max
  unsure (1)..(439): unsure at all n locations
tgccgcccagctcgcccaggctagcaagggtgcttcctctataagcaacaaccttctagaggaatcttctagagggcccaagtgggcctggttgctatatgcacccccctttttactaaatgcacccacttctatttntttgtaattctttttccgtaacgttacgaaactttacgaatttcgtaacgatacttaatttccttccgcaaggttacgaatccttacagattatgtatttactcttttttagctttcgaagaagtttacggaaactcacggattgcgcaaaaacacctcttttcgatttccgtcacattacagaagttcacggatcgcgcaagcctgcttccttttgatttctgagacgtctccggacttcatttatcgcatgtcatcaagtaataatccccggacgaaatagggtatgacagtgcctaat

SEQ ID NO: 99741 - DNA, 420 bp, Glycine max
  unsure (1)..(420): unsure at all n locations
agcttcaacatcagaccacttccagggggctttaactactttacatggacttgatggggcctatgcangttgtaaggaaaaacaagactctgcaagaggctgctatggtcatgcttcatgccaaagaacttccctataatctctgggctgaagccatgaacacagcatgctacatccacaacagagtcatactgagaagagggactccaaccaccctgtatgaaatccggaaagggaggaagccatctgtcaagcacttccacatcgttggaagtacatgttacatcttggccgatttaaagcaaaggagatagatggatcccaacagtgatgcaggaatattcctgtgatactctacacacagccgagcatatatagtattcttttccagaaccagaacagtgatggaatccatccatg

SEQ ID NO: 99742 - DNA, 447 bp, Glycine max
  unsure (1)..(447): unsure at all n locations
ccgcaagaacgactactgaatcaccaaagaatttattgtgctcttttgattatgcatggagccacccatcccacactatgtataaaccaaacacagagcatngagagagaaaaatcgctaacttttaagaattcccttctcttcaatcccagattcatcaatcatagcattcacaaaggttagaaggaaattcaaaaaaataaaaaataaaactcaatagattcccttccttctgtttcaaactctatggtgttatctcccaccaaccttttttgccgtcacttaatctcattaatcgggcctcacatcccgtcttcaatccaatcttgttttagcaccctgcagaagaacaagaattacaacacgaagggggtttgccattaataataattntaaaaatgtcacatcatttctatttttataatttgtgaaggaaataaggaaaca

SEQ ID NO: 99743 - DNA, 446 bp, Glycine max
agcacctgagctccgctttggagaaacaggaccactatttatcttttatatgaaggcgaacccagccaaggtctgagagaccatacaaatttcctaacgatttctaattatgtgggccattaagtctatcatatgctggcaataaccgagaagcccatgaatctctttcggggtggagtaggtgtctgccatcgccttggccttggctaacaagcggagaagttcttgactcccgttcaaggtaagagcaaaccgggccatccatatggttgcctcttggtgtaaagagacgatcacccttcctctagcctctttgtccgcatatacttgagcatactcatccgcgattctatgctcgttggccgtggctagacctaactctttctggtacttggcgatgatagctaacatgttggtctccgtctcgcataaacgctgagacaagc

SEQ ID NO: 99744 - DNA, 445 bp, Glycine max
  unsure (1)..(445): unsure at all n locations
gataatgagagagagaaggtggcatggtttatngattgaagaaaggagggtggttgaacttgaagtgtgttcatagactctgatttatcaaaggtgtgacaagtgttaacacatgttcctattttatagtctaggtcactaacaaaatgaaattcacttcatttcatgtgaatctaagaggaatatttgaaggatatgccatagacaacttataatattccaagaatatgccacaggcatcttagaatgttccaagaatatgccacagacatcttagcatattccctttagatgtcacaagaatgaaaggtgtgactctagcacatgggaaagaaatatgtcacaagaatgtgccaaaggaatattccaagaatatgccacagggggaaaactacacacacctcttcatagctaagctcacacccatgccaaaatacaaaaaaag

SEQ ID NO: 99745 - DNA, 452 bp, Glycine max
  unsure (1)..(452): unsure at all n locations
tgcagctacacttcgaataattttagccgttttattttctttatttcaaagnnaacaataantagatggatgaaaagatatatttgaaccaattttttttttaaaaaaagaccaaactgaataaaaaagataaaaaaaatcaaatatattatttgacccaaatttaaatatgtgaatctaattatatacttttgctacttttcctgtttgtaatcaaaacccaattacgggaattgaattggctaattaatcataattaaaaaaaatgttaatttagtttatagtcataaatttatcttaagtttatatttttttttcaaaattaccattatgattcttggccctcttctaaatatttactgatacaacctctttcttttttttaattaagaataatttatactaaaaataattaatataataaatattatgagataaatcttataaaaata

SEQ ID NO: 99746 - DNA, 420 bp, Glycine max
cttctgagttggtactctatggcttattcaagctttcactgcccattctctcaaattgaactctgacacatctctacttcttgagctataaagaagtgattcagctgttaaggccatgaattttagttataaaataattcatcagagtggaatgttgttgttgtaaatgttggttcaagtcactctcactccaactcaaactagtgaatgagcttttgaaaaaagtgtaattttctaaaaataactaaatgaatgagcttttgaaaaaacaagaaaagttaagaacattctagctacaacatttgcagttaagagcattctggctatcatgtagcttaagcaataggcatacatgtatcagatcttttctatagtaatagagatgtcaagttaacaaattaaaaaaaagaggaactaaag

SEQ ID NO: 99747 - DNA, 449 bp, Glycine max
  unsure (1)..(449): unsure at all n locations
agctnttctacatcccatttttctccccctttgtgttcatcaaaaagccaaagttcttgggaagtaaaccagagataataatggagtagaaacagatgaacatcaaagtgtaaggcataagcaaccaaactcacaaatgataaataaccaaaccataatccaaataaaaaaaacaaaccacagagtatcaaagcacaaaagtctgaaaaccaaattctacaagggaaataaagtacttatcattataaactaaattttaagaaactaaatagccaaaatacacgacttataagagacatataattagaaactaaattctaagaaggtggaggtggtggtggaagatcgaaactctgacgaatgtaacctacatcctcttcaagctgtgtgaggcgaatgtccatgccggcaaagcatgtatctaatgagtcgaaatggtcaccaacata

SEQ ID NO: 99748 - DNA, 444 bp, Glycine max
  unsure (1)..(444): unsure at all n locations
cgcctgcttctacagtctagtgattctagagagttaaaggtcttaattccagagagntttgagagaatttgctgtgtgaagatctgcagagaccagagctcgaagaggaagccgttttgagagcttgagatgagtttgtgagtggttatgagatcctagaggtgaaggagacatcctcaccacttgtatttttggaatctttcatcttgttcttctctttgttgtaaaagaggcttcctggttatggaaagctaaaatcctctgttggatcttcctcgtaggtacttgatgtaaatatctttctatctantttaatgatgtttgtgtgttctctgtgctatcagcttttcattctagtatgcctttaccttgatcatgtagatgcatgccttgttaaggtcattcaatagtgaaaattgtctaattctgatgaccttgatggga

SEQ ID NO: 99749 - DNA, 444 bp, Glycine max
  unsure (1)..(444): unsure at all n locations
agcttggacttcctgtgttctgggaacctctctttcttcatgtgtacccaaacccaatcacctggttcaagcacgactttctttctacttttgtttgcttgccttgcatagctcgcatttttcttttcaatttgagccttcacttgctcatgcagcttcttcacatactcagctttagcctgtgcgtccttatgcttaaacatagtaatgttaggcataggcaacaaatcaagaggagtcaaaggattaaatccatacactatctcanatggtgaacaattagttgtgctatggacagtccgattataagcaaactcaacatgaggcaaacatgcttcccaagatttaagattattctttataacagtcctaagaagtgtgcctaaagtcttattgactacctcagtttgaccatcagtttgtgggtgacaagtagtagaaaac

SEQ ID NO: 99750 - DNA, 385 bp, Glycine max
  unsure (1)..(385): unsure at all n locations
cgccttccagatccgatcatggaaggacttggcaactgccttatttangaagtaccagtacaatacggatatggctcccgatcggaaccagcttcagagtatgactaagcgagagcatgagtccattaaggaatatgcccaaagatggggagatctcgcagcccaagtcgtaccacccatgacggagagggagatgatcacaattatggtagatacgttacccacgttctactatgaaaagcttataggctacatgcaagctaactttgcggatctcgtcttcgccggagaaaggattgaatccgaactacgaaaaggcaagttcgaatatgctttcaatgtagcccccaacaacaacagaagagccccagtagtgggcgcgagg

SEQ ID NO: 99751 - DNA, 446 bp, Glycine max
  unsure (1)..(446): unsure at all n locations
agctntattagagacacatatattacagatattcttgatgaatgatcgagacaagtctctagatttagaaagggtatattaaatacgagggggattccaaatgaagtaccaaaatgtttggccaacaaatttaaaataaaaagacgtttacaagaagattactctctggtcatcgattaccatatgatgctatcgattaccagagagctctactgatttacaacaactattacaatttgaatgctaaaattgcattgtgtaatcgattacacatatatggttatcgattaccatcagtttctgaacgttntaattcaaagtatatagcttcgaatcgcatacacatatactgttatcgatcacacacatactgttgtcgagtaccatgagaaatctttagaaaacattttcgacagtcacatcattatgtgcggctctagaacggc

SEQ ID NO: 99752 - DNA, 365 bp, Glycine max
  unsure (1)..(365): unsure at all n locations
agcagacggagataatgccctttcaaagagtgggagaccgccaccactcaagataaagaatattcccgatccaggatcgaataaaacagaacaaatattccgataggtctctggaccatacaatatctgaacattacagaattgtcacccaagtacacagaaaataaaggaaaccacgacctanagtgagcctctccctttgattgccaaccaaaatcctgtgcgccggtgacttgttcagctcactctaaactaaaaacagaataggaaaaggtcgagaacactcacagtcaaatgtcccacataccatttccaagaataaagtcctattgatgcatgatcacccatgtaatctttgatttgat

SEQ ID NO: 99753 - DNA, 447 bp, Glycine max
  unsure (1)..(447): unsure at all n locations
agcttattgtatgcacgcttgtggtttgatcacccattggtgtgngccgntaggaactntagcattgacaaatgtattgtttccttggaacttgatggagtagggctagataactgtagtgctagacatagtgtgcagggttctagttnttattatgttgtgcttataatgctatttaaattaggctaagttcaacaagagacatctgcgaacgaagcttagtttaaattattccaaactcacgagacatcggtgttggtatttttgtcctcagcatagaacacaagaataatttcaaatagtgaaaaaccctaattgcatcaattatctcggtgaaaggacctaacccttttacttatttgttttcacactcaattgttcacgtttactatttctttgattaaaatagaatatacctttgttttcaattcatgatacttaattctt

SEQ ID NO: 99754 - DNA, 344 bp, Glycine max
  unsure (1)..(344): unsure at all n locations
gcttcaattggagtcatggcttttacagacttagttggacatctggtgagtatgtaacagtagtgtagactgcttcaacccaaaatgtgttatgtagtcccttctccttgagcatcgatctagccatctccataactggagcgaagtctttctctcggacactccattctgttgaggagaatatgcgactgtaagttgtcgctcaatgccttcatcctcacaaaatctttcaaactcgcgagaggtgtactctttgtcgcgatcacttcttagtacttttatcccgtttccactttgatttttagcaacggccttgaactttntgaatactccaaagacttctg

SEQ ID NO: 99755 - DNA, 301 bp, Glycine max
  unsure (1)..(301): unsure at all n locations
attcttacgaggtttgaacgttagcttgctaacacancggcgcacatgctcgtcatggatggaaaacccgccacctccaaaatcttctcttatgtagctcaacaagatagacaactgttagggcacgcatgaccaaacattatactccaacccaaggacatctccataaacgcgacgaagacgacttgcgatttctgtgggcgcattggacatgtacaaagcacctgggataaaaagcatggcgtgcctgcaagttatgatggaagaaacaagataacgatggaagagagacgtgtaccca

SEQ ID NO: 99756 - DNA, 449 bp, Glycine max
  unsure (1)..(449): unsure at all n locations
gaccttaagtcacctgagcatgcaagctggctttcatatactgatgaaggtgttccatatgtnctcacgactggactaatacatntgctgcccaagtttcatggtcttgcaggtgaagatcctcttaagcatcttaaggagttccatattgtttgttccaccatgaaacccccagatgtccaggaggatcacatatttctgaaggcttttcctcattctttagagggagtggcaaaggactggctatattaccttgctccaaggtccatcacgagctgggatgacctcaagagagtattcttagagaaaaatttccctgcttccaggaccacaaccatcagaaaagatatttcaggaattaggcaactcagtggagagagcttatatgaatactgngagagaattaagaaactatgttgccagtgtcctgaccaccagatntctgagta

SEQ ID NO: 99757 - DNA, 441 bp, Glycine max
  unsure (1)..(441): unsure at all n locations
agcttgcaagaaggacccgagagattccattctcaaaataaaggaaagattccaagaattccttacacaacccaccagagttacactgtatttagactcaaaagaagcataaatactgggtaaccaaggtagcataagaaaaatccaacanatctgctaaaagacaacccgcactccccacttatgaagctaacaggctttaacaactaccanaaccagttgtatgccattccccttaaggtgttgctgtcatgcatactttcccacanacaccttttacactaaattcccacttaatagactgaataccagaatcaacagctatacagacttccaaaattcacatacagcaaatgtccctccacaagacacgtcatcaaaacctggttcctctttggtagccatctgaaccataaacaacgatatacactatagtactag

SEQ ID NO: 99758 - DNA, 311 bp, Glycine max
ccattattaatttggtcctaaggcgagaacaatggaagggaccgttttacattgagcaaataattaacttaattacaagttatgtggatggtagagatcaaacttctaactatgttcacagaagctctgatactatatcgaagaccaagattttttttaatgaagaatatcaagaatgattttaaatatataatataatgcttcaaggcgagaaggaaaattaaattatattaaaagaaaagaaactaaatatatgattcccaacacaaagaaatgtcatatattataacactagtcatttacaaattgtc

SEQ ID NO: 99759 - DNA, 429 bp, Glycine max
  unsure (1)..(429): unsure at all n locations
gcttgacccttctagaggaggaaggangtatacaaagaataactcggaaatataactcgaagctcaagaaatgtagctttaaacccaataacttggtttggaggctccaangagatgccgggaaggatagcttataaagaaagctctcaccaaactgagaaggcccattccgcatcaccgagtccatgcaaaacgatgcgtataggcttgaagatgtcacaggaaaggtcatccctatgacctgaaatacgactcatttaagaccatattacagttaaaatcgggtagtgtactcttttttctacttcatattttctcccacttgtaaaaaaataagggtttttgctaaagagattntaacgagtcacacccgagtactcatgtaaaagaggagtgcttcatgaatcacattatcaatacaattctttt

SEQ ID NO: 99760 - DNA, 423 bp, Glycine max
tgttccatagtaccagaaccagacttgttatataaattacaaagaaaattccttgcgattttcattatctgtaatagaactgattcttctataaaatataaccagaggattgcccgatgaatgaagttccgagagtttcaacatgttagactgagattaagtttctaagaagtagggatggccatgctcacctcaacaaactctcccaaggctgccctggcctgacctctcctttttcatgcctcaccagccaatggattaaattgtatagcctaatacatacaacatgtaaaacacttacatatagaagaaataccatatctctatatacacctgttcgacagttttcattcaaccacctttgtaaaatcagctatagcagcatcaagttccctctggaatgcatatgctgtacctccttct

SEQ ID NO: 99761 - DNA, 475 bp, Glycine max
  unsure (1)..(475): unsure at all n locations
acttcgaaactatagctataagaacaaaantaccttaatcatttccaaatatgcatgtgaatnattacgcatcaacaagaatcaagccaatgctattgtgcaagcaatcaatggngcaaaacacaccaaatgattataatgatggatggctcaaattctcacaaaagtaaatcatcactttcaaaatgagctttcaaaactatcatgacatgtagagaagaatcaaggatttcaagtcacaaaatgtcaagaacttttattttcaaaacaattacccatttcttgaacatatcctataattcanagaaaaacatgcaaagtcgtacgtgcacacaaaattgacccaaaatattaaactgaaaatccgacgaaactaacaacattagcaaatttacacaacttacaaattaacaaaaccaacaaaactagccaaacccaagaacacttcccccccccccccatacttaaacaacac

SEQ ID NO: 99762 - DNA, 439 bp, Glycine max
  unsure (1)..(439): unsure at all n locations
ctgccgcttatgctttactggggaaaagatctcttngttgctctaatngngggaaggggctcaaatatgaggggcaattctgggttggtctcttgctcgattgggntgaattgtgggttcgtatgagatggccctacgcctataatgcattttgaagcaatgggacatgccacattgtccctggtcttttgctattgatgcctaaacgcgcgcccaccgagtgttcggtgaaatgcctcaatggcattagcacgtggttttcgtagggaaacaacccatggggcattttggttcgcacatatcttctatnttttgggacatgcattcagttccgaaagggctagagtaattgccccacatatattctatgcctatgaaccaaagtgtttatgcaaaagaacacaagaggggtgcatattgtgtaaagttaccctctttg

SEQ ID NO: 99763 - DNA, 458 bp, Glycine max
  unsure (1)..(458): unsure at all n locations
tacatgcatccaattccactcaaattggatcctacaagttctaaatcatgtataaattatgttcaagccanaaacaaacttcanaccaaggtaaagcaaaacatatgtatccaaaacccaccaaatttagtgaattttcaaggtttgaaaggtgaaaatgaaaattgggtaattttggggtaaactctcatcttcatcatgtctataacattgatntagacttactcaaactgatttcaaggtaaaatctccacctattcaaaatttgacctctcaacacttaatttacactgtaaatggctcttttctttcacatttgtcactcattttcctcatttgctctaatcaagctttcctacaagtcctaattgacattctaaactagaatcaactcactttagactccaatttccactaaccccacatttggctttctaaccctcaaaatctcacacttt

SEQ ID NO: 99764 - DNA, 302 bp, Glycine max
  unsure (1)..(302): unsure at all n locations
tgagaattatctcttggggagtgatgtcaaccgaacaagattgcttttttttatgatcatgaagcacatggtgcatttccaatggtgcccttcgaggaagctgggaagatggacatgaagatggtgatgaatgagagcaaaaggaaacttggaagcttccaaaatgtgccttgtgcacctgctgtggtggagcaaaagggatgagcttgccctctccttgttgctatgccatcaattgcaacattcctcatagaccttntggcttttgctcattcacacccaagacctgtaattgctttgga

SEQ ID NO: 99765 - DNA, 173 bp, Glycine max
  unsure (1)..(173): unsure at all n locations
aacttaaaattctggctgatggagcttacccttatgggcgactcaaatcctcaaaattttatggggggacactaaaggaccgaaggaagccctaacgntggcagggattgacgacggagcgaggcggacaaaactctatattgcgatccaatttactatcgacgttatgttgg

SEQ ID NO: 99766 - DNA, 357 bp, Glycine max
  unsure (1)..(357): unsure at all n locations
gatctgtaacccaccattttccataatagaacactgtttatatgtctactatcatcgngannacagattnctttgccattgagggaaacacttgggctgccagatccctccacctttgggcgtattctttgaaagatctgagcccccctttttgcacatgttttgtagttgcatcctatctgaagccattatactaacattgcctaacgaatgaaaccattangtccttccaagcatggactcgggaaggttccaagttagtgtaccacgtaacagctaccccagtgagactttcttggaaagaatggatcagcaattccttatcttttacatatgcccccatcttccgacaataca

SEQ ID NO: 99767 - DNA, 422 bp, Glycine max
  unsure (1)..(422): unsure at all n locations
agcttgagaatagangccattgctttgcattctttcttacatgcnnctaaataagacttgtttccttctaagtagtaacggcaaatcattagtagcattaagtcgaaaggacttagaacttgnttgttaaaacataaaaaaaaaataatgtaaagatatttaataattaaataatatttgaagttaaatgtataattctgattttattaattatttaattagtattataattatagtattatgtatttaactattaaaataatcattatatatttgtaaatattataaaaaaataatcacataattatataattaataatttcatatattatatataataataaaattatagataaatgtataattatattattagtaattaggtacatgcataagccaggcagggagtgatatattcaaat

SEQ ID NO: 99768 - DNA, 292 bp, Glycine max
  unsure (1)..(292): unsure at all n locations
aggacgacgaatatactgattttcaagaggaaatatggcgccggcggtgggcaccacttgttactcctatggccaaagttgatcccaaaatagtccttgaattttatgccaatgcttggccaacaaaggagggcgtgcgtgacatgagatcctgngttaggggtcagtggatcccgttcgatgccgacgctatcagccagctcctgggatatccgatggtgttggaagagggccaggaatgccagtatggccataggaagaaccggtctgatgggttcgatgaagaggccat

SEQ ID NO: 99769 - DNA, 442 bp, Glycine max
  unsure (1)..(442): unsure at all n locations
agcttctcccctantttgctataaataggggtagaagtgaagaaaagggttcagccccttaggcacttctctctctctcgaaatagctgaggaaaattagttccgtgaagaaaatccaagccgaggcgcttccgtaacgtttccgtgagtaattacgcgaagattctcgaccgttcttcaagattcatcgttcgttcttcgttttcttcagtcttcaacgggtaagtacctcaaaccaagcttttcaattcattctatgtacccgtggtggtccacattntggttcatgtatttttgttctcgttttcattcactttttatacctccttttgacgtgcttaagccatttatttaagtcatttctcgcttaatctaanaataaaataaatttccaccgatcgtttgaatggcatcatccgttacatttggttaaaatgaattc

SEQ ID NO: 99770 - DNA, 418 bp, Glycine max
  unsure (1)..(418): unsure at all n locations
tatccggcctcccataatagggcctntatagaanaatattgcatgccaaggcaggcacaacagtaaggttaggcccagcaacagcaagaggaggactagcaacagccagtcgcagatgcaccgccgccacctttacagcaaccaccatctctggagtctatctttgttcacctacgaaggatgaagctccaaatgcacacatatatgcagcatatgactgaccagcaggcagctaatcataagggtcaggtgtagctgaatgagagcttctaccagtacaccctacaccaatagagccaagaacctagccccttcctgtggcctacccccgagtagttcgaggccatagttgcatggcctggagataggcccaattttcagacaggggcaggacccacggggatgatgacatggctga

SEQ ID NO: 99771 - DNA, 448 bp, Glycine max
  unsure (1)..(448): unsure at all n locations
agcttcttatccaagacactctcttnggggtgtaatcttttcttccatggcttattccctagtggatggcgcctcctctcacctttctcctttatcttccgctgcaactccatggctgaaaatcaacattaaaggacctcattgaagctcaaagatccagtctccatagaagcttctcaagcaagcttccatcatatggtatgaatgtctttgatttagcaaaatggaagagacaaaacatcacagaggtttaccacaactggaagaatctagtatgtgatgcactntgggttatttttcaagtagtatcgcatgtgattgataggtactttaattatatgcaagattagttacaaatattatttcatcaataaaattaattgaattacaattactactaagatccaaatgatacctagtcattntggaaatgttcttaatgggtcta

SEQ ID NO: 99772 - DNA, 449 bp, Glycine max
  unsure (1)..(449): unsure at all n locations
agctnggttcaaccccattaacccaggaatgacatatttgatcgccaatacttcaacaacatttcatagggatgaaagactcgggaatatgcatgatatgcatggaaaatgtaattatgagattgagatgcccgaagaaacatcttttcttagttaaccatgcattaggtaccatgttcaatcattttgtttttaagtgaaatgagtttatgatcccaacatggttggctcatggtacctaacacatgcaactaagaatgcatcatgaattttcatgcttccctttttttttgtttttgttttgtagaggaaaatacaaggatcatgtaagagcaaacatgtagaacaaaaagtatgttgaatgcatatgcatgatgatgcaatgactcatgcaaaatgtgaggcgggaatgtgataacggacaaatgcaggaacgatatgttcattat

SEQ ID NO: 99773 - DNA, 329 bp, Glycine max
cgtgggttatgtacctcgggacatatgtggggtgtattggctcaaaaccaagcttgccaatcccgacccaacccgggcatagtcggtcagtgagaacctgtgatgtacctaaacaagcgagctcctggcagtcaacaaataataggaacaaagaccaccaagcaaggaggctcgtggtggctggccagctgtgaatattgtgtgatatgtggattatggcctctggtaatcgattaccaagggtgggttatcgattacaaggcttaaaaatgaaaacaggagactaggatggtctctggtaatcgattaccacggggtgtaatcgatta

SEQ ID NO: 99774 - DNA, 332 bp, Glycine max
aagaaaaaagacagtctatgtatattgggtcccaacaaaatttgcgcctatcctgaaataaagccatttatgtgacagacaatataaaaataaactcacagtgattcagtcttcaatcctcaaatccttttgctttgatgaaaggcgagaatcaagttctgacgttggtgcaagcataagagtgtgggaaaaaatggggcgggttgtaatcctttgaatcgcatatttaagcgttcagaataagaacatgctttgcttgtgagagagtggtcacgcacgccaccaccaaacgagaagggttaacgagaaattgcttatccttccatcgaaag

SEQ ID NO: 99775 - DNA, 439 bp, Glycine max
  unsure (1)..(439): unsure at all n locations
agcttgtgctcgatatacatggtaagcacattgctacacatcaccgccaccctagacagtgttgcttactattaatactagacagaagaaacctgacatagcgaagtatgggatagactcatcatggtctactaagcgcacgacgaggattaacactgacagcggactccttcgcacatgagattgacacataagggaaatggtggatgatgcttgtgtggacgagcgatgttgattgactaggtgatattgggtttcgatccttgagtacgtgaatgtgttgaaaaagaatgagacgtgccgtgttgtgttgagatgttgggcacacaaatggtgaaatgatgtgagctatatttaagtatgtnttatgttcgttaatgatacttatacctacatggtatcttgctccccccattacctaagaatgtgaaactcactc

SEQ ID NO: 99776 - DNA, 442 bp, Glycine max
  unsure (1)..(442): unsure at all n locations
agcttgangcctctctgnattatccttattatctttgggagctttccaatatcttctagcatcaagacaagacaatgtgcagcacatggagtccanaatatttgtggtctcgtgacttctaatattttacctaaaaagaccaaaatcaataaacttgtatgagtagtgtaacaattaaaagttatgactataaaataaaacttcattaagcatgattgaattctcgcccaccaacacataattactttcattgtccgtcaccacttgaataacattcttttctccaatctcctcaacaaagctatccaaaagctcaaagatcttctgaccagtcttcatgtattcagaagcatacgcactcctcacaaactgtgttcccaatgaacatattaccaaacagttaatcgaaggtctattctttctatccgttcaaccatctgac

SEQ ID NO: 99777 - DNA, 427 bp, Glycine max
  unsure (1)..(427): unsure at all n locations
gcatgcaagcttgactcgaataatgctgannaaaacaaatntctcaacttactntggttggntcactntcctctggcagtacatatgcagttccaacacagtaatacacattattgtcatctgagaaggagcagctaattatgaagcaaccatactcataagtgtcaagagaataagttgatatgaactcaaaagtctgggcatccagcaaacggacaaagtgcatttcagagtcttcaccacttgctgggttgtatttcacactacaaatagcaaaaatcctagattgctcctggtggcagatacgtcgtgcatgctctcccagggaatagagcgaatatgaagattttgtatatcatcaatggtgccaatagtaagctcaccttcttttgcaattgccaaactgtttaagttattaaaagtagat

SEQ ID NO: 99778 - DNA, 381 bp, Glycine max
  unsure (1)..(381): unsure at all n locations
tgagctccgccgatctagacagaatgttaatgtatggtacatgtaagtatctgctaacaagnaacaactataatcccatcttgaaatggatcttaaatcattaattaagggaagatgggactaattaacgaaatatgtcagatcattaataagccttgaccgatcataattactaaaataaaataaaagttaaattatgatagccaaattaaaatgaattatattataattatgaaaatatatttaaacctaacaaatttatcaccttgaacacaatttccaaacattgcaattccttcattgttcgctggcttggtttacagcactaaatcaatttcctacatagatttggtgagatttatgaccatgtagatgatttgc

SEQ ID NO: 99779 - DNA, 307 bp, Glycine max
  unsure (1)..(307): unsure at all n locations
ctgatnagcttcttatacatttacctagttttatatttgtccacttatngaaacaagtgtattgccgtaccgtctcaaaatacttatgctatacgatagggtcttgttgaaggatctggcttatctccatccttacttaatattagaatatcacaactgttcaaaattatattacacaaattcatcctgagaattatatttttatcagacaaaaaaaataaaaaatgaactgcccgtgaggagaggataaagggatgcttattgaaccccttgggtcatacaatatatgcccatactatattgcaca

SEQ ID NO: 99780 - DNA, 416 bp, Glycine max
  unsure (1)..(416): unsure at all n locations
tccgcacaatccttaattcatccatcatctggcacttattgaattttttatggatnaattattcatgcaattctgctacaaggtcatgccaatttcatgtctttgttgaatatnggattcanaagatgctttgaacttcttctagagttcgccccttcgtctctgggactagttttgccacgaatagaatggtgaagccacatatgctagagaatatgaaaaaggttcctggccaaacataaatgaatatttgttttcttcattttttgtcctttctgccttcttttttgagggaggaggaagtattatcacaaggagttgagacttgagagttaatgcgaacctacccgcggaactccaactcatgatggaagttaaagcatatgatacaatccaagaacacaaccagcttaccc

SEQ ID NO: 99781 - DNA, 470 bp, Glycine max
  unsure (1)..(470): unsure at all n locations
cacctgcggcatgcaagcttggagaggagagtaggtggagtatatatgtgtaattatgatatggaagncgncaataacgatattggaaagataatgttcatgattatatttctttagtaatggttttgttggagctcacgtggtttagctagctacgtaccactatagaagaatttgataaagatgtctttgactcgtactttataagtttatgtggagaattctttatcgtggtgggcttcaatttgcctaattattgatataggatctacattttaagtgagataaaattatacaatagtttacataacattttttttctatcacatcactaattttaatttacaaataaattactgcatcaaatttcggtcttaaatattgactttttctcctgaataattctttaaataataaaattatataaatattgcttaaagtatgaaatatctattaaattaatgttacat

SEQ ID NO: 99782 - DNA, 418 bp, Glycine max
  unsure (1)..(418): unsure at all n locations
ctcaccacagttgctgtctaagatactagcaatagtgtacacaccagtcatgagacttctctcttgtnttggccccaaaacgatgttccttgcatgagagaacataaatgctcgcccagtttttgcctgaatagtcaaaggtgaacataaagaataatataaaatgttacaaattgaaggaaaacagtgattaaattttgaaagttacttaaggtaaaagacgtcattattttcacgtttaaatgtaattttaattcatcaaagttacatttaaacattttttttcagcaattttaatctctattttaaaatagaaacatttattctcttttaaaaaaattgtaattttagtcctttatttttaaaacaatatttagtttcttatttgataaaatctgtaatttagttcttctctcac

SEQ ID NO: 99783 - DNA, 451 bp, Glycine max
  unsure (1)..(451): unsure at all n locations
agcttctacattgaagattgagacactcatgagagatcaatttttttgtcttcatcactacccatccattcccaacctgtgataaatgtgaggttgtgcatgggtaaagagaatgcactattgatgacaagttatgtacaaccatggatgatatcaactttgttggggcagaaaataattcttacaatcaatatcccaacaatttcaatcaaggacaatgcttcangaaagtcaagggatgtataggcctcaaaccatgcaaaatcaaaggcctagacaagataaaagaaaacctactcttctagagaccatgcttcaatatattgcccaaaatgatcagagaatgaagctggtggagtcttaactcaccaacatacaattccttttgtcacaaagacagacgatcaaccttcttttcaacttgaaccaaatctatagggatgatgtcaat

SEQ ID NO: 99784 - DNA, 382 bp, Glycine max
  unsure (1)..(382): unsure at all n locations
gattgacgaagggcacagaagacgacgnttgtctctgtgtgttatcaagcttttcgtcttacagatagcacatagtttatacggataaccactcgggtatttccgcccgtcagcgtgactcataagtcagtatgacagatcttgtgagtgcggaagatgatgtaaatctccgcatgtcaacgggcttgtcggacgcgattgacgaaggtcgcaaaagacgacgttagtctctgcgtcttatcaggcttttcgtcttacagacatcaaaaagtttatacggataaccactcgggtatttccgcccgtcagcgtaactcaaaagtcagtatgacagatcttgtgagcgcggaagatgacgtatatcttcgcgtgtcaacgggct

SEQ ID NO: 99785 - DNA, 397 bp, Glycine max
  unsure (1)..(397): unsure at all n locations
agcttngcatatctgcaggatccatcaggagtttatcttgtgaagagagccataatggggggctcatgggccactctgggatagacaaaacccttttcttactcaaagaatagttctatcggccccatatgaagaaagatgttcataaacattacactatgtgtgaggcttgtttacaagccaagtctagggtgatgcctcgtgggctatacacacctttactcatcccattcgcaccttgngtagacattagagtgaaatatgtccttgggattcctataaccctcagaggtgtagactgtgtctttgtggttgcggtggataagatcagcaagattgctcactctataccatgccacaaagtggatgatgcttcctacatctcataactcttttt

SEQ ID NO: 99786 - DNA, 276 bp, Glycine max
  unsure (1)..(276): unsure at all n locations
ttgagcgcaaatcctgactctctatanaccttgtcctcttgtgagaacgncaatccttaccctccgaagccaaaatagaatagctccgacacttccaatctaataattagagaaagaaaactttctctgaaagctcaaaaggaaaagtaagataattccccaatcaaagagtgggagaaagcgatcatagataagaatgaataattccccactcaaacagtgggagaaagccaaaagaaaagaaaggaaaattcccaatcaaagaatgggagaaag

SEQ ID NO: 99787 - DNA, 449 bp, Glycine max
  unsure (1)..(449): unsure at all n locations
agctngcctaattaacctgatattgagagattatgattattaaacacacataatggaagtactaagtatttattacctatacttaatagaaaatacttataaaactacaaaataaccataaattggaagggtttgatacaatttatacaagttttatacacaaaggttagtcgtattcaccgactaacaactcccccaaatttaaagttttgcttgtcctcaagcaaaaagagaacaactcacttgtcctcaagtgacaataacatgtagtgactatgtacaaaggtgtatgcaacaaaagttattgattgcatgataagagaatggagtaaaatgccctcatcacttgtctttcacaaggtaagcagttatctaaagagaagaataaaatgtaacctgaataatagatggagctaatcataagacatatattaaggaaagtagcttaa

SEQ ID NO: 99788 - DNA, 446 bp, Glycine max
  unsure (1)..(446): unsure at all n locations
ntntgtgaagttgtggagaaannaataacttgaaaattatttgtcttcaactcgctaagcgcacccctcgcgctaagtgccatcttcttcacatgttaagcgagctgttgttcgcgccaagcgcattgacccctgatcattggctgtatggttccgctaagcgcgtgacctatgcgctaagcccaataagctctctgtcccatttaattttggaattgggctaagcgagtcatctcgctaagcacgcaagtctggtctcgctaggcgcactgacacgctaagcccaattccttctctatttggaatagcgctaagcgagacgaacgcgctaagcgcgggccactactgcatttaaggagcattntattcgctaagcacggccttggtccgctaagagagagttgcaggactaatcagagctgcagaactcgcccagtgcgtacctt

SEQ ID NO: 99789 - DNA, 425 bp, Glycine max
  unsure (1)..(425): unsure at all n locations
agctntgatgcaacatttggagaggttaatgaaacaacgagatgatgcgctccatgagaggttggatcaaatggagaatagagatcataatgaagaataaaggaggagaagagggaatgatggtgttcctagacaaaaccgaattgatggtattaaactcaacattcctccatttaaaggaaagaatgatccggaggcctacttggagtgggcgatgaaaatagagcatgttttctcatgcaacaactatgaggaggaccagaaggtgaagcttgccgccacggagttttccgactatgctcttgtgtggtggaacaagctacaaaaagagagagcaagaattgtggtttgaaagaacaagggtgatgatgaaaggaaggaaagaatcactctttccagcgagggcaacacacaaaggttgagaa

SEQ ID NO: 99790 - DNA, 391 bp, Glycine max
  unsure (1)..(391): unsure at all n locations
ttccgcaagatntacggaaagatcttagagttgaccatattttagatatccatagaagccattgcatcgctcacccaatactacgaccagcctttgagatgcttcacgttcggagatttccaattagtaccaaccattgaagaatttgaggaaattctaggatgtcctctcgggggaagaaaaccatatctttcctccgggtgtctcccctctttgagcagaattgcaattgtggtcaaggattcagcaagagggttggactgcataaaacagactcggaacggcatagcgggcctaccacggaggtacctataagacaaggcgaggggtatggccaatcaaggagattgggtcccgtttatggatgtgttagctttgctaaattttgggg

SEQ ID NO: 99791 - DNA, 436 bp, Glycine max
  unsure (1)..(436): unsure at all n locations
agcttaactcatccaaacatggcaagttcattatgctttcaacaaatttcctcacaaataactatcatgaagcagaaacctagcaaaactacccatcatatctcccaaaacccaatacccacgaaaatcaagtgagaaagaagtctacccaaacctgaaatttcgaagtcccacacgtagagatgcgtttcacgactccgaanatgccttcctttcacgatttggagcagaaatggctaccaaaggttggagctttgttggagcttcaatggtggaggaagaagaaaagaatggaaacgtgagagagagagaaaaaggcttctgaaattttggggctgagtgaggagagagaatacaactttntagtttaaaagaaaggcttttctcttttcctattattttattttaagctatgccacatgtctncatttgagtg

SEQ ID NO: 99792 - DNA, 399 bp, Glycine max
  unsure (1)..(399): unsure at all n locations
ataaagaaacaatttccaagctggtgtcaaataaatcntacaggaataagattattcatgtaaataagcatatctaccacatagctataattatttattatcataaacgaatataaatataactgtagaaaaacacaaaatgtaccatatgatgtcatcaactatgtcatttgctagcaagtagtatatattcactgaagacacctaaaaacaagtagtcagtcaaagaatcatcataacatagattatccttggcaactaaaataagttaagcaatggaagaccttttcaatatgaagatatgtatcacaatttttttcagaaattgtcgtgacttcttaatggtaccatgctagtactcttgtactgtaatttgaaccattggatcatagtgcatac

SEQ ID NO: 99793 - DNA, 450 bp, Glycine max
  unsure (1)..(450): unsure at all n locations
agcttataagaacaaaagtgcctcaatcatttcctaatatgcatgtgaattaggacgcatcaacaagaatcaagccaaggctattgtgcgagcaatcaatggggcaaaacacaccaaatgattatgatgatggatggctcaaattctcacaaaggtgaaatcatcactttcaaattgagctttcaaaactatcatgacatgtagagaagaatcaaggatntcaagtcacaaaatgtcaagaacttttattttcaaaacaattacccatttcttgaacatatcctataattcaaagaaaaacatgcaaagtcgtacgtgcacacaaaattgacccaaaatattaaactaataatccgacgaaactaacaacattaacaaattaacacaactaacaaattaacaaaaccaacaaaactagcaaaaccaaagaacactccccccccctcccca

SEQ ID NO: 99794 - DNA, 431 bp, Glycine max
  unsure (1)..(431): unsure at all n locations
agcttcaccttttggtccttctcatagntgttgcatgagaaaacatgctctatnttcatctcccactccaagtaggcctctggatcattctttcctttaaggggggaatgttgagtttaataccatcaattcggttttgtctaagaacaccatcattccctcttctcctcctttcttcttcattatgatctctattctccatttgatccaacctctcatggagcgcatcatctcgttgtttcattaacctctccaaatgtngcatcaaagcttgcatttgtgaatgcgaaagcccccctccatcattangatttgttcctgccatctcaaacaaacaaatcaaacgtaacaagacaattatagttgctgtttcaatacctcacccactcaagtgtatcacacaattgtggcttttctctaatgaaacactc

SEQ ID NO: 99795 - DNA, 426 bp, Glycine max
  unsure (1)..(426): unsure at all n locations
agctntaacctcatcgtctctcacagtctttagaattgggagccaatctagtccttgtgttcggactctcagccacttatgatagccgccgatgatcccattactggcttccctaagctctctgtcctttcttcacgccgcatcccatgccttgcaaactccttggagtaccctcgcgttgtggtcactgaaaccccgtgcgatgaaaggcgtgatgccttcgtctaatggcgctcctctcatggngtagccaagagttggtgcacaacaaacaattcttgcgccgctcttttcacatccccggtcgaacgtgtcacacatggccaaaatggcgacgatcgggctttccttgccatgatgaaaggcgaggaaagcgtcaatcgctgctaggtccactaacccttccatattccgaaagaggacaac

SEQ ID NO: 99796 - DNA, 330 bp, Glycine max
tgtctttgtacgtactgagggacacacttgagctgccagatccctccgcctatgggcgtattctttgacagatctgtgcccccttcttagcacatgttctggagttgcatcccatccgaagacattatactgacactgcctaacggaggcaaccatcatgtccttccaagaatggactcgggaaggttccaagttagtgttacaggtagcagctaccctagtaagactttcatggaaggaatgtattagcaattcctcatcttttgtgtatgcccccatcttctgacaatacatctttagatggttcttggggcaagtactccccttgta

SEQ ID NO: 99797 - DNA, 363 bp, Glycine max
  unsure (1)..(363): unsure at all n locations
ccaagacacctgcggcatgcaagctnctggcattatgaatcacacacaactattcgtttgtatccaacgcaaagcagtgaggggcatatgtaatcatatgcagaaagatatttactatctgcccatcccttgtgcaggtcagacgatcacatagcagagaacaaaatgcagcgcgaatgactcattaaggggaatctccaacgaaataggatgaaagcaatgtgcggattaaaaccccgcttgttgggatgactcaatcgaggacaacacacgggaaagaaagaaaatatcgataatctcctcgctgcccagaggaggaatttcaatacgccccgagagaacgagaaccacaattagccggat

SEQ ID NO: 99798 - DNA, 426 bp, Glycine max
tgcaagcttgtctatgcacagtgcgttgccatgttttattttataagagttcttgaggagggggcacattacagatataaaaccattcttgtaccttgacttaacaacttttaggggacggggtcctcgctaaaccatgcctcatattatgagattattatcatatggtaaaaaaaaaaaaaaaaacccattaagaaaagccttggctcatccaaggtcaaggacactgagcacatttcctagtagttagaaactagggtcacatatttactcaggtagctatatatttgcaaaggcttttcttaatgggtttttttttgctagtgtaatttacaaatagaataggaaatgtgtattacttcataagattccaagcatcacataggtatcccaataaaaaaaactgccatattcctaatgcatatt

SEQ ID NO: 99799 - DNA, 402 bp, Glycine max
  unsure (1)..(402): unsure at all n locations
tactctccgggatacaaatttaaggctatatctatattatcactaagcagagtactggcctaatatattttgggcagatacaaacaacttaattgaaataccaagcatctataattggacagaaccattcaattacatacattttatagaagataacactgaatcaacatatccaagccaagataacattgaatcaccctagcttatacaaaatagataatttcataaaggaagcccgctaagcgaattgtgtctcgctaagcggccaatgtctttttcagttntatttctcagtctttaaaatttgaataattgtgtcctgattaattggttgatttcggtgtctgcaaatgtctttcaagaaaagaaagagtggtggttcaaggcccaccacttcatatg

SEQ ID NO: 99800 - DNA, 418 bp, Glycine max
agcttttaaaaaggccaggccgagccaatttaatctcttgttaggctataggctaggctcagacctaaaaaattaatcgtaggctaggcttcaagcctgttaaagcctgtcatggcctggttcccacccctatatctaatagagtgagcaacaaccatggcttattagtaagaagttttctaatgttggaacatgagcagacttgttttcatgaaattgtatttttagaggactagatttaatggctgaaaatgctccttcactattgtgagctccaatgcttatagaccttgttatcttctgaattgggctatttcataatttgttatctacttggaaccatgttttgccatgtctactctggcatgaaattaattgactttgtgtgtcactatacatatatactgacacactgtga

SEQ ID NO: 99801 - DNA, 353 bp, Glycine max
aattccacatatatatgaagcctcattgacttccttggagaactcaaaagagcattctactatcaccttggcagagcttttgaccgcacttcaggctctgaaacaaagaacactcatgagacaagaaggcactattgaaggggctgtggtagctaaatcactggacaaaaaaaagaagggccagtcaggaagtttcaaccacaaaaatggtagcaaatcctctcatgattttccatcatgtgctttgtggaaaaaaatcaatcatccataggcaaagtgttggtggaggccatatgtgaaatgccataaatgtggacaattatggcatgtggagaaaatctgcaagtcatcac

SEQ ID NO: 99802 - DNA, 382 bp, Glycine max
gggcttcttatacccctccaatagataagctcaccccgacgccaaaatacatgaaaatacaatgggaaactttcttgtgaagcaaggaaggtagctttcttgggaagcaagaaagaaagcttccttgagaagttaaaggaggctactcacacccttccagtagctaagctcacccctatgccaaaatacatgaaaatacaaaaaaaaggtctctactacaaagactactataaaatgacctgaaatacaaggcttaaaccctatactactagggtacccttaacttgtatggtagggtgcccttaatttgtagggtagcatacacactctaaatgcccaatatataggcccacaagaaggagaacctattctaatatttact

SEQ ID NO: 99803 - DNA, 360 bp, Glycine max
  unsure (1)..(360): unsure at all n locations
atctatattctgagcgtctcgataannacgagattgattcagatgtccttttttaaagacacggncgcccgaaaangatacgagccaaccgacccaaactggagcatccctcgattaataacgacactctgtcgggcatacgagtaaaaagtcattgcgggaggaaattcaaagagttccatttggaattgtgagcggcgtcgatttaatacaggactcatccgcacatccgcgtataaagttattggcattaaaatttgctcagagccgctagtctcaattttgtgcgactcgatatattacccgagtcatcgaacatccgagcaaaaggttaatgtcgatagaatttcctatgagctt

SEQ ID NO: 99804 - DNA, 310 bp, Glycine max
  unsure (1)..(310): unsure at all n locations
gggggagattgtggaagcaatgctttccaagattattttgataatgcccgagactcaagtcaagaaatcacgagtcaagcacgtttcaagaatcacagagtcattcaatcaaagaaagtttcatgagtcaaagagtcgttcgtcgttcaatcaagattcaagactaaagtgaagattcaagagaagactcacttaagataagtattaaaagagtttttcaaaatattgaatagcacaattntgttcaagagaattttttcaaagaaaaatcttttaccaagagttttactctctgataatcgattaccag

SEQ ID NO: 99805 - DNA, 386 bp, Glycine max
  unsure (1)..(386): unsure at all n locations
aggtggaatatataatgaggtaatattgaatgcaactctcacctcacacaagtccataacatcaatctaaacttgctcaaactgaatttacacctaaaattccaccgaatcaaaatttgactcttcaacacccaattttgccctaaaaatggctcttggttcactttggtcatttgtttttctctctagctcagcctaacctttctcacatgtcctaaatgacatttcaagctagtattaactcactntaacctccatttaccacagaattcagacttaaccttccaactctcaaagtctcactcttgttccactcataacatcacattctcactgtctaaccctaggttagttctacccttcatctctaacagatttccatcagc

SEQ ID NO: 99806 - DNA, 413 bp, Glycine max
  unsure (1)..(413): unsure at all n locations
agcttttcgattcattctatgtactcgttgtggttcacattgnnggtcgggcatgtttattctcgttttgtttactttttataccccctgttgacgtgcttaagccattttacttaagtcatttctcgcttaacttaaaaataaaataaatttccaccgaacgtttgaattgtattatccattaacttcggttaaaataaattccgaccgttcggtcgtgccgtaaccacgttggaaatcaaaaagaggtaaaaaataatataataataaaaaagacatcttttagtaaaataaagcggaaaatcaagtggacgttttctctttgggatttctcattcttaatcgaattgattaataactaaaagtgaaactaaaggctaaaatctattcgcctagtcaagctcgtccataaa

SEQ ID NO: 99807 - DNA, 287 bp, Glycine max
tcggacacaagaaactcagctgccgccactcgcaggcagcaagtgttcttttattttcagccttctggagggcccaagtgggcctggttgctatttgcacccccctttttactaaatgtaccgccccttctatttatttgtaattctttttccgtaacgttacgaaactttgcgaatatcataacgatagttattttccttccgcaaggttccaattccttacggataatggattaactctttttaacctttcgattaagttacaaaaactcacggttggcccaaaa

SEQ ID NO: 99808 - DNA, 347 bp, Glycine max
cacggagaagcaccacaagacaaaggagaagacgggagaggaggcgccaaacactacggaagaagccacggaagaaggagcgtccccaccaacagagagccctggaaaaaaagctaagagaggaagcaccaacggaggaaaagaacgagagaaagacagagagggggggggggggagcacaaaaaccaaggaggaagagaccgacagaacgagaacgacaaaccgggcgccacaagacccacatgccggcaaggaccccacaacgaaaacacgcgcgagcaagaaaacccaggaagcccgcagaaaaaaaaccgagaacagcaccacaacaacccccccggcgaaac

SEQ ID NO: 99809 - DNA, 409 bp, Glycine max
  unsure (1)..(409): unsure at all n locations
actggnacaacccgtgcaggtgtgggctcatgaggagcaacctcgttgggtctcaccgttgaaggtagagctccaggccatgctacttgcttaaggaactgctccatagttctaattggcctttggtgagccagttcttgcaagctgtgcatggtaataacctgtccttggaataagctctatagcatagggactaatgtttgggagctctggacatccggtcctattgttgctgccggaggagctggagttgatggtgaagggatgtcatctgctctggccctttttctcgatgccatctataaataaaaagaactcaaaattccttagactacatttattcaagttgctaaaataatgggctgacattaatgatgggcgtntagcaggatacaactcgctcagcgtg

SEQ ID NO: 99810 - DNA, 395 bp, Glycine max
  unsure (1)..(395): unsure at all n locations
caaaatctgctgaactacgaagatgttgtccatcatctttctgttcttaatgaaatcagttngagtttccccaataatatgtctcaagcactggggctatgtggttagccagaatattagatacaatcttgtaaacaaattacagcaagatatgggtctaaaatggttaacctgagaggcctgatcatgcttatgaataagcgcaataatagcatggctgagctgctttagaattattccagttgtaaagaattcattaaccgctgcaaagatatcatcaccaatgatattccaagccttcttgatgaataaaacattgacaccatctggtccaggagctttattattatccgtcacaaaaataaccgtcctaacctcttgcttatagtatgaca

SEQ ID NO: 99811 - DNA, 406 bp, Glycine max
  unsure (1)..(406): unsure at all n locations
agcttggngatacgcgtatccattcttgttaatcttgcatccatggcatcaatacggctgtccagcgagtcaaagcgatctccaataaaggtgtggagtccatccagtctgtcaagaatgttgtgcataagagatgaacagtcatctctctgagaatgtggtgatggagaacggtctttancagcttgtactggagcatccttcttcacccaagagccatccctctccttacggtatccgaaggaagagactacatttgcaccgatagagaatgatctcttgactttgacaaagggctcagagtcaagagggatattaatatgttgtagaaacaaggtaatccgatggggatatgggagtggagcatttgatcgtaatgccttatgcatgcgatatctcacaagat

SEQ ID NO: 99812 - DNA, 463 bp, Glycine max
  unsure (1)..(463): unsure at all n locations
tcatgctgatgaatcaagnnganncaagaagttnttgatttgacaaagacgnngacaaaaagcccaaagaatgatttcaagaataaatcaagaacaaattcaagaatcaagagaagtttgatttcatgattcaagaaaaaatgaattcaagttccaagagaagaaatcaagaaaacttcacaagggaagtattgaaaatattttttcaaaaaacaaacatagcacagttttgtttttcaaaagaattttcacaaaaatttctaagttaccagagtttctactctctggtaatcgattaccagtatcctgtaatcgattactagtggcaaagattgatttcaaaaagttttcaactgaatctgcaacgttccaattgatttcaaaatggtgtaatcgattacaagatattggtaatcgattaccagtgcatctgaacgttggaattcanattaattgtgaagag

SEQ ID NO: 99813 - DNA, 371 bp, Glycine max
taaatcaaattcgaataataaaaatcttaaatactttacaatatctaaatttatttcactatttatttacttatctcaggaattttttttattttatgtaatgaaaaataaaaaaaatatttgaaattttaaaataaataatttaaaactaaaaaaaactaaatccactgaattatttaatagtaaattctaacatgtattgaggccttttgaaattacacataaattttactctttttttaccattacattacagcaacctcttataaggatacacataatatgatatttttcaaataattaaagggttaatataatgtgtaagtggtatcaatataatatatataatgaatataaatataagtgagaaa

SEQ ID NO: 99814 - DNA, 381 bp, Glycine max
atgtacgcgcgtgcagatgatgggaagatgcttaccgattctgggagaggggatcctcaattttagagaaggatatcattagtactattttttcgtgaatctcttaataatggactgaatccctgaaattgaggagaataaaaccctggttgaattggaatgcccactatcccaaaaagtggcccttggcctggaatgaataaccccttgtacctattttgacctgaatgaataatggatggattgaaccctgagcctatacagtgttatctcctgctacctggactaaggtggtgggaaagcatcttctactggaagcgtggttcaaagcaaatttgtcctaatattgggggagtattatcaaggtaaatttgctccaaa

SEQ ID NO: 99815 - DNA, 413 bp, Glycine max
  unsure (1)..(413): unsure at all n locations
agcttaggttctaggagagtattcttcctttttaataaccttcacctttntattcattccttccccatacttgccctttttttcttaggcacttagctttcatacctgaaattttagcatacacacttattaactttatttatacttacatttttttaagcacagaaaacataatcagtgtgtatatactattttctttacgcatttcaatccttacccaatgcctcccccaaatttgggacaaatttaccttgataatacctcccccaaatttggaacaaattttccttgaaccatcttctgtggataatgctctcctacaacctaaaataaggtagcaaaaaatacaactgaataggctcaaggttcaatcaatcaatcaattcattcatctcaaactgggtgcaagggat

SEQ ID NO: 99816 - DNA, 386 bp, Glycine max
actcagcttagtgactgaaacaaaatttgttaattattttttgctagcaaaagtgataaacatcaaggaaatacgtatggaattgatgactgaacaagcaaatgatgatacctagcctacccatacatatcataaaagggaaacagtagtctcagagagtacccgctcactaaaccaaaccatgttttcagactaaaccaaaaagaaagatgataatggagatctctacaagatccatgaaagaaatttatggacttgtcatgtatataccaaaaattgattctagaaagccttggatcaacatttaggttttgaactatttggctgtaaaaaagagctcattggaggtattgacattccactttataactactgcatcccataca

SEQ ID NO: 99817 - DNA, 244 bp, Glycine max
tttaaaatgatgctggcctaacaagccatacattcctccaccaatccaacaacagcaacagccccagaaacaacaaacagttgaggctcctccgcaaccttccctcgaagaacttgtgaggcaaatgactatgcagaacatgtagtttcaacaagagaacagagcctccattcagagcttaactcgccagatgggacaattggctacacaattaaatcaacaacagtcccagaattctgacaag

SEQ ID NO: 99818 - DNA, 419 bp, Glycine max
  unsure (1)..(419): unsure at all n locations
ctcaagaaagcttctcaaggaagctacctagtctatatttagaagcatgtgtaacacttgttgtaactntgatgaatgagagtcttgtgagacacaactcanagttcaacttctctccctttttcttccttcaatttcgtgctccccctccctctttctctccctctttcttttcctccattgaagcatcctctccaagcttcttatccaaggctcatcttgggggtgaagctccttcttccatggcttattccttaatggatggcgcctcctctcacctcctttcctttgtcttccgctgcatctccatggtggaaaatcaccattaaaggaccccattgaagctcaaagatccagcctccatagaagccccacaagcaagcttccatcaagtgggaatcagagcacaagagcttcaa

SEQ ID NO: 99819 - DNA, 412 bp, Glycine max
  unsure (1)..(412): unsure at all n locations
ctgcagcttctcgggccatttcttgcgagaattaacttttttaaggnagcntcacaagataatgcttatcttaacgcagaaaatgtcatgctaatctctctgatttagaatgaactgacccctcacctagaaacagctgaaacacgtatgtgtggaatatcctactatttatatcaacatagaggccatccaacacattctaattgtcatacatatatgcatttgaaaagaacatacattctcacgcccaaggcattgcgtcaaaactcacacttaatttatatcctaaacatttgctatttacaaactacctacgtatgtttgaaatatatatcatacaaatttttattgcttcactcacatttattcatattggcaagctatttacattatgcacacacttgcattcaaa

SEQ ID NO: 99820 - DNA, 422 bp, Glycine max
  unsure (1)..(422): unsure at all n locations
actaagcntgcactattgaatgggattntgtgtgtcatcccatttattaaagagttcttgttcttacgnctatngancttatcaataatgcggcctcccttaaactttgctaaaattttgtccatgcagatgaggaatggacgcattttctgcaggccaattttctcaaaaacacaaaccatctatccttttacaagaaatactcgctttggccttccctcaataagcactttgaggaggtttgttccaatattggttgggtccttagtgcaggagctttaactaacttttggaacaattattggtgctcgctctctcctttgtttgcagctctttaacctaccccccctcggtcaacaagtttgtatccttctcgatacaggaatttagaatagaaagaagatggaatattctccctatta

SEQ ID NO: 99821 - DNA, 421 bp, Glycine max
agcttccatcaacttcatacatcaaggttttctgtgaggttataaacacgggcattgggggtccttttttccaaattcaatgatctacaccaattcatatgatcctacagtagataggacatttcataggttaagtagaaataatagaagtgttgtaggtttgcatattagtgtagtgcatagtgatttcatctctgattctgtttttcagcctaattctagttttagtgcatctgagtctgaatatagtgtcgatacaatcgttgataacaaccagactcttaaggaattagctactcctgatgttgtgtatcaaccttggtatatttaatatcctgagagagaggttaggtatgagctaaagtatggactaatccatttgctactaaagtttcatggacttgcaggtgaagatccacac

SEQ ID NO: 99822 - DNA, 453 bp, Glycine max
  unsure (1)..(453): unsure at all n locations
actaagctggaaggatgctcatggggaaagaagaggggattagagatttggtgacacgaaattgaagaataaagaggagagaagggaacttgaagtatgtctcataaactctcattcataaagttacaacaagtgttcacatgcttctatttatagactaggtagcttccttgagaagctttcttgagaaaacttccttgagaaacttctttgagaaaacttccttaagaagctagagcttagctacacacacccctctcataactaagctcacctccttgagaagcttccttaagaagattcctaaagaagctagagcttagctacacatacctctctaatagctaagctcacctccttgagatgagaagctagagcttagctacacacccnctataatagctaagctcacccncatgacaaaatacatgaaaatacaaaaaaaaaaaagtc

SEQ ID NO: 99823 - DNA, 117 bp, Glycine max
  unsure (1)..(117): unsure at all n locations
cttcgagcaatttaagatttcgcattttcatagagaggaggatcgttgtgcacacgctttanctaatgctgcttatatatatattatgaaatttaataaaaaatagaaatagtctta

SEQ ID NO: 99824 - DNA, 305 bp, Glycine max
  unsure (1)..(305): unsure at all n locations
aaaaaanatgaacgtttttaatgaaaataattttgtcttgagtggtactttctgttcctttttaattgtcaaattttttaatttttattattttttatctggtggtttctttttaagaaattattaattagtcttttgttaaatatattcttactttcccatctgattttcaattaatttgcatatatgtatttattgtgaagtaaaaatgaattaaaaatagaaaatataataataataatcaataaaagacaagagtggagttgattgttgattgacaagagtggaaaggaaggacaacaaat

SEQ ID NO: 99825 - DNA, 414 bp, Glycine max
agcttagcctaagtctacaatgttcaaattgattatagtttgagcttagtgcagcatggcgcgcttagctcagcctcatcagaataacactcaggcttagcgcagagggcgcgcttagcctaactacaaaaacttaaaaaacagtcagagagttgagcttagtgtagcaaggcacttagctcaacacataacaagggcttaacgtagcagctgcgcttagccttattctaaggaaaacttacagaagcatagtggcgcttatcctaacatgtcaggcttagcactgaacaaaaattctaaaaattttaatgtctgaacactattcccgcttagcacatagacgcacttagcaggcttatcactttcgtcatcaatagggataaacgcgcttagcgcgagatggtctgcttaacg

SEQ ID NO: 99826 - DNA, 403 bp, Glycine max
  unsure (1)..(403): unsure at all n locations
gaaactttctaacttagaaactatcttctcacttactcatgatgatgcatgatgcacaagagatatgatatgaactaagatgaaacattcaatataacaaccaatacaaatgtcactcaaaggagttgggcatgtaaaagacaaaacatcttcaagctttcttccaagcttcaaactttagtcttcatgtagctcatgttgctccccctatctcttacaaaaattgcacttactcctagaaaggagacatgttttataacaaattaagtaattttcactagatgatgttattaacaaataaatgtttaaagatgagacatagaatccattctcgattgtaagttctttntaatctaacaaataagttcatagatttcaacttatcagagaattgtctaatact

SEQ ID NO: 99827 - DNA, 302 bp, Glycine max
cataaccaccactcttgtgacagacaaaaatctgattcatggcttgctgggttaccaagctaactaaggcatctagtttaccttcaaacttcttggtttcagctgctgtagataaattcatggctactttcatgcactcctctaaagacaatatcattattactggcactagactgttgggagacggaaaccatcctctcaattaaattattggctttagcaggggtcatgtcttcaatggctccaccactggcaacatctatcatactttagtccacgtaagggagtccttgctaaaaata

SEQ ID NO: 99828 - DNA, 378 bp, Glycine max
  unsure (1)..(378): unsure at all n locations
cccacgagaatgatgtcaagattgagtccacaacgttcacgaatcaagagaagtgtgattttctgactcaagagaagatgaatttaagattcaagagaagaaatcaagaagacttcacaagggaagtattgaaaagattttttctaataataaacatagcacagttttgtttttcaaaagagtttgtctcagaattttctaagttaccagagtgtttactctctggaaatcgattaccagtttcctgtaatcgattaccaatggcaagagtttgatttcaaaagttttcaactgaatttgcaacgttccaattganttcaaaatggtgtaatcgattacaagatattggtaatcgattaccagtgtatctgaacgttg

SEQ ID NO: 99829 - DNA, 414 bp, Glycine max
agcttataatactcattgtcaatctgacatgatttgtgatacaacctataccaaatgtagggtttctataatacattcacatggcggaagcaaagacttccaaatgtattgtgatgatgccaaagactcaagtcaagaatcaagagtcgagcacgcatcaagaatcaaagggtcggtcgatcaagaatcaatattaaagtgaagattcatgagaagactcaagatgtaaaagaacttcaagaacagcatcatgataagtattaaaagatttttttcttcacaaaccaaatagcacagttttgctatacaaaagaattttctcaaattttctaacgttcccagagtgattactctctggtaatcgattaccgagtgacagtaatcgattaccagtgaccacattggtttcaaaat

SEQ ID NO: 99830 - DNA, 465 bp, Glycine max
  unsure (1)..(465): unsure at all n locations
taaaaactacgctgggagtttattntctggcttccattgcttcctgnggtaattcttcattaaccaagcaggtttatatcagagacatccaaccatcgaaggcgactcaactataaaagacttatgtaacctccgtggtgtgggaagtgagggtctcttgaataaatgtccagtgttgacctcgcctcttaatacttgtaagacgagttaaggcatctactcggttattttgttctctatcaacgtgtacaagttccttctactcgaaacactccaaaagttgtttgactaggtgatagtatttttgcatttgcgcttttctggcttgaaacacttcattaacatgctcaatgatgaacttggagtcgttccgacattttaatttttcacgctgacttcatatgctaactttaagcctgctttgagagcttcatattctgcttggctatatgaagctttctaatc

SEQ ID NO: 99831 - DNA, 414 bp, Glycine max
agctttaacgccaaattaactaatttcttcttatatgcaccataggagacgctagagaggtttttatactagaagatatgccacggcatgccatttttactaaggagttaatggttgggatgctatgctaatatatggttacaagggattcccatatgcttttaatctaactagtttttagaacaatgtgatacacaggataaacagagagtttaaatatttcttatttgaattctatttttttatttatatgtaaaaatgaacataaatatctatcaaaaaatatgataacttttacttaaatttttttttttgatctaattaatgtcataattgtatcttaataatgtatctactgttatttatataatggaatagaacaatcatacaatatttactaagaaaacatatgaa

SEQ ID NO: 99832 - DNA, 395 bp, Glycine max
  unsure (1)..(395): unsure at all n locations
tcaagtttaaatgatctttggataaattttttaaatcttttctcaagtttgtgtaagctttgaaagaacagataagttagacagaagttcatgataagtctttctaagagacttagggtcatcaaaatctttttaatctgattcagattcctcagaagttgtatctgccatcacgcatatgttggcttcttcatcatcttcattaggcgaagtgtcatccagatcttcccaggtactcaaaagacccttcttttctttggtcttatagtgtttcttcttgtcctgacccttctcgtagtttgggcaatcagaattgaagtgtccaggctatttgcattcgtagaanattatggagcttttttctttatctttcttttctttgggcattattcttg

SEQ ID NO: 99833 - DNA, 276 bp, Glycine max
tagcttcacgacattcaagcaatttatttttcctttctcacaagcgatcacagccaagcaaaaccaagtaaaggcggaatcctcgcgcgaaccaccaacccaaaattccacccttttccacctcaagaaccgcacggccaataccttggatccatcttttaacgcggggagaccaccccaattttcccggaaagtattggggaaaaacccaaattttggcgaggggggctctataaaaaaacacccaaaaccggttgtaggggaatatttccacac

SEQ ID NO: 99834 - DNA, 404 bp, Glycine max
  unsure (1)..(404): unsure at all n locations
caaaacaattctccacatgcacaaatcacgtataaacccaccatcccctgttgcccacctcaactgagctcatgtactcccacgtagcccttatcctcgttcctctcaacgccgggtccccatcaatcctcccaagcttccacaacatccaagtaattcaacatccaagcctcatgaactaacacagccaagaaaatagggcagaggcagaaaactctgcccataacacaaaccgacatcacagcttttcacactcaaatactccagtaatattctcttcgttccaattcgttaaccgttggatcgactctaanaatttactggaagtctctagcacataaaactacattatgaccgttgggatctgctataaaacgtccaaaacccaatctgtactactcttt

SEQ ID NO: 99835 - DNA, 401 bp, Glycine max
  unsure (1)..(401): unsure at all n locations
agcttgctctanatttacattgattgattttttattggaggaggtcgtctgccattcttgttttaagggtagcatttcttggcaaaactaactttccaaatggttgccttcgcacgaatggccccgaggaagcttgcctcaaagaggtccacgaaggacaaggcggccgaaagaactagttccgctccggagtatgacaagcaccgctttatgagcgctgtacaccagcaaatcttctaggccatcaagggaaggtcgtttctccgggagcgacgtcgtcagctcaaggacgacgagtatactgatttccacgaggaaataaggcgccggcgatagacatcactggttactcccatggccaattacgatccagaaatagaccctgaagtttatgcccatgc

SEQ ID NO: 99836 - DNA, 414 bp, Glycine max
  unsure (1)..(414): unsure at all n locations
atagcatcaactttccatctaagattatattaacatttgtcaatttgtatgtgtccataagcatcctaactactaattgcaaaatcttttattaggtgttcaagagaatatatatagaccagcactaaacataaacccaattcaaaagcatgttctttgcgtgaagtagatcacagcattcctctttaaaccatcnngacagtaaactgtaaacctcacatggtgtgattgtcacatgcacactntgaaagggtctntaactaacgattcatgaaataaatatctgacatcgtcaatgttcagagtcacatggctactttcgttaaaataggtacagcattactatcaatgctgtcgaatgtaaaatcgcgaggaacggtttaataagagaaagctgattagatgtaacaatat

SEQ ID NO: 99837 - DNA, 412 bp, Glycine max
  unsure (1)..(412): unsure at all n locations
agcttanggaacgactagttactctgntttcgttgctggcctacacacgttagctcgcttagaggtaagagatgagtttatctcaattgaggttaaaatgaacatgtgtagggattcttaaaggatcaaattggggtttattttggaatatttatgattataattctacctttatggttataatcatgagattggtatgtttgacaggctaattgatgtcctaatgcaaattagttgatgaaattgagcactcttggtattttttgtgtgtttttgaacctatgattttaattcctttgattttgatatgattatgtgaaattgtttgagggattctactccccatgttcggagaaatatttttgtataatttgtttgtgttttggacatgatttactagattagcatgata

SEQ ID NO: 99838 - DNA, 447 bp, Glycine max
  unsure (1)..(447): unsure at all n locations
nggacaatctatcaatgagcttctcaactgtttttatttgtagctccgaagaatcaaggtgtgcgtcaagtatgtggaatgaataagattgaggaattttagtctcaagcaacttcaacagaaattgttttcagaagatagagaagcaaatggttgcggcaattactattacttcttttatatctagaaaactagaacgattataacactcatacattctggtcaatcaattgaattagacctccttaaaaattacatatatccatgaatcatttcctactagtttagattccagcctatgtgttacataggataaatgtttatatttgtataattaaaattcagaataaataaatattttaatataataaataaatatctttgaaggtagaaattatatttcagatntataatataaatttaaactgtaataaataattagtttta

SEQ ID NO: 99839 - DNA, 408 bp, Glycine max
agcttaccactagcccaacaatgtcgttatttatccaataacaaaccccctccttacccacaagccagttatacacaaaggccatccctaaatcaaccacaaagcctggctaccgcacttccaatgacgaacaccacctttagcacaaaccaaaacaccaaccaataaatgaatcttgcagcataaaagcctgtataattcaccccaattccggagtcctatgctgacttgctcccatatctacttgatactgcaatggtagccataacccctgctacgtttccgcaacctctatttttccgagggtacgactcgaacacaatgtgtgcttatcatggaggagccccggcgcattccattgagcattgcatgaccctgaagcgtaatgtgcagagactaaattgatgc

SEQ ID NO: 99840 - DNA, 424 bp, Glycine max
ccgatttttctcttccatgaggagatgaatgtgacgctactggagttggcattggggctgacttgatacaaaacaaaatgcctatagcttatttctcggagaaattgggaggagccagattggactattgcacctatgacaaacagttctatgccactgtgagagctcttgatcattggaatcattatttgcgttctaatcactgtatattgcattcacatcatgagtcattgaagtatatcaatgggcagcagaagctgagtccaatgcatgctaaatgggtcgaataacatcaatcttgtaatgcctcttccaaatacaaggatggtaatagtaaagcggtggctgatgcactatcatcgagcgatgctttaatgtcaattcttgacactcgatcacttggttttgagactgtgacagatta

SEQ ID NO: 99841 - DNA, 424 bp, Glycine max
  unsure (1)..(424): unsure at all n locations
gcaagcttccattttcaatntcgagcgtctttttatatttttcgcctgaatctgacctccaagtgaaaagttatgacaatntgaattgctcaagagcttccattgttcaatttcgagcgtctcgatatattatgcgcctaaatcggacctccgagttaaaagttatgaccatttgaattactcgagagctttcgttgttcaatttcgagcgtctcgatatattatgcgcctcaatcggacctccgagttaaaagttatgaccatttgaatttctcgagagcttccgttgttcaatttcgagcgtctcgatatattatgcgcctgaatccgaccttcgagtgaaaagttatgaccatgtgaaatgctcaagagcttccattgttcaatatcgagcgtctagatatattatgcgcctaaatgcgac

SEQ ID NO: 99842 - DNA, 379 bp, Glycine max
  unsure (1)..(379): unsure at all n locations
gcttgccaaatcaacgacacaacttntactcggatgtcggaatgattctgtattatatcgagacgctcgaaattgacaatatatcgagacgctcgtaattgaaaccaaatgctcgaagcaaaattcaacgacaataaccttttactcggatgttcgaatgaatcccataatatatcaagacgctcggatttgaaaacataagctctaagcatattctaatgataataactttttactccgatgtcggaatgagtcccgtaatatatcgagacgcccgtaattgaaaacggatgctcgtagcaaattcaaatgacaatatcgagatgctcgaaattgagcaatggaagctcttgagcaattaaatggtcataacttttat

SEQ ID NO: 99843 - DNA, 411 bp, Glycine max
agcttgaccaatcccgacccaacccgggtatagttttttagtgagaacctgtgatgtacctaaacaggcgaacttctggcggtcaacagataaaaggaacaaagaccacaaagcaaggaggcttgtggtggctggccagctgtgaactttgattgatatgtgggttatggcctctggtaatcgattaccaagggtgggtaatcgattacaaggcttaaaaatgaagacaggaggctaagatggtctctggtaatcgattaccacggggtgtaatcgattaccaggcttgaaaacgaggtcaggaagctaaggaagcctctggtaatcgattaccaaggggtgtaatcgattaccacgcttaaaaagggaactgggagatggtaaggcctctggaatcgataccagcctggt

SEQ ID NO: 99844 - DNA, 316 bp, Glycine max
actcaagctggtagaatggctagacatgatacatgtcatggtttggtttggttcaattattttagggatgccccacattatttccatgacacaaatgcaaaaatgatgatttggaaacttcatgcaaaactggtcatgcatgcacatatgtggacactcaagtgtcaaatttttatggtcatgggatgctaaggctcaggattcatttcctctattttaaatcaacccaatgtttccaaaatatgttcttttatccatttgtgcattcatccgagtccattttgggcgttcggggaaatttcacagcattcaccct

SEQ ID NO: 99845 - DNA, 387 bp, Glycine max
ccaagcaccgcagcatgcaagcttaactgaaatacaaggaccaatgatttatatagtggaaccgacacaacgagtgggaacgataccaaagggcgaacgcgaaaacaaaaacaatggaagagcacatcctttcacaaaaaagcttcgcgtaatcgactacaatgagacgggcaccgattaccagcgataagttttgaacaaaaatcaaaagatgcaactcttccaatggatctcaagatattctaaagggcataacacctctaatgggtttcttgaccagacatgaagaggctataaaagcaagaccttgagtggaattctatgaacccattcaattcattcagaacaatcattccaaacccttacaactactgaggcccattgaac

SEQ ID NO: 99846 - DNA, 465 bp, Glycine max
  unsure (1)..(465): unsure at all n locations
tcagaccaaagcaacatanaatctaggtatccaaaacccttatattattgtgattttcaggcnngagaagngaaattgagaatgagggtaaattggagcaaactctcacctcacacaagtctataacatcaatctaaacttgctcaaactggatttacacctaaaattccaccgaatcaaaatttgactcctcaacacccaattttaccctagaaatggctcttggttcactttggtcatttgtttttctctcttgcacagcccaagcttcctcataagtcctaaatgacatttcaaactaggattaactcactttaacctccaaataccactaaatccagaattggccttccaactctcaaaaactcactctttntccactcataacaccatattctcactttctaaccctagggtaactctacccttcatccctagcagttttccataagcaatttcagcaca

SEQ ID NO: 99847 - DNA, 421 bp, Glycine max
  unsure (1)..(421): unsure at all n locations
gcttggaaaagatctaacagactcagccttatgtatgataatgactattacagncagtgttaagacagttcttcctaagatcaataatgctaaagaagttatgggattagtgagagagcgctctcaaacaactgataagtctcttgctgaaacattaatgagtacactgaccaccatgaagtttaatggtttgtgtactatgcatgaacatgtcattgagatgacaaacattacagcaagacttaaaaccttccttgatcagtttatttttaacttattaccgtttgagtatggctcattccaaatgagttataataccatgaaacataaacgaaatgtgcatgaattgcacaatatgttagtttaagaaggaacggggtttaagaatcaagaaagtcactgagttcattatgtaagacac

SEQ ID NO: 99848 - DNA, 458 bp, Glycine max
  unsure (1)..(458): unsure at all n locations
tcacgccagtaacaatgacggcacccacgtaaataatagtaccccctgttaattgttttaaaacagaccctatntggtaaattgtttttaaaacaagccccctacagtaaatttgcccctctttcaacaagaaatcctttctcatgacagtgaagttactcgagaatgtgccaaaagtatgattggggagggggggatagaggtgatggtgaaggantctcatccnaatctataataatagatttaaaaaaatatcatttgtggtaatttattgttctcgctttataaaatgtttatgtgcatgtataattatctctattaagagattcatgcttttagtatggatgtgagaaattagttctgtgtaaagatcaaaccaaactgatttttaattgtctttaccggctagattttttttcatagtatcaaagtggttataaatcaattataattcaact

SEQ ID NO: 99849 - DNA, 399 bp, Glycine max
acctgaagctgcagcttcacaaaagttggtggctgaaattgcctcgattcttgtgacacaagttaatgatttattgacactcaggatcaaaaaagtgcatgggccatggttgtttggttaaaaattacttatagtatgctatccttgttgcgtatggtgacgacatgtcgattgcatgatccaatatggcagaaaataacaggttgaagcagcagttggcccaaaaatttgaaatgaaagatcttggtccatctaaaccaacccttggtttgataattctataagccgtacctgaagaattttgccccttttttcagaaaaaataaaaaaattttccttacggggtttcgtgtgggataccaaaaacaaaaaaacccctctgaatctaattatattttt

SEQ ID NO: 99850 - DNA, 338 bp, Glycine max
  unsure (1)..(338): unsure at all n locations
caaagagccagctctttgcttttgctcaaaagaaaagctctactataggcaccctgttctagctccttcctgaacttttctaaagactttctgagctaagaatggtgatgccctctggagtgggagnttggagcttgtattgttacaagtgtgggcaccctattgcttattttagtgaaaaacttgatagtgccaccctcaactaccccacctatgataaagagctntatgccttaataagagccctccaaacttgggaacattaccttgtttccaaggaatgagtcattcatagtgatcatcaatcacttaagtacattagagggctgagcaagtta

SEQ ID NO: 99851 - DNA, 271 bp, Glycine max
  unsure (1)..(271): unsure at all n locations
cccactaagcataaattcacaacaaacccgaattgtagatttaaactacgaattgngtccatatatttctaaacacaaacaaactagtacaaatctggctaaatngcatcaagttttctaaaaggctataagacaattcatatgatcattattggtctaggcttataattatacaataaatatgaacctaatagccagctttaaaaaatgacactttttttaaagttgcagtctacaattgaaatcaacatacatgtataatgaagaatat

SEQ ID NO: 99852 - DNA, 359 bp, Glycine max
tctagaggctgtgcttatctaccccatttcttacagtgtttgtgtaagcctactccaggtgataccaaagaaaggcggcatgacagtcattcttaatgaaaaggatgacctaataccaaaaaggattgtcactgactggagaatgtgtatcaattaccgcaagctcaacgaagccacaaggaaagaccatgttccttttcctttcataaaccaaatgttggagaggcttccgggacaggcttattactgcttcttggatggatattttggatacaatcaaaatgcggtggaccccaacgatcaagaaaagaagaccttcacatccccttttggtgtctttgcctatagacgaatatcat

SEQ ID NO: 99853 - DNA, 386 bp, Glycine max
agcttgtagcatattcaaacaggtatcactttttactcggatgtccgacagtgtcccgtagcatatcgagcgctcgttattgaaaacagatgctcaaagcaatatcaaacgacaataatattttattcaaatgttcgattgtgtcgcgtaatatatcgagacgctcacaattgaaaacgaaagctcgtagcaaatgcaaaccacaataacttttaactcggatttccgaataagtcccgtaatatatctcgacgctcgaaatagaaaacataagcttttagaaaatttaaacgacaataacttgttacttggatgtccgatagggacccgtaatatatctagactctccaaatcgtaaacagaagctcctatcaaatctaactaca

SEQ ID NO: 99854 - DNA, 464 bp, Glycine max
  unsure (1)..(464): unsure at all n locations
tcaagaaaaagatggcctcagaaaaaccttatttccagtatggaattcnancaacagacctccaatctttaatggagagggttaccactactggaaaacccgaatgcaaatttttattgaggcaatagatctaaatatctgggaagccatagaaatagggccttatatacccaccacagtagaaagagttgcaatagatggtagttcatcaagtgaaagcataaccatagaaaaacctaaagatagatggtctgaagaggatagaaaacgagtacaatacaacttataagccaaaaacataataacatctgccctgngaatggatgaatatttcagggtttcaaattgtaagagtgctaaggaaatgtgggacactcttcgattaacacatgaaggaactacagatgttaaaagatctangataaatgcactaactcatgagtatgaaatatttagaatgaatg

SEQ ID NO: 99855 - DNA, 418 bp, Glycine max
agcttccaaacgttggccaccactcatgttatattctctgaaaggaggtgcatgtagcaacacttgcaacacagaattcatgtagcacgtgctaccaagattgttcaaccccctcaaccccaaaggataacacgattttcccctcagatctttggtggaaactctgcacttagatttctgcaaatccaatccaacaatcccagacaccaatctcctcctcttgatcaatctctggccaatgctttcattcccagtggcaccacctgccacccccattgagtgcttagacatcacaacttggtcaaaatcagggtcatacaattgatcacggcacactccacaataaagttcagtcctttcaatgtctacaaatacagcatgaccagattcagattgatggtgcaaaagggtgtgatcc

SEQ ID NO: 99856 - DNA, 363 bp, Glycine max
  unsure (1)..(363): unsure at all n locations
tcaaattattattgtactataaggtgtacattattcattacatatngtcattctgttacggaagtttctaaccaatttctttaaattgaaatcactcaatggggttggtgctggagtgtggcatcattcatggtgatgcagtgggaaaagacggtgttgttgataggttagagaggagagaggataaataaacggagagaaaatatgttaagcagcttaaattctagcacatttccgtgtgcaggcgcattgcattcagctgtaagcctgtaactgctgtaattctaagaccataatatatacagcatttgcataaaacaaaaacagtacaaatcatattgtttcatcgcacataattatact

SEQ ID NO: 99857 - DNA, 346 bp, Glycine max
  unsure (1)..(346): unsure at all n locations
agctntgcttctacacataggatgccatgtattatagcttgaagatagaagaagatgaatgaagggagaggaagagaaaagcacgaaatttagtgtctctaaagaagtctgaactttgaagtttaattctcaaatgatcaaagttgaaaaaaatgcacacacatgcctctatttatagcctaagtgtcatacaaaattggatcgaaattcaaatttcacttgaatttgaaattgaatttgtggagccaaattttggagccaaaatttcactaattatgattagtgaatttcagttatgattcagcccactaatccaagatcaattccaagattctcctctaagtgc

SEQ ID NO: 99858 - DNA, 340 bp, Glycine max
  unsure (1)..(340): unsure at all n locations
actcagctgctttacatctccccttttgatattacacctttgagaaccngaaatggcaaaaacaggctaaagcccaagggagaaggcgaagcccaatggagaaggataaggcccatggcagagacactatcagactataattgtcgctgaggcccagattaatttaaggcccaagttaaatatgtttttagttataattaatttattgaattttggcccaactatttaaagcccatgttaccctgacttatcttcttactggaagggcgttaccaacttatttcttaccgaagggcgttacctgacttatttcttactggaagggagcatcaatctcgta

SEQ ID NO: 99859 - DNA, 414 bp, Glycine max
  unsure (1)..(414): unsure at all n locations
agcttataaatgcctgggttaagttangtttagtccaaattcaagatgatatcaagtatcaacctggccccacagagtttccagtgttatcaagcttggcctgtgaatttcccagggcaatctacctggccctgcatgtttcccagtgtaatctacctgctccatggcttttcagtgcaatattaaaataatgtgacatgcacagtcttgggtgtgacttgtgtgtgttgagataccaataccccataccgactacaaaaatggccaaagtagagcttgtcaagtataaacaataaataatatttatacaaaagtagatagaaattttattttgccccccagctgctgcaaaggactgccactggtcctgagattgactattgaccatgacttagtttttcattggcataacat

SEQ ID NO: 99860 - DNA, 364 bp, Glycine max
  unsure (1)..(364): unsure at all n locations
gacctataaaactaagcttgctgataacattctcccnctttcttaagtttattcttcttgacatcatcaaaatcttcatgagttacattctccccctttatgatgatgacaaccacctgtatgttatgagcaacaacaaaaaanaaatatttatntgcatatagtttactcccccttggttttgcaatgtttgcttatatgagacagttgaagatttcatatttttcatatataacaaagtgtctcatacagaatagaataattttcttactattttatcttttatctttctctctccctttgtcaacataaaanacaaatcatgaattgagaagagaaaaatggtaccacttgttgcaatgta

SEQ ID NO: 99861 - DNA, 409 bp, Glycine max
agcttctcttggaccttatgcattccttctactcatccttcaagatcaaatagtctactcgtgattggtccctttcctttctccggagcttaagctcgctgatactgccccatagagcccctcggaatttgttccggccgtgttcttctcaacgagcccttttggtctcttgttccaaggccttggtggtagctatatttacatctctcagttcggcattctcctttcagatcttaagagttgctgatttgaacctttctttgactgtttgggcttgctcgagttctgccctaagggcctgtacctcttcgtcttccttcggtgcctcaacttcctcccctttagtggttctcaaactcgggagccaatccaaaccttgcatgtgggctttaaccacttacggtagccg

SEQ ID NO: 99862 - DNA, 440 bp, Glycine max
  unsure (1)..(440): unsure at all n locations
gttataagcgcgggtctgggagacataggtcaatcgtnctctatgtgcgaggatgatatttccagtactttggatttggtacgaacatgccctcctgattttcagctgggaaattggcgagtggaggaacgcccccgcatttatgccacgagcataatgtgaacctttacggtttaaaagctctataattgggcctaggctgtagagattttccttttgtgaggctttgtgtctttcgttcttgaatatataatacaaggatctttcttcatcggttcctggtctctacccattctcattcatttgcatgtttacttctttatctgaaacggcagatccgatgacgagtcccccgaaggtactaatacctgggacccgcctatcgacttcgagcgagaaatgaatcatacggaagatgaaggagatgaggatgtgggact

SEQ ID NO: 99863 - DNA, 418 bp, Glycine max
  unsure (1)..(418): unsure at all n locations
agcttctaaggaagctacctagnctatattattgtagcatgtgtaacacttgttgtaactntgatgaatgagagtcttgtgagacaaaactcaaagttcaacttctctccctttttcttccttcaattatgtgctctcccctctctctttctttccctctttcttttcctccattgaagcatcctctccaagcttcttatccaaggctcatcttggtggtgaagcttctttttccatggcttattccctagtggatggcgcctcctctcacctcttctcctttgtcttctgctgcatctccatggtggaaaatcaacattgaagctcaaagatccagcctccatagaagctccacaagcaagcttccatcaacattgatttcacaaaaagtggatggtgctaatttaacagtgcgttg

SEQ ID NO: 99864 - DNA, 197 bp, Glycine max
tgaccctttgtgagattgccgacccttaccctcagaagcaagattatgaacggcgagcatatactgacctctatctatcttggacgatgcatactcaaggatatatggagactttctcctctatgcactctagcatatcaggaagcgaagttcccattcttagactgggagattgattctatattcgctctagctct

SEQ ID NO: 99865 - DNA, 432 bp, Glycine max
  unsure (1)..(432): unsure at all n locations
tcttccccttntctttntgtaaatcgagttcctctctattcatatgatatagtntattcttttctcacttcctaaattttgaatttcggtgttgtaaaaaaaatcattgatttgcttagctcagtgtagaaaagggagggacatagaagaaagtaagaaactattgatgctggaatcacttgatgtaatcttttcataagaatctatacacacaaccaattattttttgttagagtctgagatacatttttgtactgttgagcagctcagcttcagtccattttacgcttgctcatgttttctaccataaaaattggttgttacattggttggagtgaaagttgaaagtattttggttcatggtaaatttggcacagccagaatttcatctcaattacccaatgaaaaacaggagaccgagaaaacctttta

SEQ ID NO: 99866 - DNA, 421 bp, Glycine max
  unsure (1)..(421): unsure at all n locations
gcaagcttctncgaagggcatggatatntccttttttttgaaaatgnctaanaatctcaccaaatgacgatcttttttcttcttggaagataccacaggatatggtacttccacagctctntcacttctactcttctttgcattcttattattttatttttcttggtccttcaattctttatttctgaccattatttgttcctctttttcttcattactttcacctctcacctcatttttcttgcaattagtacctttcttgtcagtagtttcctttttatgcacaacactatcctcatcctcagcctccacaaaccttttactccttgtcatcacaactttgcattcctccttaagattctgttttgtatttgccaccacaatgttggatgacttgtccgctatttgcttggcgagttgt

SEQ ID NO: 99867 - DNA, 405 bp, Glycine max
  unsure (1)..(405): unsure at all n locations
tcttcagnttgattttgtggcaagaaagtgttatccctctcttttcatttacaagactgcttttcaaactactaatctcttagtctatgtatatgatatcatcattaatggtagctcttcttagttgattcaacaccttaccactcagctcaactcaaaattttctcttaaacaacttggtcaactagattgctttcttggcattgaggttaaatctctttctaactagttcttacttctcactcataacatgtatataatggatgtactacagaaaactaatatgatagaagcttagttaatctatctccttcaatggccttcaattgttaacttactaaaatagactcaaatctcttcacaaatcccactttatacaagtccctagtgggtgctttacaatac

SEQ ID NO: 99868 - DNA, 425 bp, Glycine max
  unsure (1)..(425): unsure at all n locations
agctngctaacccatggaagctcctaatatctcctacactttgggggggagggccattcttggatggccttgattttctcaaggtccacttggaccccatttctaccaactacaaaacctaagaaaactatattatctacacaaaaggtacacatctctatatttgcatagagggtatttttcctaaggactgaaagaacttgtctgagatgtcctaaatgatcatctaggctcctactatacactaaaatatcatcaaaataaacaactacaaacctacctatgaaatcccttaagacatgatgcataagcctcataaaggtgcttggtacatcagtgagcccaaaaggcatcactagcatttcatacaaaccaaacttggtctggaaagcagttttccactcatcaccatttttcatcctgat

SEQ ID NO: 99869 - DNA, 425 bp, Glycine max
gttgtcttcttggcaatgtggaagtcaagcattatgttccaatgatagtagctaatggtgatacacaagtaggtaagtcaagaccattcaatactcacaaaataaatgcaggaaatgctgagaatttttcaagtggtcaaatgtaacaaagtttcaaagtaataattggacttgcatccagatcgtctcccaaaggactagcgtatactcagacaattatgaattaaaaactcaagtttgtaaaaagtatttatcaattggttgtgataaattcataaaataaaagacgtaagaataaaagcaagtaatagagaaggattgagcaaaaattattgcaatagtatgtgaaatttgaagattggacaaccatgggcttggtttccttctttatcaatgcaataacccaaataagctacttaatcatg

SEQ ID NO: 99870 - DNA, 287 bp, Glycine max
  unsure (1)..(287): unsure at all n locations
cctaagaatactcccgctgctcgncttgctgatatgtatcatgcagtctttttttattatgaccgacgaacaatgagggatcaacttgaaacttatgtgcttcaagtgagaagaaatgcttctctttccacttgtgaagatgttcaaagtttggctatgaagatggttcaaactgagaaacatttggtatttccattggtctataaacttattgagctagctttgatattgccggtgtcgacagcatccgttgcaagagctttttcagcaatgaagaatatcaagtc

SEQ ID NO: 99871 - DNA, 413 bp, Glycine max
catgcaagcttgcgtgtggagcttctattgatgctttatctctgagcttcaatgaggcgcttgaatggtgattttccaccatggagatgtcccggtagacaaaggagtaaagggtagaggtggttccttccactatggaatataccatggaagaaggagcttcaccccctagatgagccttgtataacaagcttggagaggatgcttcattggtggataagacagatggatataatgagataggagggagcactattttgtaggaaaaaaaagggtgataacatgaaccttgagtggtgtctcacaagactcttattctttaatgctttgacaagcgaatcttgaagtacctcttacgattcgcgtttgtgttggccacaaattgaagtattacgaggcccttaatggttggc

SEQ ID NO: 99872 - DNA, 407 bp, Glycine max
  unsure (1)..(407): unsure at all n locations
acatacaaatgagcttgtnacaaatcatctacacttggagtgatcacatgcagtcctcttgaacccttaccacccactctgttcatcatgtcgagcctcacgatgcccaacgggtttagccttctctaagtattctgaacataattcaatggcttcttctgcaatgtacctctcaacaatagatgcttatggacgatatagattctttgatacccttttaagatcttcatgtatcgctcaactgggtacatccaccgtatataaataggatcaccgcatttgatttctctgaccagatgcacaatcaagtgaaccatgacatctaagaaagcagggggaaaatacatctccaactggcacatatagggaattgggacacttcttggaatcatgcatgtacaggatgc

SEQ ID NO: 99873 - DNA, 415 bp, Glycine max
  unsure (1)..(415): unsure at all n locations
agccttctaagcgcaccccctgtgttngttatatttaccccccctcgtttatgtgttattggctgttttctttccgaaatgtcctggaactttacgaattccacgacaatgggtattaaacattttgaagtggtcaaacagaggtcgcatgctgacaaacaatggtccccggacgaaattagggtatgacagttgcccctctttacttatcttttattggagataaaagggaagtaaagataagacactaattgcgttcgagctaaatccttacccgaccgaccaatatctctgttagtgaaaaccatgacgtctctgatgctatcggactcgatcatttctggacaacaaaagaggttcttggcgcgccatcttacttgattgtccttggataacaaaaagtatctatagaaaa

SEQ ID NO: 99874 - DNA, 339 bp, Glycine max
agctgccaaggcgaagccattactttcaatttgattcttaacattcaaatattagaactaggtgacccacttcggcattacaaatatagataagtcatatctcacaattttacttaaacctcaatatataaggactaactgaaccatgtaaagtcaaatatcttataaccttcattaccatgcactgcaattaaacctaataatatcatgctatatgagcaatacaacactaaagggagctgcgctagattctccttgccatacaggctcaatcaacctaaatatgctatgcaattcatactaaataaagtttccatctcatctattctgaatctcttg

SEQ ID NO: 99875 - DNA, 411 bp, Glycine max
agcttgcatcaagtggtaatctgtgctcttatcttcaagtaggcgctccttagacctcctttaattttcagctctaccttttcctccattgctgtttcttcatttttcactatgtatctcctcacatttcttgtgctaaatattgttaacatgattatttagaatttgcaccgattaaatttgctatagaagctagatttgattttatatggttcaaatttcttgttcttgttcttgaaccatgaattgtgttgagtttaggctcctttgagttttgtctttctatttttagtggctgaaacctaaaccataaaattcttacaaaaacattatagcagaagaaaacctcgaaaatctaaagtgactggttcacctattgtagttttgtcatacaagtcatgtctagtcatg

SEQ ID NO: 99876 - DNA, 452 bp, Glycine max
  unsure (1)..(452): unsure at all n locations
tatagaatatataataaaagaaaaaggtctattgttgagtctatacatgttnccttggatgagtctagtgccattcttccaaggaaggattttttaaatgatattntagattccttagaagatacacatattcatggaaatgactctaaagaaaaagatgaaggaagcaatgaggattctcaagataatggagttagagaaaataatgaacttccaagagaatggaaaacctcaagagatcatcccctcgacaacattattggtgatatatcaaaaggggtaacaactagacattctcttaaagatttatgctataatatnggatttgtatctatgattgaacctaacaatataaaagaatccatagtagatgataactggatcattgccatgcaagaagaactgaatcaatttgaaagaaacaatgtgtggaaactagtagaaaaacctga

SEQ ID NO: 99877 - DNA, 398 bp, Glycine max
agcttaagcgctgctacatggctgataatatagccaaaggtttatgctacttctgtgatggaagtttttctcttgcccatagtcagacacataagaaccttcagctacaagttctggagattgatgatgctgaccctactcctatagaacttgaagatgcagtaattcctagtgagtcacctatttctaaacctcaaatctcaatgaatgctcttactggtgttgcaaatttcaaaactatgcgtgtgactggttatcataagaagagggctttgcatatactcattgatagcggaagtacacataacttcctcgatatcaacatggcaaagaagttaggttgtccaataacttccatggatgctacgaatgtggtggtggcagatggcacacagttg

SEQ ID NO: 99878 - DNA, 221 bp, Glycine max
tctataaacatccttgataggtcctttttttacaatcactacaagctccttgaacgaacccaatcctatccgagttccctccctatgcagtttagaatcaagatatacacgtaagagcgattcctcaacaagtgtcattcgctgcacatttaccctacctctgtctatattgtcagaattttaaaaacttaaaaggaataacacaaatatatcctggtgct

SEQ ID NO: 99879 - DNA, 409 bp, Glycine max
  unsure (1)..(409): unsure at all n locations
agcttagccaaaagcacgttacttatttctatgacaatggncattgcatagncttcatccatggctgggcttgcgtgccattagagtcaatgcaactattagaataagccaatttaagtagtgacattatgttaactacaagattcatttgactattaaaataacattgattaattcttaggtgtttgctcacatgtagtagttgtgcaataatatcttattagaattagtagctaataattagattattgacatgaagaaaatagatcttaattagatgtattgtaagatttggacggtccaatatgatatatctagacgatataaaatactcataattttgatgataatagaaatataaattattgatggactaatgctctatataaagtgaaataaaacatacttg

SEQ ID NO: 99880 - DNA, 445 bp, Glycine max
tctacttatgtggcagggcggtcttctcttcactttcttttttccaacgcgagctctgaccactgttcttccttcccgcgatgcttcttttcatgtccgcctgagtgggcttatagcctaaaccatacttcccacgattcccttgggtttttatcaggctagttatgccgccattgtctttgcctaaacccatcccgggttcataaccgttccccaacataactcgggccatcatcaccgccgcatcggacagacaaggttgcccaaagagggagtctactgaggaaatgctgaccacctcaaaagactggaaagcggtttctaacgattcttctgcggcctccacataaggcatggaggatgggcagcttaccaagatatcttcctcgcctgacacgatgaccaagtgcccctccactacgaatttcagcttttggtggagtgt

SEQ ID NO: 99881 - DNA, 419 bp, Glycine max
  unsure (1)..(419): unsure at all n locations
agcttngaactagcatttggtttaaagatatattttgttagagcagttttggggcaataaggaaattctatcaatggcggaaggaggcagttgaataccttaattgcagaatattgtccttgccattcctgtatctgggtatccccattggggataacccaagacgtagtgagttntgggatcccataattagaaaatgtgagagaaaactagccacgtagaaacagagacacatatccttcggggggagagtgactctcattaatgcagtcctaacaataattcctatttatttcttctcctttttcagggtaccttcaaaaataatagtcaaactagaagccattcagcaaagatttctatggggagggggacaagatcataggaagatcgcatgggtcgactggaagacaatttgt

SEQ ID NO: 99882 - DNA, 64 bp, Glycine max
cttgataccaactgatatagcaataaacacactaaaagagagttgaattgtgtgtttatcaaag

SEQ ID NO: 99883 - DNA, 231 bp, Glycine max
tggagaggatgcttcaatggaggataagatagagggagagaaagaaagagggggggagcacgaaattgaaggaagaaaaagggagagaagttgaactttgagttgtgtctcacaagactctcattcatcaaagttacaacaagtgttacacatgcttctatttatagactaagtagcttcctagagaagaattcttgagaaaatttccttgagaagcttctttgagaaaac

SEQ ID NO: 99884 - DNA, 148 bp, Glycine max
  unsure (1)..(148): unsure at all n locations
tctcgcanagcttacggtaagatctgggacctagccatggcatatgtttccacagaggccatngcctccctcgcccaatattatgaccagttgttgaggtgcttcacctttggggacttccaactatcacccacggtggaagagtttg

SEQ ID NO: 99885 - DNA, 420 bp, Glycine max
  unsure (1)..(420): unsure at all n locations
tcaaactcaccttatgggcttcctcggagcttggtctccgaccgcgaaccattatntgtcagnctttttggcaagagcatattctggcaagtggcaagcaactccgaatgagttcggcctatcacccttagagtgatggccaaactgaggtgctgaatcgaatcattgagtaaatatctacgagcttttgtgcatcgtcggccacgtacatggggcaagcttcttccttgggttgaattatcacataacacatcatggattgtgggcacgggctcgactccttatgaaatcacttttggccgcaaaccttttaattttccaaagcattcacaagagactcctgaaagctcaagaagctatgaaacgacaagccgacaaataacgccgagaagtgcaataccaaatggatgattgggttct

SEQ ID NO: 99886 - DNA, 411 bp, Glycine max
  unsure (1)..(411): unsure at all n locations
cgcgacaaaaatatttgggaactntgaaataatacgtctctttgttaaaatattttcaacctgtaatgcatggaaactatatcaatccatgagaatgagatgataaaatatactttgtctactcctatatgaacgaaaccataaaatgacgataatttgaaatattttatagctaatggttgaaatagctgtaaaatgtacatgcaataaacgagaaaataataggacgatacctgacgaatcgcaataacgaatattatataccttaataaataaacatgaaataacaatgaattatattatctataccacaccttttataacacttttcttaattacaccaacaattttttcttacacattcttttctctctgtgctctgaataacacaaaataatattcaatcatatt

SEQ ID NO: 99887 - DNA, 306 bp, Glycine max
gcctatgttgatggggatgattcccccacatttacccgcgtgaacttaacaaagagacatcaaaaacctttgaagaattcaaagagctgagtctaagactccaaagagagaaagactgtgtcatcaagagaatcaggagtgaccatggcagagaatttgaaaacagcaggttcactgaattctgcacatctgaaggcatcactcatgagttctctgcagccatcacaccacaccagaaagggatagttgagaggaaacacaggaccttgcaagaggctgctcgggtcatgcttcatgccaaaaaac

SEQ ID NO: 99888 - DNA, 300 bp, Glycine max
gacaaagctcccaataataaggccaccctcggcaagaagaaacacatagctggaccaccatggattgagcaacacggctataagagcacccaagcaaccaaataacccccacgggaaaagaaaaacaagagatctcacagacatacctgactccaagtagagaagtttgtacatacgaacgtcacaccaaacatagcgaggtcggccttaactttaaatgttaggacagcaacttaacaccctttgcgactgaacacgtaaagaaccacaacggccaaagcaaagagagcctcgggaaaa

SEQ ID NO: 99889 - DNA, 449 bp, Glycine max
tcctcctccagtcttgtcatgaaaatatgctaatttggatttctatgcattaagccctgcagtgacaagtgatagaaagtagtgcaactcctattttgatgcataaccagctaattgcacaattgtggggctgtagtacataacagtgttaatccccacatattgttggaagatttgaaggcccattccatcatataaacctcttctcacagttttggttttcagcagcttcattatgctgactttgtttgaagctgaagcttcttcattgagttccgtttaattgatttcttcaaagcattgatttcatcttcaacatcctggggagggtaaatcctcctcacaatttctttggcttcttcttgtttaccctattgatggccacacagacatgtgaatacatagattttgagaagaaaaattaaattagaaacactactttataaagt

SEQ ID NO: 99890 - DNA, 189 bp, Glycine max
ccaggaaagctagttcatctatcaaccactatctatcatcatcgcctaataaagtaaggggtgtctaattctaaaaaacattacgtataaaaaaacatttatcgtagaaagtcatttcacatatagaatttattaattaatattatataagttcattgttgctggaaaagacaatatttttgaagaaat

SEQ ID NO: 99891 - DNA, 414 bp, Glycine max
  unsure (1)..(414): unsure at all n locations
agcttccatcacataatcccatgcattttttntttccaaccaaggatttacactttgccttcacattcttatcaatgtgaaactaacacaacaagttggtacacttgggaacacagttttcaatgcattcatcagtgctagatctttgtcggttaccataaccccagggagggcattacgtatgagaaaaagaccttgaaagcattctaaagcccaaacaacattatttacacattcttcctccaaaggaaaaacagtagagaaattcattcatgttggtgtcacaccaacaatgtcaagtaataggagcctgtacctgtttgttttgtgggtattatctatcaaaaataccaaattacaagcattgcttagcttcactgcatcaagatgactccaaaacatatagtgtacaac

SEQ ID NO: 99892 - DNA, 453 bp, Glycine max
  unsure (1)..(453): unsure at all n locations
tgcatactggcagaagttcactacggattttgttgtcttantttgtgtggaaagactttggtcataaaagcattaagagtgggatactattggctaatgataaaaaatgccctgaattatgtcaaaaagtgtgacaaatgtcagagatgctaagacttgcataatgttttcacaaataagttacaagttatgaattctccttggtctttcttaacgcaatcctaccctgcaagagcattggatagaagactctaataagattgagccagagatgtaggagaaggtcctacggttctcatgagccttacggtagattttgggcccatgggctaagtatgaatccacttttctttgtaaatattagaatacgttttccttcttttgggccttgtatattggccatattaagtttgtagggtaccctacaatataagaacactctaccctacgagt

SEQ ID NO: 99893 - DNA, 407 bp, Glycine max
  unsure (1)..(407): unsure at all n locations
agcnttgcactcagctcgcttatcgagtttggattatctggaagagaatctatcattcatgcacacgcccaacgtgccatcagctcgctcagcgagtcatttgtctcttctcgcgctcagggcgcccagctcgctaagcgaaaattcactaactcacacttagcgagaaaatggcgctaagcgagccttcatgatcaaaaagcccttaaaagattgaagttggcgaaaaatgagggaaaagacgtaacagggccgaaaaacaaagcaagagagaagagcttggacgaaaagcctcagcctttgagagattctgagtttaggagtgattattaagtttttagaggtggaggagacatccncaccactttgtaatcttaattattcttcaaaaccctgttcttgggctg

SEQ ID NO: 99894 - DNA, 406 bp, Glycine max
cgtaataacaaaatgtataaaatgcaagaaaaatgctcgtgaataatatcagaaaacgcattctctagttccttcctctatctctctatctctctacccttctccttccacgggggttgcttgggcctcgaaagccaagcctaacatatcaccaaacctcaataaaaacaaccctttataattaatcaaaaaagtattttatacaataaaatatattttgcatttatgaaattaatctaattttttattattttttttcacagtaactatagactacatttcaaatttttaataattttatttccgacatgtcccaagtattattgtcatgtagcttgcttttgaaccatttgtaatattcctagttgtcttggtaatggtcctgaacgtatcctgaattgacttt

SEQ ID NO: 99895 - DNA, 127 bp, Glycine max
agctagtgccacctacattttattttttttttatggctgaccaacctaggctgtggttgcaaatttgataatctctcccatacccaaaattaaaccaagtagtataagggtgttcctgttcctatgt

SEQ ID NO: 99896 - DNA, 452 bp, Glycine max
  unsure (1)..(452): unsure at all n locations
cttacagcagattntagtaatgacccactaacctataatttatttaacttaatgccattaacctagagaattaaaataaacttaatggctgagtgtaactgaaattgtggcaaccaaaagtcacccccaacagccaacaagtcagccaccatttggtctcccaaaaggctgatgcctatgttgccaattgggcccttattacaacttgaactaaacctaactaaagcccttttagttgattaacccagaacatatttttggtcagccaactttacaaggattgggccattatttagacaaactaaacactctaaaattgagacaaagtggtgtcatttagtcctcctccatttgggccatgatacaactcacaaccttggacttttctccttgaaacttgngcttgtattcaaatagtatggacaacactcgttgaagagcttccttggctt

SEQ ID NO: 99897 - DNA, 398 bp, Glycine max
  unsure (1)..(398): unsure at all n locations
agcttgttcgaccaaactttcttgtgaatcntgagcaggncnccacacacccctgtcatgactaagcggatctacttgggaagcttggttaccaagataccgtaagaagctagcgctctaggacacatgcctctctaatagctatgctgacctccgtgagatgagagagcttagctcaccttcacaccccctattatggctgtgatgcccctcatgactaattgcatggagataaacccaatcccttttacaaatactacggggagggcctcgtaatactgggataaaaccctgtcctactataatggcccacatacagcgcccacacgatggaaaacctgttctaatatatacaaagataagcgggcgtatacttagcccatgggctcagaatctac

SEQ ID NO: 99898 - DNA, 205 bp, Glycine max
gctacaactcgactggtatttacgccatgcttcgaattgccacgaatgatgaggagcctcccaatcacactgtcacaaacattattgtacacatgcagtaacatcaatacaatgtctaatcgtaagatcacaccattacggaagatcacagataacgcacctttgcttccatatgcaactctgaacgtcatcctacttttgggac

SEQ ID NO: 99899 - DNA, 417 bp, Glycine max
  unsure (1)..(417): unsure at all n locations
ctgcagcttaaccaagcactcaaanctttgtatttaattcccctcaatcnaaaggactttcaaggcttgagaagtgaaaatgacaatggggtaaatttggagcaaactctcacctcaaacaagtctatatcatcaatctaaactcgctcaaactggttttatgacgaaaactctaccaaatcaaaatttgactcctcaacacccaattttaccctagaaatggctcttgttttcactttggtcactcatattcctcatttgcacagtctacactttctcataagtcctaaatgacatttcaaactaggattaactccctttaacctccaaataccactaaatccagatttggccttccaacactcagagcctcactctttttccactcataacactacattttcactctctaaccct

SEQ ID NO: 99900 - DNA, 449 bp, Glycine max
tctgccctatattgctataaataggtggagaagagaagataacaaggttttattcttttaggcacttctctctctctcgaaatttctgaggaaaattagtttcgtgaagaaaatccaaaccgaggcgctttcgtaacgcttacgtgagtaattacgcaaagattctcgaccgtttttcaagagtcatcgatcgttcttcgttttcttcagtcttcaacgggtaagtacctcaaaccaagctgttcaatacattctatgtacccgtggtggtccaaagtatgattcatgtatcttttattctctgttgcatttactttctatacccccttttgacgtgcttaagccatatatttaagtcgtttctcgcttaatctaagaatagaataaattttcaccgatcgattgaattgtatcattcgttaatttcggtaacatgaattccgaccatt

SEQ ID NO: 99901 - DNA, 300 bp, Glycine max
ttgggatccattgataatttcagcttgaaaaaattttccaactcattttgctattgggtaatcgattacaacaatttggtaatcgattaccagagaggaaatactctttggtaaaggtttgtcaaaatcagtctttcaagtttgaaaacttttaatacgtatcttgattgagtcttttctttattcttgaatcttgagtcttgaatcttgatcttgattcttgagatcttgaacctttgatcttgattcttgattctaggctttcttcttgagtcttgagttcttcttgattcttttctt

SEQ ID NO: 99902 - DNA, 443 bp, Glycine max
  unsure (1)..(443): unsure at all n locations
tagtaactntgaaacctcacactctcatcactctcacttgaatgctttttcactctgattcacaacctctcatggcactgtaactccgacatcgccagcattgcaacctctcatggtgctacaacatcattattgtcctcagtcacagcgcactacaacctcattgtcactctcacagttttgcaacatcattgtcagggatgtttatatccatactgatgtagctccaagtggagcttgtaggccttggatcttctccatcaatggagtcctttgcttcttgaagattaatggcagtggaatggagaaagagaaagatgattggagacgccacttcaatgagaagatgagtcaagaagaagctcgccaccanaggaagccatggataagagcttgaacgtacgagaagaataatggacggagaaggagcacggaattctatg

SEQ ID NO: 99903 - DNA, 448 bp, Glycine max
cctaagtagtcagtaagtgatcaacgtaccgtggtcttagcccttttcttattaactgccactccttgattgcaattaactgcgacgcgagaacagacttctaagtcttcgggttgaatggaagaacaaatgactaacggttgaagttgatgcagccaacatcaatgtagcttttcttcttctttttctgttctccaacgcccaagagccaactctgttgggtctcgtctaaagcgcctcggcccagctcctgtagatactggctgtgctcgtcgttcgtggcggagtctgtcgcatgaatcttcaacgggcctacccacggatctctagctagggtttgatttgaacacagaggggctagggttcaagctgttcgatttgcaacaaacacgggatgggttctaatgactatgcttaatgcaggcgtgggactgatgctattcactgc

SEQ ID NO: 99904 - DNA, 472 bp, Glycine max
  unsure (1)..(472): unsure at all n locations
actcaagctatgacttgagtcgtcaagagattataaatatatgaccattggtcatgaattctttacaaccnncnncaacacctctttcaataatcaagaatctatctttcaatcttctctctcaacatcattcaactttttctacagaagtttgtgagtcttcttctcttcatctttctaaaagtctttgttcaaaactttttctttcaagaaaagttctttgatcaaaaacttgcgttattcatctttttttattcttttctccttttgccaaaagaacgaaggactaaccgcctgaattcttttgtgtctctcttctccctttccaagagaattcaaaggaccccgcctgagaattcttttgattcttccctttcccttaaacaaaagatctcaaaggactaaccgcgtgagatatcttttgttttccccttacacagaatcaaaggactcacagcctgagaattcttgt

SEQ ID NO: 99905 - DNA, 400 bp, Glycine max
  unsure (1)..(400): unsure at all n locations
agctngttcatcaactctcttcgtctcgtttgatttttgaaatagactctgaagttgtagtaaattggatcctcaaaggcaggatgaattgtactaacaatatctttatgcattgtcttcttgatctttcatcatttgcacttttgattaatgatatttgcatattcctataaaaaatgtactatttttgcgaaagtaaatgcagagcaagtctttcttggattggtcttacaaattttacactaattcattaagatgtgatgattacttggggtgaaatattggctttcaaattctttatcgatagagaaatgcctttcttacacaaaattattcttgaaatacgaccattgacaagtacctaaacactacttattgaatttatcactacaaaacttgt

SEQ ID NO: 99906 - DNA, 406 bp, Glycine max
  unsure (1)..(406): unsure at all n locations
atttctgaattgtctgaagaataccgcatagcttatagcatttcaaaataggaatagataaactgtacattctttgtttaaatctctaatgcatgcttcatgcttgtataaaaatggatgaaaagatgtatccgcaaaaatacgtcatcgcacctacttattcatctatatataaactatatatattagtactgatatcatatatatcagtgatatgttttaactaactagtggctgtacacataattttattattttcaccaggataacgatataaattacattaattatatntattattatttctaaattntcatggtctcctagaccaaattaatntgataattcaacagaggagaataattaanaagatcataatcattatttctcgttttattaagtatat

SEQ ID NO: 99907 - DNA, 425 bp, Glycine max
  unsure (1)..(425): unsure at all n locations
acctgggctgcaactttatgacatgaacttttgagtagatttagnnganacttcatttgcaacagagtttgagaaagatatgaatatttgatggaagcgtgcttgagaagcttctatggaggctggatctttgagcttcaataaagtccttcaatgatgattttcaatcatggagttgcagcggaagataaaagaaaagaggtgagaggagacgccatccactagagaataagccatggaaaaagaagcttcatcatcaagagagtgccttggataagaagcttagagaggaagcttcaatggaggaagaaaatgagagagggagagaaagagtggcgtggaaattgaaggagaatagggagagaagttgaattttgaagcgtgtctcacaagtttctcattcatcaaagttgtaacaagtatta

SEQ ID NO: 99908 - DNA, 449 bp, Glycine max
  unsure (1)..(449): unsure at all n locations
tatggctaatacgttgaccctcgttctactctcatctatttgttaaagacaaacagccttcatcaaaggaagacatattctgcatggagtgatgattgctaatgaggtcatagctgaagctaaaacaaaaaataaaccctgcatgttctttaaagttgactttgaaaaagcttatgacttgctctcttggggctttcttaattatatgatgatgaggatgggtttttgtgaaaggtggagaaagtggatccatggatgtctctctagtgcatcagtatccatcttaatcaatggcagtcccactagggagtttgtccccgagagaggactaaggcagggggatccccttgcccctnttctcttcaacttggtaacagaatgtcttacaggactaatgaagacagccatatctaagaatttattcaccagttatcaagtgggaagcatga

SEQ ID NO: 99909 - DNA, 449 bp, Glycine max
  unsure (1)..(449): unsure at all n locations
tcatgatgttgaatcaagaatgattcaaggagttcngattatcttctttatgangacaaaaagccgaagagaatgagttcaggattgaatcaagaacacttcaagaatcaagagagaataagttcaagattgaatcaagaacgcttcaagaatcaagaggaaatttgatttcaagattcaagaatcaagaaaagactcaatctagataagtactaaaaagtttttcaaaacattgagtagcacatgaattttttacaaaaccttgtaccaaagagtttttactctctagtaatcgattaccagtagcaaagattgttttcaaaaagctttcaactggaattacaacgttccgattgatttcaaaatggtgtaatcgattacaatganttggtaatcgattagcagtgtgtttgaacgttcaaattcaaattcaaatgtgaagagtcaca

SEQ ID NO: 99910 - DNA, 418 bp, Glycine max
  unsure (1)..(418): unsure at all n locations
agcttataataacaaaatngccttaatcatttttctaatatgcatgngaattaggacgcatcaacaagaatcaagccaaggctattgtgcaagcaatcaatggggcaaaacacaccanatgattataatgatggatggctcaaattctcacaaaggtaaaatcatcactttcaaattgagctttcaaaactatcatgacatgtagagaagaatcaaggatttcaagtcacaaaatgtcaagaacttttattttcaaaacaattacccatttcttgaacatatcctataattcaaagaaaaacatgcaaagtcgtacgtgcacacgaaattgacccaaaatattaaactgaaaatccgacgaaactaacaatattaacaaattaacacaactaacatattaacaaaacctacaaaacta

SEQ ID NO: 99911 - DNA, 444 bp, Glycine max
  unsure (1)..(444): unsure at all n locations
gggcaatagcaccccacctgatgtctcaagttcttctgaccccgcgacatatcttcaggtaccactctgtggtcaacaaacaaaagtagaagactgactctttcacgctttctcacttcaagcttggtggattatggggcacccgtcatatgtggtactangtggcgatagggcgatggcacaaatcaactctcccacttctgtgaatgtatgtatacatgattttgatgatgtcaaagaagaatcaaacaaggctgcttcaaatgataaagcatttgcttcaagaataattcaagagtgcttcaacaagcanagccatgtttcaagattcattaaagaccaagccttgccttanaacaaagtgttttcaagacattcaaggctctagtaatcgattaccaggaagtgtaatcgattaccagaagacagggttgagaaatagct

SEQ ID NO: 99912 - DNA, 408 bp, Glycine max
  unsure (1)..(408): unsure at all n locations
agcttgccgttccagttnttnggtattgttattttataagctaactaagttgtattgtatctctgtcttgtgttctccactacattgaaattaaaacttgtgttgtgttccttgaattttgctgccatccttttatttcattgattcaatttccttttggctgagcatcttcatttttcaatataatagtggattttacaacaatagatagatgaattgttttgtagtgtatttgtttgagttttttttttctcacaaatctgtttgatggtgtgattcgcccagtcttcagtgcttcattcacaaccaaagtcaactgtgggaactcctgcatatattgctccagaagtattgttgaaacaagagtatgatggcaaggtagagtggttattggttagtttcatggta

SEQ ID NO: 99913 - DNA, 396 bp, Glycine max
  unsure (1)..(396): unsure at all n locations
agcaattgacatatgcttgataatgcaaaaaaactaggcaaatgaagagggtgaaaatgagggagaagcccatgctgtgactgccattcctatacagccaagtttcccaccaacccaacaatgtcattactcagccaataacaaaccttctccttacccaccgcccagttatccacaaaggccattgctaaatcaatcacaaagtccgtctaccgcacttccaatgacgaacaccacctttagcacgaaccgaagcaccaaccaagatnatgaatttgcagcgagaaagcctgtagaattcaccccaattccagtgtcctatgctaacttgctcccatatctacttgataactcaatggtagccataaccctagccaaggttcatcaaccttcatt

SEQ ID NO: 99914 - DNA, 416 bp, Glycine max
  unsure (1)..(416): unsure at all n locations
agcttgcttatagaaagccttcgnctagctttatatngatnngngttnggnccaacaacataattgaatcaacatatctagaaggaatagcctataatgagaaggggttggtcaatcaaaaaatagaattaattgaaacaaaaatttcaaactcaaagacaaaaaacacaaacaattaaaagaagatatctaaaaataaattcacacaatattcccccttgcatttcaccagtcaaaaacctagatagtgttgttcctttattcacatgttgaatattctaatgtcaaaatgaatttctctgatatagtgaatcacaacccaacataatgatctatgtttaacttataaaatctaggtatttttaatgctctaattttaaacatggaacattcatgcttaattttgtacaatttct

SEQ ID NO: 99915 - DNA, 390 bp, Glycine max
  unsure (1)..(390): unsure at all n locations
tatgcagcngtaagctctcttcgaatgccatgttctgcacaaaaaatttcaaattctttggagcaatattcaccacctcgatctgtgcgaagattctttatagactttcctgcttcattntcaacacttgctttgaagcttttaaatgtagaaaacgcttatgatttttcctgtaaaaaataaccccaagtttttcttgaaaaatcatcgatgaagcaaattaagtatcttttacctcattggaccacaaatatcagaatgcaccagttccaagacatcttttgctctccatgactttcctttgggaaattgagatcgatgttgtttgcaacaacacattcttcgcatacttgggaaggaatattaatttgaggaaggcatgtcaccatg

SEQ ID NO: 99916 - DNA, 378 bp, Glycine max
  unsure (1)..(378): unsure at all n locations
agcttgtgcattacaatttcttatatatgtgtgccacatgcccanccggactggacataaacatttgctgaccaagattcatggtccttgcaagtagaagatcctcttcaagcctcttaagagagttccatactgtcatgtgcccaccatgtacaaccccctagatgtccaccgaggagtcacatacttacaagagcgctttaacctcattctttaataggcgactgagcaaatgacatggatattattaccattgctccaaaagttccatcacgaagctgggatgaccttcacgagagtacttcttaataaaaaaattgtccttgcttccaggaccacaaccatcataaaagatattactcggattacgcactcacc

SEQ ID NO: 99917 - DNA, 383 bp, Glycine max
  unsure (1)..(383): unsure at all n locations
tctcaatagattaattgattgatctaacatgtataaaaaatactcaataccaagaagattcttcacgcgaatgtgtaatctcattgctaataatttcatcaaaatgaggttttctatgaatttacgtttctaagaaattttggctgtatatccatttcaatagccattttctgtggattctaaagccaatgcaaactcgttttccctataatgttntaaataagtaataacaccttttaaattatctatagcaacatctatatgcatatcttttgattgtagaatcttgctaacagaattgacagcatacaaaatatcataccaaatatccattcctaataaaaattcagaatcttcaagttcatgcgttgctaaagacatgg

SEQ ID NO: 99918 - DNA, 389 bp, Glycine max
agcttaaggatggaatacttgtttttgatattaaaagcgcaaaacagaatcgaagaatgcgaaaagtagagatcctaagggtgcaaactcataaattccgtgggtatggcttttgaaagggggaaaaaaatgttttgaatgcaaaaacgtcccccctttcgtcacttttatattatggtgcaggggttgctcgcccaggcgagctaacctgcacttttttttttttttggagaggaacattaaccatgtcccctcctttcttatgggttagcgttttgcctaacttgaacttacttaagttaaaattaggcgttgattacttatttttaaaacaaacaaataataaaagaaaactgcgaatacaaaggatacggggctgccttgcaacg

SEQ ID NO: 99919 - DNA, 448 bp, Glycine max
  unsure (1)..(448): unsure at all n locations
tcatcttcaatccaagaagaaagtgataaggaagactttatttgattggatgaagatgatgatcttaacctttttggtaaaagggtcaacaagttcctcagaatccaaggaaatcaaaggagaccaaattttaaacctaaaagaaggacagaagattcatcctctactccaaatgctatgaatgcaatcaacctggacatctgagggttgattgcccgatcttcaagaaaagaatggagaaatttgaaaagaaaaattttagtgaaaagaaggtgaagaaggcctacatcacatgggatgacaattatatggaatcatctaaggattcanaaaatgaagagataaacctgtgtctaatggctaanagttatganagtgatgaagaggtaacatcttcaaataacaacttatccatttcttttgatgaattacaagatgccattgctca

SEQ ID NO: 99920 - DNA, 417 bp, Glycine max
  unsure (1)..(417): unsure at all n locations
ctgcagctattttgaccgtggatgtgatttatgttaggtatggaagntacaaagttataaccaaacgcagtgttaatgtggctggaactcgtttctactttcggtaatgtattatttatattttaaatatataaattaaagtataatttatatatttaactgttttttttactatgaatggttaaaataaacatttttatataattatatattacataaaattttaatataaatatataaattaaaatataagtgaaaaatactcctccccattttgaatatgagaaaaaaaatctttaatcttgaacttaaagatatgaaaatctcaacaaattttattttatttaacaagtttatctctaaagtacccataatttaatagaaaatttaattcaatgactccttcttcttaatata

SEQ ID NO: 99921 - DNA, 455 bp, Glycine max
gctgctcacattgattcaatctggactagttccatgtatggtttatttatcatatcaaacagctgtcacaatttgatggacttgaccaaatctttataggaaatggtgaaggtttaagcatttccaacattgtttcttcatcattattgtctcctaatgactctcatattactttcaaacttaataagctattacatgttccttccatttctaaaaatttgctaagtgtcagtcagtttgctaaagataatgttgttttctttgaatttcaccctcacttatgccttgtcaaatcataggggaccaataaagtgctccttcaaggtgctatgggtgctgatggtctctattcttttcataacatcaaactccaggatcacagaccttagctgttatcaacaacatcttctactgctaataaagattctactgtaacatctagttctggtatttca

SEQ ID NO: 99922 - DNA, 452 bp, Glycine max
aactcaagcttataagaacaaagttaccttaatcattcgcaaatatgcatgtgaattatgactcatcaacaacaatcaagccaatgctattgtgcaagcaatcaatggggcaaaacacaccaaatgattataatgacggatggctcaaattctcacatagggaacaatcatcactctcaaaatgagctttctaaactatcctgacatgtaaagaagaatcaaggatttcaagtctcaaaatgtcaagaactcttattctcaaaacaattacccatttcttgaacatatcctataatttaaagaaaaacatgccaagtcttacgtgcacacaaaactgacccaaaatattaaactgaaaattcgacgaaactaacaaccttagcaaattaacacaactaacaaattaacaaaaccaacaaaactagcacaaccaaagaacactcccccccccc

SEQ ID NO: 99923 - DNA, 411 bp, Glycine max
  unsure (1)..(411): unsure at all n locations
cagctcagagaggaagctncaacggaggattagaatgatatataggggacggggggcacgacaccgaaggagaaaaaaagacagagacgtcgaacctagaagtgcgactcacaagattcacattcatcaaagctctgacaagatgtacacatgcttctattaatagcctaagtcactaaatagaggaaagcttccttgagaagaaatagcttaaccacacacacccctcataaagctaagcccacccccttataaaaacaaactaggacttagctacacgcacccccttaataacaaacctcacccctatgcctaaatacacgaaaatacgagacgggccctaaaacaaagactcctccgaatccccccaaagaaaaaaaacggaccctattattcaaagacaaggggccc

SEQ ID NO: 99924 - DNA, 433 bp, Glycine max
tacaccatcgcgatttaacccaaccccaccggtctgtactttttccctaacatcacgcgggctaccatcaaagcggcgctagacgagcgtggttgcaccggggagactcaacatatgcgttgcttaccacttacaaagcttggaaggacgtctctaaggattcttcgacggcttccacatatggtgtagaagagggacaactcacaacgatgtcttcctccccggagactatgattagctacccttctaccacaaacttcaatatttggtggagcattgaagggactaccccgactgagtgaattcaaggccggcctaaaaggcagctataggccgggttgatatccatcacttggagaatgatatgacagatgtgcggtccaatctgaaatgggagatcaatctcgccctttacgtctcgacggctaccgct

SEQ ID NO: 99925 - DNA, 416 bp, Glycine max
agcttgcaatattaaaaccttcaatacattgttttattgaccaaaacacatgatcagggttgcacaagatgcatgagctcatataatgacattgatatgaagatttttggtgccaaatacatcaagctcaagagttaatttgatgtatctattactattgcatgatctaacaactataagaaactatagttagggtttagctatattgacttgtctttcttgagctttaaataatagggttgactttaagcaagacaatattggaagatgcacgttgcttctccaatcatgggtgtaggactggattacatgcatttctccatatgtgtaggtatgcaaaaatgtatttttgagggtgatttgtttcttttatataaaaactaaaattgtgtcattattagtgttacaaatgaatt

SEQ ID NO: 99926 - DNA, 432 bp, Glycine max
  unsure (1)..(432): unsure at all n locations
cctcacacaaggaaaanncttattttcagagatttgttcttcatggagaatgagaaatggagctgaaacgatattgagaaaatgtcaatagatggccctttgcatgatcaagatgagttaattgatgatgtacccatgagaggcactagattgtacgttctcagatatttatgaaagatgcaacgcagcagttctagaacctataggatactgggatgcaaaggatgatccaaaatggagggatgcaatgccgaatgatctaaaaggagtttgttattttctaccaactgtttgaccaagtctttaggattagttggtttatgttcaaatactaagtanngtgtatattagtggtttgttattgttatatgaagtggtgtttattatttaagaagtcacgtattacggtttctttcttttataacaaatcta

SEQ ID NO: 99927 - DNA, 424 bp, Glycine max
  unsure (1)..(424): unsure at all n locations
agcttccatagctgccagaccaccngactttaccttcatctcacccgcacaccaaaaggagcactcaagggagacgaaaatggtttctcaacataccttctctaccaccacccatactactcaccgaacggtgctttcatggttgacagaccacctttcactaccacccacaataaccgcctaaccacctcgaattttctctcgttaccgatgaccgtcttgacgcctgcttggccaaagttgaagaggctcaacgccaccctgactcccaattggatgcacttctttaaaaattgcctgcgagaaccagccacccctactcttctgcctccctgtggaccactcaacaacaacaacaacgccccccaccacactcctatgtgggtttcttccctctgcagtcgccgccaacagtcgtcccgat

SEQ ID NO: 99928 - DNA, 390 bp, Glycine max
  unsure (1)..(390): unsure at all n locations
gcagagaagctttatgcacccaattggcgttaatatctctttgaacgcctatatgaagcaacttttgactggtgttggtttctacaaactcactcattttaaattattcattttcaaaagatgcatcttctctctatgagatagcattatttttttttcgtcacataattgcatggaagcttctttttatttagatgtattattcattacaaactcaatgcgctaattaatcagcaaaacttaaagtgctaattcatacttctatcttgcgaagaatcattaatgatataattaattagatatagttactggataggaataatcagttatgaataattatatgccaatanttggatcctagcattnttacctaatctatctatcattcac

SEQ ID NO: 99929 - DNA, 395 bp, Glycine max
catgcaagcttagcacactaggagcacttcttttttgtatctcaacaggtgtcgcatttgctgtatagagctaacattactcaaggtgcatgcaggcctaccaaggaattagctacacatcaatattggtcaagaggttaaaaaggaacccttattttgttctcccatcctcttggaaataagcagggcaacatgcttctatcctcctgaagcattccctttctaaagactactttccaagtttgaaagaacaataaaattgtaggatttttgggaaatttaaaatttgagtaagaactattaactaagatcctggcatttaaataaaagattctacatcatgatccaaggtatttagcatattggtagagtctgcttcaaaacttacacaaaac

SEQ ID NO: 99930 - DNA, 266 bp, Glycine max
atatgccacatattttttgataaatgaatagattatgctgttaaaaaatgaatttgctaacttattttgaattgttgatgttatatatgccagaatatattttgataaatgaatagttttatgttgtataagatagtaattctgtataggttagcttgcattattaatgctatatggtagattagaattatgtttatatgataaattagtgttgcaacctacccttctgcgggagggcgacactagacttccgggatgcgtgtttc

SEQ ID NO: 99931 - DNA, 411 bp, Glycine max
agcttagacagagaagaagagagcgcgattaaatatggctcacgttctaatatttttaaatgtaagtccaacatcgatttttaatacaaaactgatattaatcaaatgatgttaaccgtgacatcggttttttggaagaaatcgatgttaacttatcatacattaacatcagttcttgaaaacccgatgttaatgaactaacgttaacatcttctttaagaaccgatgttaacaaagtcatgttaacatcgatttttcaagaactgatgttaacgttagttcattaacattgggttttcaaaaaaccgatgtgaacgaatacacattatttacaattatgtcatcccgtttatgttcacatcggtttttgtcaaaaaccgatgttaatctgacgatgttaaatctacattt

SEQ ID NO: 99932 - DNA, 439 bp, Glycine max
  unsure (1)..(439): unsure at all n locations
agttgagcaggtaaaaatattcgtcttcaactcttagaggtgactttgagcgtttgtttatggaggagtccgagtcaatntctgattatttttctcgagtattggccgtagtcaatcaacttataagaaatggtgaaaatgttgatgaggtgaaggtcatggaaaaaatacttcgaactttaaatccaagttttgacttcattgttaccaacattgaagaaaacaaggatttaaagaccatgactattgagcaactcatgggttccttacaagcatacgaagaaaaataaaagagaaaaattaaacaaaaggaggctacggagcaactactacaactcaacgtaaaggaagcaaactatgcaaattacaagagccaaagaggacgaggtcgcggccaagatcgtggacgtggacgaggacatggaggagaaggaagagg

SEQ ID NO: 99933 - DNA, 237 bp, Glycine max
  unsure (1)..(237): unsure at all n locations
ggatccttaagtcacctgcagctgcagcttgccgtgcacaccgctttgtttatactcacaggcnacacagtagagaggagccgtaacacggactcatatcataacattgaaataaaatactgagaaacgcatcatgggactggtgtactcacnaaaagtatccacattcatgtgaccgaactttagccttcctaaggcgttgcttttctcgaaacgaactgagttagtgataattgg

SEQ ID NO: 99934 - DNA, 443 bp, Glycine max
tctgagaccggaccttaagcaccgcggctgcagctggttcaccccatacccttgattgactttttgatcgccaatacttcaacaacatttcatagggatgaaagactcgggaatatgcatgatatgcatggaaaatgtaattatgagattgagatgcccgaagaaacatcttttcttagttaaccatgcattaggtaccatgttcaatcattttgtttttaagtgaaatgagtttatgatcccaacatggttggctcatggtacctaacacatgcaactaagaatgcatcatgaattttcatgcttccctttttttttgtttttgttttgtagaggaaaatacaaggatcatgtaagagcaaacatgtagaacaaaaagtatgttgaatgcatatgcatgatgatgcaatgactcatgcaaaatgtgaggcgggaatgtgatt

SEQ ID NO: 99935 - DNA, 312 bp, Glycine max
  unsure (1)..(312): unsure at all n locations
tggagatatgtcgcgggggtcaagagaccctggggacatcacgtggggtgctattgcccaaaaccaaacttgaccaatcccgacccaacccgggcatagtcggtcagtgagaacctgtgatgtacctaaacaagcgagctcctggcagtccacaaataataggaacaaagaccacaaaacaaggaggcttgtggtggctggccagctgtgaattttgtgtgatatgtgggatatggcctctggtaatcgattaccaanggtgggtaatcgattacaacgcttaaaaatgaaaacaggagactaggatggtct

SEQ ID NO: 99936 - DNA, 441 bp, Glycine max
  unsure (1)..(441): unsure at all n locations
cacgacccggatcttaagncacctgcggcatgcaagcttgagccaaacctgacttttcattaaccttgacccagggtgagaacgtcaatccttaccctcggaagcaaaaaagaaaagaaggaaaatttccaatctaagagaaagcaataagaaaagaaggaaaatttccaatcaaagagaaagcaaaaagaaaaggaagaaaattccctatcaaagaatggatgaaagtaaaaaaaggaacataaatatggaaagaacgctcctaatcaaggatcgaaagaaaacagatgaaatatgcagaaaggtctttggaccggataatatctgaacaatacagaattgccaccaaatgaactaaaagaatgaaaggaaaccatgacctanagtggttttctccctttaattgccaaccaagatattgtgtgctagcgacttttcacc

SEQ ID NO: 99937 - DNA, 447 bp, Glycine max
  unsure (1)..(447): unsure at all n locations
taaagtatgcccgagnanncattcttatgatatgttgttgaagnattggggatcagaattgccattccttggattatagggttgaaccaagctcatgctnttacaaaaaggttcatcaagtcaagttgaaatatggaagtaaccgtcctgcaaaattgnggcaaaagatgaattgagtcacatcactgcttcgtctactgccaaacatatttangattgttgatgtccttgttacttccagtttcaccttgacaaagatgtcatggaccatgttgaanatctaaattgattcaaccccatattctgcgtaaaaattcacaatacttcgactgtacatcattcgcatgcatccatgcttttcattggttgcattactcattgcattctttccttgaaaaatgaaataaaataaaataaaatgaacttatcataaagaaaaggacacgc

SEQ ID NO: 99938 - DNA, 466 bp, Glycine max
  unsure (1)..(466): unsure at all n locations
gacctatgatactcagctgacgttacttagagtctccttgnacttctcactttttaaggaatgtcaaaaatagtaacaagaagtacctccaaactaattaatgttattaatgaagatagtgaccaaaaatcagaaaatacaactgatgtaggttcagtatcggaaaaatacattaatcatataaattccaaacattggaaaacaccctccatactgtattatcaacgaccaactgcccctaaccttctactagaagaaagaggtgagagtaatttcaaaagttttagtgcaaataacatctatgagtggaatatagatgcccaaacggagtacaatatcatgaatacactccaacatatgaccatggtagccacgacttaccaaacatctcatgaatgttcggaggaaacgattattgatatcttagtagcaggattctccggacaactaaaaggatggtgggata

SEQ ID NO: 99939 - DNA, 394 bp, Glycine max
ctgcagcttgccagagagcatgccgtgcttattttcatccgcgccggtgatggatctcctacttgaaggtaaatgtctcttttattggtttgggtttgattgggatgattatgcttaattatttggtgttgactatgggaacatctttaggagatttagactggggaactcgtgaagcccactgggtggatatatctatccttgtcttggagccgatcctaggtaagtacatagctctttttgcatccagctattggtggttcaagttcgtctccaccttttgttgtttggaggcgtggattcttagcttcaacgaaattttgtgggcacgtgttggatcatttttagccattagtgaaactgaagtagatggctttttctctatttttattct

SEQ ID NO: 99940 - DNA, 417 bp, Glycine max
  unsure (1)..(417): unsure at all n locations
tgattctacaccnngagaagatgtttactcagttgcatttgagaagaagcnccctgatcatgagggagttaacaaanatattcatgcaggtggaccttcttctattagtgtctgacttgcaacagcctcctatcactcttccatttccacctagagcaattccacacaagaagatggaagaagtggataaggagatcttggagaccttcacgaaagtacacgtgaacatacctctgctagatgttgcaacaccctgagatatatatctatgtattattagtaactatgtttgatgtctgattatattcgatggactattttcatccttaatcattttcaatgaggataatttacttaatacaggggtgtgggtagataaggatctaacttcttgaggaggctacatgaagctgcctc

SEQ ID NO: 99941 - DNA, 430 bp, Glycine max
  unsure (1)..(430): unsure at all n locations
agtcgcccgatcatctcctatgagagtgttgagtattgtcgatcataactgccattcgtcggattataggggtgaaccaagctcatgcttttataaaaaggttcatcaagtcaagttgaaatatggaagtaaccgtcttgcaaaattggggcaaaagatgaatcgagtcacatcactgcttcgtctactgccaaacatatttaggattgttgatgtccttgttacttccagtttcaccttgacaaagatgtcatggaccatgttgaaaatctaaattgattcaaccccatatcctgtgtaaaaattcgcaatacttcaactgtacatcattcgcatacatccatgcntttcattgngtgcattgctcattgcattctttccttgaaaaataaaataaaataaaataaaatgaacttaatcattggtatca

SEQ ID NO: 99942 - DNA, 424 bp, Glycine max
  unsure (1)..(424): unsure at all n locations
acctgacgctgcagctggcataacacacctcactctattttttgttaacccttccaagnggtgctcagttggaaaatagtcatgagctatgatgcaatcctaccccgcaagggcattggatagaaaactccaagtagattgggccagaaatgcaagaaaaggccctacggttcttatgagccttagggtagatttcgggcccatgggctaagtacgagcccacttatctttgtaaatattaaattaaggtttcattatttttgggccttgtatttaaggctccataatgtaggtagggtaccctagaaatataggatttttcagcccttgtattttagggcacctagactagtttttgtattaagggtagttttgtaattttacatgcactaagtggatatttgatgtgtgtgggtggaaataa

SEQ ID NO: 99943 - DNA, 464 bp, Glycine max
  unsure (1)..(464): unsure at all n locations
tcatgatgaatcaagaatgattcanagatgttttgatgagtacaaagatgnattacaataagatgatgacaaaggtgatgacaaaaagctcanaggtcaatcaaagaatgagttcaagatgttcaagatagaatcaagaacacttcaagattcaagaggaaagttgatttccagaatcaagaatcaagattcaaggatcaagctctcaagaatcaagatcaagattcaagaatcaagggaaggcttaatcaagataagtatgaaaaggttttntcaaaaactaagtagcacatggatttttctcaaaacatgtttaccaaagaagttttactctctagtaattgattaccagattattgtaatcgattaccagtagcaaaatggatttgaaaaagttttcaaatgaatttacaacgttccaattgatttcaaaaagctgtaatcaattacaatggtttggtaat

SEQ ID NO: 99944 - DNA, 412 bp, Glycine max
agcttctcaaggaggtgagcttagtgtttatattgttgttgtaactaaactctagcttctcaaggaagttttctcaaagaaacttctcaaggaagttttcttaagaaagcttctcaaggaagttttcttatgaaagcttctcaaggaagctacctcacctataaatagaagcatgtgtaacacatggtggaactttgatgaatgaaagccttatgagatacacttcaaagttccactcctttccctcttttattccttcaatttcgcgctccccccttctctctttcttttcctccattaaagcatcctcttcaagcttcttatccaaggcaattcttggaggtgaagctccttcttccttggcttattccctgggggatggtgcctcccctcatcatttactactttgcct

SEQ ID NO: 99945 - DNA, 459 bp, Glycine max
  unsure (1)..(459): unsure at all n locations
ataccactgtcgttgtgaacaangganccttttttaaaatataaacctaaggggaagttcacaactgtctgacttcttggccaaggttcgcaagctacttcgaacttcttcaggcattcatcaaactgctgttctgaaggacaattagtcagagatccccagcaatccatgacataatgccaagcatttttttgcgcaattagtgatttacatttagccttcacattcttgtttatgtgaaagatgcacaacaaatttgtgcatttagggaatacatctttcactgcattcatcaatgcttggtctctgtcagtgacaataactccagggagggcatcacgctttaaaaaaggcctcgaaagcgttgtaatgcccataccanattattaacgcngtcaccctccacatatgcaaaaccggcagagaatgtcatcccagtcggtgtcaccccaacaaaat

SEQ ID NO: 99946 - DNA, 413 bp, Glycine max
  unsure (1)..(413): unsure at all n locations
agctntatgttatatcaatttatactcttttgatattctttcaattgtagaaaaaatttataatcttcctatatattttgaatctgatttatgttgctaattatatttatagttttatggcataaaatttaatttaataaatattcaaaacatataagactctacaaattgagaagtttacaatttcttcattttttttaatcctcccgacctcaaactactcattgatctaatgaatatttttttcttggtatccatgttaggatatttggctcttcctcatgatcaatttttaaattattgatatttcaattctattaagtacatttatttttgttgctttaaatttgtttcatacattgctatcatgttttattattcttaattctttgagtaacgaaacaaatattgca

SEQ ID NO: 99947 - DNA, 445 bp, Glycine max
ggcctattcgatgcagcagtaatgatggcccgagttatgttgtggaactgttactaacccggaatgggtttaggcaaagacaacggtggcataactagcctgataaatgccaaaggaaatcgtgggaagtatgggttaggctataagcccactcacgcagatataaagagaagcatctcgggaaggaagagcggtagtcaaagctcgcggttgagacaagaaggtgaaggaagcccaccctgccacataagtaggagctttataagcgcgggtctgggggacgaaggtcaagtggtcgcgatatacgaagatgatgttccgggtacattggatttggtacgaccatgccctcctgattttcagctgggaaaatggcgagtggaagaacgccccggcatttacgcaacgagcataatgtaaacctttacggttgtaaaagctctat

SEQ ID NO: 99948 - DNA, 415 bp, Glycine max
  unsure (1)..(415): unsure at all n locations
agctttgcataccccaatgatccatcantttattacttgngaaagagagccataagggtgggctcatgggccactttgggatagacaaaacccttttcttactcaaagaatagttctattggccccatatgaagaaagatgtccataaacattacactaggtgtgtggcttgtttacaagccaagtctacggtgatgcctcatgggctatacacacctttactcatcccatttgcaccttgggtagacattagtgtgaaatttgtccttgggattcctagaaccctaagaggtgtagactttgtctttgtggttgtggtggataggtttagcaagatggcacactttataccatgccacaaggtggatgatgcttcctacatctcanaactctttttaagggaagttgtgagact

SEQ ID NO: 99949 - DNA, 349 bp, Glycine max
agcttgcctaataaactctgaaatttgatatttaatgattatctaacacacataatggcaagtctaagtatttattacctatacttaatagaaaatacttatataactacaaaataaccctaaattggaagggttcgatacaatttattcaaagttctatacacaaatgttagtccttatctccgactaacaactcccccaaaataaaagaattacttgttctttaccaaaaagagaacaacttacttgtgctctaggacaactacatgtagtgactatgtcaaaggtggatgcacaaaacttattgattgcttgcatataaaatggaggtaaacgccctcatcacttg

SEQ ID NO: 99950 - DNA, 402 bp, Glycine max
actcgctaagcgcacatcattcgctagagccatcttcttcacatgttaagcgagctgctgttcgcgccaagcgcattgacccctgatcattggctgtatggatgcgctaagcgcgtgacctatgcgctcagcccaataagctctctgtccatttaattattggaatcgggctaagcgagtcatctcactaagcacgcaggtctggtctcgctaggcgcactgacacgctaagcccaattccctctctatgtggaatagcgctcagcgagacgaacgcgctaagcgcgggccactactgcattgaatgagcattttattcgctaagcacggccttggttcgctgagagagagttgcatgactaatcatagctgcataactcgaccagtgcgtacctttgcgct

SEQ ID NO: 99951 - DNA, 415 bp, Glycine max
  unsure (1)..(415): unsure at all n locations
agcnttgatgctaacattggagaggttaattgaattacgagatgangcgctccatgagatgttggatcttatggagaatagacatcataatgaacaagaaaggaggagaagagggaatgatggtgttcctagacaaaaccgaattgatggtattaaactcaacattccttcatttaaaggaaagaatgatccggaggcctacttggagtgggcgatgaaaatagagcatgttttctcatgcaacaactatgaggaggaccagatagtgaagcttgccgccacggagttttccgactatgctcttgtgtggtggaacaagctacaaaaagagagagcaagaattgtggtttgaaagaacaagggtgatgatgaaaggaaggaaagaatcactctttccagcgagggcaacacacaa

SEQ ID NO: 99952 - DNA, 391 bp, Glycine max
ttcggaccttaaaactagcttcccagattacgaagacttaagtgaccttttttattcatagaaccatgcatcgtcaccatactacgacagctttgaatgttacgttcgagatttcattgtaccaccattgagaattgaggaaatttggatgcctctcggggagaaaaccatattttctccggtgttccccttttgagcaaattgaattgtggtcaggattagcaagaggttggactgcataaaacagactcgaacggatagcgggcctccacggaggacctagaagacaggcgaggggtatggccatcaggagattgggcccgttatggatgtgtagcttgctaattttgggtcgtctcttccaacgggatggttggggacctacacaatc

SEQ ID NO: 99953 - DNA, 347 bp, Glycine max
  unsure (1)..(347): unsure at all n locations
ccatatacaatctgggtatcgtcattacctaaagtatgtacatgtacttccgaggtgtattgggtatgtacatcacacacgcctgcttggctaaatttacatacatgcgtactcgaagcatatctgtgtaccgaaaaatgcacatgcgctcatcttggatttctaatcctatacatatacaacttatgatgntcttgctaccttccaataggtgctcatttatgctttttaagttttgctactaaagccgatgcaattcagtatatttccttgctgactaaaggactcgaaataaaagatatatatatttcgaatgtatttcttacatgcatgcacatattatatat

SEQ ID NO: 99954 - DNA, 377 bp, Glycine max
  unsure (1)..(377): unsure at all n locations
agctngttgaatggctagacatgatacatgtctttgtttggntnaggacaaggataaaagggatgcttctcattatttccatgacacatagtgcaaaatgatgattgggaaattgtatgcaaaactggtcatgcatgcacctatgtggacgctaaagtgtcaaattattatggccatctgatgctatggctcaagattcattccctctataataaatcaaccgaacgtttgcaaaatatgttctttgattaaatggtgcgttcatccgagctcatttctggcgtccgggaaaattatcacagtattcaccctataggtgtacacacacattgtccaaaaataagtgaattcttccaaagaatagtgggatatcattc

SEQ ID NO: 99955 - DNA, 457 bp, Glycine max
  unsure (1)..(457): unsure at all n locations
ttgccctcagatccctcttgttggactatacttagaccttatatttttattgnacaaaacatttaaacccaaacttaatccgcgaatccctcatttaagactaaatatcaatcctgcttcattcaagttctaaggcaacagtacatttcccaatgctatagtcacctaactatgcacacaaatggttgatcagaccaagagcatacaaaatttaagcactgaaagaagcattgaacacaagaactacaatcaattagatattaaaggagttacatcatatgttctctagagatcaccaacaaaggtgtttagccagccattacagaaataccctaacaataatgagattatagtagagaataactgctccttacacaagaagnnngatccctcctcctcttcccaacatatcataatcactctgcaactcactaatctctctctaattacacaacct

SEQ ID NO: 99956 - DNA, 429 bp, Glycine max
  unsure (1)..(429): unsure at all n locations
ttaagcaccgcggctgcagctttaccaaaagttntactctctttaatccaataccagntnactgtaatcgatnaccagtggcaagttttgtttccaaaaagctttcaactgaatttgcaacgttccaatcaatttcaaaatggtgtaatcgattacaatatattggtaatcgattaccagtgtgtttgaacattgaaattcaaattcaaatgtggagagtcacatcttttcacaaaaatgttgtgtaatcgattacaatgatttggtaatcgattactagtgataagttttgaataaaaatcaaaagatgtaactattccaatggttttcaagtttttctaaaagttataactcttctaatggttttcttgaccagacatgaagagtctataaaagnaagaccttaacttgcattttacatacattgaa

SEQ ID NO: 99957 - DNA, 459 bp, Glycine max
  unsure (1)..(459): unsure at all n locations
actcagcttattaggatatgggangcagtttgtttatgtttgtgtatggaagctcgaatggagaagacaccttcttgaatggagaagccagcttctgtgtgtgtgtgtgtgcggaagctcgaatcaagaatctgtctaagtttaatgcagcatccctacgttgcattaaatctcattacaggagcatcactacatccaacagatgggaagtcacaaagacaatgggtgggagtggagctttatttggagaaggccattgttatgacaatgaaattgatacggctggtgtttttctcaatgaggttcaggatatggccattcaacaacatggacctgatgtgtgggaatggactgctgaccctacatgtcagtatacagcatacaatgcatataaggtaataatgggaggagcaacagcaataacccatgaggaatgttttgtcaaattatggagcataa

SEQ ID NO: 99958 - DNA, 407 bp, Glycine max
  unsure (1)..(407): unsure at all n locations
agctntccatcacttggggatgagttatgttggactctggaggngggggcggngcgtctgttgtccgttgctggcagtccctaagctgttgtggtgcctcaccctacgcttgcctaagagcacagtacttcttgatgaaagccctgctaatagggggcctgatgaccttgctgggggtgacgggcactccgtagaactgatagaggcccataatcagagctggaaaccccaggaccctattggacttctccgagtgcactgggtgtcttgtgggcgcgatccactttggcagggggagatcagagttgtggtcattgggaagaatgttgctaagtaacaacgtcattcatatctgggtaagagtggtcatgtttgtgcgcatgatccacacttgtccccctgcagtg

SEQ ID NO: 99959 - DNA, 367 bp, Glycine max
  unsure (1)..(367): unsure at all n locations
tgacagcaccgcttttgagcgctgtcaccaacgcgcttcgggccatcaaggatggtcgtttctccggagcgacgcgtccagctcatggacgacgagtatactgatttccaagaggaaatatggcgccggcggtgggcaccactggttactcccatggccaagtttgatccagaaatagtccttgagttttatgccaatgcttggccaacagaggagggcgtgcgtgacatgagatcctgngtaaggggtcagtggatcccgtttgatgccgacgctatcggccaactcctangatatccgttggtgttggaagagggccaggaatgtgagtatggccagaggaggaaccggtctgatgggttcgatg

SEQ ID NO: 99960 - DNA, 411 bp, Glycine max
  unsure (1)..(411): unsure at all n locations
agcttaaatgtaaacatatgagaatcaagtgatgatatanngcactcattttttttatactgatgtactccttaaccctaaactacatctagtcgtagtaggattttcacttaaaagcacaccaaccacacaaatattctttccccccaagcatctataagtttttacactagtattcttttcaagcctctataggttgcacaactagtatatttctcaaacctttgcaagttgcacaatcaatattgttgtcaagactatgtaggatactcataatcattattatttttatgttaaattaacctatgggtatccatcctattacaaatttttttaattaaatccttatatttttttttattgagttcctatattaattttaaatttataagtaaattcccatgttaattt

SEQ ID NO: 99961 - DNA, 455 bp, Glycine max
  unsure (1)..(455): unsure at all n locations
ttgacaatatactnggccttatttaactgtctttggtcttggcggccatgctcaacaaagtactttcgacacctactgtacgttgatttcaccaatgctgttatgggaatgttgcgacaatcctttaaaaccttattgatacattctgagaggttcgttgtcatgtggccatatcgacgtccttctctatcgtaagccatcgtccattnttcttttgagatgcgatcaatccatgttgctatggctggactcagttcacgaaatttttctaaattttgataaaaaatgtgcttgcaaggagtgtacgctgcataaaattagttatgaataacaatttagagtataaatgaaagtaaaataaacgtggccatcaaatatgaaattntacccaacttcttcaacatttctttttgtttgacgttattgaatnttcgattgaagttgcttgctatgtg

SEQ ID NO: 99962 - DNA, 389 bp, Glycine max
  unsure (1)..(389): unsure at all n locations
tgaaatcaaganacacacacacacacacactgtttcctagccgatcactcacataaatttccattctccccctctgggtgtgaatttatgcttctcttaaaattaagctgattactcatgtgagttcttgatttaatccccatttctctccccctttggcatcaacatagagccatagtgcgtaacaagtataagacaatcatacactatgaatcattcacaaggcatgcattgaagaatatacaccaatcatgaagcaagaaacatgactagatcaaatatataaaacaaatcacatagtcatctaacataattcattattgttcatacacaccatgcanataaagaaatactatatncgtcacatgtaataataatatagattattt

SEQ ID NO: 99963 - DNA, 457 bp, Glycine max
  unsure (1)..(457): unsure at all n locations
ctcagcctgtggantatggggtacccatcacatgtggtactaggtggttgtctgtttatggtgcacaacaagttntccacatccacaatgcgcgcataaacccaccatcctctgttgcccacctccaactgagctcacgtactcccacgtagcccatattctcgtttctctcaacaccgggtccccatcaatcctctcaagcttccacaacatccaagcagaacaacattcaaacagcacaagctatcacagccaagcaaaacagagcataggcagaaaactctgctcatacgaccaaccaaatcacagacttttctcgcttaaagaccacagtaacaattccttcgatccaattcgttaaccgttggatcgactcgaaaatttaatggaagactctagtacataagcctacatngtgacgcgttggatctactatcaaacattcagaactcattct

SEQ ID NO: 99964 - DNA, 170 bp, Glycine max
aagcaaccaagacaacaacggcgacaaagaacaaggaacgagccgcacgacaaaaaggaaggacagcaaggaacccaaaaacaggcgacaaaaagcaaaacccgcagacagcgcaggcaaaaccaggccacaagcgaggaaaaaaaccgccacgaagcacccaccaaaga

SEQ ID NO: 99965 - DNA, 352 bp, Glycine max
gagctaatagatcaccacaaaataataacgcatcacaaaattaatatacatactcacgagtccatatacaaagatatgtctctgccattggcaggagtctgcactaaaaaaaaacaagagcatccaatactctctatcgtgctaacatgaacaaaaaatggatggtgcctaacctccattcataactataacatcaagagtcctataatacagggaaatcaattgataatacaccttaccaagaacttgttatagataactcggataacacatgttcatctcacttgccaactgtttaccacattttcggatgcactaccgaaagaatatttgtattattgcctattatcaa

SEQ ID NO: 99966 - DNA, 395 bp, Glycine max
cgagcgcactcctcgagccgtcgcgaaggattttttaagtagttttccaggggacctctcttaaacaaaaagactatcacccctccatataacaaacttaatgtaatattagcaagcttatgtcatattccctacgagcgacacttgtccagacatctcattacctaagataaatgcgcccaatacaaacaaggcagctgcactacctaaaaaatttacatgtacatccagggatgattagctattaacatcacacacgccgtcctttgctaaaattacatacatgcatacttcaagcatctcggggtaccaaatattgcacacgcgctcatcttggtattctaatacccatacaaatacaaacttcatgatgaatactgactagctacacaata

SEQ ID NO: 99967 - DNA, 442 bp, Glycine max
  unsure (1)..(442): unsure at all n locations
ctatactccgacgncgctatcaattgatcgagtttgagtagcacccataccagtttaataataaagtccaagaaggattttgatgtcctctctagtcaagcattcccttaatcttaaagggaaatggatgaggtagttgtcttctgctgaatttgtgtgtgtgagtattcaaagatacatattgtcatatgttactttggtcagacgcattaaatgttgtcatacatcttcaagaaaagagaataattatgtcttttcttgttgagatatcttttaagacactcgagggtcacgtccattcgacccatcanattggatatccatgctttgatcaatgtgataatagcaccttttcttcctagtgctactcgaaggcaacattccttctttacctatcgaaggttggatggatttcactttggacccttgaatgagtgcattc

SEQ ID NO: 99968 - DNA, 373 bp, Glycine max
  unsure (1)..(373): unsure at all n locations
ccaaagacagagagaagtggcaagacaacatagatancggcaagcgggatacaacacaaggcaaaggagaaagcttatctacaacacatcaattccaacctagaagcacaatggctataacgacactaacatacaccctttcaagccctcatcccccacaatatagcatatacaaataaatctcctgatatattactgcatcagaaatgttacatcttttaattacaacaaataaaaccctttgcaagactatctatctcactattaggggctatgtatgcctgttctaataggtaaactgctattctatttgattcccaaccctgctgccaagcagaacttaggcgacatttccagcattcctttttttccc

SEQ ID NO: 99969 - DNA, 428 bp, Glycine max
  unsure (1)..(428): unsure at all n locations
agctatcacagccaagcaaaacagagcaaaggcagaatactctgccaaaacaccaaccaaaatcacagctnttctcacttaaagacccccagtaacaattccttcgttccaattcgttaaccgttggatcgactcgaaaattttactggaagtctctagtacataagcctacatggtgaccgttgggatctactagcaaacgtccagaactcattctgtactactctttccacagcctaccacacacaagcanttttctgcacaagccaaaattctgctgcactctatttgacagcaaaattctgcataagtgcagaattctgaaatcacacttccnctcatccaatcttgctcaaatcaaatcctacaagtcccaaatcatgtatcaaacatgtctaaaccaaagccaagcttanaccacagaacac

SEQ ID NO: 99970 - DNA, 410 bp, Glycine max
  unsure (1)..(410): unsure at all n locations
actaagcttcacattcaacttcgagcgtctcgntatattataggactctattatacatccgagtaaaaagttattggtcgttgaatttgctcagagcttcaacattcaatttcgagcgtctccatatattacaggactcaatcagacatccgagtaaaacgttattgttgtttgaatntgctcatagcttcaaaattcactttcgagcgtctcgatatattacgggactcaattagacatccgagtaaaaagttattgtcgttggaattggctcagagcttcaatattcaattacgagtgtctcgatatattactggactcaatcagacgtccgaataaaaagttattgtcgttggaatttgctcatagcttcgtcatttcaatttgagcgtctctatatattacaggac

SEQ ID NO: 99971 - DNA, 495 bp, Glycine max
  unsure (1)..(495): unsure at all n locations
ctcagctttattaagctgaccatttatcaataacacatttttgttttttcgaanatagagnnatctctttatcttatgagagtgattctctaaattctgagtgatcaagacaccttggctgtataaaggactatacaacctttgtgtgttgccctcgctggaaagagtgattctttccttcctttcatcatcacccttgttctttcaaaccacaattccagaaaatccacctctgcccagaattatctcgtggccataacttccattntacgcactcaaattaagtgattcttgagcctaaattgaatttcaaaacgagacctttcacctcgtgttggaatcacctcatatggagccctgtagtttcagctattgccatttctatatttctgtccagccaccacttaacctactgtttaccatcccattcatccattttatgccangacccacgaattagccaccgtattttccatcctttcttaatcaattccg

SEQ ID NO: 99972 - DNA, 374 bp, Glycine max
  unsure (1)..(374): unsure at all n locations
agctgggcggcaagcaccacccctctttttctataaatatgccgagtggggctgttccaaaagtccctaacccctatgctatgcatttcaactgtgttgggtgaaaaaatgntgttccgtgaagaaaatccaagctgaagtgcttctgtaatgcttccgagacggatctgtgagcaatatcaagaaagattttcatcgttcttcgccagtctatggccggtcatcgtgcattcttcgatctcaactggaagagatcgtaatggccaaagcccatacgttgtttctttacaccagagatattaatggccatagcctacagttcttccttcaaaaaccaaagatggaatgggcaagccttaatgtcttccttcaaa

SEQ ID NO: 99973 - DNA, 459 bp, Glycine max
agcttagctacacatacctctctaataagcaagcttatctttttgagaagataagctagagcttagccacacatcccctataatagctaagctcacccccatgacaaaatacatgaaaatacaaaaaaaagtccttactacaaagactactcaaaatgccccgaaatacaaggctaaaacactatactactagaatggccaaaatacaaggcccagacgaaggaaatgcctattctaatatttacaaagataagcgggctcatacttagcccatgggctcaaaatctaccctaaggctcatgagaaccctaaggccttcgcttggatctctagcccaatctacttggagtcttctacccaatgcccttgcggggaggattgcatcaaaagcccaatcctataaatttagaaggggggtgagctttgcttatacaacccatgtcacatatatatcacact

SEQ ID NO: 99974 - DNA, 397 bp, Glycine max
tgggtgcgatggtgttgagttgtttatagggacgagaacaaatagggttaagaatgttcaagagcgcgagaggaaaacatgaggtgcgcattttgtttttttaatccaaatgaattaagacagtttttttaaacacacccgccgtaatttaaatttatacaacattctaagacggtttttactaaccgtcttaaaatgaatgtcgtaaaaagcttttattcttactataattacaaaaatgacaccgcactactttctacaccggttcccaaacaaccgccgtagagtccctgtcgtaaattattgtttttctagtagtggttctttctgtcttgtaagtaagttggagccaaatggaaaattggtaatggacatgtgaatttgtgcttttgtctat

SEQ ID NO: 99975 - DNA, 415 bp, Glycine max
aacaacaggaccggaagaaatggttctacctctgattgttatgtagcttaatatgtgagtaagtgacttatgtaacatgccccacggtgtagtctgtggattgttgctcctcatcctatttggaataatacaagaagaaacaatctttttcgtgttgtgttgtattagatactggtggatgagactaaacagtcatatgtctttttgtgttggtcttcaccctacttataataatacaagaactttcaagagtcttaatggagaaagctgctgtttttcaggagagatacttttaatagctatctgaacaagtccacgtctcttgatatgataagctaatactattgagagaatactgtatgattatatttgcttcattattgcaccatcgaaactaattaacaaaatgtggtct

SEQ ID NO: 99976 - DNA, 445 bp, Glycine max
  unsure (1)..(445): unsure at all n locations
cctttggtgcgcatatctgctccatatctctanagattgtgcatttcngagtcgtgaagcgcgtctctacgtgtgggactntgaaatttcaggtttgggtggacttctttctctcttgattttcgtgggtatagggttttgggagatatgatgggtagttttgctacagttctgcttcatgatagttatttgtgaaggaatttgttgaaagcatgttgaacttgccatgtttggatgagttaaacatacccattctgctttagggttcttatgatgatgcttgtgatgtctatgtgctgaaattgcttatggaaaactgttacagatgacaggtagagttaacctacggttagaaagtgagaatgtggcgttatgagtggaaaaatactgaggctctgatagttggaaggttaaatcccgattctgtggtaatggagggttaaat

SEQ ID NO: 99977 - DNA, 410 bp, Glycine max
  unsure (1)..(410): unsure at all n locations
ttcttcttgacatcatcaaaatcttcatgatatacaataagaacttttaatcctttccttgaattgacccttgataatgcaatgcataattgtccatggctaaagacgggttttggcaaataaagtccaaccatagaaagtgagtggccttgagacttgttaattgtcattgcatgagataacatgattggaaattgtcttctcaaaagtttaaaaggccattgtgattgtgaaggcaacattgacattcttgggatgtaaacattatggccaagattnttgccagatattattttagctgcaattacatgtttgactagtcttgaactattaatctagtaccatacacaggccttgcgttggtctaatgttctagcaacattattggactacccgattttaccttgata

SEQ ID NO: 99978 - DNA, 308 bp, Glycine max
gatcaataatcatcattctcatgctcccatcgccaagaagattcgtgccttgctagatctttcttggcaattgtgatctcaatcacagatatctcgagagtatacgtatactcgcgagagttccatagattccactcgtgaacttaactcgtagactcgcaaaagttcatttcatataaaaacattcaccaaatttctatgaataacatactaattaaacattgcatcactattttatagtcacatagctaatcatctatttcacaatacttaaataaccaagtctagtcatgcatcactactagata

SEQ ID NO: 99979 - DNA, 216 bp, Glycine max
aatatcatgcctcagatgagttattaactctgatgcgaacactctcaaatgattaaacgttgaaaaatgcacacataatgcctatatctatagcctaagtgatacaccataattggaggaaaacttgtatccaaaaatatccagacttcactcgaatttgaagttgggagcccaaattcactaattatatttagtgaattttagctatgggtcatt

SEQ ID NO: 99980 - DNA, 386 bp, Glycine max
actaagctgaagcaactgatgcatggttacttggaacccagctttgtctttatcaaaaatatgtacctgtcgcaagggtttgtggtttgtgctcctctgctgaccaccatacagacctttgcccttccatgcaacaacctggagcaattgagcagcctgaagcttatgctgcaaatttttacaatagacctcctcaacctcagcagcaaaatcaaccacagcagaacaattatgacctctccagcaacagatacaaccctagatggaggaatcaccctaatctcagatggtccagccctcagcaacaacaacagcagcctgctccttccttccaaaatgctgctagcccaagcagaccatacattcctccaccaatccaacaacag

SEQ ID NO: 99981 - DNA, 440 bp, Glycine max
  unsure (1)..(440): unsure at all n locations
actccgctgctacagatctcttgctgcacttcaaaccttcgtttgtgtctatagatgtctttctctanatccccatgcaagaatgtaggtataacatctaactgctccaagtgaagattctctgcagctactatgctcagaataactctgatggtagtcatctttacaactggagagaagatctctgtgaaatcaattccttgtatctgctgaaaccctctcaccacaagtctcgccttgtatcttcttctaccgccagattcttcctttagcctatagacccacctatgctgtaatgccttctttccttctggcaatatagttaaagaccacgtcttattcttctgaagggatgtcatctcatctnttctcgctagctcccactcaatagtgtcattccctgggtagctcaatgaaactttttgctcaccacatcagtt

SEQ ID NO: 99982 - DNA, 137 bp, Glycine max
tcatctccggcctaatcactgagctcagctggcaacaaatcaccctcgttcatctctttcttcatcttattcagtacccacctctcactgttggtttttacggaaaacaccattacctaacgcgccgcaagggatct

SEQ ID NO: 99983 - DNA, 376 bp, Glycine max
  unsure (1)..(376): unsure at all n locations
gtctcacgaatgtcacgtgctgatgcaacatattgnttctcgtggctatacgagacatcttgccaaacaaagtcaggttagcgataactcacctgtgctttttcttccatgctatatgtagcaaagtcattgatctagtcaagtttgatgagtnggaaaatgaggccgcaattatactatgccagttggagatgcattttccccctgctttctttgacatcatgaattcacttgatgtgcatcttgtcagagaaatcaaatgttgtggtcctgtttatctacgatggatgtacccggntgagcgatacatgaagatcttatangggatacaaagaatctatgtcgtccaaaaccatctattatagagaggtacatt

SEQ ID NO: 99984 - DNA, 302 bp, Glycine max
agacaacgagctgtaccacttgagggagcatccattaagaagacaacatgaacctacatcttccttctcgagaatagtgggccaaccctcctaaaggaagagctaccatcgatgtacatggacttcagaccaacaacttgtgaccttttgtaccaatgacctgtcctaatgactggatcatggcgaggtcctacacatgatgatgtatcttgatgcgaaaagccatactattcctgcgctatagcatttggatattatgtgatggcaacattcattgaaacatggacttttaacttgcagac

SEQ ID NO: 99985 - DNA, 355 bp, Glycine max
ctcagctgtcatgtgggcagggattctgatgaagctttttgtgtcttgagcctaaatcttcttatcaatggttcctttgctcttggaagatgaatggcagcggaatggagaaggaagagagaggagacgcctcttcaaggagaagatgagtctataagaagctcaccaccatataaggccatggataagagcttggaggaagaaggagatgaatgaagggagaggaagagaagagcataaaattttgtgctctaaaagagctctgaaatctgaaatttaattttcaaatgatcaaagttccagaaaatgcacacacatgacctcttttatagcctaagtgtcatacaaaattgga

SEQ ID NO: 99986 - DNA, 299 bp, Glycine max
  unsure (1)..(299): unsure at all n locations
acaactttctgctgcaaattattaggttacatcaaatgcagcatcttcattgccgatgcctgcttcagccatggctcgaaagttctctacatcttatcgtggtgctaaagttgcagcaatacatgactcaagaccactagaagaccctaataaatcaacaatttctgaggatattgattcttcctctctgatgcanattgctttatctactagtcagccatcatcagatggctctgacactgttgctcaggctgtctattcaggagggtaaatatatgaaaaagtcttcttctcattac

SEQ ID NO: 99987 - DNA, 422 bp, Glycine max
  unsure (1)..(422): unsure at all n locations
cgtatntgtctatgcgctagatgtctattcctaggtgtgatgtggtgttgntattgngccacccacattngtccatgctctacgttaaagatataattagggattattttcattaatagtctntattatgtttccctatattgtactgattattcattataaataagaacacacaattacagtaaatacttttgtatactctagatgtccagtcctggttttgagagggtgtgttgagatcccacattgactagagacatgaccaatgtagtccttataatggttgagcaagtcctcactttttagaatttggcttaaggcctaatcaacctccaaaattggcttgttaggtgacactgctaaaccttataagacacattgccatattctcttgatgtggggtctacagatgtttttcattg

SEQ ID NO: 99988 - DNA, 513 bp, Glycine max
  unsure (1)..(513): unsure at all n locations
actaagcttaggatgatgtacagactngtggatatcaagatgttctagtgttgtgggaaatgctacagagaaccgaaggtgaagttatagaaaaccaccataagcgcaagcagtttcccttctggaggatctttgtatggtccaaccatactcaatctgcaaatcacgcttcaagttaaaaccagacacaagtttcaagtttacaaataaaaccgcttctgcagctggcaagccaccctccttttatcttcccattgccagcatcatgattcttctcttcttcttcttggcttctaaaacttagcacatgtcgtgttcaactcanactctactaccctgtcacagtacagtagtagtatatatgtatatataccaatagttncacacccaagagcttntggggaatagctactggttctctaactggcaagcaagtagaattcatgtctcactgacattgaagcagcgcctcgttagcccgaggattacattagttactatgggcactggtag

SEQ ID NO: 99989 - DNA, 199 bp, Glycine max
  unsure (1)..(199): unsure at all n locations
aaatagctgtcttcctcaccaaccttcctgataacccatacacccgaattggctctttattgagtttatcnttagaccaaaaaccaattcatagcatttcatgattcactttaaatctctaacattatcattagtggcagccccaaagatcaaagttgcgtctgcatacaactcgatattaacttcctctttattcttt

SEQ ID NO: 99990 - DNA, 374 bp, Glycine max
tgtgccgctcttctcccatcttcctcttcttctatgagactgtgttggcctgagggcaaatgactaatttatgacatgatgctaggatagattcctaacatatcagaaggttgccacacgaataaatatgtgttcctttgcaggacttagctatgtgtctatactcgtggctggtgaggtccttgctaagttgagtgcactgcccaggtttggttctaagttgtaacttaacaagttcttcgatttgttttgggcctttttcgttaatgtcatcacgtggaaatacattgaatacgtcatcttgatctcccctagttgcttcatagacagacagagtctggattggggacccttcgtccatgcccatgacttga

SEQ ID NO: 99991 - DNA, 443 bp, Glycine max
  unsure (1)..(443): unsure at all n locations
ctccttggaaagattcctaaagaagctagagcntagctacacttatctctctaatagctaagctcacctccttgagatgagaagctagagcttagctacacacatctctctaatagctaagctcacctccttgagatgagaagctagaacttagctacacaccccctataatagctaagctcacccccatgacaaaatacatgaaaatacaaaaaaattccatactacaaagactactcaaaatgcctcgaaatacaaggctaaaaccctatactactagaatggccaaaatacaagtcctaacgaaggaaaaaacctattctaatatttacaaagataagcgggctcatacttagcccatgggcttaaaatctaccctaaggctcataagaaccctagggccttccctcggatctctggcacaatctacttggagtcttcta

SEQ ID NO: 99992 - DNA, 384 bp, Glycine max
  unsure (1)..(384): unsure at all n locations
tgtgatgagaanatcatccangaggtcttgtgaaccctggatataaccttctttccagtgggcacactgaatattaccaactcactatcagtgatggatagtatgtcaaccaacagggttggtgagtatgatgaaagatttcaagatgggattcccaatctatagcttgccttatggggaaaaacaaaaccaccaccagctgcgcctaagggtatgctgcctttcttatttggggcagtagacaggctaaataaccaccctgataacttgggagacaggcaggaggatgaaggtgtcgctgcatctctttccctctctctgtcctttccatcttcaaacaaggaacacacaaacgctgcagagcttttgcctgatgggcagcgt

SEQ ID NO: 99993 - DNA, 478 bp, Glycine max
  unsure (1)..(478): unsure at all n locations
agctntactaaatcaatcttattctcacacacactcacacacacaacacgaaattttatgattaanaacatataactattaaaattaaattcatgcatgcacaaatgacacaatatagagtttccttgtcagtctaagctatatattttcaaggtggtacaactctaatctattntaattattttacatcatataattagacactcttattagtcaccaactaattaaactaaaactctatttttaaactaagtatatagtcatatacgaaaattctctccactgtaaactcttatgacttaattacctcttttctaattctatggaatctaaatcaccattaatcaaccttaattatcctcacttaatttctaactttgcttacattaattactaaatttcgttcaatcttctaaattctatttctagaccaaattccaattattaaacatctaggtcatngataatttgaccatta

SEQ ID NO: 99994 - DNA, 430 bp, Glycine max
  unsure (1)..(430): unsure at all n locations
tataagaacaaaattgccttaatcatttccaaatatgcatgtgatataggacgcatcaacaagaatcaagccaaggctattgtgcaagcaatcaatggggcataacacaccaaatgattataatgatggatggctcaaattctcacaaaggtaaaatcatcactttcaaattgagctttcaaaactatcatgacntgtagagaagaatcaaggatttcaagtcacaaaatgtcaaaaacttttactttcaaaacaattacccatttcttgaacatatcctataattcaaagaaaaacatgcaaagtcgtacgtgcacacgaaaattgacccaaatattaaactgaaaatccgacgaaactaacaacattaacaaattaacacaactaacagagtaacgaaaccaacanaactagcaaaaccaaagaacac

SEQ ID NO: 99995 - DNA, 450 bp, Glycine max
  unsure (1)..(450): unsure at all n locations
catggttgtgtntctgtctcggtccggatataaagcgggatgcagcaccggctctgctttcctaaccgtactggaggcggttgtcgtggctctgtcctctatggtttctggagtttaacatgacctccgagatggaagccatttgatcttttaaggccgatagatcggccttcatctgttcctgcacgccctcttcattaatcatttttctggatcgagtgttataggggtgccttggggttatcttaattatgatgaaatctctatagagataaacaacggtgagtatgccaccaacacatgagcatgcaaatggatgatcggagcacttggatccaccacaatgtttttatataacgtaatgagtcaaaactctcagtttatanaaagacaaagcttcatctacccagatatacaaggtgttacaagagacctaacattcctattatt

SEQ ID NO: 99996 - DNA, 430 bp, Glycine max
  unsure (1)..(430): unsure at all n locations
ctcagcttctccccaatttctataatagggggagaagtgaagtggattatggttcagccccttatgcacttctctctctttcgaatttgcttagaaaaattgtttccgtgaagaanatccaagccgaggcgcttccgtaacgtttccatgaggaatttcgcgaaggtttttgaccgttcttcgacgttcttcattcgttcttcatcgttcttcagtcttcaacgggtaagtacctcgaaccaagctnttagattcattctatgtacccgtggtggtccacattgtgtntcgtgtattttccttctcattttcatttactttccgtacccctttngacgtgcttaagccattttatttaagtcatttctcgcttacaactaaaataaaataatattccaccggtcatttgaattatattatcccgttattt

SEQ ID NO: 99997 - DNA, 88 bp, Glycine max
atggcgaggccacaggagagaaaaaccgacaaaacaaccatcaacacaacgccgaaaaacgcccaacacgacagaaacccggaaaaaa

SEQ ID NO: 99998 - DNA, 431 bp, Glycine max
tacgcactgcgagcagaatatcgtcactctggatctgcaaaccactcccaagtatctgaaccctgttgctggattatatattctgcaatatctctgacaaagtcagccgctgaggagatcttcattgcaaacaaggctcttctccaagcacatgtccattcccaccccatgccttgatacacttcccacggatctaatgagtctatgctgctgcaatgagactgaattaagtctaagacttctataccattgaccaagactaatatggattgtaaattgatgcactcctcaatccatgtgatccacttagagctgaagcctgttcttcaacatatacttgagctgaatgccaatgatctgcctcttgaaatactgattcttctcgacttcttagcatcgaatcccataaacatgtcaacctgaaacaaagg

SEQ ID NO: 99999 - DNA, 309 bp, Glycine max
aagcatgtcaccttcatctcgcatagagacatacgttttgtgtctaccatcattgagatgatattcctttacatcaatgggggctctacttgagctgccaatatccctcacctatatgcgaattctttgaaagattcttgctccctcttacacatgatatgcatctgcactctatccggggccatatcctaattgtatagatactgcctaacgaaagcgaccattacgtctatctataagcggactcgagaagattctagattggtgtaccatgtgattaccaccccagctcaactctctatgtatcaa

SEQ ID NO: 100000 - DNA, 454 bp, Glycine max
  unsure (1)..(454): unsure at all n locations
ttgtgtaggataagagaatccaaatataatctattttatcactctaaaaaataccaccagatgttggtagacttatcactctaaaagttaatagaatttggactcaaataaaaaaaaatatgtttcttttagtcttatcactctaaatgtttaagttcctcacagtcaatgatcattcataaaatatttttagaatttcgaatnttaaaagtttccagtgattggtctcaagaagaagtgtgaatcaatcgataacattataagaagaataattttttaaaaataaatcgcacatatataatggatttgcatgtaattntagtggaagcacatgaatatcttcacatttgttaactcaagccttcattngttggaagcattgaggttgtcgaggtactcatattaaaccgctagtcatgatagcgaaatgaattcatttaaaataattatgtac

SEQ ID NO: 100001 - DNA, 444 bp, Glycine max
  unsure (1)..(444): unsure at all n locations
tttgaacacgtgagtcattataaacatggcttcattatcttcgagtcctaagggataaagacaatcgcaacacgatacagattacaaaaataatatcaaacatcatatagccctgataaaaaaaataatcaaacttgattatggacttaagcttcaagtgagtctttggactttgcagaacgattgtgcgaaaattgctttctgtaccacctcttttgcttcttacacctctaanaagatccagacatataacaatacccctccacctccacccaaccatgacaccccacctccactcaaccacccagtggtggtcctgagcacatgcgacaacctatggccgcattcttataaggacaccaattttctgtattaatttatataatattaaagtaaataatgtttatacttatttaaaaatatattaacaatgcagataatact

SEQ ID NO: 100002 - DNA, 345 bp, Glycine max
gaaaaaaggggaccatttaagataaaaggaaaatgaacctttctttctccagactctttcttcaaagtactacaggtacactgttctattataacacggactccttgaaaaattcctggaaaactcctttagaacttctcttaaaaactctcttggaatctttaccttgctacaccacctccctaattactaactcacctccttgatatacttccttgaaagattcttaagagctagagcttatatacacacacccccctagagcttacccacctcttgatatgagatgctaacttactccccctccttaaatctaactcccccatactaatcataaaatcaaaa

SEQ ID NO: 100003 - DNA, 358 bp, Glycine max
  unsure (1)..(358): unsure at all n locations
cccaatgagatgaagatggagctgacgaggatggagatatggcaaatgtgatggcttttttcctttgatgagactgagcctcccaaccaggaccttctaaatttatgaacttgtctttatcttatttatcgctnttagtactttattatgttattgcattgtgatgattgcttgaaactaaaaaaaaactaaaaaatcttacatgtgagtttcgttctatattcgcgcgcctctttggttttgatagtgtagtctcagattactactatttctatggttcaacctttttctaatactaacattgattttagacgaaataatcaccagtattcttcgaagatattgcggatcaaaacac

SEQ ID NO: 100004 - DNA, 441 bp, Glycine max
  unsure (1)..(441): unsure at all n locations
ctaagctgcctggttagactgatggtcatgacttgttcttgnttgattcaatttgngcaaaattggatgagggaaagagtggttttctaaatcttcactctatgcagaattttgctgttgaaatgtgcagcagaattttgtataagtgcagaaaaatgcttgtgtatggctggttgtgaaaagggtagtacatatggggttctggacattttcttgcagatcccaacagtcgaaatgtagacttatgtaatagagacttccagtaaaattttcgagtcgatccaacggttaacgaattgtaacgaatgaaatgttactggtgtatttgtatgtgaaaagctgtgattatgagttgtgttttggcagagatttctgcctatgccctgattcgcttgcgtttgttagttcatgatgattggatgcgaaattacttggatgttg

SEQ ID NO: 100005 - DNA, 297 bp, Glycine max
  unsure (1)..(297): unsure at all n locations
tccaatccactctattcatttattntctcattcgaatcaatcacaacacttcatttcataaagaatcaaaccactgaatatcatagttcatcagttcactattcaatcatgccgttggacaaacaactaaaacaactgcgatttaaaggactgagatntagataactgaaacattaagcataaacctaagtaactgatcaaaattaactgctcaaatgcaagacaagaagataaagatgttgtcaatcctcctgcgggtgatcctctgcctgctcattaagatccaacactggagca

SEQ ID NO: 100006 - DNA, 513 bp, Glycine max
  unsure (1)..(513): unsure at all n locations
actcagctgagctactgtgctgtccccaaagcccctcattattaganttggccccattctttctttcgggccctcattgtttctcgttctaacacttcagttgtggccacattgacgtccctcaccttgtcacactcttatctaaccctaatggttgtcgtcttgaacttttccttgaccacttgtgctctttcaagttccgccttcaaagcttgcacctctttgctctcctcggtggtttcaacctcttccaaacttgaaatctttagcttcgggaggcaagatatctcttgcattctagccttcagccacttgtgatagccgccgacgatcccatagccgcttgccctaagctccccatcctttctttccaccacattccatgcttttcggactctttgaagcaanctagcataggggtcactgtagccttatgcaatgaaaggtgtgatactcttctccgatggagcttctctcattgggtatacaagttgtcttatggcaattcacgat

SEQ ID NO: 100007 - DNA, 405 bp, Glycine max
  unsure (1)..(405): unsure at all n locations
ctattatacgtagggatcataagaatgaatcatatattatctatattatatgccttcttcacagctgaattntaattggtatgagttatttatatcaacctaatcccattctcttaatttgattcctctgaattcaaggatatttttatgctctcacaattcaaggtagcatcttcacaagcttcttgaatctaaagttaacaattttaaggaataattaattttaagtccttgaatttttctaaattttaaatttcagttcctaaataaataatgaactcgtaaaagtcctcaaaaatatatatagttacaacttttaaatcctgccgtcattagatgatgaaataggtgtctgtgacctcngctgtgccctggtgggtggctccaagtggcttgtcagttgtc

SEQ ID NO: 100008 - DNA, 418 bp, Glycine max
cttctaactcaataggccagctcggcgcatctaatattgacctggtatatgcccctgtagtgccactctaacctatctacacccctaacaataggaaaatcgtgttattaataaatatattaaaacccaatataaccaactaatgtacctatatattatctgagtggccatgtaattgtgttacaaatgacatactcctgagtgtattacatcatatgataaagataacatacattttgaagacaagcttaatcgaacagaagtcccttacattttgtgaaagaagataaagtgtgtcaaaaactttcttactttatattccatccattgcatattatatgatgtataaaatcttgacacatgtattaataaatgaaattattatcttgaaactaccttttgttctatctataagtaa

SEQ ID NO: 100009 - DNA, 457 bp, Glycine max
  unsure (1)..(457): unsure at all n locations
ggatcttaagcacctgggctgcagcttcacaaatggcgccgccttcaagttatatgatcccaatcaggttgaattctatacttcgggccgcacttccaatgaagctgcctttctntatcagctntttgcccgtgaanacnggagcaataactttcccgactgctccaacatgtgccatgaaccgacaagcgtgggtttggcagcgagtatcggtgtaagtaaagggaccgtgttgctggaagactttgagaagtgcgatttagtcatttgcattgggcataaccctggtacaaaccaccctcgcatgctgacttcgttgcgcgctntantgaaacggagagcgaatatgatcgccatcaatcctctacaggaacgtggcctgtagcgatttaccgcaccgcanaaccccgttgaaatgctgacgaactctgagactcagttggccagtgcctactat

SEQ ID NO: 100010 - DNA, 418 bp, Glycine max
  unsure (1)..(418): unsure at all n locations
tagtggcgtacgtgtaccgccaatctaattgcgttaacggtatatctctcgcttcccgatctggcattgccagcgcanaattgccccccatgcagatcaatgctcgagcctgccccgtacatattgcttgcatgctggcaattgcagcatgtccaggtgcatgaggtggggtgaagccatagcgctcacccagacgagccagaaactctgcagacggtttctcggtgataccgacggttcggtcgccctgtacattagagtgtccacgtagtgggcagatacccgcaccangcttgccaatgttacctttcatcaacagcagattgaccagttgctgtacgttctgggtaccatgttcgtgctgagtgatccccattccnnnacagataatggtgcgttcggcagcggcatatgcgtc

SEQ ID NO: 100011 - DNA, 473 bp, Glycine max
  unsure (1)..(473): unsure at all n locations
gagaagatacctaaagaagctagtgtttatcttcacacccccnctataatagctaagctcacatccttgagatgagaagctagaacttagctacacaccccctataatagctaagctcacccccatgacaaaaaacatgagaatacaaaaaagagtccttactacaaagactactcaaaatgccccgaaataccaggctaaagccttatactactagaatggccgaaatacaaggcctagacgaaggaaaaacctattctgatatttacaaagattagcgggctcatacttagcccatgggctcaaaatctaccctaaggctcatgagaaccctagggccttcccttggatctctagcccaatctacttggattcttctacccaatgccctngcgggattggatngcatcaaaagatgtacccttcaatgtggtaagactaagatctcaagtggttaacctttgatctttgag

SEQ ID NO: 100012 - DNA, 397 bp, Glycine max
  unsure (1)..(397): unsure at all n locations
ctcagctgagataggaagtgttaagggtgaaacttcctgctcttattgttgaccacagagtggtacctggagatatgtcgcgggggtcaggagaccttgtggacgtcatgtggggtgctattgcccaaaaccaagcttgaccaatcccgacccaacccaggcatagtcggtcagtgagaacctgtgatgtacctaaataggcgagctcctggcagtcaacagataaaaggaacaaagaccacaaagcaaggaggcttgtggtggctggccagctgtgaattttgtgtgatatgtggattatggcctctggtaatcgaataccaagggtgggtaatcgattacaaggcttaaaaatgaagacaggnggatatgattgtctctggtaatcgattaccac

SEQ ID NO: 100013 - DNA, 358 bp, Glycine max
atgacaaactgtgcgaagagagcagtgtgaatagtccattgaaaagcgcggttggcaagcttaacggtgatgttggctcttggttaggcaaatctgatgaaaaaggtaaatgatgtttcttatgctacagacatctttgctcaatggcgttctatgtataattctgatttcgagtttctcttgttatggctgccggaggtgaatatatatcctacagtacaaattctggtgctgaagtgaacaacgttatcatgttgtttggtggaacacgagtagttcatctgaaaacaaaggactcctaaattgttcatgatattggacatacaacggactgtgctccccttggatacaatttgtt

SEQ ID NO: 100014 - DNA, 361 bp, Glycine max
ctgtggaactaggccatcacttttctcggatgtgcagagatattatatctttcttatgtaattgggaaaagcacaatagaaatagaagagaaaagacgctgctgattcggctagctcatcttatttggaaaattgtattacaccctgcgtgtagtgtagcattccgttattctacgtcacagattgtgagttttgacatgtgactatgcagttaaatgtgaactgttagactaatttaagttatcttaaccgttggagtaagacactggaggatgtaaagaagtgttcatcatatatggagcctctgcaccgttggtgatggtcaccctatgataggtttgccatcgcattgatttgatga

SEQ ID NO: 100015 - DNA, 423 bp, Glycine max
  unsure (1)..(423): unsure at all n locations
gccccactccatcattaggagtattatctgacatctcaaacaaacaaatcaaacgtaacaagacaattatagttgctgtttgaatacctcacccactcaagtgtatcacacaattatggcttttctctaatgaaacactcttgccttttaccactctaattccccttgagttcttaggcaattcaagagattatggccactacaaagaacaattcaccaatatgttgtaagtaaggctagagagacaaggaaaaggttaaccaagaaaaaggcgtacaatgtctttaagcacaaatgaatgaaatataattcataatttatgaattcaagtaacaattccttattgcgaccaatatattactctaaagagattattttaaangtcttcaacatgaaccatcagcccacatttttttttttttt

SEQ ID NO: 100016 - DNA, 327 bp, Glycine max
ttgaacatctcgatatattatgcgcctgaatcgggcatctgagtgaaaagttatgtcatatgagttagccgagagcttcactgttcaatttccagcgtctcgacatattattggcctgaatccgacatccgagacaaaagttatggcgggttaaactttccatgtgctcccatgtttaattttgagcatctcgatataatatgcacctgaatcggacatccgagtgaaaagttatgccatatgagatagctgagagcgctcggtgtttcattttgagcaactcgatatattattggcctgattcgacatcacagtcataaatatggc

SEQ ID NO: 100017 - DNA, 481 bp, Glycine max
  unsure (1)..(481): unsure at all n locations
cttccttattcaaaagattgctcaatggcttcgcaatcttagaaaaatctttgacaaaacgcctatagaatccaacatgtcctataaaacttctgatgcctttgacatttgctagtggtggcaagttttcaatgacttcccccgtagctttgtcaacctcaatgccatgctctgagattttatgacccatcacaatgcctttagccaccataaagtggcatttctcccaattgagtaccaggtttgtttcaacacactacttcagtatagtgtcaagattagacatacatatatcataagaagagccaaaaatagagaagccatgcataactactgcaatacttttttcattaaaaccttgcttgatagtctatgacatgataatatatagtcttcgttngacccacaacttgctctactgcatgcaatatcacttgcatcacacataattccaaatctagtgtcaatttggacactgata

SEQ ID NO: 100018 - DNA, 364 bp, Glycine max
  unsure (1)..(364): unsure at all n locations
tcagaatgtcaatcgcaccatgttccaagaagagtatatggtgccacctttgttgagtggttttattagcatcttgttagttgaaataaaggtacaaacttgtgttaaagtggctatcaattctctttggatttgtaccacctatgggcttgttctaatgtgacaaaattataatttaattacgtggaaactttatgcttgtggctgcctcttggcggaccaggagatgcgcatttntccacatgttttgtgtcataattctagttctaattaggtataatgacaccatcaattgtgttattggtatcatttctcttctacttttgtaccaacttgatgcatgctattattggctgtgattttc

SEQ ID NO: 100019 - DNA, 507 bp, Glycine max
  unsure (1)..(507): unsure at all n locations
actaagcntgaagtgtatcaaattacttgagttaagcacacatcacatttaaaatgggttgtactagaataggaagtacggtcaaaagagtattccttatgaaatatatttcaatatgagtcatcgaacaagaaataacaaataaccatattatctatacaattaaggcagaacaccatactacaagcatgcatataagaagtaagaattaaacagtcactatgatgtacttaacgaatcacaagtttcaacaatcacgtttatgatcacccactaagaaaaaaaagggattagtccacacatgttaacacatcgattaaacacactcattcacaacacacctgcaagttcaaggttcttgacgacattaatacacacatcaagttttcaagacaacttgtatcacttaatggatngccatgacatcctaccgcacttcacgaattatagagatggccagtctcataactcangactcaatagtggatntatggtatagcagacatt

SEQ ID NO: 100020 - DNA, 451 bp, Glycine max
  unsure (1)..(451): unsure at all n locations
caccaacgttcatataattcttatctattaataaatngagggtatgaatataaaaaccacaaactcgtatataagcttccataaataagaacttacattactgcctccatttcctttgtgtcaaaagtctcattaaccctaatcaaagaaccaaaaaaaagttgagaacaaaaaaaataataaaaagaagttgaggtggtatggtacctacaaaactcaatgtggaaaaggtcttcagataagactgagcgcaatataagcaatcctagaccataggccctanaacaataatgaaatatgttaaaaggaagcacaaaanacaagggaaagtggagaatggataatggaatgaacctaaaacgaggcctcttctagcttcaacgatccnattacgcanagctttaatctcattctggagaaatttggatcccatatgcttctttgactactc

SEQ ID NO: 100021 - DNA, 416 bp, Glycine max
  unsure (1)..(416): unsure at all n locations
agcttgcgtagcagatgctcttccagattccctttgctcgctgagcgctcttgtgttgggcttagtcactgatatgcgctaagcgcacggagctcgctnagtgcgacatccactttggcactgctttaaattagcttctcttttgcttgaaatcgaagagaatttaacattaattccatataaagaggcttcttatgaacatatatcataacaaagaaaaattatttacaatcctatataagaactataaattggggagttatatacattttgtaaaagtttagcatacaaaagttagtctgttaagacgactaacaaactcccccaaatctacagttntgcttgttctcaagcaaagaaagaacatctcacttgctctcaagtgacagaattatagtggttattcaaaaacaaag

SEQ ID NO: 100022 - DNA, 420 bp, Glycine max
  unsure (1)..(420): unsure at all n locations
cttgtagcttcaatgcaaggaaacatgcttatggctattgaatccaaattnggttttaggattagaaaagcatgnaaatagggatctgtttgtaagaatttgggctgccccatgattggtactttgcacctaagtaacgtgggaaatgcttttcaatggtgtgtagatatatgtgtaaatataaagggcatgaaattctctgtatagggtgaaggaatattgaggtcccttcctaaatgaatgtatgatagcacgggattcccttttgaatgcaagtatgtgcataatgttaaatatcttgccaatatgcataagtgtgagtgaaacaatgaacgtttgtatggtatatatattttgagtgtgtgtacgtagttcgtgaagcaagtgttangacatagttaagtgtagatttgacgcaat

SEQ ID NO: 100023 - DNA, 123 bp, Glycine max
atgcaacaacaagggggggaccttaccgattcacggaccacatcgcttctagccgctcattatttgcggaaccactttgctgaatggaaagaggaacggctgcttcccccatctaaaacgtgt

SEQ ID NO: 100024 - DNA, 310 bp, Glycine max
  unsure (1)..(310): unsure at all n locations
cgggacttgatccttcgttttcttttatagtcactccnatatcggtctgtgtggccgttttatgcgcttgctggtcgccacgtttgtcacgtctagatcaacactagtcgtatttactgtagaatttgatgaataacataaaggataaattaataatattctaacgactctctgacaagtggcctggttctatttcttaatagacttaagaatatgttgtattgtcctataatgattactatggtaactatctatccagcgtccaacacgctaaaactaaacggtgaccactctctatgataattagtgt

SEQ ID NO: 100025 - DNA, 381 bp, Glycine max
  unsure (1)..(381): unsure at all n locations
aatgatcatccccgctgataatgatggctctgaactctatagtaggacttattaacttgtacatggaggaaaagactangtagatgctgagaactattttctctttgatgaacacctttctgaacttactcttttctcctctataatgaatgctgtttttcctctatgcatttaagtcattcattgctgtcataaataatagtcttgtcctttgtggatgtttatatatatatgaccgagaatgactctttgcattgactattaacaattatactaccatgttagctaccactataacccatgattatcaaatgcatgtgatgattatttgtgtcgacgatttttatgtctcactcttacacattctcggtcctaattcat

SEQ ID NO: 100026 - DNA, 401 bp, Glycine max
aactcagctttccctatttgctattatagggggagaagtgtttatatttatggttcattctccttatgcacttgtctctctctctaaatagctgaggaaaattagttccgtgaagaaaatccaagccgaggcgcttccgtaacgtttctgtaacgtgttcgtgagttattacacgaagattctcgaccgtgcttcaagatacatcgatcgttcttggttttctttagtcttcaacgggtgagtacctctaaccaagctgttgaattcattctatgtacctgtggtggtccacattgtgtttcatgtatttattctctcgttttcatttactttatataccgccttttgacgtgcttaagccatttatttacgtcatttctcgcttaatctaaaaataaaat

SEQ ID NO: 100027 - DNA, 399 bp, Glycine max
tgtacgaatgtaagaaacatcttcttctaccttggtgatccttgactccatctcattgaaacgcatgtctacttgtaactccaaagtatcaaacctttcaccaacaaaggttcgaagactatcgaacccatccaaaatcttttgaagaagagaggaatcttctccaccatgtaaatgtccttcttcatcaatgggtcaagcaccctttttcacccaagagccatcatgctctttttgataaccaaaggatgcaatgacagcaacgcctattagaaaggatctcttgattggaacacaaggttcagaatcaagagggatgttaaagtgttgaaggaagagggtgactatgtatggatatggcaatggagcattaatcgcaatgtcttatgcatgcgatat

SEQ ID NO: 100028 - DNA, 427 bp, Glycine max
  unsure (1)..(427): unsure at all n locations
taacagctattaccaaccaaagactattatcatctngcgggctttctacaacctcacttgtgtccacattattaagcattttgcaggaaggagttatacaacataagattgtgattttgaagtttacacggttctttagatacatctttgaaagataggttctcgacctttgagcaaatacaaaagttagctaccatgaaaatggacagtgaatatcctactgtaagtttccatgatggcaatattattataaaaaatatgtaaatatgcattaaataaagagacttaattatcaattcttgcattaagagattagtagatcctttgaagttgcatacaagtacataattacatgttcataagatagacataatggcattcatataaatcttaaataactagacatatcaactaatctaagcttttg

SEQ ID NO: 100029 - DNA, 381 bp, Glycine max
  unsure (1)..(381): unsure at all n locations
ccttatgcacttctctctctctcgaaagttctgaggacaattagtctcgtgaagaaaatccaagccgaagcgctctcgtatcgtttccgtgagtaattacgcgaagattctcgaccgtttttcaagattcatcggtcgttcttcgnttgcttcagtcttcaacgggtaagtacctcaaaccaagctnttcaattcattctatgtacccgtggtggtccagattttgtttcatgtatattttattctcgtgttcatatacttcttatacccccttgtgacgtgcttaagccatctatttaagtcatttctcgcttaatcctaaaatataatanattttcaccgatcgttcgaattgtttcattcggtaattctggtaaaatg

SEQ ID NO: 100030 - DNA, 236 bp, Glycine max
ctgattcacagactctcaaggcactgggactccgacatcgccagcttttgaacactctcatggtgatacaacatcatttttgtactgagtcgcagggcactacaacctcaatgtcactctcagagttgtgcaacatcatctgcagggaggaggatatacatactgctcgcccttcgagtggagctatgaggccttggatcttctccatcaatggagatcagtgcttcttgaatatg

SEQ ID NO: 100031 - DNA, 325 bp, Glycine max
  unsure (1)..(325): unsure at all n locations
tggggaaatgatagccattttcagacctcggtgggagagcataataattttggtgtgtaaaaggggaagatcttgtattttttttcaaatctagtattggctttgtgtaaattgactatgtagatgatgctttgtataaattgttgcctgaaaaatcttatttcctgaacaaattatgtataattgagagtgttatggtggtggtggtgaggttntcagcacaacgatcgaatgagcgggtgcgctcggttcccttggggcgatganggttgagaacaccttcttggcacgatggaactagtcttcaccataggcggatttcttc

SEQ ID NO: 100032 - DNA, 395 bp, Glycine max
  unsure (1)..(395): unsure at all n locations
cactcatgatttgcaatttactttatctgttatcaattcacacataaatttcactctttgtanaaattctcatatttggcactctatgtttggtcatatatcacacaaagttttcagtcatatgaataataaaattggtttacaattctctcctaatttctcttcttctaattggtctgtttgtccacttactaaatttagaagattatcctttcctaactctaacaagttatttgattcaccttttgacttactccactgtgatatatggggtccctatgcccaccctacatatgaaaggaagagattttcattacattggttgatgaatgctcaagatacaacttggtatttctacttgaacacaaatctgaagcttaatctatgtgaacagt

SEQ ID NO: 100033 - DNA, 474 bp, Glycine max
  unsure (1)..(474): unsure at all n locations
gctgagtcacagccgaaatgataaagaaacctacattacagaatctctgttgtggaccccatccacttgatggcgctgagaccacattcgaactgagaatcacaagacaagacaaaaagcaactaanatatccagcttatgcaaccaaacaaacctaaccgaaagctacagtttcaaaggtatccaaaagcaaatttaaaccagaaagcagcacaagaaactatatgaaaaagagaacaccaaatccatcatgcacaatattgcatcttaagcttttctatagatcatctgcatgagatccatgtccttcttcatgtgaacctcaggcgccatctgcatcgcaacatcataacccattgtgccatcttacacagcaacatttaccatcgtangcacataagcaccaccaccaccatgtagctgctgacaccccgccaacttattcttctaaactgaaccccctctgagctatcg

SEQ ID NO: 100034 - DNA, 458 bp, Glycine max
  unsure (1)..(458): unsure at all n locations
ggaccntaagcgactgcagcatgcaactgtcacagaatagggatgtgattatttatatctcagttccttaccaagcaaaatggatcantttaaggtccaacgccttataatgatcacctttcaagtaaaaagaatcgctcgattcacgattaagaaagaactacgtaggtctgatttcctctccaaaggagggtacgtaagagcaaaagccccgcttttgtcgacctcataaaatataaagaaataaaaggtgagataacccacttccactattctataaaaatatgttgttgtcctttgagacaaacgtgagaggtgctaataccttnctcaagcgtaaatacaactcctgaacttaggaatttcattatgaccggcttccttcggtgtttctgacgttntctacaaataaactgtggtggcgactccgcgcatctttcctctcttggaaagcgcac

SEQ ID NO: 100035 - DNA, 362 bp, Glycine max
  unsure (1)..(362): unsure at all n locations
tgtctagagattctagagagagaaaggtccaagttccaaagagttttgggagattttgctgtgtgaagatttgcaaagactagagcttgaagtangagccgttctgagatcttgagatgagtttgtgagagattgtgagatgctataggtgaaggagacatcctcaccacttgtatttttgcaatctttcatcttgttattctctttgttgtaaagaaagcttcctggttatggaaagctaaatcctctgttagatcttccctgtaggtacctgatgtanatatatttctatctatttaatgatantttgngtgtctctgtgctatctgcttttcactccagtatgtctttaccttgatcat

SEQ ID NO: 100036 - DNA, 490 bp, Glycine max
  unsure (1)..(490): unsure at all n locations
ccaaaaactaagctgagatntgtttgctagaaatatgtcccgnaattattattanttttgattaaccnncgcangggaatataagtgtgcgcaaggtgagtattcaaaaatttgggatttaatcaattattttgagatgaataaatttgtaaaataagaaagataaaaatatatccactattatttttaaattaattaatcaaatntaatttaaaataataataaatacatcattgtttactattaaacatgtgaatcaaatgatacaaaactggttcaatttaatcaataggctggactgtaaatattaaatatacaattaaattaaatatttaaaataaaaattcgatattcataatggtatcatatcatttgagtaaaaataatacatgtatcttgactatatgagaactttataaaagggagataatttaaaatctttaatatatatttagttgtctttgaatttatggataacaaagataaacac

SEQ ID NO: 100037 - DNA, 345 bp, Glycine max
  unsure (1)..(345): unsure at all n locations
ttgaatcataaatctgcacctggtgcaagggtttgtggtgtgtgctcctctgctgaccaccatacagacctttgccctcccatgcagcaacctggagcaattgagcagcctgaagctcatgctgcaaatattnacaatagacctcctcaacctcaagcagcaaatcaaccacagcagaacaattatgacctctccagcaacagatacaaccttggatggaggaatcaccctaacctcagatgggccagccctcagcaacaacaacagcagcctgctccttccttccaaaatgctgctggcccaagcagaccatacattcctccaccaatccaacaacagctacaa

SEQ ID NO: 100038 - DNA, 409 bp, Glycine max
  unsure (1)..(409): unsure at all n locations
ttgatcaatcaatatgttctatgttcttgaagatgtgtgaacctgcatataatcctgttgaataatttgtagctgacctgtacgtgtttgaactttagcactgattggcgaaatttgcatccaacgtgcctctctgtgtctcttatatgacattagaacaattagaaatttgcttatcaaacttcttttggagaggaaccacaagatacaattaattattgttataatagattgtgtgaaataaatattatgtntagacacgtttaagtgaaaagtggttctaagataatttaatttgttatccanacagagatcacattattttataaataattnggaccataattaattctgtaaaatcaattttatcacacattaattacaccagaattttgttatattgctaaat

SEQ ID NO: 100039 - DNA, 363 bp, Glycine max
agcttcttgcgtagccgctctaggtgctcataatatcccaaaacaaatccctcttattactagctattttgaatatcttagttcctgaatgtacaaccttcaaattgttgctcgttcccctctttcttttctgcaaaaaagataatcaaatgctgttgaaacatggatgaagtcctaagaaaatcaatatcaaagaaaacatggatgaaatcacaattaagaagcacaactacctatctttcagagtcctttggtaatttggcttgtctccttatgtgagggggatctagttaataatcttatacttttgccttccaaaagaaactaatcactaatcctcttttcattaatccaatattgtat

SEQ ID NO: 100040 - DNA, 418 bp, Glycine max
  unsure (1)..(418): unsure at all n locations
cacatgaacaggtgttgatacaaggagacttttgctctttgtgcagaactcattattgtttgttgtctcttggttgttgntgntgttcgaaataggcatctccaccaaatggatgtgcagaatgccttcttctatngnnaccttcttgaggaggtttatatgcaaatcccacctagttttcgtcgagaaagggagaagcttgtgtgtcgacttaataagtcccttttaccgaagcaagcatctcgaagctagtttcttaaatttttttcatcttttgcttaaataggtttccaacagtcaaaagttgattactccttatttgtcacaagtgatggtacatcttacaccactaccttaatttatggtgatgacatgatcattatatgaaattgacgagacaccattcatgacctcaaac

SEQ ID NO: 100041 - DNA, 412 bp, Glycine max
  unsure (1)..(412): unsure at all n locations
tacatgcccaactccctcgagtggcatctatattggttattatcttggctgctgcatcttagtacatccgatatctgtattgcatcatgcatcatcatggttagtggtaagaaaaggttctaagttagaacaatttctgtagaggaatatactctatttctattgattacaacctcatcataatgaattacaacaagctatctcataaaccattacactgttgtttgagaccatgacggatttttttaagattctctacttcaatcgagtaccaagtggatgaatcaattacttctctctcgcttacgtggtcggaagtgaacaagaacactntattcgattacttatagcatctactcaagtagagtgttcttcagtatttccaaatgttgggaataacactctaatcgat

SEQ ID NO: 100042 - DNA, 408 bp, Glycine max
agcaccgcagctgcagctcaagatccaattctgctgacaactatttttaagtagattgttagtaaacacaactctggctactatacactagcacagaagataactaacgtacctgaatatccttctatatcaaattctttgcatacccgtatacaataggctatcttaagaagtcactctgaaatccgatcatacatagagggcactgtgcttagctaaaaagactctaggtcaaggtcacgaatcatatcctgcaagcgatctatctatttatacataatacggctcatatggggacccacattgcatgtctatcaattcaccatgccatatccacagcgtgcaactcttcttaatcccatcacacaatatatgctctcacatgccgtacataattgaagtcttcat

SEQ ID NO: 100043 - DNA, 314 bp, Glycine max
accatcccccgtctctgttttgctcacgttcttatctacgtataatgtatggtgaactgtgtgatgcaatcctccctatgaagggaccattctctataaccatgagcaagatgctacaataagactgggctagagctgctatagaacgccctatggttctcatgaaccttatggtagacattatacgccataggccaaggttgggtccaattagctccgtacatattacattatgatgtcattatgtacggtccttgtgttacggctgcatatagaggtacggaccctatattatagattttcaaccttgattt

SEQ ID NO: 100044 - DNA, 413 bp, Glycine max
  unsure (1)..(413): unsure at all n locations
taagatcccatgatacanatagatgtgacgtcttagaatgtattctatgttgcatggnttcaatcaaacccattgatctaatcaaccgaaaggagccaattcccatctaacaaagggagattgtggaaaactcacaatacagaattgcaagagcaatgctcccagccgaagaatattctttggcccaaggcttgaagactgaaagaaaccacataacccctggcattgcaaattcccctttctagacagatccaattacatctgttttccctctcctttccttnttttaaataagccaaaataatttataaataacgatgaaacctatacctaagcacaagaagtgttagggtctctcttcttactagatttcattccttagatgcttcatacaagttattgtctcctaattt

SEQ ID NO: 100045 - DNA, 345 bp, Glycine max
gagaaatgttaaagaacgtcttttattgactattaaataatgtgttaaaagaagcttgccataaagtcacacaagagaaagaacaagtgtggatatctataaatgtaactaagaagacaactttaattgattaccaaaacatgtactcaattattgtgatcaaaatatatttggtatgcatttctagaattatggtaatcaattacatcatggtggaatcgattatgtcaagttacacagatgttcctattgtttctgtgagccagtggaatcgattactatatctaggagtagataaattctctttcaaagagcgtatgaagtcttgtacaacaacataattga

SEQ ID NO: 100046 - DNA, 492 bp, Glycine max
  unsure (1)..(492): unsure at all n locations
aataatacctggcatttttatgaaagntagttaaatttgatgagttgtcaaagattagacgtaatctcactggttgagacgaacaaatataaaagtttatgtcttatatctttataacttttattttaactaccaaaggatataatttgatttttggtttcacaaaagagtttttagcaaaatttgttgttatcgcctaattgtatttgtttgtgaaaactntgtatttttgttgataaaaccttatcatatatatatatatatatgcgcgcgcgtgtgagagagataatggacacacttatnttttaggttagaatgtgttagcaaattacaccatgttaacaaatccacttattaacgtatacgcacttgattnttatgttaaatactttagaagttacacccagngtcngatggagtgcggtggccagctgagccatgcatgaactnccccaattttgtagattgtatttattatatgtaatatgattt

SEQ ID NO: 100047 - DNA, 428 bp, Glycine max
  unsure (1)..(428): unsure at all n locations
agtgaaatttataatgaggtcaattcatagcacactctcacctcacacaagtccatatcatcaatcttaacttgctcaaactgaatttacacctataattccaccgaatcaaaatttgactcctcaacacccaaattgccctagaaatggctctatgttcactttgttcattagctcttctatctagcacaggcccaagctgtctcccaagtcctaaatgacacttcaagcttgtattaactcactttaacctccatttaccacagaattcatacatagccttccaactttcaaagcctctctctatgttcactcataacaccacattctcactctccaaccctaggntaactctacctttcatctctaacatgtgttcatgagcatattcagcatataaacaatacatatattatcacaaataccct

SEQ ID NO: 100048 - DNA, 458 bp, Glycine max
  unsure (1)..(458): unsure at all n locations
tggtgatatcagagtgngctntgggatgggattttatattctgaagtaattgaacatattgagggtcctgtaacaaggagtccctgagctggtccaaaaaggttcaatgaggcaaagtcaacaagaagcattcagcctctgatggaacaaggcgggacaacatgtcagccactacattggcggagccgggcttatacttgatagtatagtcatagcccaagagcttatacaagtttgttgttcaagggtctgtatttcctgagacatgagatccttgaggctcttgtggtatgtgaggatggtgaaagaggtcccaagtaaataatggcgccatttcctaacagcagaagtgattgcgtgcaactctcggacataagcagacgtacgttgcaatctggggcataaaacccagctataatatgcaattgggtgaccctgttgggttacaccacacccat

SEQ ID NO: 100049 - DNA, 423 bp, Glycine max
aactcaagcttgagatccacacatgagagtattccagacttacatgctctttattttctgttacgaccactcatcgcgcaaagagccctcgaaggaacacaatctctgttcacacatgtctcttccaccgaatgtgcttccacaataattgttttcaaaccctgcagtcacactgttaatagaaacatctcacacaatatgtgatactcaactttatcctataataaacacttatcaatgactatcaactttcttgataccttatatatataaagagtaaactccatatcaattatcatatgcacacttgacattaatttctttagtaactcagtcacactctcgaagatcagaggatgaacttgcactaacacactgtcatgtatttttggtttatgagatcaaacattcttgatagcatga

SEQ ID NO: 100050 - DNA, 287 bp, Glycine max
agacgctctaaattgaacaacgggagcatcttacaaagtcacatgggcagaacttgtaactctgaggtctgattcaggcgcatactctatcgagacgcccaaaatataacaatggaagctcttgagcaattcaaatggacataacttttaactcggatggccatttcacgcacacaatatatcgagacggttgaaattgaacaacggaagctctcgagaaatacaaatggtcatatactgtaactcggatgtccgattcacgcgcataatatatagagacgctctaa

SEQ ID NO: 100051 - DNA, 410 bp, Glycine max
  unsure (1)..(410): unsure at all n locations
agctngaagagtgctaccattgtaactgtttctctattcctcaacatcattagctgagacagttccagtgctttcataggcatccacatttcattctttgcatagcatgcagtggtagtgctccaagagacaaagttcttagcaagcattgcacaaaacacatatgatagactgcttcatagcatatacattcagcagagttgtcataacacgattatttgcatcatagccatgttgcagaaatattagtatgaatctccttacgcttctggggagggcagactgtcagctctgaaacaactcaagccttatactttatgtgaacctatctgatgggatcccaatccaaatccagacatatatggggttctttcccaagtttcatcataactggcaagcatgatgaatag

SEQ ID NO: 100052 - DNA, 468 bp, Glycine max
  unsure (1)..(468): unsure at all n locations
ctttaaacaattactccattcattccagaataatagttttnttttttaagccgtttgttgtgtgccaacttccacaataatagtgcttttagctcttttaagctattctatcaacaatactcctatatataatacttgcattgacaatagatattggccataagttgttggatagtagaatgtatccactattgctatatagtaggataatttatgacgagtagttgataaactgagggtatcttgtctatatttgtataaattgaatatttcttaatcaacgtgccataacctttaaggactcttattttggaatggaggaagtataaaattagacttgataatttgttgtcgcaaatcaatgtatgtactacatcttattatattccaaaacttgcaatctgaagaatatatggctttgatgtgcattgaatactctatgatggttaaaagctattattgtatact

SEQ ID NO: 100053 - DNA, 275 bp, Glycine max
ctatcaatacacctccaatctgtaatggagagggttaccactactggaatacccgaatgcaaattttatagggcactgatctaatattggaagcatagaatagggccttatatacgcaccacagcagaaagagtttcaatacatggtagttcatcgagtgacagcataactatataaaaacctatggatagatggtctgaagaggatataatacgagtactatacaacttaatagccatgaacatactgacatttgccctgagaatggatgaata

SEQ ID NO: 100054 - DNA, 396 bp, Glycine max
ttgatcgcctatacttcaacaacaattcatagggatgaaagactcaggaatttgcgtgatatgcatggaaattgtaattatgagattgagatgcccgaagaaacatcttttcttatgtaaccatgcattaggtaccatgttcaatcacttcgtttttaagtgaaatgagtgtatgatcccaacaatggttggctcatggtacctaacacatgcaactaagaatgcaggatgaaatttcatgcttccctttttctttgtctttggtttgtagaggaatatacaaggatcatgttagagctaacatgtagaacacatagtatgttgaatgcatatgcatgatgatgcaatgactcatgcataatgtgaggcgggaatgtgattactgacaaatgcatg

SEQ ID NO: 100055 - DNA, 330 bp, Glycine max
  unsure (1)..(330): unsure at all n locations
ctggagatatgtcgcgagggtcaggagaccttggtgacatcaagtggggtgctattgcccaaaaccaagcttgaccaatcccgacccaacccgggcatagtcggtcagagagaacctgtgatgtacctaaacaggcgagctcctggcagtcaacatatataaggaacaaagaccactaagctaggaggcttgtggtggctggccagctgtgaatcttgtgtgatatgtggaatatggcctctggtaatcgattaccaagggtgggtaatccattacaacgcttactaatgaagacaggagactangatggtctctggtaatctgatacca

SEQ ID NO: 100056 - DNA, 415 bp, Glycine max
  unsure (1)..(415): unsure at all n locations
ataacatgaataattaaagaaatcacagcttattgagacaagcaagctaattgaggaatgaatggctaattgacgaaagcatggctaatttaggaaataagattaattatggaatgccaagttaataaaggatagaagacttattatggaaagtagaataattaaggaaaccatttattaattaaggaaagtaaaggcagacttggagtaaaaagcttactaatctgcacctatataagataaagagaaaagatggagaagacacatataaattccaagagaatataattcctcatagaacgaagtggctatatgaatgagaagctaacaataggagtcattccttccctctattccctttcatatcttgtcttnctttactaaatatatccctcttgcaattgggaagtctcta

SEQ ID NO: 100057 - DNA, 388 bp, Glycine max
  unsure (1)..(388): unsure at all n locations
ngacagtntacttagagtcatccttgatactcctcaaccttcttattgaatgtcaaaaatagtaacaagaagtacctccaaactaattaatgttattaatgaagatagtgaccaaaaatcagaaaatacaactgatgtaggttcagtatcggaaaaatacattaatcatataaattccaaacattggaaaacaccctccaaactgtattatcaacgaccaactgcccctaaccttctactagaagagagaggtgagagtaatttcaaaagttntagtgcaaataacatctatgagtggaatatagatgcccaaacggagtacaatatcatgaatacactccaacatatgaccatggtagccacgacttaccaaacatctcatgaatgt

SEQ ID NO: 100058 - DNA, 416 bp, Glycine max
gagagaggggggagcacgacattgaatgaataaaagagggagagaagtggaactttgaagtatgtctcataagactctcattcatcaaagatacaacaagtgttacacatgcttctatttatagactaagtagcttccttgagaagctttcttgagaaaacttccttgagaagcttctttgagaaaacttccttgagaagctagagcttagctacacacacccctctcataactaagctcacctccttgagaagcttccttaagaagattcctatagaagctagagcttagctacacatacctctctaatagctaagctcacctccttgagatgagaagctagagctcagctacacacctcctataatagcttagctcaccgcatgacaaaaacatgaaataaaaaaaagtcttat

SEQ ID NO: 100059 - DNA, 472 bp, Glycine max
  unsure (1)..(472): unsure at all n locations
agagggagctttctgttttctagaagtttaanggagcttcctctagatagcttggctaattgcttaagacactaagatgatcatagaactaatatttatttattaattgatgttgtataaagagtgtccagttttgttcattgtgtgaggcagtagagtaaacaagataaatgcttaagcttaagatggaatgaaattcccatgacctggcataagacataaaatagaactgagtgggagacatttacacatcttaattaactaagctaatcctttttaatcattagtatgagacaatagtcaattgacataaaataaaataccaaacatataacaaaagttacttttttatagttctaaaaatcactatttgacccaccaacacatattaccaatatccaccaaccaccatgtacgtncaanaaatatgaagaaaatgaatattcaatattcataagttataaatcactat

SEQ ID NO: 100060 - DNA, 415 bp, Glycine max
  unsure (1)..(415): unsure at all n locations
cttaagatagtttctcaaggaagctactctttcttattatagaagcatgtgtaacactggttgtaactntgatgaatgacagtcttgtgagatatatttcaaaatttcacttctctacctcttttattccttcaatttcgtgctcccccctctctctttctctccctctttcttttcctccattgaagcatcctctccaaacttcttatccaaggctcaacatggtggtgaagctccttcttccatggcttattccctagtggatggtgcctcctctcacctcttctcctttgtcttccgctgcatctccatggtggaaaatcaccattaaaggacctcattgaagctcanagatctagcctccatagaagcctccacaagcaagcttccatcaagtgggtatagagcacaagag

SEQ ID NO: 100061 - DNA, 251 bp, Glycine max
tacctaatgcgagattcacacctgtctgacggcttaggcaaggatcacaacctacttcaaacttcttgaagcatgcatctaaatggggttgtgaacgacgattatgctgaaattcccaggagtactagacataatgtccaccgttgtgttgcgcaagtagcgaggtacattaagccttcgcatgcttgcttatgtgaaacatgcacaacaaatgagagcatttagggaatacatctattactgcaaacatc

SEQ ID NO: 100062 - DNA, 349 bp, Glycine max
  unsure (1)..(349): unsure at all n locations
cttctcgcntcagccgctgaagatgaatacgtggctacttcattctctcttctaatgactatagcatcatttctggcactacactgtggggagttggaagccatcttctccattaaatttttggcttcagcaagggtcatgtcttcaacggctccaccactggcagcatctatcatacttttgtccatgttactgagtccttcataaaaatattatacaagaagctgctccgaaatctgatggtgaaggcaactggcacatatctatttaaatctctcctactattcatataggctctctccactgagatgtctaatacctgaaatatcctatttgatagaagtggtcc

SEQ ID NO: 100063 - DNA, 463 bp, Glycine max
  unsure (1)..(463): unsure at all n locations
accttagagcaccgcggctgcagcttgaataggaagtgtgaagggttatactcctacttntattcgnngaccacagagtggtacctgtagatatgtcgcgggtgtcaggagaccttggggacgtcaggtggggtgctattgcccaaaaccaagcttgaccaatcccgacccaacccgggcatagtcagtcaatgagaacctgtgatgtacctaagcaagcaagctcctggcagtcaacagataaaaggaacatagaccacaaagcaaggaggcttagtggggctgaccagctgtgaacattgattgatatgtgggatattggccttggtaatcgattaccaagggtgggtaatcgattacaaggcttataaatgaagacatgaggctaagatggtctctggtaatcgatcaccaaagggtgtaatcgataccacgcttgtaaacatgcaagaagcttaggact

SEQ ID NO: 100064 - DNA, 372 bp, Glycine max
  unsure (1)..(372): unsure at all n locations
ntatcanatggatgttaanagtgctnttctaaatggtcttaattatatatgaagtatatgtngaacaacccccaggttttgaaatgccagataagccacatcatgtttatagattgaaaaaggctttatatggtttgaaacaagcccctagggcttggtatgagcgtctgagtaagttccttctataaaaggacttctctagaggaaaagtagataccactcttttcataaagagaaaatcacatgatattttattggttcaaatttatgttgatgatattatttttggatctactaatgaattattgtgcaaggaattctctcatgacatgcagagtgagtttgaaatgtcaatgatgggagaacttaatt

SEQ ID NO: 100065 - DNA, 341 bp, Glycine max
  unsure (1)..(341): unsure at all n locations
cataggccaaatattaagaggagtgagcggggtttatccatcaaccacttcaagaggagaacaatgacggctccgatcaacttagctctgtattgcaagcaataagtcttggagctgaagtcaagggctcatggtaagtcgttacatccatgaacacactacactttaactgcataccaaacaaagtacaattgccattgaataatacaactaagaatgtcatatggttattcttccaactcngcgagatgcgccaatgttgataagggaaccatgcatgtgaagaacatcactattgtcatatattcacggaatattcaactcctatctgcattatctca

SEQ ID NO: 100066 - DNA, 254 bp, Glycine max
  unsure (1)..(254): unsure at all n locations
acagaggcccccttacttctgagatcgcagtactacagttgtgatgtctatcggaggtatgtggatgtactgctcacacgcactcattaaaatctacatacttgcttacttgaggcancgaggtccgaaagagacacacctcaggcggagcgtaatgcgctctctaacattctcttgacgatggagctatccacgaatgtggctactgaaggcaaacgaaatttgcatcaaaacgcgggaattaatattttgcg

SEQ ID NO: 100067 - DNA, 328 bp, Glycine max
tccattaacaattgcaggttataagaacataatctttgatttagaggaaacaaatatcctctatttatgtgtaattaatgtaattaacctatataagcacacatctgttggtactcataacacaggttgcagctcattatccctctgttttctcctattttacaaatgagaagcataactcattaaaacccacagacttcagttgattagtcaagactcacactttgtatggaaccaataatttatgagagagaattgagttgggaagagaacacacttctagataatgttctatttggaacagtgagaagatgaagagattctagag

SEQ ID NO: 100068 - DNA, 387 bp, Glycine max
  unsure (1)..(387): unsure at all n locations
ctgatgaggagagctatggagganaatctgtacttaggtatcttatttggctccaataatgcgagcattagcatcttatagtatgcggatgatacaatcttttttggggaagcatctaaggagaatgtcaaagcaatataagctatcctactgacattcgaactattatcacgtccaaaaatcaactctgcaaagagctgttatggagcatttggggtaacagatcagtggaagtaatctgcagccaattacctgaattgtagcatgctggcttttccttttgtttaccttggcatacccataggggccaacccgaggcgatgtctaatgtgggatccacttatccacaaatgtgagagatcatcggcanaatggatataaaacaca

SEQ ID NO: 100069 - DNA, 411 bp, Glycine max
  unsure (1)..(411): unsure at all n locations
tagcttgaaccaaaacctgtgagagtgtgaacttttactgtgagtgaacgactagctgtgagtaataatctctgcatgaatctttgaattttggaatgaaatgtataaatgagaacatgatgaaggccatgattgtacatacacaagccttttgaccaaaaagcttaccttgaatgataattataaactttgcaccctttctgagttgagtgattttgagcataaatagaaccgctgaacttaagnataatatcttctgataccttgcttagattctaagagagcatatggttcaaggaaaaatatactcctaaattgggggagtaaaaagtcaattaagaatgcaaagaagaaggttaaacatcagcacacacaacaaataagttgtgtgttaaataaaaagagaagaaa

SEQ ID NO: 100070 - DNA, 236 bp, Glycine max
cacagtggcacctggagatatgtcgcggtggtcaagagacccttggcgatgtcatgtggtgtgctattgtcgaaaccaagcttgaccagatccgacccaaccacggcgtagtctgtcggtgagaacctgtgatgtacctaaacagcgagctcctgcagtcaacagataaaggaacaaagaccacacagcaatgacgcttgtggtggctggccagctgtgaatcatgtgtgatatat

SEQ ID NO: 100071 - DNA, 311 bp, Glycine max
  unsure (1)..(311): unsure at all n locations
cctttgagctacaatgggagtgttagaagcacaacaatcttgttgcactacatatagtacatatactaccaatttctaccaagagaaatgattgtttacttgtctgctggagtgacagaccatggttttctgcttcactcttgtcagtttangagatgaattgtcatatatgtgctggaatatgaagaatcccttgcattgccatggatttctagaagttgaaatgaagttatctacaagacaagaagatggatcgatttttattttcatctttctttctttctaaggtttactgttcttatctctatgta

SEQ ID NO: 100072 - DNA, 342 bp, Glycine max
  unsure (1)..(342): unsure at all n locations
aaaaaactagggccaatgaacacgccgagactgatggagaaacccatgctatgggtgccattcctatacagncaagttttccaccaacccaacaatgtcattactcagccaataacaaaccttctcattacccaccgcccagttatccacaaaggagatccctagatcaaccacaaagtctgtctaccgcacttccaatgacgaacaccacctttagcacaaaccataaacaccaaccaagaaatgaaatttgcggcgagaaagcctgtagaatatcaccccaatctggtgtcctatgctaacttggctccatatctacttgataattcaatggtgagcata

SEQ ID NO: 100073 - DNA, 208 bp, Glycine max
ttagcaatacacggatctatatacagtctataattaacggtaacttttataatcttgaactctagcgcactcctaaatattatattactacccatggacattttctaaaactagttactttaacatatatttcatcacaaaaactatcttataattaaatacgcaaatcttaacaaattcatatatcaaataatacatagctaaactt

SEQ ID NO: 100074 - DNA, 158 bp, Glycine max
cgttggtgatggttttactgagactcggcttgcagtgaatttttgattttacagcaccctgccggaggggacgtagaatgtcagaatttttggcggtactgcgtttactgcataggattgggtggaccgcgcgaagaacatatggacgtttgctggtt

SEQ ID NO: 100075 - DNA, 159 bp, Glycine max
ctcaccatagaggcgtcccgacaccgtcctcagcacagtctgatcgagaaaggccggggggccatgtctcatgcattgtcaaaaatctgattaccatgttccacaagaggtctactaactgtagggctgaccctcagcgattttcacttgattcatgct

SEQ ID NO: 100076 - DNA, 364 bp, Glycine max
  unsure (1)..(364): unsure at all n locations
cgcggacgagtatgcccaaatatacgcgaaaaaagaagctagaggaaggggtgattgactctttacaccaagaggcaaccatgtggatggatcggtttgctcttaccttgaacgggagtcaagaacttcctcgattgttagccaaggccaaggcgatggcggacaactactccgccctcgaagaaattcatgggcttctcggctattgtcagcatatgatagacttaatggcccacataattagaaatcgttaggaaacttgtatggtctctcagaccttgactagatacaactttntgaaataaaatgagttggtcccatggttctactccaaaaagcttgtgcanatcaaatcacttctgca

SEQ ID NO: 100077 - DNA, 405 bp, Glycine max
  unsure (1)..(405): unsure at all n locations
ggaccttctctctctagaaaccctagacatgcaaagctctgaatctcaatccaaactctctctctgaaatctgatttcaggcttaaataggtggccttgttcgtgctcgtgcgcttagcgcacttatggaccgcttagcgcacgttagtgaattctggcttagcgcatgactttctcgcttagtggatgaactgaagcagtgcgcttagtgagatgaagcggtgcgcttagcgaacctgtacagctcattttcttccagagtcttcctcgcgcttagaccatgagtgttgcgcttagcggacgctcgctaagccagcagattgacttatcgagaaggtgaaaaacaacacttttcaaagctttcctaaataacctgaaattgagagaanatgattattaaacaca

SEQ ID NO: 100078 - DNA, 203 bp, Glycine max
tatcatccttatcaccccccaatctgaatcatataaccaaacacgtcttcttcaaaaccttagactgcgaggatatacaatccagaccaaagatcctttacaaacacgaaatcctcttgctccaagaaggaggagctttggttcccataacccgttatcaacccacacacaggcaaataggctggggacataggacctaagaa

SEQ ID NO: 100079 - DNA, 283 bp, Glycine max
gtttttttgcatcaaaaggctttaaacgggacaaaaattaattttcatgagaaataacttttgaaaaaatatatgatgtacaactaacctcgttgaatattgtccaaaaagtttcccacattattataaagtgatatgataatatctaaaaatttcgatgttaaaataccgttgcaggacaactaagatacaataactatgaaaaatagattcttgtaatttgtttggcttgagaaaaatatgacatattattaacgttaacgaaatttcctattaaagttta

SEQ ID NO: 100080 - DNA, 342 bp, Glycine max
ttccagctctctacaggttagctcatgattattaatcctaaaatttatgaacaatgtgatgcacctctcttgttacacaatctttgtaatctgaaggaaattgaccttttgtattccgaagaccttattgagatcccaaacttatctgatgcagaaaatcttgaaagcattccacttctcacgttgaaaagcttgcataaactccatgttcattcaaaatctttccgtgcaatggaacatgatggttgttcatctctcaaggatattctcgtaacatctgagaaaatgacataattgaagttatcctacaccaatataagtggatcgtcacatcaattggtc

SEQ ID NO: 100081 - DNA, 265 bp, Glycine max
ttttttctccaccttgccacttgcgatcaatttttcatagtcagggttgccctacatcgaacaactgctaggttgacataatacccttatgcaggttttttataaagatatttcaaaaaaatttcaaatactctcgccttctcaaaatcaaccttagttaacatcagaaagcgattcccttgacagctatatccatgtccaatgattattctgaaaacacaatacaagataactgggggcttacaaaagcgcttctttaacgcat

SEQ ID NO: 100082 - DNA, 201 bp, Glycine max
  unsure (1)..(201): unsure at all n locations
tttctatgaactctctcaagatatgggtcattagtctcatgaaagtgctaggagcgttagttaagccaaaaggcataaccaaccattcatacaaaccatattttgtttaaaaagcagttntccattcatgcccttctctaatcctaatgtgatggatccgctttttaactcattttagagatgtacatgcatcatgcattc

SEQ ID NO: 100083 - DNA, 307 bp, Glycine max
ttttaaattgagatggtacccacgcttctacggttgttgccaatccactgggaaatccaacctctctaaaaaactgtgtggacgatcgcaggttagtattcactaccgggaccagttttgacaaaataaaaaaaggtccttttccatgacttcaggttttcaaagggtatctcttccacgggttcctggcccacttgaaaagcttataagcatcccaggtgactttgagaaaactacaactcacaacttaaaaaacgttccaatattctttacaactgtgatgcttgacttttctctcctttaaaac

SEQ ID NO: 100084 - DNA, 320 bp, Glycine max
actaccctgagacgagacgatttttttttgggaacgcaagaacgtgaaaccttgcagatcccacgaaacgtacgaaacgttcgaagccctcgttaatttcttccggaaacatttttcagcaatttcaaaagaagagtccctaaggctggggatctttttttttcattctcccttttatacaaaaagggagtggttgcgccacttgccagcgacaaggtgcttcttccaaccaccgcctcttgagaatcttttgaggccaatgggctgttgtattgcccccatttaccatatcaccccccgccggtttgggagctttttct

SEQ ID NO: 100085 - DNA, 201 bp, Glycine max
ccccctatatagctaagctcaccctatgacaaaaacatgaaaataaaaaaaaggtcttttacaagacaactaaaatgcccgaaatacaggctaaccctatactataaatggccaaaacaaggccgacgaggaatcctatttaatatacaagatagcggctatcttagccagggccgaatcacctaaggtatgagaacctag

SEQ ID NO: 100086 - DNA, 409 bp, Glycine max
atgtgctgaaattgcttatggaagactgttagagatgataggtaaggctaacctacggttagaaagtgagaatatggtgttatgagtggaaaaagagtgaagctttgagagttggaatgcccaatctgaatttagtggtattcggaggttaaagggagttaattctagtttgaaatgtcatttaggacttatgaaaaagtttgggttgtgcaagagagaaaaacaaatgaccacagtgaaggcaagagccatttctagggtaaaattgggtgttgaggagtcaaattttgattcggcataattctacgcataaaaccagtttgagcaagtgtagaatgatgttatatactcgtgtgaggtgagagtttgctccaatttacccattcttatattcactttcaaatcttga

SEQ ID NO: 100087 - DNA, 286 bp, Glycine max
  unsure (1)..(286): unsure at all n locations
ataacagcacatgctgttattatagcctangtcactggcccaacctaccctatctgcgggaggacgatgcgaggctcacaggtgcgtcttccatgggaggaaaatgcatggagtcgccaccaacgtttattcgacgaaaacgtcagaaaaaccgaaacgtggggtctacgaactttaagtgtgaaaggtttgggagttgtttttatgcacggggaagggattagcacttcacgtgtccgtcacataggacgacaacctttaatcaaatgtgcaatatcatgtcttc

SEQ ID NO: 100088 - DNA, 354 bp, Glycine max
ttaaatttttaattggaacctaactggatataccaaaagggaaaatggtggaaataataaatattggatattttttgcaccatataggaagaaaaacgttatggggcttttttaaggatacgatgttatgtgtttaacaaactaatatataattttacgtattgaacatcaaattataaatatttcgtataaaaattaatggcatataggtgttggatgtatttattcagacaaaaaggttattgggtgtatttctttttattggccctccctgtcttctaagtttaagtttgtccctgcaacatgtcatcgtccaattctatcgttaatgtggcttaatataattattcttat

SEQ ID NO: 100089 - DNA, 238 bp, Glycine max
agtctatataggttacattttaattctcttagaccgtgtaggttaaaagtattcttcttagtccttataccttatattttaattcccttttagtccttataaattacaacggatatttctaggctttataatgtatattttaattacctcttagtctttattacaaaaattattaaaatgattaactacacaatagttataaattatcaattattttcttattatcaaatatcttacg

SEQ ID NO: 100090 - DNA, 244 bp, Glycine max
ttttgaccaaatatttcatcttgaaaaggaaactgaagatatgaaatttattaacttcatgaatattaggaaattcccattctttttttctgcccaccctccaaaagagactctaaatccataccatatgcttatcacattacttagaagctaaatcatttgccgctattcaccctctcatctccaaagactacaggcttctcaatctggggtaagctctttttgaactaaccggtgatatata

SEQ ID NO: 100091 - DNA, 295 bp, Glycine max
ctccattgattttcaggtgtactcttctactccattgttgctccttcatctttctccatgtatctcctcacatgtcttgtgctaaatgttgttaaaatgattctttataattttcaccgattaaactagctatagaagctagattttattttctatgggtcaaatatcttgctcttgttcttgaaccatgagctgtgttgagttttggctccttcgagttttttcttgctatttttttttgtggctgaaacctataccataaaattcttacaaaaatattacagtagaagaaaac

SEQ ID NO: 100092 - DNA, 251 bp, Glycine max
ttaattggaattttgtgttggtatattaacagaacctaatatgggaagacattttggtaagtggttttaacaacatgtatggttatcattgtgtatattatgtacttttataataattatattatttatgtagttaactcctttgttgtgctgtgcaaatttgaattccttgatagtgtaatgtagaaaaaaagtgtgtttttatttatactttaaggagctattttagacttctttagggttaatttggt

SEQ ID NO: 100093 - DNA, 335 bp, Glycine max
acccaggccccttctttgtttgatttatacaggcctagggaaaacctgaatcccttacctttaggaatttgagctttgaatgtttggaataatgggggggtatgtttattgaagaatgattttggccttctaatgtttattttgccatgcttgactatttatatttgctagtcttgctttatcttcaaatccactgtctccatatgactaatagaatgaaacacaaagaagtgagtgaataatgagtcttgtattagacttgatccagaccctgttgatttgtgaattaaagggtgggttactactggctaattttactaatcccttgctctcat

SEQ ID NO: 100094 - DNA, 204 bp, Glycine max
ttaaagggtatccagaaaccccccaagccgtcggaaaattactttcaaaatgggaacaagaagtacctccaaataatcaacggtattaatgaagaatgcgaccacaactcagataacacaactgagataggatcagtgtcagaaaagaatataaatccaattaatgtcaaacactggaagacaccctccaactatatatcaacg

SEQ ID NO: 100095 - DNA, 188 bp, Glycine max
ttttcccacccaccttagcgccctctttttttttaaaccaacctccccctttctcctctggagaaaatataaacacccttagtgggtattatattggaggatctttgcctcggacggaacttaccacttgccttttctgagctctggaccaatgtgaatggggacttcttgcactcctctggattgca

SEQ ID NO: 100096 - DNA, 131 bp, Glycine max
atttttttttatagaagactgattttttaattgaaacatgggtactaaacttgtaccaaaaggatactttggtattgaaccatgttgtcggatcgattccacacaaagtgttgacagtttcactaaatttc

SEQ ID NO: 100097 - DNA, 61 bp, Glycine max
  unsure (1)..(61): unsure at all n locations
gtttttncccccccnccccggggggttttttttttttttgggggggccccccccccccccc

SEQ ID NO: 100098 - DNA, 216 bp, Glycine max
  unsure (1)..(216): unsure at all n locations
atccttcactcctcgtgtaaagttttgtcaatctttcttttcaagaaaagtctttgataaaaacacgtgcgctattcatcattntcattgtcttcttcctttggcaagaaaacgaatgactgaccgcctgagaatactntttgatccttccctttccctttagcgaaagatgtcacaggactaaccgcctgacatatcttttatttccccttacaa

SEQ ID NO: 100099 - DNA, 305 bp, Glycine max
  unsure (1)..(305): unsure at all n locations
ctagggaggtggtttttaaattatgggggggccaccccaacacaaaaaaaganattgaggaattatgaaaagaaaaaaaacttaaaaaaaatataagaaaggaaaaaggggaaaaaaagaaaaaaaaaaataaggcaaaaaaaaaagaaaaagagaagaaggtgaaaaaaaaaaaaaaagaaaaataaaaaagagggaggaagaagaaaagaacaaataaaaagaaaaaagaaaaaaaaatagaaaaataaaaataagaaaaagaaataaaattgaaaataaataaaaaaaaaagtaataaaaaa

SEQ ID NO: 100100 - DNA, 320 bp, Glycine max
  unsure (1)..(320): unsure at all n locations
cccccccccnnnncaggttattagtgtgtttttnnnccccccncggcccgtgttttttttttacgggggccccccccccccccaccctganaatattggtaattcccccccccccccccccccccgtccctccccgcccccgccccccttcccccgctccccccactagccccaccccctctttccccttcccccctctccttcaccccttcccccctagctcccgtccccccgcccttccccccctccctctcccccccacccctccccccccctcctcgccccacttcctctcacccgcctccccccccccccacccc

SEQ ID NO: 100101 - DNA, 476 bp, Glycine max
  unsure (1)..(476): unsure at all n locations
tactaagcttgcatgatctgcanaagttaaaccttgcttgttggacattgtctgcttttaaggtaaacacaaagcgtgatgtgcaagttaataacatgtgtgaggcattcaataatgtaataatggagtacagacataagccaattattacactattggagggaattcgattttacataagttctaaaattgtgaagttaaggactaccctgatgaggtatgaggggccaatctgtcctaaaatttaacaaatcatggaaaagaataaaaaagcatgtgaaccatggcaggcacattggtgtggtgatgttgatctgtctctgtttgaggtgtcaaagggcatggaaaaatatgttgtcaatcttaaacaatagacatgttcttgtagaaagtgggagttaactggaattcatgcactcattccataacatgcatgtggatcactggtgttgaaccagaactcagtgtcaactctt

SEQ ID NO: 100102 - DNA, 317 bp, Glycine max
  unsure (1)..(317): unsure at all n locations
actgaggcgtgcgagctcgcaatctcattgtgcttggtcagatatgctattatgcatatgtcgcttgagcttattgtgcggaacatgtagtataattgaactatcttaccgaaactatttccctaagattatatagaactttggcatcatagatggcgaggatagagagcacgagatgaaagagcattcgctagccngttttcccactcttcctttgattctataacatagaacatttaaattcactactttgctttagctaagaattccatagggacatattaccatacaagatattgcccattcttgttttgatt

SEQ ID NO: 100103 - DNA, 476 bp, Glycine max
  unsure (1)..(476): unsure at all n locations
atactaagcttaactaatggcgctcctaatggatccaaacatgatcatttcttgttccttataagacaaacgatgagacaaatcaattggacatcctccaaatggagatcatatcctaccaatagatggctctggctctacctgctattgctcttgttgttgctcgtcatcacgatgttggcatgtcaatgcagtcattctacgacgtttctctacagtatcttccccttcctgcgaggggtcacatccgacaacatatgatgtctgcttcgtgcaagcatctaaaaaaaatgaaaaaataagctagtaatcattcataataaacacctatatttaactaagacaatgaaataaaataaactacatttatttaaaagtgataaacaaatataacagaatcacgaatttcttgtgtgtttcatcataatgcaccatanaatcatgatctcgttgtgatgctggagaacaatagaatg

SEQ ID NO: 100104 - DNA, 477 bp, Glycine max
tctcacagcgacctgcggctgcagcttgatgggtgacaaaatccatgtttgtttttcttttatgggagaacgcgaacgagtgtatacatgattttgatgatgtcaaaacaaaactctcactaggctcattctgcttctagactaatgcatgattgtttcaacaaacaaagccttgattcaagatttcttaaagatcaagccttgccttcacatgaaaggttttaagtcattcaaggcacatgtaatcgatgaccaatccatgtaatcgattaccaatggtttgaaagagtgtaatctactactacacttgttggaatcgactaccagaaactctgagcattgggaactaaacatttcaatgaaggggcacaactgcgcaagataaactactgcgtaatcgattaccagagaggattttcaagaatattcccaccagaacatcctattattcgaacttgaatggcatcaaaagcctat

SEQ ID NO: 100105 - DNA, 159 bp, Glycine max
  unsure (1)..(159): unsure at all n locations
acctcaagtcacctgcggcatgcaagctaaggggttgacgtaattcttacatgtttcctttttctatgntgactgaganggcctctgttcatttcctccctagattctacactcctggttggggttgcatgcccctgctcttttcatgcaaaaaaggaa

SEQ ID NO: 100106 - DNA, 352 bp, Glycine max
  unsure (1)..(352): unsure at all n locations
tgacggatgaagattgaaatgatcattatcctgttagagatcatttctattcncgccattctttncatggacaaatttgactattttactcagacttctcaagtctaaagttatactacttagcggctctagtaggcatagtttcatcataattcctattagatgctggatctgtttactcgtcctccacgacgacgctttttggttggaattcatcttttaaggtttggatctcctgaaccttctcttttaatttatcttgcaacattaacacctgcagtaaaacccactggagtagactactcaccctgttgccgtaaagacgttgaccagagattcaacattacaaaat

SEQ ID NO: 100107 - DNA, 472 bp, Glycine max
  unsure (1)..(472): unsure at all n locations
atccttaagtcacctgcggcatgcagctatggcattaaggccttcttcaacaattgttctttgtctttaaatatatagatttcttcacttgagcctgtgtctaatgattgtgatcgctggaacatttaatatttccattgatacacatactccttcatgctcaaaaaaatcactgttgtgttgatcactttagcagaaaactaattgctttaagtcaaagtaggtttgtcattaaccgtgcacatttttgtgatggtaattttcaactttcagatcttaaatnttatttattcttcataggattcaacatatcttaggaaaatatcatacgaatctcaaacatagagtaataaagaaaatctcacatgtcatcctttaatgctatatcaaatcatgaccttctctaaccatcgtctgatattttagatgcaaaattcacgaagcataatctaattntgcataagacgtcact

SEQ ID NO: 100108 - DNA, 415 bp, Glycine max
tgcatttggaattgcgaaagccccactccatcattaggattagtttctgacatctcaaacaaacaaatcaaacgtaacaagacaattatagttgctgcttgaatacctcacccactctagtgtatcacacaattatggcttttctctaatgaaacactcttgccttttaccactctaattccccttgagttcttaggcaattcaagagattatggccacaacaaagaacaattcaccaatatgtgtaacgtaatgctagacaaggaaaaggttaaccaagaaaaaggctaacaatgtttttatgcacaaatgaatgaaataaaattcagaatttaggaattcaagtaacaatccttcatgcaaccaatatattaccttaaagagttatttttttaaagtcttctagcctgaacca

SEQ ID NO: 100109 - DNA, 272 bp, Glycine max
aaattatacgcacgctcggcggttgagatgaaccaatataaatgctttgcatcgatctatcttgtgggctgtccttacttcttaactaacctatggctagaatttgattgcggacttgaacttatatggcatgttgcacattttgtctattgcctgaatctggtttacagaaatctgttatatgctttgctcattatacattagacgataaccttatttttcaaaaatttctacaaccataattcactcctcctatagaataattgccttcc

SEQ ID NO: 100110 - DNA, 400 bp, Glycine max
  unsure (1)..(400): unsure at all n locations
agcttntagaatatttaatgaaagaactatgtctanttgttaagcaatacgtgttgcttttgatgagactaactctattaggccaagaaagaatatacttgatgatataacagatactttataagatactcatattcatgattggtactcggcacgaattggtatgctctactctattaattcattataaattgctgaaatgtatttcttctctctgctcgtgatatggttttgatgttgacaaccggggagagataaataataaaatgaggggagtttctttttttgaacaacncttttctatatctattatattatatatttatttcctccttgtggggacccccccttttttctataccttcctgcaagggggggggcccctacaaaattttttttt

SEQ ID NO: 100111 - DNA, 441 bp, Glycine max
catgacaatctcatatctacttatcttaaacagtgatcgaagactcttcattaatgaattatgaacgtttcccttgtcaacaaatacactttagaatattaattttgtacgtatgcttatcctttttatgtgtgtttgggtaagcattgtcaaaattgatttttgaagtgatgtgatttatgtttggatgtttttattctaaaagcaagttaataacaaaacttagtataatttttttgatccaatgcaaaagctacctgaagtggcttcaacatagaatcaatttttcttaagatatgggtttgagcctaactcaacttctaaagctagctcataaggttagggttgtcccccacttatatactatatcttagcactatctctagccaatgcgagatttggatttttccaatacaccccctcacgcccaagtacttttgg

SEQ ID NO: 100112 - DNA, 458 bp, Glycine max
agcttgcttgtgcagcttctatggatgctggttctttgagcttcaatgaggtcctctaatggtggttttccaccatggagatgcagcggaagacaaaggagaataggtgagaggaggcgccatccattagggaataagccatggaagaaggagcttcaccaccaagatgagcctttgataagaagcttggagaggatgcttcaatggaggaaaagaaagagggagagaaagagagagggggcagcacgaaattgaaggaagaaaaagggagagaagttgaactttgagttgtgtctcacaagactctcattcatcaaagttacaacaagtgttacacatgcttctatttatagactaggtagcttccttgagaagcttgtttgagaaaacttccttgagaagctagagcttagctacacacacccctctcataactaagctcaccttcttgagaagct

SEQ ID NO: 100113 - DNA, 401 bp, Glycine max
  unsure (1)..(401): unsure at all n locations
tgtatttntctcacatataggacatgcgtgattgtcgtttacactataaccacttaagttgccatatgttggatagtcattaatggtacaaaaaaccattgcacgcaacctaaaggtatgctggagattcccatcccacacatctaccccatcttcccacaatttggtcaagtcttcgatcaacggagtcagatacacgccaatattgatgaggacatgaccaagagcaagggcaaggatccacttgaaggacttggaggacctatgacaagggctagagcaaggaaagccaacgaagctcttcaaaagtgttgccatactatttgaatacaacccaatttcaggagaaagtccaagttggagttgatatggccaatggagagactaatacacactttgct

SEQ ID NO: 100114 - DNA, 375 bp, Glycine max
ttaagcaccgcagctgcaacttaccttggcctccattttgttcctataacagcctattcatccccactccaatatcctccggacattcttctttaaagggaggaatgtgagttaataccatcaattcctttgtctagaacaccatcattcctctttctctttttctcataggaatctatttcattgaccaaccttatggaccatatctcgtgtcattaacctctcaattttatcaacttgcattgaattgcaaaccccctccatattaaattgtcctgccttcaacaacaataacatacagacatatagtgtgttgaacctcctcatcagtgttacacatatgttttttaagaaacacttgctttccattaattc

SEQ ID NO: 100115 - DNA, 400 bp, Glycine max
tggcaactttcttaaaactacatagagcactctttgttgagaccaattagcaaagtctgccactttccgtttatacagagcactcttcaacgtactttgacatttgagcaattgcctagtgaaggggatattaatctgcacccttttaagtatttgaacaaatctagcaaattgacaatcctcactcttgtccttcaatctttgagaaaatggagcacttaccctgaagaggtgtcactaactccttctcaccctctttgtttgcctcttggccttctttagtaagagcctcccttcttggtggtggagtggctttcttcctcttctttagcttaatcatatgttgtccactctttgcactcaaaacattcacttccttctcaggaatggatctagtcta

SEQ ID NO: 100116 - DNA, 410 bp, Glycine max
agcttgtaatcgattaaactgatatgttacatttctctgcaagcttcaaacacttgtgtaattggttacaatcagtctgtaatcgattaaaacagaagagttttaactatagaggaaattttctaactttagaacttttcttctaactccaacatgatgatgcatgatacacatatgaaatgatagagacaaagatgcaacacacaatacaataatcaatacaaatgtcattcaagagagttgggcatgtaaaagacaaattttttaagctcttctttaagctttaaggctaagtcttcatgttgcttcccctatctctaacatgcaatagtttcaactagtccgctaatcatcttaggatttcttcgtcttgtactacaaccggtgtggatatcaggtggaattatgca

SEQ ID NO: 100117 - DNA, 454 bp, Glycine max
  unsure (1)..(454): unsure at all n locations
tgtntccttggcgggtaatgtgtctgctgaaattccaaatgatgacattntggaatctcttaagactttgtctgttgaggagcagaggaagagtcctgaanaggccaccatgatggagatagatggtaagccaatgcctaaagtagttgtgcttgaatttttactacctcactctacaattgaggtaaaaagagttgagcttgatgaacttaaaaggatatagtctacaacagagcatggacctacacttatgtctctgtatgttgctaaaagataagtagagtttcaaactggcattgttactgaagatatggagcttgaggatattccaagttatgaagaggctatgctttaatntgacattgaagcatctctcaatgttcacggggatgatatggttgagacaaatcctagtggagatcgtgtgtaaccaaagcaattgtctactgatgat

SEQ ID NO: 100118 - DNA, 215 bp, Glycine max
aaattcattataagctatgcatctagcagaatactggtaaaagaatactcaattacaattacatcaaaagatttaacaggtgcttgtaagagaaagatgaaataattgtgctaatccaaatttctcaattgaactatttttgacaattatcagtggttgcaagtggtgcttatatattaccggaaaagaattgcattaactttcaattcatgacg

SEQ ID NO: 100119 - DNA, 451 bp, Glycine max
  unsure (1)..(451): unsure at all n locations
tgtcagttgagtatagcctatctcagctgtctccttatgatgtttatgtggcattttcaaagtgcatgatgaacaagttgaagcattccaaaatagtaacatctagagcaaaatctctaagtgagaaatcaatatttttgcttcaaccctctctgtgagagcaacccacttctgtattgtgcttacaaatctgtaatattctttagatagaagtgagagatttaataccagagtggaattcctctctcaaggtgaagatttgtattctgtgcagtaaagcataaatcctcttttctattgtaagttcagtagtagatggcaaagctganatccaatggtattgttggtctagttgaggctaggattgaagtccaatgggggaactggtangggtgctgaaatcaatggtttttggtccaactanggatggttntgttagtgaaatctcatc

SEQ ID NO: 100120 - DNA, 401 bp, Glycine max
  unsure (1)..(401): unsure at all n locations
agctntgatgcaacattnggagaggttaatgatacttctagatgatgcgctccatgagaggttggatcaaatggagaatagagatcataatgaataagaaaggagaagagggaatgatggcgttcctaaacaaaaccgaattgatggtattaaacttaacatatctccctttaaaggaaagaatgatcctgaggcctacttggagtgggagatgaatatagagcatgttttctcatgcatcaactatgatgaggaccaaaaggtgaatcttgccgccacggagttttttgactatgctcttgtgtggtggaacaagctacaaatggagagagctatatatgaatagcctatggttggtggccggagatgaaaaggatcatgatgaagccgtatgtgtccgc

SEQ ID NO: 100121 - DNA, 436 bp, Glycine max
  unsure (1)..(436): unsure at all n locations
ntgaccaaattcaaacgatgataactttntactcggatgtctgattgagtcccgtaatatatcgagacgctcgaaattgaatgttgaagctctgaccaaattcaaacgatgataactttttactcggatgtctgattgagtcccgtaatatatcgagacgctcganattgaatgttgaagctctcagcanattcaaacgataataaatttttactcggatgtctgattaagtcccgtaatacatcgagacgctcgaaattgaatgttgaagctctcagcanattcaaacgacaataatttttttagtcagatgtctgattgagacccgtaatatatcgagacgatcgaaattgaattctgaagctctgagctaattcaaacgacaantaacgtttgctcggatgtctgattgagtcctgtaatctattgagacgct

SEQ ID NO: 100122 - DNA, 453 bp, Glycine max
  unsure (1)..(453): unsure at all n locations
agtctcacgagggcatgtgctcatgcaacaatngntagccgtggctatacgagacatcttgccaaacaaagtcaggttcaccataactagcctgtgctttttcttccatgctatatgtagcaaagtgattgatccaataatgtttgatgagttggaaaatgaggccgcaattatactgtgccagttggagatgtattttccccctactttctttgacatcatgattcacttgattgtgcatctggtcagagaaatcaaatgctgtggtcctatttatctacggtggatgtacccagttgagcgatacatgaagatcttaaaagggtatacaaagaatctatatcatccggaagcatctattggtgagaggtacattgcagaagaagccattgaattttgttcagaatacttatagaaggctaaagctgttgggcttcctgagtgtcggcatga

SEQ ID NO: 100123 - DNA, 401 bp, Glycine max
  unsure (1)..(401): unsure at all n locations
tataaaatccatatgacaaaaacaaaatnntgaatatgaagaaaaaaggtcttggataatattacatgctatactctgcttttgtttcttttagcatgatgtaggcaataacattttttttatagataaactgaatcattcggggaacaaatgatccagagcaactatggtaatgttgaatataaactagaagaaaaaagtcattgtgttgttttttcactattctattagttattaaaagttttttagttattttgctatagaagaaataatattagagtgtatagaaatttagttcaaccaatgaggaggataagatgtcggctntactaagaatntaccaatatcttccactctctcaaatagagagaaacaaagaanacaaaaagctaaagaatctt

SEQ ID NO: 100124 - DNA, 274 bp, Glycine max
aacaatggattgaggctactgactattgttgcttagagagtggcgagcgagacacaattcgactgagaataggtctgtgcccatgaataaagggcctcatttcaattcctcgcccacaacaaataaaaaaatattctctttttccattctgtctcacacacgtcactctgactctacttcattgaggagttggaactaaaaaaagacccacggtatggaaagaaaaagaaaaaggtttctcctatggtagttggttgcagataatggaagaaga

SEQ ID NO: 100125 - DNA, 288 bp, Glycine max
gctagcagcgaccccgagcggcataggctcggacagtggacgcgcgcagtttcccaagtggggatcgaacgtgctgagacctgaaatccaacggcgtaaccagctccgcgtcgagaggctctaaacatcggggtgtcacagaattggaccactcttaacactgaagaacagaaagcttttctccttcgtcaccattcagctcacgtatcaatgcagtaatgacctgtctcgcgcgactattaaccaactgaactagacctcttttgcaagaacactattgggcttaca

SEQ ID NO: 100126 - DNA, 456 bp, Glycine max
  unsure (1)..(456): unsure at all n locations
gctaaacccagatattatttanaaaactgtgtctatgttctactaaactaatgacttgttgattttgtacgggttatgaatattgtctttatggatgttagaatttgtttttataacattaaaatctttcataaagacagcataattaaaagtttaaattctatggatatgtaaaaaagagtgaattttgacaaaaaaaaaaacttggtgtgtaaaatatgtatagaattgtatatgtttaaaatttgaaaagtatttaacttatgttaaatttaaatgtttttgtaaatttgaaatgtgaaataataaaataattcaattattctgtcaattattttatagtagtatttggctagaatgatttgactctgcaaatcaagagagttggactaagaaagtctagtatcaaaagctagaacaacttttgacctatgtgctctcttcatattgttatct

SEQ ID NO: 100127 - DNA, 463 bp, Glycine max
agcttggagtttccaagtgcccaattcgcctcttctttattccagtcttcttctggcttcaattcatcagtgggctttccttctgtgtccagcatcttgggatgttcccagcctttgatgacagctttccaggttctgctatccagtgatttgaggaaggccaccattcttgctttccagtattcatagttgcttccatcaagaattggtgggctggtcactggtcctccttctttctccatgttcatcagaatttatctccccagatctcactctgtgatttcgagtgttggctctgataccaattgaaattctgataccacgggacagatgtcgtacaggatgtcacgacatcacgcttcagaacatgcagtttatgtgtgtccgtatgaactgattaaacaagtaaataacacaagagaattgtttacccagttcggtgcaacctcacctacatctgggg

SEQ ID NO: 100128 - DNA, 315 bp, Glycine max
  unsure (1)..(315): unsure at all n locations
ctaagcttagtcagaaagtatccaaaatgaccagaatggttttttttgagcataacaagactttcctaaatgggtttaaagatataatcctcagtgaccataatgcatctgaaacgttatggaagttagcagatgagcctaaaagtaatgttataacttggcaaggatacaatatcaacaagtattcattctacacgaaatcacaagacaacaagagtacaatgcacaatagtggtgttagtctaagggttgaatctcaatactttgctattgtacatgatgacaatcctcgtgtagctntcatgccttactttg

SEQ ID NO: 100129 - DNA, 468 bp, Glycine max
  unsure (1)..(468): unsure at all n locations
gacctgctgcatgcaagcttcaacatagaaatttagtcaggcttcttgtgttttgcttgtttgagaagagaagatacttgtttatgaatatgtgcccaacaaaagtctcgactatattctctgtggtaggaccatctttctgaattctgtgtctactttacatgcctgctttgatatttatnttttttgcttccagtttttgccctgttggcctgttcagtatatacataataatcgtcaatcgaccacaattcaggaagcgatgcgtaaaaattaggacagttatccgttggtcaaataataaattgtatatatttttcatgcaatcaaagtgtcgcaatgtttcttccaaattactacatttttatttgatatttttcatatgacttgaatattttgtccaatttctagatcctgaaaagcaaagggagttggattgggggagacgttacaagattattggaggga

SEQ ID NO: 100130 - DNA, 465 bp, Glycine max
  unsure (1)..(465): unsure at all n locations
nggctggctagttactngattcgaggaataaaacattctcttattttttgtagatcaattttggaatgtgctgatgattattntgaaacctaaaccctgggatccattttttgaaatgcaggatgtccggctgtgtgcaaaggaaaatgtattttctggcgtatctctgaaaaaataaaaataaaagaggagcgtactagtaacataggatagtggaaataacatgagtttttttcttaaacatttttttgggtcctgcgtatttacaccttttttcattatgattntaaacttgctgggctcacgagatgttgggtaaaaacggttttggttggttgaagactaacagatttctttttctggaattggtttataaattcaagagctcagttcaaatgttaaaaagtggtaggaaacaaattgactaanacattntagtncctcattctgtgaggcgatatcatt

SEQ ID NO: 100131 - DNA, 355 bp, Glycine max
  unsure (1)..(355): unsure at all n locations
gatccttaagtcacctgcggcatgcaagcttgatgtgaggaagcgnggaagattagtttttctactttngnntgnngaccaccaagtggtacctggagatatgtcgcgggggtcaggagaccttggggacgtcaggtggggtgctattgcccaaaaccaagcttggccaatcccgacccaacccgggcatagtcagtcagtgagaacctgtgacgtacctaaataggcgagctcatggcaatcaaccaataaaagaacaaagtccacgaagcaaggaggcttgtgtggcggctggccagctatgtatcttgggtggtattagaaaattagcctctggtaatcgattaccattcat

SEQ ID NO: 100132 - DNA, 465 bp, Glycine max
  unsure (1)..(465): unsure at all n locations
nttatccacaaaaatcgcttgaatcccgccaaatgtcctttaccttaaatagtctcttttacttttatcggttaaaatgaaccttttaaaagtttaaaatcaaccctacgcgtaagtttcttgctttcaaagaactacataggtttgagttcctcatcgcaattaaggatacgtaggagcaagagccatgttcttgtcgaccctaaaaattaaatgaaaaacataaaagggaaaataaaaaaatattaaagtcatgattttgcatatttaattaaagactgccgtaccttgaggtggatgcgtagggtgttaataccttccctgtgcataaacaactcccgaacctttgttcttaaaattcgtagaccttcttttggtttttttctaacattttcctcanataaacgttggtggcgactctgcgccgtttccttcctttgaagatgcacccgtgagtctcgcgtc

SEQ ID NO: 100133 - DNA, 437 bp, Glycine max
agcttgctgaacaagttaacgacctaatttaattctggtccaaataattcaatgtgaagtttgcatatccatagaagattttctttgaactatatccagcaaaggaaaaatttcagatgataacataaaacactgcactccttttttcttcaaagaaaataaaaaaaagcaatgtactccttctgacgagactaatataataatacaattttcaaaccaatccctttattatcgattatttgattgattaatcatttatactggaatgagtaaaaagtcacatgatttgaataattctcatcggaggctaaatcaagataattttgaatctaagttttcaatttttgttcatccttcttaccataataatatatctcgagggttacaatgataattttttctataagacataatcttgaattctctttctttatata

SEQ ID NO: 100134 - DNA, 462 bp, Glycine max
  unsure (1)..(462): unsure at all n locations
cgccttgttgctctgcaaggattgagccaatacaatcctatcatatttgtggctaaaggggcaaacaggaattttcttttgcagccattactctcattcagagacgagcattacacagtttatttcaatattcaagattgatatatattttcccctttaaaataaacagtataatatgcttcgtcttacaaagaagggtcaagtaatcgatattcaaatgtaaaagaatagttgatgaatatcttcaagtctttggtgctgtgttattaaatgatactcagtgataaccacaattagaaaattggaagtcagctgcagtaaggtgacctttctattcattntatagaaaagaaaagaacagagtggggagagaagtgatgatatatgtcactactcagcgtagctggtttcgttaattatatcagcattcagttgctatgtaataatagtatgggatgatct

SEQ ID NO: 100135 - DNA, 452 bp, Glycine max
agcttcttatacaaggcacatctcggtggtgttgctcctgcttccatggcgtattccttaatggatggcgcctactgtcacctcctttcctttgtcttccgctgcatatccatgggggaaaatcaccattagaggaccccattgaagctcaaagatccaaccttcatagaagccccacacgcaagctttcatcacacccccacctggttaggtgatctgttctcagggtcatagaggtttgcatagaattcttttacgatggcaacatcaatgctgccgtccagatagtcagcaaggtctaccctgcagtgtgtgctatccagcgtatctaagaattcatcagatattatggtgtaaaccaccacatttctctcaggtagcaattctctatgcacaataatggctatgtatctctccccaacttgctgggatgagaatgtcgatctatcata

SEQ ID NO: 100136 - DNA, 93 bp, Glycine max
tagacttatcaaacagtctgggttgtgcaagatagacaaacaaatgacccaactgaggcaacagccatttctatggtcaaattgggtgttgag

SEQ ID NO: 100137 - DNA, 469 bp, Glycine max
cggatccttaagcaccgcggctgcagctatctgattagatcaattgtagttttcttttctcaacctggccaccttagcggaccaaatcagcctcagatgcaagggttgggcgctaagcgcttgagactcacagcttatcgcatgaacagagatgcgcttagcgcgaggcttatgcttagcgaaaggactatttttcagaaaatattgttctaagatatttttcagtcctttcttcaagaaattgaaacccttatgttaagcattcaaagattggctgatatactcctatgtacagattatatagcaagttccaaatgatttaattgcatgaaaaacaaagataacacaaattaaaactgggtggccttccaagaagcgcttctttaacgtcattagctggacgcttttacctcactgggtgaacttatgttgtgggtcctacttatagagcctctttctttcattacct

SEQ ID NO: 100138 - DNA, 448 bp, Glycine max
  unsure (1)..(448): unsure at all n locations
agctntattatatgctaaagggaggatcattgttccttgtgagggattccccatgaaaaaggcaaaataaaagggagcccaatttgttacaactcagagagggtaatggcgccaataggacctatgttgtaaagggtctctttttatttgaattatattatatttgagagagtcgctcatgtgcatgagagtgagaaccctgaagttgtgatgagatgacacattggtgagagtgatgagtcatcaccatcaatcattatttggctttcaattggggaccataggatttattctatatagccaactttaaccactctcacgtggttccataacagctccactctactttttcctcttaactggggcataccctttctcctatgttttggggtatttcgaatgaacatanctggagtggtaattgctatcagtgatgctttgggattgg

SEQ ID NO: 100139 - DNA, 446 bp, Glycine max
  unsure (1)..(446): unsure at all n locations
accttgaaactcagctataatattgtattaggtaaaggatactatatttactgtatgaatagatatcctattntctctattcataaataaaagaaaaaggggtcgatgtttctttcttggatggagagtgtggtgatatataaataatagtgatttttttagcgacctacacacacatacttaaatatgttaggtaccataaaaaggatattataaataatgatatttaaaagtgacataataaatcgngaagggacctactttattctcgctttaaaaatttatttgaaaaacttaaggttttttttcacaatatttttcacgcaatttcacattttttaacccgaggatcttaatataaaacctcttgttgaataagtaaacataaatctttataaaatgttaacacactatatggtatttaaataaataaactaatggaacgt

SEQ ID NO: 100140 - DNA, 421 bp, Glycine max
  unsure (1)..(421): unsure at all n locations
agcttgtcttgccccttgatatatntttgtttctatggncactatgaatgacaaattccttgagataaaggtagtgttgccatgttttcaaagcccatactaaggcatacaattgttcttctctaagcacagtcaagacagattttaaatgatcaatatgcaaatcaagtgaagtgctatagataagaatatcataaaagtacaccacaacgaactttcctatgaactctctcaagatatggttcattagtctcatgaaagtgctaggagcgttagttaggccaaaaggcataaccaaccattcatacaaaccatattttgttttaaaagcangtttccattcatccccttctctaatcctaatttgattgtatccactttttaaatcgattttagagaaataacatgcatcatgcaattc

SEQ ID NO: 100141 - DNA, 446 bp, Glycine max
  unsure (1)..(446): unsure at all n locations
tagcgccaatcgtgtactgatcctgtctgaagacacctgttgtgcttagcacactaatctggcacttagcgtgctgccttgatgttgatgctctgccagattctccaccagattctcctttgcgctaagtgcactgaagctgcgcttagcggtggatgcgcgcttagcctaattactgagctaagctcaactgtcactttntgcacttcatgacttagcctctttttcacctgaaaatgcattgatttcatcattaaatccaatggacatattctaaagacatctttaaccataagacanaatntatttacaagattactccaaaacaaccattaaatggggaactatacaagttttggaaaatagattctatgcaaaagttagttgtataaggcgactaacacttatgctcaattatctttgataacacaattcaagagagctta

SEQ ID NO: 100142 - DNA, 448 bp, Glycine max
  unsure (1)..(448): unsure at all n locations
agctttaacgtgtcttatatatttattgcgatggaaataaagagaatagagcatattttataaaaaataatgatattctacactagttatgtaattaaataatgtagaaaatgactatacagcattagatatgggaaaaactgatttaaaaaagacactttctacatcggttaaaaccacaaccgatgtggtaattggcagatttacaaatttcgacacatttcctacatcggttttatgaacaattgatgtagaaatgcgtttttcacatcaattttaaaacagatgctgaaagtgattgactntcgacatcgctagatacaacattggctttaaaactgatggtaaatgactttgttaaacgatgttaaatgcctgttgtagtagtgtgtggcaattaactattaaggaattaaacaattttgatagattgtgtgaaattagattg

SEQ ID NO: 100143 - DNA, 293 bp, Glycine max
ggcttctcaggctcgtcttttttgatgatgacaaccctgaagtcaagaaacacatacgtcttctttttcctagtcgagcgctcagctaatcatccatactctgccgctttgctagcgagtttaagcttggcttgaaagcaagtcgtttaagtatatgagctcttgattaaatccctactgtgtctccccctgtggcattaacaaaaagccgaagcgcgtaagaaatagtgagcatacataaatgattatacagcataataccacatgttagcacatatcgctagacatatatc

SEQ ID NO: 100144 - DNA, 486 bp, Glycine max
  unsure (1)..(486): unsure at all n locations
ttaagtcacctgaggcacgcnagcttatcacggtccagagttctcatgatgtattctatatgactggtgaaactgggagctgtgagtattctcagagtttctttttaagtgttagttcccattcttgtgcaaaacttaatttaatttccttcttctcggggattaaaaaaaaaagaccgctacatggctcctgaagttntcaaacatcggagatatgataagaaggttgatgtgtactcctttgcaatggatttatatgaggtaattctgcttgcttaaatactaaagttttatgtgatacaaattgaagctaattntaatgcatgatatccttatctcgtgcagatgctngaaggtgaaccacctttngcaagtcgtgaaccttatgaaggagcanaatacgctgcagagggacacaggcctcattttcggcanagggttatacccctgaatgcaagagaagtctgatcatttctttatccaatt

SEQ ID NO: 100145 - DNA, 456 bp, Glycine max
  unsure (1)..(456): unsure at all n locations
taatccatcgactntcagcggctcatacattcatgaggacccttatacctttgtagatgaggtgtcgtggatatatcgaggtttaggttgttcccctactcggatggtgcaatttgtagctcttcgtttacgtgatgtagcgaggggatggtataagactatgctccttgcaagaccagcaagatcacttcttttagcatgggatgagtttgtcgagctgttcttagttcactttttgcctcaaagtgttagaggcaatagagcacgtgagtttgagacccttgtgcaaacagagcagatgtcagtgatggagtataatatccaattcatgtgactttctagatatgcaccacacttggtggctactgagaagttacgagttcagaggttcttggaagggttgaagagttatttgttcagggcaattgcangacatggtgacatgacttatgatga

SEQ ID NO: 100146 - DNA, 277 bp, Glycine max
  unsure (1)..(277): unsure at all n locations
acctttgagaccgnggcgaccgaggaaaagattacttcatgttccgtgattcatatcttgcgctagacaaataatatgagcgattgatttgccagaaatagtttaaccattgctagaactgtatgtgtatatgatagctgatctaatcttattgtaactttcatcatgctgaacgtaaagcatgaccctctatttgggtaatagatcatactttcttgggcctattgctcaagcatgcatacaataaaagacacttcctaatcttacctcctttttg

SEQ ID NO: 100147 - DNA, 454 bp, Glycine max
  unsure (1)..(454): unsure at all n locations
tgtgcttaggtnggagccggaatgatacctggagctatttatttttatgcgtccacaatgattacctgagaaatcaaagtggaggcctacctttaggttgaagcctgagtcgttagagagactccataggtggagaaatgtgaacgggctctcatatcatcgcgcgatgttgtgccatagagagttaactaataggtggaaggaattatgagattcagctaaaataatctgctgagtaataccctaaattatgaagtgcacggcaagaacatattatgctgcttggttggtgcatgcacattcaaactcataatgtttgaacaaaaaagagggcataaatgagcataatgtataatgtgtcctgaagtgtatgccatggcgtcggcccgtggcgagttcactaagatggaaattttatggatgtaaagatgcatgcgaaggtgtggcgatacta

SEQ ID NO: 100148 - DNA, 450 bp, Glycine max
  unsure (1)..(450): unsure at all n locations
agcttgctaacacatggaagctcctaatatctttcactctntntggggtgggccattcttggatggccttgattntctaagggtccacatggaccccatttctaccaactacaaaacctaagaaaactatattatctacacaaaaggtacacttctctatatttgcatagatggttgttttcctaaggactgaaagaacttgcctgagatgtcctaagtgatcatctaggctcctactgtacactaaaatatcatcaaaataaacaactacaaatctacctatgaaatcccttaaaacatgatgcataagcctcataaaggtgcttggtgcattagtgagcccaaaaggcatcactaaccattcatacaaaccaaacttggtcttgaaagcggntttccactcatcacnccttttcatactgatttggtgataaccacttttaagatcaa

SEQ ID NO: 100149 - DNA, 469 bp, Glycine max
  unsure (1)..(469): unsure at all n locations
ccttaaaactaagctgcttgggagctttatggagctggatcttgagctttttgatgtcctttagtggtgattttccaccatggagatgcagcggaagacaaaggagaagaggtaagaggcggcgccatccactagtgaataagccatggaagaaggagcttcaccaccaagatgagccttggataagaagcttggagaggatgcttcaatggaggaaaagaaaaagggagagaaagagagaggggggagcacaaaattgaaggaagaaaaagggagagaagttgaactttgagttgtgtctcacaagactctcattcatcaaagttacaacaagtgttacacatgtttctatttatagactangtagcttccttgagaagctntcttgagaaaacttccttgagaaacttctttgagaaacattccttgagaagctagagcttagctacacacanccctctaataacta

SEQ ID NO: 100150 - DNA, 287 bp, Glycine max
  unsure (1)..(287): unsure at all n locations
tgcagcttggaagggaagcacgcttattcttgtcttcccgncaaccgtgctcatccgatgccgttgatggagctcgtgtgatgtaaggcatgggtacgagcccaaaagggtttgggtcgaaacggaaatggcgtgtgagcttggtgtgttaaagggaaccacggaagttcgagctggattaagactacacgtgccgacgtgagaagaatgccctataaagaggggagaagcatgggccactgctggaccacaagtgaagggatttcttatgtacatcagcgaagctt

SEQ ID NO: 100151 - DNA, 482 bp, Glycine max
  unsure (1)..(482): unsure at all n locations
acactatagaaagctcgcgcttgcttgtggagcttctatggaggcgggatctnatanatttttgaggtcattcaatggtgattttccaccatggagatgcagcggaagacaatggagaagaggtgagaggaggcgccatccactatggaataagccatggaagaaggagattcaccaccaagatgagccttggataagaaacttggagaggatgcttcaatggaggaaaagaaagagggagagaaagagagagggggaacacgaaattgaaggaagaaaaagggagagaagttgaactttgagttgtgtctcataagactctcattcatcaaagttacaacaagtgttacacatgcttctatttatagactaggtagcttccttgagaagctttcttgggagaacttccttgagaagcttctttgagaaaactttcttgagaagctagagcttagctacacacacccctctaataactaagc

SEQ ID NO: 100152 - DNA, 387 bp, Glycine max
cttaccttattacaaaagaaatattctacaaaatatatttatttataaatatgttgtggttcccataaaccatagcctaaaaggaaacttcatcattaatgggaagagtagtcgctgcatgctagtatgattcatcaatgggaataggaaagatgactaacacaccataatcacaattgaaagaccaaacaaagtccactgcacaaaaaactagagataaccacaacagaaatctcaaaaaacaacccaagcctaccgaaaataactcaaatctcatgatagtactacaaagaacatactagatcacattaaacaatgcagaagcagaacacacgcaaagggaggcagacaaccacatcaagttggccaagaacggcgatggggctt

SEQ ID NO: 100153 - DNA, 452 bp, Glycine max
  unsure (1)..(452): unsure at all n locations
tagaacaatatacttggccttcgtttaattgtcttttgtcttggcgaccacgatcaacaaagtactttcgacacttactatatgttgacttgaccaacgctgttattggaatgttgcgacaatctttcaacaccttattcacacattctgataggttggttgtcatgtgaccatatcttcgtccagatgtatcgtaagccatgctccatttttcctttgaaatgtgatcaatccatcttgctatggctagactcaattgacgaaattttctaagttttgatcaaacacatgcttgctaggagtgtacgccgcatcaaatntgttaccatcaaaagttgtaggtagatatgaaactcaaattaactcaatgtataagataaaccttactcaattctttgaacatctctttttgtttcacgttgttgaaattgcgattgaaattgcttgctatg

SEQ ID NO: 100154 - DNA, 402 bp, Glycine max
  unsure (1)..(402): unsure at all n locations
agcttaaacattcaatttcgagtgtctctatatattactggacttaatgaaacatccgagaaaaaagttattgtcgtctgaatttgctcagaggttcaacattcaatttcgagtgtctcgatatattatgggactcaatcagacatccgagtaaaaagttattgtcgtttgaattggctcacaggttcaacattcaatntcgagcgtcttgatatattatgggactcaatcagacatccgagtaaaaagttattgtncgttgaattggctcataggttcaatattcaatttcaagcgtctcgatatattacgggactcaatcagaaatccgagtaaaaagttattgttcgttgaattggcacagagcttcaacattcaagttcgagcgtctcgatatatgac

SEQ ID NO: 100155 - DNA, 449 bp, Glycine max
  unsure (1)..(449): unsure at all n locations
ntgagccaaaatcctgactcaccataaaccttgacccttttgagaatgccaatccttaccctcggaagcaaaaaaaaagaagagaaggaaaatttccaatcaaaggaaaaaggagaaggaaaatttccaatcaaaggaaaggaaattcccaatcaaagagtgggagaaagcaaaaagaaaagaaagaaaattcccaatcaaagaatgggagaaagaaaaaaagagaagtaaaaaagaagaaagctcctggtcaaagaaaccagaagaaatgtgccgagaggtccttggactagacgatatctgaacaatacagaattgtcaccaaatgaacaaaagaaagaaaaggaaaccatgacctaaaagtggtcttctccctttgattaccaaccaaaatcctgtgcgctagcgactntntcgccccgcactaaacaaaaacagaaaaggaaaaa

SEQ ID NO: 100156 - DNA, 457 bp, Glycine max
  unsure (1)..(457): unsure at all n locations
agcttctagaggaagcctcttaatgatgcttctatagaaaactacatgaagctgcctcggtagaaacgcttcccagccttcgttaaccgttggatcttctcgaaatttggtttgcaacttcacaagacactttaccatgatttaaccgttgggatctttgggaaaatatctggagtgtgctagaagcttccgttcccgagagcatctcttatttaagcatttcagcctttgctttcttgtagcttaggaaaaagggcatttcttcttctttctttctttcaaatccatttctaaagttccaagtactttctccatcacccacatccaccattagccaccacaaaccatcattgttctccattgaaaacccacaccgagaggaacccttcaaccgaagcagaatttccaacttggcttgcggtttcggtagagaacgaanaccctaatctgatctttc

SEQ ID NO: 100157 - DNA, 446 bp, Glycine max
  unsure (1)..(446): unsure at all n locations
tagtgcacgactagtgctaagctcaaatccacttatctctttcttagcgcgagggtggcgctaagcgcaaagtcatgaattcagagcctatttaaagcctgtcttgtgcagaattagggtacaacttagacaatgcccaaggcacagaattccacagcaccccacagtgcctatttcgggaaaagagctctggaggctgcaagagaagcagcctttacagagatacctaggttttgtaagcttattattgttagggtttcttttgtaatggctggctaaacaccctagaaggggatttctaatgaacagctgatgtaaatacttaatatctaattgattatgttntctggtgttaatgcttccttcaatgcttaatgtttgtatgcttttggttgataatccatntgtgtgcatagttaggtgactctagcattgggaaatgtact

SEQ ID NO: 100158 - DNA, 429 bp, Glycine max
  unsure (1)..(429): unsure at all n locations
agcttgcctcanagaggtctattatggacatgtcagccgaaggaactagttccgctccggagtatgacagtcaccgctttaggagcgctgtacaccagcagcgcttcgaggccatcaagggatggtcgtttctccgggagcgacgcgtccagctcagggacgacgagtatactgatttccaggaggaaatagggcgccggtggtgggcatcactggttactcccatggccaagtttgatccagaaatagtccttgagttttatgccaatgcttggccaacagaggagggcgtgcgtgacatgagatcctgggtaaggggtcagtggatcccgtttgatgccgacactatcggccaactcctaatgatatccgtggtgttggaagaggccaggaatgtgagtatggccagaggaggaaccggtctgatgg

SEQ ID NO: 100159 - DNA, 445 bp, Glycine max
  unsure (1)..(445): unsure at all n locations
cgaatgaattcttaagatgttgtgttttcaaagnttattctttactctgtatcctcttggtaatttcagggttcaagtgccatctccagcgctgatctttttggtgactcaagagacaacaacatcgatcttactgctggtgacctcatcaatcgattatctttccaggtattctttaccttttactggatttgggaatttcattattcatgtcatttgtcatctgaacaacaaaatgataattgaattagtgacattagtttctgtattcatgttggatgggttgctgtacgcctccctcccctctgtgttgcaggcacaacaggatctctcttcccttaagaacattgcaggagagactggaaagaagctcagctcactggcctccacattgatgacagatcttcaggaccgaatcctctaaaatgtgtatgctctgtattta

SEQ ID NO: 100160 - DNA, 443 bp, Glycine max
  unsure (1)..(443): unsure at all n locations
agctntcaaccgttcttcgacgntcttcattctttcctcatcgttcttcgatcttcaacgggtaagtacctcgaaccaagcttttcgattcattctatgtacccgtagtggtccacattgtgtttcgtgcatttttattctcgttttgcttactttttatacccccctgttgacgtgcttaagccattttacttaagtcatttctcgcttaacttaaaaataaaataaatttccaccgaacgtttgaattgtattatccattaacttcggttaaaataaattccgaccgttcggtcgtgccgtaaccacgttggaaatcaaaaagaggtaaaaaataatataataatcaaaaaatatctttttagtaaaataaagcggaaaatcaatcggacgttttctctttgggatttctcattcttaatcgaattgattaataactaaag

SEQ ID NO: 100161 - DNA, 439 bp, Glycine max
  unsure (1)..(439): unsure at all n locations
tggccccaactaggaagacccattctgngccacatccaatcttgacaatggagcatacagactgcaagaacttgatagcaaagcaattccaagaacatggaatgccacccacctaaagttctacttcagttaacctgaatgcaaacccaatgttgtactctttntcctactcaggtcttttgtcccaaaaatagaanaactagggttttggctagaggggttttaacgaggcacatttgggataacaaagggaatttgtacttaatctaatacattgaataaaattctacaccccttccttctcataattttcttatcaagaacatccatagtcgtagctccaaggctcttaaaacccaaggacctcctttgtgaggcctncttctatcactaagtctctagtacatgccactcacaacaagtgacaagtaggcatgag

SEQ ID NO: 100162 - DNA, 339 bp, Glycine max
tactgcgcaagatgaatctctaataccgcgtaacacgaaaattttatatatataactgcataatcttataatcccaactgctcatctgtctggtaaactaataataataataagaataataatcattataatagtaataagaattcatattacttatatgaacattcttacatcttctgaaatactttttattctttctttttacatttgttaacatttgatgacatgctaaatttcctatgatagacagaaaaaagaagatacattagggatataatgtgattcactgcaacaggaatgcaatatagcgtgagcgaaagtcataacaccacacctaaa

SEQ ID NO: 100163 - DNA, 454 bp, Glycine max
  unsure (1)..(454): unsure at all n locations
agcttgtggagatccatatatcangaaggcctatctgttgatcttacctncgagacagngaagaccaatgaaatatttacttcatgttccattattcatatattgcgctagacaaataaaatgaccgattgttttgccagaatagtttaaccattgatagaaatgtatgcttctatgatagcttatctaattttattgcaactcccatgagtatgaatgcaaatcttgatctctctattctgagtaatatataattctttcttgggccttattgctcaagcaattcagaacaaaaaaaatcagttcataattaataactaattatttttgaaacataatatattttatacatacaattaggaataaaagccttatcaatatgtataagagaactatttatctctgttcaacaaatgagatctatttattctgcactatattggactaaaaaatc

SEQ ID NO: 100164 - DNA, 419 bp, Glycine max
tctgcttcaattggagttggaatgatgcctgcgtgcattttagttattaagctaccaaaatgattacctgagaaatcaaagtgggggcctacctttaggttgaagcctgagtggttagaaagactccatatgtggtgaaatgtgaagtggcttcatatcatcgtgtgatgttgtgcctcacaaagttaatagttatctggaaggtattatgagattcaattaaaataatcgctgtgtaataccctaaattattaagtgcagtgcacgaacatattatgctgtttgtttggtgcaagtacattaaaattcataatcttttagcaaaaaaatgtatataaatgaaaaaaatgtaaaatgtgtcctgaagtgtatgccatggtgttggtttggtgcaagtccactaatatggaaatcttatg

SEQ ID NO: 100165 - DNA, 463 bp, Glycine max
  unsure (1)..(463): unsure at all n locations
agcttgcaaggtttctagactctaagcaagtatacactgagttcttgagcaccattgctatcaggattcatcatataaaaagcttcggagtctctggacccaacaattctctcaaacttggccctcatgtacatgatttcaccctctgaccctgcttcagctccactattattattgttattattatttcctggtaagacacctgcacccattgaaattggttccactgctttgagaatatcccaatcctttgggccacactctcttctggtggcaaagccacacttcttgccattgcagtaagtcctccacacaggctcttcaagcaacctcacatgttgntttttctctgctcctttctcttttccacattcaagggcaattctgaccagcccagacgccatttcgcgaaccaaaacactgatgggcgtggcgagctctatcatgaaggctggctgggaag

SEQ ID NO: 100166 - DNA, 414 bp, Glycine max
  unsure (1)..(414): unsure at all n locations
gcgtgacctgacaatactcaagcttgagctnggttataataaaacaaacaagctcgaacacatttaacgtgttgagctngaatattggaggaatagctcaacccattgagcgccggttaggataccatacttttcttgcaagtcagcatgacaatgaatatttccagcagacttgcagtcccttttcacatggaacacaaaacaggttgttgactataattttgagtgctcattataagtgtacagcttctctccctctgcctctgaaaagtatgaatgctctttgtaggacagggaagaatgaaataagtgctttttttcccccaaactcttgcatacagctgttggaggataagaaaaatattattgcttaacgcgtgcttgactgctctatgtctcctatcggaatatgtt

SEQ ID NO: 100167 - DNA, 427 bp, Glycine max
  unsure (1)..(427): unsure at all n locations
cagtccaaaacgcattttttcccgaaacccaagtttatgtttcttatatnacgatttntactagcgggtaatggtggatcatagttttgctatctcatctacccttgggtctcatctactatatcttaaaactcagggaaaactatcattaccctttttaatatgctgaattaccaacatgccaaacataatctaatgaaactgaattccaccactcatactcagcctatgatctagaaccaacaaaagccctcatgtcagataactttcatcttctaagtttattatagcttctgcagattaaaacaagcacttggttcttcgtttgacataaatctttatttagtttataaccaatgaaatatgcgtttagccatttcaacatgcagactatctacatgcaagagatctattgtgcaaaaccaga

SEQ ID NO: 100168 - DNA, 445 bp, Glycine max
cttacagtcacctgctgcatgcaagcttccaagaatcaagatcaagattcaagactttatattcaagattcaagagaagaattaagcaagacatgtatgaaaaagttcttcaaaaactgagtatcacatggtattttctcataacatgtttaccacagagtctttattctctggtaatcgattaccagattgttgtaatcgattaccagtagcaaaatggttttcaaaaagctttcactgaattacaatgttccaattgatttcaaaatgttgtaatcgattacaatgttctggtaatcaattaccaatgtgcttgaacgttgaaattcaaattcaaatgtgaagagtcacattctttcaccaaaatgcgttgtgtattcgattacacatgattcggtcatcgattatcagtgataagtgttgaacaataataagaagatgtaac

SEQ ID NO: 100169 - DNA, 452 bp, Glycine max
  unsure (1)..(452): unsure at all n locations
ctggtccgcatgggcatcatgacatattgaacactgccatcgtttttctagagcatctatgtcttgtacgtgnggcgggaacaggtgagacaatcacccagtattctggacacacatctcgtgactccaagacttactctgtatcaatcacgcaacaacaattggctaaaatcatcggtaacctaaaggaagagtggcagaaggaagtagaagaagaaaacaagaacctgcaagaagcatggaggaagaaggtaaaaaaggaaaacaaatgcagtggggaaataattaagcaagagctgaaccgaccatacaattagagcgacccagattgcagacaacaatcacctccacatgaggcaccggatatacaagcattagctgcacgtgtgagcaccaagcacagctgtgctgaagctgacatacacccattncgtaaagagccttctgatgtg

SEQ ID NO: 100170 - DNA, 459 bp, Glycine max
  unsure (1)..(459): unsure at all n locations
agctngaatgtcatgcatgcaaatatttatatcctattgttaataaaatgctggagttaagagatgattcgttgtgttattatgcanacactggcctggcatcgacattattgaccaaatatatcaacatgaaaaggaaagctgaggatatgacaatttttttaacttcattgaaatattgaggaaaatttcccaattctctctctctcctcccccacccnctcccaaaaagagactctaaattccattaccattatgctttatcacattactttagaaggtctaaatcatttgcctgtctattcacctcttctcatactcgcaaataactagcagtgctctctcatatctcgtgttaaagcatcttttttgcaacaaacaccgtatgaatatgataaaacatgacatgtgtaatgattataatgggaccgtatactcttaagttctcttgataacttt

SEQ ID NO: 100171 - DNA, 440 bp, Glycine max
  unsure (1)..(440): unsure at all n locations
tcgccctggattattaaactgaatgccagaatcttgttgtttcttaagcatggttggnggaaaattctcggttaagagctgtcctgaatgaagagcaagggcagttccatgattcctaataagggttgaagagtgcactgaagagagtggctgatttggaactgttggatgtggcaattgcgatgctaacattgcagaagatctctgctggacagaaggagggccataattaattattggttgctgatgcttactctgatcagtgaaagcggctgagtgagacagcttagcaaaaccgccattgctttgagagacagatggttcaggattgtcatcattatgcaatttatcagtttctgacaaagggagtttcgtctctatctttggcagatgtccatcttgaaattcattgccttggacagaatgctcattactatcat

SEQ ID NO: 100172 - DNA, 471 bp, Glycine max
  unsure (1)..(471): unsure at all n locations
cggaccttaagcgaccgcggctgcagcttgcttggttgagtgacattcccttttatgtattgacgaagagaaatattttcaaatagaaacaaacttatacaaataattgattcccagatttctaaagatgtagaaaaaagtattaaaaaaaacaaaaaacattggttagattttttaacgtgtacattattttatatatcatttgtttaaaaaattttatacttgtattatttgggtcatttttttgtattaaataggtaaaaaattctactcatgtaaaacacaaacttttgtaagttttgttatttgaaataaaaaaatttattgggtcccatatctcatttaatgtttggctcttgatattgtagttctaaaaaaaaatcatcggctttcggataattacttgatagattgttggtttgcttgctggatttcgtttgcatggctcgcattnttgtgattttggatttc

SEQ ID NO: 100173 - DNA, 466 bp, Glycine max
ctttaatggaagtcaagagcatgatattgggccgtatttatttctctggtgagcttgtatatcagcaggttcaacacctgaacactgtatttgggaagacccaaaagaaggataaaagtcacagttgcatatggaagaagaggtccattttctttgatcttccgtactagtgtgatcttgacgttagacattgtattgatgttatgcatgtggagaaaaatgtttgtgacagtgtgattgggacgctccttaacattcaaggcaagacgaaggatggcttgaatacccgtcaagatctagctgatatgggtataagatcacagttgcatccaaggtctgatgggaagaaaatttactttgccccagcctgccatactatgtccaagaaggagaagataagtctttgtcagtgtcttcgtcgggtgaagggctcacaatgatactctccaaatattaagagccttgc

SEQ ID NO: 100174 - DNA, 457 bp, Glycine max
  unsure (1)..(457): unsure at all n locations
agctntagatacagctgaagtttctttcaactttaatggaaaagttcaccaacactgttaaagaaacaaatacccaagctccaatgaacaatgtacttttctctaacaagttgttttatattttatggtcccttaccatggccacagcatcttagctttattatagaatacagcatattaaatgaacaagtgggtgtagagtggatgctaaaatcacaagtctataagacacatacaatgcaattataatgacaccattaacaaaggactaggataaatagagagattctattatgattccaagatcaaattaatgtattaaattatgaaaaaaaatgtgatatcagataatctacttaagaattatcctagcacttcagtgtccagtcagagcttcaaaagaaacaatacagacttcaacaaagaaatagaaaaggaaagaaaaaagaatggaaat

SEQ ID NO: 100175 - DNA, 362 bp, Glycine max
  unsure (1)..(362): unsure at all n locations
ntgaagagctatgtcagaatntacgaacacattttactctatagtgttgagtgacttgctcataatatcacaaaagtgtgcccggatgaaataggagaaatttggatccacattgaagacccaagtaatgttgaaatttggatcatttacattatcatcccccattgcttcagcagtggcatagacccaatttggggcagtctcaggtgtaacagccaccggatacttaatgcttgaaggattcaccgacacatttatgaccgagcttgtgacatgaaggtattttctatcattcacccaagtcctacccacggtgtcattttgggcagtaatcaaagaccccccatggttaagcgataaac

SEQ ID NO: 100176 - DNA, 325 bp, Glycine max
tatctacaccactcacaaaccctatctatcctatccttagcctcgatgtcatttcacgattaatgaagctcctgcaaaaccgcattgcacattgagtttgggaacaaaatgggctgcaaatacgcacagcttatggcatgaactctacgatccaaccaatacaagagatgacaccttcacgcaagtgcccatcggcatagataaagatcaatgggctcgttctgttcattatcgtcataaaccatcaacattgggaccgatacaaacgttctataaccgatttggtttataacgtattatatgattactattaccagtcgtacac

SEQ ID NO: 100177 - DNA, 312 bp, Glycine max
  unsure (1)..(312): unsure at all n locations
agcttgttgaatgatccccaacggtcctttacttttttctctaacgcacaggcatggccgactcacgagtctttggtgaccgcaacatgctaagagacctttataaagctcagactctcaaccgccatgagcaagaattgtctcatgagctgtacatgattatatatattgctgacttgagctcctaaacttgatggaaagccgttgtgttctgaaagcgttgtaactgtctcccattggtatctaagaatgatcctgatggctngctctaaaaatatgagcaaagatgaaggcttactgatatctactatc

SEQ ID NO: 100178 - DNA, 453 bp, Glycine max
  unsure (1)..(453): unsure at all n locations
agcttccatcaagtggtaattatagcacaagttctntaactaggngctccttaaacctccattaattttcagctttaccttctcctccattattatttcttcatttttctccatgtatctcctcacatgtcttgtgctgaatgttgttaacatgattttttagaatttccaccgattaaacttgctatagaagctagatttgattttctatggttcaaatttcttgttcttgttcttaaaccatgaattgtgttgagtttaggttcctttgagttttgtattgctattttttgtggctgaaacctgaaccataaaattcttacaaaaacattaaagtagaagaaaacctcanaaatctagagtgacatgttcacctattgtagttttgtcatagaagtgttgtctagtcttgaaacttgtcacataagattccttatgttgtgctcgaattta

SEQ ID NO: 100179 - DNA, 450 bp, Glycine max
  unsure (1)..(450): unsure at all n locations
cgccgctggagctgacccattaactgccctaactctnttatactggtggtccctaggctcttgaccttgacttgatagaacctctttttaagtgaaggcatttgacttgatcccatgttttactaaagtgaacaaaaataggtgcgaattaaaactccgacatctatcatgggtggaatggatgaatgcatgaagaaatgcatataacacagatgcaatttatgaatacgggagcccgagaaattgtctccttcttagatacaacgtcttgnggtagcaaagtgcccgacatatgtatttaagaaggtggcacggaccctccgttggtttgacaaagagaggggatcacaacagaatccgtgcgtgatgcatatgcganaggcgcaacacangaatgtacaatatgacaatattcacaaaatataagcaaaagggtacatgacagttatg

SEQ ID NO: 100180 - DNA, 493 bp, Glycine max
  unsure (1)..(493): unsure at all n locations
tccttacagtcacctgcggcatgcaagcttactgctagataaagctgccgtggaaactatatggtaatttatcacanagacgacgatgggacgtgtttgacttcaaatatgacaacgtctacagcgaaaaaaagatagagagggttaatcgttaaaagaaactaaactagggtttgattcttgaatgtgcgtggaattcttgaatgtgcgtggaaccacaggaaatagagaaagtagatcttacagatagagaaagtgcgtggaaccacaggaaatagagaagtactgaacaactaaagtagttgctttcgttgtatcctttctccctttcccttatgggagactttcttaaaataagtagtgacatgccttgtttctacaatttaatgggcaggactttggcaagtcttgagtaataaaccttctatacctattggcggacacttagcctatacattctcatgttgcaatgtaacataaataanaataaacc

SEQ ID NO: 100181 - DNA, 461 bp, Glycine max
gattctctaatctggaacataccaacaaatgtgctttatacagctaaaattacttattttcataattcggaaacacatgaacgaaaagaaaaacaaaaactaaaacaacctgttccacaaaatgaatgtgcttccaatgtgttggtgattgtcgtctgtgttggcagcgatagacctcactggtggcaaagaaagtcaaagggggatgcaaaggataagggttcgaagaacaagataataggggaagcaaaggtattttggggctttaattatgttttaattttaggcttcaataaactctttttttagtacctacaaaataacctgttttgattttggtacacaagtaattatggaggaataaatctttacgattatataaaaatattattattttcttatactattcacaacaattaagatatgcaatatatagaacttatttattaatagaaaataat

SEQ ID NO: 100182 - DNA, 463 bp, Glycine max
  unsure (1)..(463): unsure at all n locations
agctntcttaagaaaacttccttgagaagcttctttgataaaacttccttgagaacctagagcttagctacacacacccatctagaaactaagctcacctccttgagaagcttccttgagaagctagagcttagctacacacacccatctactcaaaatgcatgaaaatacaaaaaagtcccttgaaatacaaaaaagtccctactacaaagactactcaaaatgccttgaaatacaaggctaaaaccctatactactagaatggtcaaaatacaaggcccaaaagaaggaaaaacctattctaatatttacaaagaagagtggatccaaccttgacccatgggctcaaaaatctaccctaaggttcatgagaaccctagggccttctttagtagctctagcccaagcctcttggagtcttctaaccaatacccttggggggtaggagtgcatcacgatcatt

SEQ ID NO: 100183 - DNA, 452 bp, Glycine max
  unsure (1)..(452): unsure at all n locations
gaatggctagacatgatacatgtcanggtttggttttgctcaatgataaaagggatgccccacattatttccatgacacanatgtaaaaatgatgattgggaaattttatgcaaaactggtcatgcatgcacctatgcggacactcaagtgtcaaatttttatggtcatgtgatgctagggctcangattcatttcctctattttagtcaacccaatgtttccaaaatatgttggtttttcagctagacaacttatttttctttttccatctttttccttacttgctctcttttttctcatttcctctcttttccatttcattntttttttcttttctatttttatttntatcatgatttttgtttgttttacatatatttttttttgacgatgttcttaaacgaagaactctacacggttccagaatttaaacatcattgatataatgatt

SEQ ID NO: 100184 - DNA, 444 bp, Glycine max
  unsure (1)..(444): unsure at all n locations
agcttgaagtgaggaagtgtggaagggtgagacttcctactnttattcgttgaccacagagtggtacctggagatatgtcgcgggggtcacgagaaccttgggacgtcaggtggggtgctattgcccaaaaccaagcttgaccaatcccgacccaatccgggcatagtcagtcagtgcgaacctgtgatgtacctaaacaggcgagctcctggcagtcaaccgataaaagaacaaagaccacaaagcaaggaggcttgtgtggtggctggccagctatggatcttgagtgatatttgggatatggcctctggtaatcgattaccaagggtgggtaatcgattacaaggcttaaaagtgaagacaaaaagttaagatggtctctggtaatcgattacaaacgaggtgtaatcgattaccacgcctaataatgggacaaggaagtc

SEQ ID NO: 100185 - DNA, 314 bp, Glycine max
tgaaacttcctgcttttattgttgtccacagaggggttcctggagatatgtcgtgggggtcatgagacctttgggacgtctggtggggtgctattgcccaaaaccaaacatgacctatctcgacccaacccgggcatagtctgtcagtgagaacctgtgatgtacctaaacaggcgagctcctggcggtcaacatataaaaggaacacataccaccaagcaaggatgcttgtggtggctggccagctgcgaattttgtgtaatatgtggattatggcctctggtaatcgattaccaagggtgggtaatcgatta

SEQ ID NO: 100186 - DNA, 307 bp, Glycine max
cagataaggagagtggacctcgttcattgacatattattctttgttggtgtttgggaccatactctttccaaatataaaggggctagtgggtttagcaacaatccacactttcttgcttatcatcagagcaagaaaagcccgaccgttggtgttttggccaatgcatatgacacattctacttgagatgcgaaaagagtaacgccaggattgtttgttgcacgcccacactttatgtgtgggtggtctcccacgtgcttcgtcatgaaggtagacctgtctgttctctacaaagtcatcacatgtgc

SEQ ID NO: 100187 - DNA, 346 bp, Glycine max
  unsure (1)..(346): unsure at all n locations
ggcgaaattaaaacatgtgttcacgctccattctataaagttgaatcttaagttgataattaatttgaattttaagttccttctatagccatcacaaatatgcaagtgtttcaacttatccgacatctacaatgtactccatatattagaaaatactttgcatcataacatttagatataaggaaatttatacgactcaaaatgctggcttcattataaacttgttatataaaataaaatatttcgtataagaacacatgccactaggatntcatactatcctcgtgagctgcattgtaatttttatataagtgattattgatgatattcaagcaatgcttcatat

SEQ ID NO: 100188 - DNA, 462 bp, Glycine max
  unsure (1)..(462): unsure at all n locations
agcttgtagtttctatgtgaaatnttatgatgtanatctaatctagaaagaatattttcctccagctaagcagctttgtgattgcattgtgcaatagattttaggttccatgtctttatttgttactcaagccaagcactgagtgaaaaatgtcgatagaatttcagaaataaaattgaccaaattaaaagtcaatcacttcaccctcaacacaccgaagtctaagaaaattcaaaattgacatatccaagaatcatgtcacaagacaaatttggcaaaattgaggcagagaaacttacttgagcctcacttaatctctcgctgcattcgttgtttttctttgaggaagccacagaaccactagatttattgcttgcagaattgtcttctgaggcagttttaagttttttcggtgaaaaggttgtattctgagtacgagtgctaatctgaataaaattatac

SEQ ID NO: 100189 - DNA, 466 bp, Glycine max
  unsure (1)..(466): unsure at all n locations
ctataaacctccctgaccccacctacccaattgcttgcctttatcttttaaaggggcatggcccgcttcgaaatttggtgaagatgtcattgttggatttgtggacagtggagtttggccacaaagtgaaagcttcaaagatgaggggatgactcaaattccttcacgttggaaaggccaatgtgaaagtagcatccaatgcaacaagaaactcatcggagctcagttctttaacaaagggttagttgccaaataccattatcccgcaacagttgagaactcaactcgagacacagaaggtcacgggacccacacatcaagcactgcatctgggagccaagttgagaatgcatcattctttggctacgccgatggaacagcgaaaggagtagcttccatggcgagaatagccgngtacaatgccgtgtggcaaggtcaacttttctcatctgatctaatagccgca

SEQ ID NO: 100190 - DNA, 449 bp, Glycine max
agctttgatggtgcgtaacccaccattttctttgtataatactggtaatgtgtctactatcattgtcatcgtttttttcgtcattgaggtgccacttgagctgccaggttctccacctttgggcgtattctttgaaagatccgtgcccccttttttgcacatattttgtagttgcatcctatccgaagccattataccaacactgcctaacgaagacaaccattaggtcctcccaagaatggactcgggaaggttccaagttagtgtaccatgtaacaactaccccagtaagacttccttggaaggaattcctcatcttttgcgtatgcccccatcttccgacaatacatctttagatggttcttggggcaagtaatccccttgtacttgtcaaagtccagcaccttgaacttgggaggggtgatgatattgggtactaggaacaactc

SEQ ID NO: 100191 - DNA, 287 bp, Glycine max
aggatacaaccaacagaaagcgttgactatgatgagacctatgactctgttggtacgctggatgttattagatagttacatgctattgctcgtatacatgaatgtcatgttctatccaatcgacgcgaaaagcgatttactcaattgatacatcgacaaaaatatatatgtggagcaccctccatgtgtttgggactttgatcatcctaatcatgtttacaagttagaaaaaggcactatatggatgaaaacaagcacctacatcttggtatgaaagattgtgcaat

SEQ ID NO: 100192 - DNA, 407 bp, Glycine max
agcttgagatgaggaagtgttaaagggtgatatctttctgtctttattgctgaccacagagtggtacctgtagatatgtcgcggcggtcacgagaccttggggacgtcaggtggggtgctattgcccaaaaccaagcttgaccaatcccgacccaacccaggcatagtcggtcagtgagaacctgtgatgtacctaaataggcgagctcctggcagtcaacatataaaaggaacaaagaccacaaagcatggaggcttgtggtggctggccagctgtgaattttgtgtgatatgtggattatggcctctggtaatcgattaccaagggtgggtaatcgatacaaggcttaaaaatgaagacagggggataagatggtctctggtaatcgattaccacggggtgtaat

SEQ ID NO: 100193 - DNA, 350 bp, Glycine max
ctttttaattgacatggcgcaatataactggtggtacatttataggaacaagtgatctccatctgtgaatattataccatgttaagtgaaacatttggttggctgctctttggttatgaaatctctatggagctaagtctgttgcatgtatgactgtcaccattttggattgttttgtggtcgtattgttttattaaatgctccgtgatgtgatatgtcttgacgtatgttatatgaaagttatggttaacatcactattatctaaaggattactagtatgattattattagtattttgaagtacgttcatcatgcacatattttaatattatttatgttagtgtacctt

SEQ ID NO: 100194 - DNA, 460 bp, Glycine max
  unsure (1)..(460): unsure at all n locations
agctntcttctattttatcaacctgtttcatgtttatgtataaaagataaaaataaaaataaaacattttgattgaacggctgtggctttaacttatcgataaacattttacaatttactatcaccagtaaggttgatttaacaattgggcttcatgttcttcaaatgtatacaaaatattaccagctatttaatttgatgatttttggacgtgacataattganattctccccccagggccttaccataaaaggtatatatatcttgtagacttgtagttattttacattaaatgtgaaaattgataagttggcacctattccacatagagaacatatcaatcgttcttgaaccatttgaaaaactatgtgcacacttactttcattatactactaattactgtaacagcaagcaaccaatgagattntgaagaaaatctcacaaaaaacnagtactgt

SEQ ID NO: 100195 - DNA, 462 bp, Glycine max
attatggggtacccatcacatgtggtactaggttgtggtcgggcgatggtgctttacaagttttccacatccacaaagcgcgcataaacccaccatcccctgttgcccacctccaactgagctcacgtactcccacgtagcccatatcctcgtttgtctcaacatcgggtccccatcaatcctcccaagcttccccaacatgcaagtaatacaacattcaaacagcccaagctatcatagccaagcaaaacatggcaaaggcagagaactctggccaaaataccaaccaaaatcacagcttttctcacttaaagaccccagtaacaattccttcgttctagttcgttaaccggtggatcgactcgaaaatctcactggaagactctagtacataaacctacattttgaccgttgtgatctactagcaaacacccagaactcgatttacatcactctttccac

SEQ ID NO: 100196 - DNA, 449 bp, Glycine max
  unsure (1)..(449): unsure at all n locations
agcttcanatttattaatttatcatattagttttaaacattacctttctgtcgctcattagtttagacttttggaaaattcaacaaagttgtatctgtggtgcgcttattaataagatgatgtaaattcattggatcaagtaattaataagattatgacttatgattattgctatattcaataaagttgggtggagatatattagcaaaattaaagttaattagaatctgacagctatatgaaatgtgaaggaattaaaagacaacttaaattggaccaaacaatattatctataatataacttatcaaacaatattatctctgttggtaaatgttttgcatagggaaagattcatcaaattgttaatgtcttggttcaataatagagtgctagtgcatgtctatatcagtaggtgaaaaagaacttctctagctgatatattcttgat

SEQ ID NO: 100197 - DNA, 222 bp, Glycine max
  unsure (1)..(222): unsure at all n locations
ggggaccagacgcctcttgggcgctacgtgcttctattgtcgaaaatggagggaagcctgacgcagaactttttggagcacgacttgccactctatacctctagacgtcttgaggtgccanccaagacgcngaattcactctgagatgaccaaacggagagaggcgcccctaacctaaccaactcaccatgcccatatcttcacgatgacaaaagctcaatt

SEQ ID NO: 100198 - DNA, 453 bp, Glycine max
  unsure (1)..(453): unsure at all n locations
agcttatcanaataagctctcatgtcatatatgttcttgctaaaaaaagattaattntgatgaagacaagaagtaccacaggagacaatcttactcatgcccagtaaaattcctatgaacaacaaanatctccctccctccaaatatttaactgtatatttcggactcaaacttgacactactaatgcaatcccgacgctcggtgttaattaaactatttactgaaatacacaccttatttcctacggtcaattaactactatactacaatgacaatatccagagaggattattaaattaaaaatgacagttggaactaatttcaataacaacaacaaagtcttatcccacttaataaggtcaagtacatggatatggatcacaggacatcatccgacacgggttaaaaaccgaagttcagaaatatattttagcctaaattaagaatttttt

SEQ ID NO: 100199 - DNA, 400 bp, Glycine max
  unsure (1)..(400): unsure at all n locations
tgctgcgtagccgctcttggtgctcttattatcccacattcacatccctcttattactagctattttgaattctttagttcctgaatgtacaaccttcaaattggtggtcggtcccctctttattttctgtcgaaaagaaaaatcaatagctgccaaacatggatgaagttctatcaataatagtatcggagaaaacatggatgaaatcacaatgtaaaaagcgtaactacctatctttcagagcccctttgggtagttgtcttgtatccttatgtggtggggttntagttaatgatcttatacttatgccttccagcaaaaactatcactaatcctcttttcttaatcccattttgatagtattgataaaagataatgggttctccacctgcctccact

SEQ ID NO: 100200 - DNA, 450 bp, Glycine max
  unsure (1)..(450): unsure at all n locations
agcttctcaatgtgttntccatgctngcaacattatcatgattctttntttcttttcaacaaagtattccttccaaaaccttgaaaagaagacaatcttggggcgacattcataattattttgcccgtttagtgtaaggccgtgggcctcttcctccttctgcaaatttacccactgatggcacagggaaactactattggtattaccaatattgttattagcaccacccatgatttcattaacaataaaatgatatttttgttgttggttgaaaattcccaatacttgcataaccctccccctgcgacttccccctctaagaatcaaagaattatgtgtttttattttgttagaatttttttccatctttntatttactctctctctctctctctctagngagcacggacccacctagtttgtctatataatgcacgtgtaattttata

SEQ ID NO: 100201 - DNA, 452 bp, Glycine max
cttcaaactaagcgtggggagccttgacgcactcatagggcgtttacgtgcatcttttgaggaaaatggagggaagcctgaggcagaactttttggagcacgacttgtgagtctctacctttgtgaggttcgtgatctgcaatccaaagccgaggaattaactatgagaagaagaaaaggaaggaagcgtccatcacctcaccaacaacccatgccaatttctaccccatcccaacgtttaattcaatattttttttcacctaccattaatcttgttcacacacgtgtccctctatcagttgaccaccccaccccactttttttctctctacctctcttctggtcccaccaatatagctgccacccactaacccacgtccaatccaattccactttcacgttttccaggctaattagccggtgctttcatcacttttctggcctacccacta

SEQ ID NO: 100202 - DNA, 452 bp, Glycine max
  unsure (1)..(452): unsure at all n locations
agcttgcgggaaggaaagctaagtttccattgttagatctaatacggaaaatattgttagtctaacagtgcanaaaagataaaaaaaaaaaatcatcaacttaaggtgatatgttggtaccaaagtaaaaacaattgagacgacacagattcattagccacacataaattaaaatacaagacaacacaaaactcaatcaaggactacaattccaaattcatttgtaaatagtgcattgacaaagcattgagaacccaaaatctagaattagaacctttaaaatggcaagcaatgccaacagctagacacaactttgaaatagtagtgaataaatgaattagagctcaaagcagaaagaacatttctataaaaaggaaaccaagcaagactgatccacaaaaatcagacaaagtactcaatcaaatcttctgtttccaatcaaattctccatg

SEQ ID NO: 100203 - DNA, 389 bp, Glycine max
tgcacaatttgctacgtgacatgggaagagaacatgttcgtcaaagttctctagaggaacctgagaagcgtactcgattgtgggttcaccaagaagtgcttgatttgttgttagaacatactgtaagaactttctctacatattattgtgaaacttttgatcatatgtgcttttatcatgatcacaaaactaaatttaaatcatcttgttctttataagcattgctaatttttgtgggatgcattgttcacaaaaataaatttgaatgattatgctcttttaatgtgatgcaatgctattagacccggatttattcagaccatgttgcttgcaaaccattgttcgactgtctgaactaggcaaactggtgaccatctggttgatctggt

SEQ ID NO: 100204 - DNA, 427 bp, Glycine max
  unsure (1)..(427): unsure at all n locations
agcttctaaactntatacaagaatgaagctctgttactccttgttagacaagtggcctcagatatcttaagaaggggggtttaattaagatattgcaaactatttccccaattaaaattctatttcactttctatgcaagttacaaattcccttataaatgaactcttaaataatgattcaaatagaacaatctgaatataaatataaagcaataataaataaaagagtttaagggaagaaaaagtgcaaactcggatatatactggttcggccacatccttgtgcctacgtccagtccccaagcaacccgcttgagagttccactatcttgtaaaatccttttccaagttctgaacacacaaggacaatccttcctttgtgttcagaattcttttacaacaagagaccctcgatctcttaatcctt

SEQ ID NO: 100205 - DNA, 365 bp, Glycine max
tatcctaatgagggtgatctatatgctcttcagtcttttactatacatttgctgcccaagtttcatggtcttgtaaatgaagatcctctcaagcaccttaaggagttccatattgtttgttccaccatgaaaccacctgatgtccaaaaaaatcatatctttctaaaggcttttcctcattctctagagggagtggcaaaagattagctatattaccttgctctcaggtccattttcagctgggatgaccttaatagggtgttcttggagaaattcttccctgcatctatgaccactgccatcagaaaagacatttcacgcatcaggcaacttattggagagagcttgtatgagtactggacaag

SEQ ID NO: 100206 - DNA, 373 bp, Glycine max
  unsure (1)..(373): unsure at all n locations
agcttagagccaattcacacgacaataacttcttactctgatgtctgatagagtcccgtcatatatcgagacgctcgaaatataatgttgaagctcttagccaattcaaacgacaataactccttactcgaatgtctgatcgagtccctgaataattcgagtcgctcgaaattgaatgttgaagctctgagcctattcaaacgacaataactntctacacggatgcctgatgagtcccgtcatatatcgagacgctcgaatttgaatgttgaatctctgacccattccacacgacaataacgttttactcagatgtttgagtgacgcccgtgatatatcgagacgctcaaaatcgaatgttgaagctttgagc

SEQ ID NO: 100207 - DNA, 262 bp, Glycine max
caacttcgagcgtctcgatatattacgagtctcattttcttccgagaaaaacgcggttgtcgagagaattcgctcaaaggggcaacattcaatggcgagcgtctcagggtattgcgggactccaccagacatgcgagtatcaagtgaggatccagagaattcgcattacaagttcaccaatccatatacagcggcgagcgatatgactggactcaatcatgcatcccagtattaagtgctcgacatatgtactttatcagag

SEQ ID NO: 100208 - DNA, 488 bp, Glycine max
  unsure (1)..(488): unsure at all n locations
gaccttaagtcacctgcggcatgcaagctntgatttcctttgttccggaaacctttcttttttatgtgcacccaaacccaatctccgggttcgaagacaaccttgtttctccctttngtggcttgtttagcataacttttatttttcctctcaatttgatctttgactctctcatgaagcttcttcacatagtccgcctttgcttgaccttctttatgcttaaaaacagaaacattatgcataagcaaaagatcaagaggagttagtgggttaaaaccataaacaacttcaaaaggagaacaagtagtggtgctatgaacagctctattgtaagcaaattcaacatggggtaaacaagcttcccaagtttttaagttcttcctcaaaactgtcctaagcaaagttcccaaagtcctattaacaacttccgtttgcccatcggtttgtgggtgacaagtggttgaaaataacaatttagtgcccaactt

SEQ ID NO: 100209 - DNA, 279 bp, Glycine max
cgcttgtgactcctacaaatcaaggattgtgtttgtatcagttcatgagtgcttctctggtacccacctcccctctaactccattgccacttccttcatgccaggcctttcttcccctttaaggttcaagcacttgcttgcaaaaacaacaactttcttgatctccttctcattttctttagtaagaagaccaatttcaacaattttaaacaagcgatttttttctaaggtagagagaaaaagcatggcaagacttctttcccctttagatctctgaaa

SEQ ID NO: 100210 - DNA, 458 bp, Glycine max
agctagtgaggatcctcatagacgtttaaattttatcatccttgatcttggaaaacagttatcctgccgactttgatgactttgacaagttggaaaatccaagctgacctcagagattcctaatataggatttgatctagcatatttcatggatggcattttacgccaagattttgacaaggggctaaatgcaagctcccctttgtgtgttttgaatgagctcctatccactttcccaaagttagtcaagctcgaacatcctccaacaatgaagatatcatcctgtataccagcaacagagaacaagaaccttcctttgagaaaatgagcatctatcctgtgccattgattcagagacacatccagcgcatgtatctcaccagaacaaaatccatctttaacaacctcgaacaaaaacaaccatggactttgatatgaacccttccttctcatatgga

SEQ ID NO: 100211 - DNA, 392 bp, Glycine max
  unsure (1)..(392): unsure at all n locations
gcaagcacnacaagcatgtatagtctatgcagaangcaaaggggcccataggcagcagccaaagcagcccaccatcaagaggcactctcagggagacttcatgcgggggggggagtgggagcccactacaccaaagcacaagagcctgcaacaacaccacgaacaactgcaccaccccaacacaaagccatcaaggcatgccccggaaggacaactggactcaccccacacgcctgcgtacgagggacggcgcggtgaaagacacaacangctcgtacccgtcacgctactactctgtggctgccaccctctaagcaacgaggatgcacacctcgcacattagacccatgagatactacncggaggaacaacattccagggacaaagtaccc

SEQ ID NO: 100212 - DNA, 451 bp, Glycine max
  unsure (1)..(451): unsure at all n locations
agcttgaatgctctattcaatggagttgactataatatcttcagactgatcaacacatgcacagtggccaaagatgcatgggagatcctgaaaaccactcatgaaggaacctccaaagtgaagatgtccagattgcaactcttggctacaaaattcgaaaatctgaagatgaaggaggaagaatgtattcatgacttccacatgaacattcttgaaattgccaatgcttgcactgccttgggagagagaatgacagatgaaaagctggtgagaaagatcctcagatccttgcctaagagatttgacatgaaagtcactgcaatagaggaggcccaagacatttgcaacatgagagtagatgaactcattggttcccttcaaaccttngagctaggactctcggatagggctgaaaagaagagcaagaacttggcgttcgtgtccaatgatg

SEQ ID NO: 100213 - DNA, 241 bp, Glycine max
tgtgcaaaatcagaatgctcacaatcataatgctcaaaattattatgctcaagatcaggatgttcaaaatcaccaataacagaatgcacagattcaccatttattgaatgctcataatgatcaaaaggtataaaatgatgcctaactaatctatgaaatgtcctatctatctcacgatcaaagggttgtaagtcagatcgattgcctctagtcatacactacattcagcatgcacaccact

SEQ ID NO: 100214 - DNA, 413 bp, Glycine max
  unsure (1)..(413): unsure at all n locations
gagctgcaagctcttagactaccaataagntcttttctgtttgatcatgaactcgacttccttaaataaggtctctggttcgagtattataaatggaaaacaacgtacttagtataagagatcctattaaaaatgatcaatcaggtttctgatgaagattaattattagtaaaattgatagatactccacattaatactacaataataaaaaaaacacttagactgtgccttgagggtaatatggcaattcagaatgatagggatttgcanaatgcttcaccaaccgatgcaccagcaacggcggagccgaaagttaatttttgccaacggtaatgctttgttggctcttctctgccctcacgcgtcgctcgtctattgattcttcatgaaaatctgcccctcactttaactt

SEQ ID NO: 100215 - DNA, 430 bp, Glycine max
  unsure (1)..(430): unsure at all n locations
agcttgtggttgtggtggagctctatttgattaatctacataagattcgntagaatgtcctagacaaaagtgttagagggaccagaatatgcattattattntgtggtctccagccataaggctaatttgaacatgagccacctctgtagccttgatagtttccttggaagatctattgaggtcttgcttgatactatatataatgggcctcctcttcctattgacaatgctgaatagtggccattctgatggtgaccaccacagaagtcacatcttagaactcgttgaacttgatgagcttggtgagtttttagtgatccaccttattcatattgttgagggagttaacctatctgcttggtaaggcctctatttgatgagtaagagtttcgtttgagccaaaattgcattagagctataactccatta

SEQ ID NO: 100216 - DNA, 440 bp, Glycine max
  unsure (1)..(440): unsure at all n locations
tcactcctacatttcatctctagcattcatcttctttctttacccactcctcacgtttggttctttagggaaaaacaccataactaaacgcgccgcaagggatccctatcgcaccacatccaaatctagaacgatgggtgatcacgaggagacgcatgaacagatgaaagccgacatgtcggctctgaaagaacaaatggcctccatgatggaagccatgttaagtatgaagcagctcatagaagaaaacgcggacaccgccgccgctgtcagatcggctgccgaagcaaacccgacatctcttggcaactacgcaccatgctccctcaaacatattangatggggaagggacacactngggcacgatggcagccctcacctgtgatacaaccgagcggcttacccttatggattgccgcccaactattcaccacccgtc

SEQ ID NO: 100217 - DNA, 412 bp, Glycine max
  unsure (1)..(412): unsure at all n locations
agcttgcaacataggaattaaagaatgtgcttgttatgcatctggttccatggctgttgtcgaaggagatgggttggatgatgaagggatgtcctcagttcttgctctctttcttgatgccatttgtattgttgaagcaagaaacaatgcagcaagcacaaatgtagatacaaaattgggagattttttttggatgagagaggacgaaggagaagagagtgtntatgtagaataccatagttgtcctcttccttgggagcttgtcaatatactgatgttacacttaaccaagctatttttgacacttgcgcttagcgaaatgtcttgctaagcaagagagacgtttggtttttcaagacctgttgcttaacgaatccgcgcgcttagccgacgtttcaaattcaattttttt

SEQ ID NO: 100218 - DNA, 439 bp, Glycine max
caagaactattatttgctttaagtaaaaaatatttattacatctttaactgtagattcttcatagatcttggcataaaagattccaactttccatgtttggtcattggacccccaatggagatatccatgttggatgatatgttctttagtaaaatccctaaagaatgggatggtatgaattaaaaaatatttaattgtaaaagtaagaatggttgaaaaataaccaagaaaaaagaccatagatgaagaacaacaacaaatgagagcctcgtggaagaataaattaaaccaaacaaaaattaatagtttaagaagaatctcaaaatcaaaccacaaatcaacaattaactatgatcaaactcaaagttaaatatcaatcaacaatgaatttcacgatttaatcccaaaatcaacaatgaatttaaactatgtttgaat

SEQ ID NO: 100219 - DNA, 442 bp, Glycine max
agctttaggagaaaccattattactaatgtagttcctaaacaaaaatcaattgagggagctgcaccaagtgtccccatcgaaattgaaaaacctttattcaaacctttcaaagttagtgagaaggctaaacggaaaattagggaacttagaaaaactaaatccttaactgagggcgtaggtgacaatcatagtgaattactaaacaagattggtagtttacttaaggtcattccagatactccccaaatggtaacaagaagtacctccaaattaattaatgttataaatgaagatagtgaccaaacctcagataacacaactgagataggatcagtgtcagaaaagaatataaatccaattaattccaaacactggaaaacaccctccaaattatattaccaacgtccaactgcccctgaccttctattagaagaaagaagt

SEQ ID NO: 100220 - DNA, 206 bp, Glycine max
  unsure (1)..(206): unsure at all n locations
agcttgcaggatatatcactctattacaggttatttaagatgttgcgaaaaanatttcattgaagttgaatattatatgnttgcgcgtattttaaggaatatgcttgcaaaatatatttagtgttggatctacgagcattntccgtccgttggttttgttgttcctgccgaggattatgatgagaggagaccgtgtgcatgtcgat

SEQ ID NO: 100221 - DNA, 458 bp, Glycine max
  unsure (1)..(458): unsure at all n locations
cttaaaactcaagctgtagactntnnggaagtgtactattgtcattgtaggttatcaaatttataaaagagatcatctccacatagacttgggttactaagtttctccaaacaaaagtaaatagttcaataaatatgtacaacagatttaatcaaaatttcatgagtaaagagtgaatttattcagttcaaattctaagagtactttttagtcaaaattaatatccaatttaatgaaactagtgatcaaatagtaacaagcatcacaaacagaatgaaatcactagtaatgagtagagaagattcatatatataaaatatcaaactaaatatatcagggtacgaagattacatccaatcctatgatgaaactagcagataatggtatggagcacaagatcaacagaagaaatgatgaaggatgcgatccacaatcacttcaatgtcgatctctatagc

SEQ ID NO: 100222 - DNA, 453 bp, Glycine max
  unsure (1)..(453): unsure at all n locations
tggacttaccttgaattaattcctttgatatgccctttgagcccctgttccctttcctttgtnttaagctcactacaagccttanatgaanaaccatgatatcaccatatctttaagggaatttggagctttggaattgttttgggaataagtgtggggggttttttggttcattggataacttgttttgttggctatgcttcgtgatgtattttgggccttacttgatgtacattgtatattggttaaatgttggacatgctgaatgaaatgttgtttctcaaaggctttngagtnaaaaaaaaaaaaaagaagaagaaaaaaaaagaagaagaaaaagaaaagcaataaagttgagtgaataagatcttaaatggcacaagaatgatgaaactcttggntctactctttatgtttaattnttatctttacttctttntattttcttatttt

SEQ ID NO: 100223 - DNA, 420 bp, Glycine max
  unsure (1)..(420): unsure at all n locations
gctcgctcgtgaagcttctatggagaccagatctttgagctttatattgtcctttcaatggtgattctccaccatggagatgcaacggaagaataaggagaacgggtgagaataggcggcatccactatggaataagccatggaagaaagagcttcgccaccaagaatgtgccttggataagaagctangagaggatgcttcaatggaggaaaagaatgaccgagagagaaagagagaacggggagcatgaaattgaatgatgaaaaggggaagagaagttgaactttgagttgtgtatcacaagactctcattcatcaaagttacaacaagtgttacacatacttctatatatagactatgtagcttccttgagaagctctcttgagaaaactttctagagaagctttcttgagaaaac

SEQ ID NO: 100224 - DNA, 402 bp, Glycine max
  unsure (1)..(402): unsure at all n locations
agaaaagtactatcggatgtgtantttttatgggtgattgtgtttttacatggagttctaagaagcaaggcattgtgacactttctacttgtgaagccgagtatgtaactgcaacttcttgcacatgtcatgccatttggctaaaaagattgttggaggaactttagttgttgcaaaaggaaagcacaaagatctatgttgataataaatatgcacaagagcttgccaagaatccggtgttccatgaacgaagtaagcatatagatacaaggtatcatttcattagagagtgcattatcaagaaaaaagtagaattgactcatgtgaaaaatcaagatcaagttgcggatattttcaccaagcctctcaaatttaaagattttcgaagattgcgagcatgac

SEQ ID NO: 100225 - DNA, 386 bp, Glycine max
  unsure (1)..(386): unsure at all n locations
gacaatactcaagctttggcagataaggagagtggacctcgttcatggacatattagctttgttggtgttngggaccatactctntccaaatatataggggctagtgggtttaacagcaatccacactttcttgcttattatcagagcaagaaaagcccgaccgttggtgttttggccaatgcatatgacacattcgacttgagatgctaaaagagtagcgccaggactgtttgttgcacgctcacactctatgtgtggatggtctcccacgtgcttcgacatgaacgtagacctgtctgtcctctacaaagacatcacatgtgctccgaaaagggaaaagcanattggaatgaactctcgtgaagtatgctatgagcgttcgtaa

SEQ ID NO: 100226 - DNA, 397 bp, Glycine max
  unsure (1)..(397): unsure at all n locations
tccttacagtcacctgcggcatgcaagctngacaggttcaagtgcagatgctgctactggtggaggcttctcaatatgcttgccagacctcaaggtgatggcactcacattttgtggatcctacacagtatgagaaagcaatccgacatatattggggattgagcttggttcaaatgagtaactatctgccccatctgatttgtcagactctgaatagaggctcttgcctcttgctgaaattgcatattctggattggcattttcctcactaactcatctaattgcttgttgactttgttgagactgttgctgctgttgctgcattggaggaggaacatatggcttgcttggaccaacaatattctggaaaggaaggataagttgttgttgttggtg

SEQ ID NO: 100227 - DNA, 448 bp, Glycine max
  unsure (1)..(448): unsure at all n locations
actagctttggagaaacaggaccacaattnatntatatngttttatctagncaagatctgagagaccatacaagtttcctagcggtttctaattatatgggccattaagtctatcatatgctgacaatagccgagaagcccatgaatttcttctgggccggagtaggtgtctgccattggcttggccttggctaataatcgaggaagttcttgactcccgttcaaggtaagagcaaaccggtccatccacatggttgcctcttggtgtaaagagacgatcacccttcctctagcctcttttttcgcgtatactanggcatactcgtncgcgaccctatgctcgtgggccgnggctagacttaactcttcttggtacttggcaatgatagctagcatgttgggctccgctcgcataaacgctgagacaagctccttttggacctcgaac

SEQ ID NO: 100228 - DNA, 454 bp, Glycine max
  unsure (1)..(454): unsure at all n locations
gctgngtagcccaccatattntcatagcagaatactggtattgtgtctactatcattgtcatcatttgtttctgcgtcattgaggtgccacttgagctgccaggtctctccacctttgggcatattctttgaaagatctgtgccccctttttgcacatgttctgtagttgcatcctatccgaagccattatactgacactgcctgacgaaggcaaccattatgtccttccaagaatggactcgggaaggttccaagttactgtaccaggtaacagctgccccagtaagactttcttggaaggaatgtatcaccaattcctcatctntttcatatgcccgcatcttctgacaatacatctttagatggttcttggggcaagtagtctccttgtactttgtcaaggccagcaccttgaactttggaggggtgatgctattgtgtactatgaacaac

SEQ ID NO: 100229 - DNA, 272 bp, Glycine max
gcaagcttctgaggcacgctcatgactggcttgattttttctttcctggataatccgccagcggatggcgccagactgtaaatgtccttcacagcctctcggtgaatgatcatggtggagcatctcaattgcaggacctcatagatgctaagacatccacccgccatataatctctgcaagatagacttcatcaggagtatcagagccttgaggtgtcctaggtgccgctagaccttcgataagcatcccgctataccaactctaccattgt

SEQ ID NO: 100230 - DNA, 455 bp, Glycine max
  unsure (1)..(455): unsure at all n locations
gcttgtgcanatcanatcactcctacttttttctctagcatgcattntctttctttacccactcctcacgtttggttttttagggaaaacaccataactaaacgcgccgcaagggatccctatcgcaccagatccaaatctataacgatgggtgatcaagaggagacacaggaacagatgaaagccgacatgtcggctctgaaagaacaaatggcctccatgatggaggccatgttaggtatgaagcagctcatggagaagaacgcggccactgccgccgctgtcagttcggctgccgaagcagacccgactctcttggcaactacgcaccatcctccctcaaacataatangacggggaagggacgcactgnggcacgatggcagccctcacctgtgatacaaccgagcggcttacccttatggattgccgcccaactattcaccacccatctt

SEQ ID NO: 100231 - DNA, 282 bp, Glycine max
  unsure (1)..(282): unsure at all n locations
gcagtcggacctaagaaactcagctatagcanggatatgggaagattggganctgtcgattatggaagtgtcagntgaagncatagcatctctcacttaatactatgaccaatcactcagatgcttcacttttatggactttcagttagcaccaaccatagaggagttcgaagggatcttanaatgcctgataggaggaaggaagccatacctcttttctgggtactatccttctatggggagaataacatcaatggtcaagatcttggaatgagaatttta

SEQ ID NO: 100232 - DNA, 282 bp, Glycine max
  unsure (1)..(282): unsure at all n locations
agcttgaagacaactctaatgcgatcttgtcgtatatttcctcactancgnagtatggactgtttacatgatatgcttgagtgaagaacccctctatactagttatgcatcttacagaaaagagcagctaatcttgcacactctcggcataataagacaatgtatgctcactggactactactgtgattttttttatgctcagcctactacattgatctaatagaaacctgacatataatgagatgaatctggaggatgaaaaatgatacagacgtgcgatg

SEQ ID NO: 100233 - DNA, 443 bp, Glycine max
  unsure (1)..(443): unsure at all n locations
tgaagcacgcacacaagtactcacaagtggagaaggacatagtttgtacgtgagcggacaacgggacagaccactctaagcataattggcttgctcaagacgaaggtgctcttaactaggtctgtgttgctatgcanagtagatcatcactctttgatgcactacagatcacctccttgtacaaaactatactctagaccttgatgaggcctgcactcttggaccgctatatcctctaccgtacaaactaggctatgcacacaggcattcgaccctggaactcatataatgataataaacgctcatactctttagatagacctcgatcttacggtcacatgatatgctgcagcacacacagctactatgttatatcttccttccacttatccagagagccgcgaacgaaacccattgcgcatttatattatgtaatgttgaga

SEQ ID NO: 100234 - DNA, 394 bp, Glycine max
  unsure (1)..(394): unsure at all n locations
agctngcacattataagatcgacagatatatattctgatgcctaatagaacctatccacgcttgcctatttgtgatgaaggtagaaagaacggatccaaactatacttcagtgaagagatgcccaacaaaagacaaaaggtgtagatcactaactattcaaggtactggaggaccttattcagcaacaacaagttggtgaaggagttggacaatcatgatgcttacacttcatggaattagactgtatggtttgatataatgaatgtgtccacttccaactatgtagatnggcccattgaggatgatcacaaggactcaatatagttgttgcatccaatgaaggtataccactttgatgatgtctctgcttgctntatgaagaattcaaaagat

SEQ ID NO: 100235 - DNA, 465 bp, Glycine max
  unsure (1)..(465): unsure at all n locations
acctataaaactcagcttacacagnttatctttctcaaactggagatttttaagttttattactaagtctttcctaattagatgatttaaatgattcatattaatgtgtgcagtcctacaataccacaaccatgaatcatctatcttactcaccaagcaacttagctcatgaaaaactgcatgctcaacattcagcatataaatgttacctattctcttaccaatgtggataactttatcggatatggcttcacttataagacatcaatttatgttgaattcaatcttgaaacctttatcacaaagttgactaatacttagaaggttatgctttagtccatccatatttaacacatntttcatctaggctctgtttgattccctatatttccttctcccatatctttcctttgttattggctcaaaacgtgacgtatccaccatcctttgacacgaagtcagaga

SEQ ID NO: 100236 - DNA, 316 bp, Glycine max
  unsure (1)..(316): unsure at all n locations
agctntataagcgcaggtttgggagacgaatgtatgtggtcacgatataggaagatgacgttccgagtacattggatttggtacgaccatgccctcctgatttccagctggngaaatggcgagtggaggaacgccccggcatttacgcaacgagcataatgtaaacctttacggttttaaaagctctatagttgggcctaggctttagagtttttcttttgtaaggctttgtgtcttttgtttttgaatntataatacaaggatctttctttatcttgttctacgtctctacccattttcatccatttgcatggtt

SEQ ID NO: 100237 - DNA, 421 bp, Glycine max
tcgaagggaagagagagaccaatcacgaacacatagcatggtcttgaaagaggtttttgcttcttgctcaaggtccaaaagaaatttgtctcagcgtttatgcgagacagagaccaacatgttagccatcgtcagcaagtataaaaaagaactaaatatagccacggcccatgagcataaagtggtggacgagtatgcccaagtgtacgcggaaaaggaggctagaggaagggtgatcgactcgttacatcaagaggcaacaatgtggatggaccgatttgctcttaccttgaacgggagtcaagaacttccccgattgctagcccaggccaaggcaatggtggacacctactctaccctcgaggagatccacggacttctcatctattgtcagcatatgatagacttaatggcccatata

SEQ ID NO: 100238 - DNA, 388 bp, Glycine max
agcttatcaaataacattaaataataaacattttttagtgatattgcatacataattcatataaaacctgaaaaatcataaaattcttcatgcgtcttccattcatcgccttcgtcttgattgaatacattttgttactcagtcacacctcttgcaatccttaggtagtcttcggtgatagtgtatgcttctgttcctttagtcaatatccttaggttaagcaacatttctaacctttcatctattgcttggcaagcctccaaggacattaacaacaaggaaaaaattttagggttaacacaggttcatataaaatgagtaacagtgacaattgacaataaattttaccactgcatgtcgaggctgctctacatcagtaaatgcatct

SEQ ID NO: 100239 - DNA, 449 bp, Glycine max
  unsure (1)..(449): unsure at all n locations
ntntatccaaggctcatcttagtgttgaagctccttcttccttggcttattccctagtagatggcgcctcctctcacctcttctcctttgtcttccgctgcatctccatggagtaaaatcaccattgaaggacctcattgaaactcaaagatccagcctccatagaagctccacaagcaagcttccatcaagtggtatcagagcacgagagcttcaagtaggtgctccttaaacctccattaattntttgctttaccttctcttccattgttgtttcttcattttttctccacgtatctcctcacatgtcttgtgctaaatgttgttaacatgattctttagagtttccaccgattaaacttgctatagaagctagatttgattttctatggttcanatttcttgttcttgttcttgaaccatgaattgtgaagagtttaagttccttt

SEQ ID NO: 100240 - DNA, 449 bp, Glycine max
  unsure (1)..(449): unsure at all n locations
agcttctatagaagggtcgttcctaatttctctacaattgcatcacctttcaatgagctggtgaagaagaatgtggcatttacctggggtgaaaaacaagagcaagcctttgctttggtcaaagaaaagcttactaaggcacctgttctagctcttcctgacttttctaaaacttttgagctagaatgtgatgcctctggagtgggagttggagctgtattgntacaaggtgggcaccctattgcttattttagtgaaaaacttcatagtgccaccctcaactaccccacctatgataaagagctttatgccttaataagagccctccaaacttgggaacattaccttgtttccaaggaatttttcattcatagtgatcatcaatcacttaagtacattagagggcaaagcaagttaaacaagaagcatgcaaaatgggtagagtacct

SEQ ID NO: 100241 - DNA, 253 bp, Glycine max
ggaactttaacattgacacatgtactgtttccttggaacctgatatagccaggctagataactgcagtgctagacataatgcgtacggttctaactttttattatgctgtgcttatcatgctgattaaataacgctaagttcaacatgagacatatgcgagtgaaaccttactctagattagtcgaaactcaccagacatcggtggtggtatttttgtcctaagcttactacacatgattattttcaaataaa

SEQ ID NO: 100242 - DNA, 310 bp, Glycine max
agcttcttagtctcagatgattcagttgagtttgtagctacctcatgcactcctctaatgactatggcatcatttctggcgctaaactgctgagagttggaagccatcttctcaattaaatttctggcttcagcaggagtcatgtctccaagggctccaccactggcagcatctatcatacttctctccatattactgagtccttcataaaaatattggagaagaagctgctccgaaatctgatggtgagggcaactggcacatatgtttttaaaatcgctcccagtacttatacaggctcttttcactg

SEQ ID NO: 100243 - DNA, 243 bp, Glycine max
  unsure (1)..(243): unsure at all n locations
tgcttgtggggcttttatggaggctggatctttgagcttcattgangtcctctaatggggagtttccatcatggagatgcagcggaagacaaaggagaagaggtgagaggaggcgccatccattatggaataagccatggaagaaggagcttaccaagatgagccttggataagaaacttggagaggatgcttcaatggaggaaaagaaagacggagagaaagaaagaggggggagcacgaaa

SEQ ID NO: 100244 - DNA, 351 bp, Glycine max
tattatagatatgggtgactaattctgtagaagcacttgcaacactctccgaatgcatgtttggattaagcttattctggggggaataatagctctctgatagcttctgaaagagatttcgaaaaatatggctacttggtagaattgacaaacattcctcttcaagagatggtgggattattgaattttgtctaagatgtgcctccttttttggaaattacataccatgtgcattttcatcctgtggaactgaataagaaccatgttgtatgtcactttgccgagcatgattatgtttatgtgcattgacctgcaggctgaatcccttgtaaggttcagctagacatgggt

SEQ ID NO: 100245 - DNA, 472 bp, Glycine max
  unsure (1)..(472): unsure at all n locations
caagtcaccgcggctgcagctttaaggcctttgatctatgcctatacaattttatatgcatgcncatgaaaacccgtaaatacagttccactattcaaatatcatatcataccactaatacaaatgataaaaaatgcctaatggtgccttgcctcaataaaatatgcatcaggtaacatggcccggcaagtgtctcggtctcttctgtaggagatatcagactagcaacacatattaagccggcatcaactaacagtgttgccacttcttctagattaaataatttttttatcagtaaaaccaagttgatatgcatcagattttttaatacactacagctatatacaataactttgaaggattaatagattatttttcatcatggaactaatccaaatacactaatattgattagaaagttttttcatgtaataagttggccaagagtagattgcaatattgtgtacactgc

SEQ ID NO: 100246 - DNA, 261 bp, Glycine max
ggggggcaggagaccttgttgacatcacgaggggtgctattgagcaaacaagcttgaccaattccgaaccaaccccggcataaagagtcagtgagaacctgtgatgtacctaaacaagcgagctgcggctgttcacagataaaggaaccagaccaccagcaaggggcttgtgtggctgccgctggaatttgaggattatggttgggctctataatgattccacggggggtatcattacacgttaaattgatatagagctag

SEQ ID NO: 100247 - DNA, 441 bp, Glycine max
tcttagtttcagatgatgcagatgtgtttgtagctaccttatgcactcctctaatgactatggcatcatttatggcgctcaactgctgggagttggaggccatcttctcaattaaatttctggcttcagcaggagtcatgtctccaatggctccaccactggcagcatctatcatacttctctccatattactgagtccttcataaaaatattggagaagaacctattctgaaatctgatggtgggggcaactggcacatagttccttaaatctctcccagtactcatacaggctctctccactgagttgtctaatacctgagatatccttcctgatggctgtggtcctggaagcacggaaaaatctttctaataatactctcttaaggtcatcccacctcgtgatggaccttggacatctccctctactgaatgaggaaa

SEQ ID NO: 100248 - DNA, 431 bp, Glycine max
agcttcaacgaagtactggtgttatatatgaatatgcttcctgaagataacacgctaccgaagaatcattacgaggcagagaagatattatgtcctgttggaatggaataccaaaaaatacatgcttgccctaacgattgtatcttgtataggcatgagtatgctaaactgcgcaactgccctacatgtggcgtgtcacgctacaaagtgaattccaacgatgtcggtgaagatgcaaccacatacaaagatcgtccatccaaagtttgttggtatcttccagtaataccaaggtataagcgatttgtttgttatgcataatatgcgaaaaatctaacatggcatgctgatggcaggatcaaagatggatcgttccgcaatcctgatgattctcctcaatggaaaacaattgatcagctgtatccggagtt

SEQ ID NO: 100249 - DNA, 414 bp, Glycine max
  unsure (1)..(414): unsure at all n locations
tggaccattcctttttctttcaattcaaaccctactctcttgtntntaaatatagatatnnttattacatatatgtttcaaacaatccaaaccttcactatgcatcaagcacacaaaagtacgaaaatagccactgaccctttcgcagccaagtcaacaatgtagcaccggttggtcacaacgaacttgttcattaccagcgtcttccttgcaacgaccattaccatacatcagcactaaaccaagcttaaatggtacccgcgacatgtcttcaacactacaccaagcttaacctaagtaagtaagtaagtgaccaacgtaccgtggacaaagccctgatcttcacgaagtgccactccttgattcaaattaactgcgaccacggaagagtcgtcgaagttgtcgggttgaatg

SEQ ID NO: 100250 - DNA, 394 bp, Glycine max
agcttcttatccaaggctcatctcggtggtgtattcttttcttccatggcttattccctagaggatggcgcctcctctcacctattctcctttgtcttccgctgcatctccatggtagaaaatcaccattaaaggacctcattgaagctcatagatccagcctccatagaagccccacaagccagatctcatctggggtgtatcagagcacacgagctttaagtgggtgctccttaaacctccattaattttttggtttaccttctcttccattggtggttcttcatttttctccatgtatctcctcacatgtcttgggctaaatgtttttaacatgattctttagaatctccaccgattaaacttgctatataagctagatttgaatttctat

SEQ ID NO: 100251 - DNA, 242 bp, Glycine max
  unsure (1)..(242): unsure at all n locations
tcggattctanctttcgatcagggagattgaccgaacgttaactataatctcactaatcatgtttaatgaattcaccgatcgttgagtcgaatcttgttaatcattttaaataaaataactgatcatttcgttgaatctgcttatactgtaaaataaatgaaccgatcgttcatgcctaacctcgtaaataaaaataataaaataagtccatagaatttacttgaagtcttttaagagtgta

SEQ ID NO: 100252 - DNA, 433 bp, Glycine max
tgaagttaaactagacgccctggtaacctggtatcctttctagccatgaatcttaaatttgtacctgtcgcaagactctgtggtttatgctcctctggtgaccaccatacaaaccatttcccttctatgcagcaatctaaagcaattgaatagcctgaagcttatgctgcaaacatctacaatagacctcctcaacctcagcagcaaaatcagccacaacagaacaattatgacctctccagcaacaggtacaatcctgggtggaggaatcatcccaaccttagatggtcgagtccttcacaacagcagcagcaacaacaacagccttaattttagaatgttgctggcccaagcagaccatatgttccttcacccatccagcagcaacaacaaaagcagcaaccgcaacagccccagaaacaacaaacagttg

SEQ ID NO: 100253 - DNA, 341 bp, Glycine max
acgggatcaaaaaatgcgaataatgatgacccctagggtgcacactcgcaaacccccgtgggtatggcttttgaaaggggggaaaagaagtttttgaatgcaaaaacgtcccttcctttgccacttttatattttggtgcaaaggtggcttcgccaaccgagctcatcttcgccaggcgaactaacctgcactttttttttttttggggaacattaaccatgttccctcctttctcatggattagcggcttgcctaacttgaacttacttaagttagaattaggcgttgattacttatttttattttaaaacacacaatagtaaaagaaaactgcgaatac

SEQ ID NO: 100254 - DNA, 429 bp, Glycine max
tgtctcagcgtttatgcgagacagagaccaacatgttatctatcatcgccaagttccgagaagagttaggtctagccacggcccacgagcatagaatcgcggatgagtatgcccaagtatacgcggaaaaagaggctagaggaagggtgatcgactctttacaccaagaggcaaccatgtggatagatcggtttgctcttaccttgaacgggagtcaagaacttccccgattgttggccacggccaaggcgatggcagacacctactgcgcccccgaagagattcatgggcttctcggctatcgtcagcatatgatagacttaatggcccacgtaattagatatcgttgggaaacttgtatggtctctcagaccttgactagatatgactacctctttgaaataaaacgagttggtcccatgtttctac

SEQ ID NO: 100255 - DNA, 385 bp, Glycine max
  unsure (1)..(385): unsure at all n locations
agcttgtccacccactanatatacttatgtggtgtactgcatccaaggatgaatatccacggctgctaactcatattctcataaaaatagagacaatatatggtatcgagaagaatatacatgcacgatgcgcatatgtaacgttatcgcttagaacccgagggtgatttatcgaaggttatgtagagttgattaacggaccttgttcagactccaccgatatattgtcgtcaaccgagaagtatcctcgagcgagctagttacagatctcatgcactctcttaaggcaacgaagaaaaatcgtgctttattcacagtgattaagagtcgtaccaactagagagggcgtaaccaccttagttggtaatttctctctactctagga

SEQ ID NO: 100256 - DNA, 456 bp, Glycine max
  unsure (1)..(456): unsure at all n locations
agcttgttcgaggtctatgatttcacagtgcgtttcattcatgtcatgcaatcaattcagttcaaaacaagatatcaagacaaacacaccatttactgaggaaaaaattatgaaaatgctagattaaaccactgttcanatccaacaaatagtaaaataactaaataaataaagaaaattgtctgaaaaacaagataattaaatggaatcttgtcactcctcaatcctgtgctagtgtgggccatggatcccaagcccctatgctggaatgagacttttgtatattatataacttcaccccccacttttgtgtgcccctaaatcctccgcagcctctggggtgtcctcaacagcctccttatcctctaaagtgccctgtgcatcctgggccttaagagcctcacctnccccaaaaaggaaggctggactccgggtcaagccacttgcgctagatac

SEQ ID NO: 100257 - DNA, 287 bp, Glycine max
  unsure (1)..(287): unsure at all n locations
agcttgaatctcacaagctgttgatacttanttattggcccacaacttcttncacaacccaatccttggataatattccgggcccttgcaccactaaagtgggtctccataaaaaatattaaagaggatggatattcccttttgatatcttaattaaagaacaaaaactctattggacctactgngacaattgcaagacaaaaaaattctggaggcataacaacaaggatggccttaacattgcccttgctaccctcttggcaaactaccatatcatcattcttatt

SEQ ID NO: 100258 - DNA, 390 bp, Glycine max
  unsure (1)..(390): unsure at all n locations
ctgctattcttcacataaaanactgaacacatatactgttctcaccanattgttcagtagctgcatcgaaaactatggatccttacaaagctatatgttattttttcaaagtaaaaccaccagtgccaaattgctgagtcacgaccctttgctttttttcttctctagctgacaaacaacaacattgtctccaaattgcccagcattgcctacaaatttctgggataacaaattaaaactaaattaaatcagatggcctggtgtcccacaggggtggaataacaacaaccaaaccctatcatactaaagattggctacatgaatcaatataaaagggtctttaatagtttcttctaaagatctctttaatcttctctcacttcttttcat

SEQ ID NO: 100259 - DNA, 392 bp, Glycine max
  unsure (1)..(392): unsure at all n locations
agccttgagcanaatcaaacgataataacttttttctctatgtccgattgtgtcccgtagtatatcgagacgctcgaaattcagaacagaagctcttataaaaataaatcgaccataactttttacttggttgtccgattgtgtccgtagtttattcagatacttgaaattcataatagaagctttgagcgaaatcaaacgattataaccttttactcggatgtccgaatgtgtcccgtagtatattgagaccctcgaaatttaaaacagaagctctgagctaaatcaatcgacaataacattttacttggctggccgattgtctcctgttgttaatcgagatgtccgaattcagaatagaagctctgagcaaaatctaatgacaataacct

SEQ ID NO: 100260 - DNA, 172 bp, Glycine max
actctccgtaggtagtcctttcttagacaataaccaccaactctgacaccgcttgactgctctcaagaccaatgactggctcgacagaccaacatgataatttttagcatgtgttgtcctcactcccaagccactaggacactatccacaaagccacggagcctgttgctgc

SEQ ID NO: 100261 - DNA, 219 bp, Glycine max
ttgtatttctcgcaatccttcatctttctcttttcgttgttgaaaggaggcctcccaattatggaaagctaaatcctctgttggatcttccttgtaggtacttgatgtatatatgtttttatcttatttatgagtgtttgtgtgttccctgtgctatcataacttccatctatcatggctttttcttgtcacgtagatgcatgtgtttttacgatcatt

SEQ ID NO: 100262 - DNA, 259 bp, Glycine max
cctcttcagattatttgatgatgccgcgaatcatgagcaaacacgtttagaatctgatcagatctagatccagaatatcttgatcagattccagatcatgattcaagtatagaatcatgactcacgatttatgaaatcatgagaagactcgatccacatagctttaaagattttctacaaactattgaatagcacaattctgttctgagaattttcatagagaaattttttaccaaagagtttactctctggaattatt

SEQ ID NO: 100263 - DNA, 392 bp, Glycine max
  unsure (1)..(392): unsure at all n locations
cctgcagcatgcaagcttatggcatataaggccttattcaacaaatagttcctttgtctttatatatatagaaattctntacatgcagcttgcgaccaatgaatgtgaaccgttggaaaaaataatatataccattgatacacatacttccttaatgcatcaaaaaaatcacttctgtgttgatcacctttaccacaaaacttatagctttaaagccaaagaagtttgtcattatccgcgcacatttttgagatggtaatattaaactttcacatcttaaatcttatctaatcttcatatgatccaacatatcgtatgaaaaaatcatacgattctccaacatgaagaataaagaaaaaccacatgtcatcctttaatgctatatcaaaata

SEQ ID NO: 100264 - DNA, 474 bp, Glycine max
  unsure (1)..(474): unsure at all n locations
aaaactaagctgcattggaatgcgaagcccacccatctaggaatttatctgttatctttaacaaacaaatcaaacgtaacaagacaattatagttgctggttgaatacctcacccactcaagtgtatcacacaattatggcttttctctaatgaaacactcttgccttttaccactctaattccccttgagttcttacgcaattcaagagattatggccacaacagagaacaattcaccaatatgtgtaatgtaaggctagacaacgaaaaggttaaccaataccaaggctaacaatgtctttatgcacaaatgaangaaataaaattcagaatttaggaattcaagtaacaatccctcatgcaaccaatatattaccttagagagtatgtttttaaattcttcaagcctgaaccattcacgcaatattttttttttttttttaaattagatatacagaaacagcttctttttt

SEQ ID NO: 100265 - DNA, 327 bp, Glycine max
  unsure (1)..(327): unsure at all n locations
agctncagtnttcaattacgagcgcctttatattatctggatccaaaccgacanccgagtaaaagtattgtcgtttgacttttcttagagcttccgtttacaacttcgagcgtcttgatatattacagggctcaataggactttcgagttaaaacttattggcggttgatttttcttagagcttccggtttcaattacgagcgtctcgatatcctacgggacacaatccaccatccgactcaaaacttattgtcgtttgaatttgctcaaagctatagttttaattacgagcgtctcgatatattacgggaatcaatcggacatccg

SEQ ID NO: 100266 - DNA, 308 bp, Glycine max
  unsure (1)..(308): unsure at all n locations
aaattagaagttatctcttttatcttaatgagagtgattctcctatattcttgagtgattcaagaacaccctggctgtatcaaaggactttcacaacctttgtgtgttgccctcgctggagagagagattctttccttcctttcatcttcacccttggtctttcaaaccacaattccagaaaatccacctctgcccaaaattatctcgtggccataactcccgtttacgcactctaattaagtgatcttgagcctaaattgaatttcaaacgagaactnttaccttcgtttggaacacctcatttgga

SEQ ID NO: 100267 - DNA, 137 bp, Glycine max
agatatgtcgcgggggtcaggagaccttgtggacgtcacgtggtgtgctattgcccaaaaccaagcttgaccaatcccgacccaacccgggcatagtcggtcagtgagaacctgtgatgtacctaagcaggcgagct

SEQ ID NO: 100268 - DNA, 397 bp, Glycine max
  unsure (1)..(397): unsure at all n locations
agcttgcttgtgcaggttctaaggaagctggatcttcngtttcttaaggagcgcctctaatggtggcattccaccatggagatgcggcggaagacataggagaatacgtgagacgaggcgccatccattacggaataagccatggaggaatgagcttcaccgccgagatgagcctttgataagaagcttggagaggatgcttcactggaggaataacaagagggagaacaagagagaggaggctgctctttattgatggaagaaaaagggagacaagttgagcttgggggtgtgtctctcaagactctcattgctcanagttacacacaagcgttactcatgcttctatttatagactatgctactttcttgaaaagctcgttggaaaacttccttg

SEQ ID NO: 100269 - DNA, 201 bp, Glycine max
catcccacacatttgccccatcttcccacacataggtcaagtcttctatcaaccgaggaggatacacgctcttattgatgaggacatgaccaatatcaacggcaaggatccacttgaaggacttggacgacctatgaccatggctacagcaatgaaagcccaagaagctcatcacaaagagctgccatactatttgaatac

SEQ ID NO: 100270 - DNA, 377 bp, Glycine max
  unsure (1)..(377): unsure at all n locations
agcttaagctccttcaactgcacaaggctcttaatttttgtttagtatcccngaggaaccttcacccgacaaagacactgacaaaaacttatcttcttcttcttggacaaagaatggctggctgggggcaagataatttcttccatcagaacctggatgctactgggatcatatacccatatcaactagaatcttgacgggtattcaaaccattattcctcttgccttgaatgtaaggagtgttctaacacacctgcacaaacatttttcttcacatgcataacatcaatacaatgtctaacggcaagatcacaccagtaccgaagaataaaaatatggacctctttcttcatatgcgactctgactattattcttt

SEQ ID NO: 100271 - DNA, 376 bp, Glycine max
catcaacaagaatcaagccaaggctattgtgcaagcaatcaatggggccaaacacaccaaatgattatgatgatggatggctcaaattatcacataggtaaaatcatcactttcaaactgagctttcaaaactatcatgacatgtagagaagaatcaaggatttcaagtcacacaatgtcaagaactcttattttcaaacaattacccatttcttgaacatatcctataattcaaagaaaaacatgcaaagtcgtacgtgcacacaatattgacccaatatattaaactaaaaatctgacgaaactaacaactttaacaaattaacacaactaacaaattaacaatacccaccaaactagtcaaacccaagaacac

SEQ ID NO: 100272 - DNA, 382 bp, Glycine max
agcttgtaatcgattaaactgatatgagacatttctctgctagctccaaacacttgtgttagtggttacaatcagtctgtaatcgattaaaacagaagaggttttactatagaggaaattttctaactttagaacttttcttctaactccaacatgaagatgcgtgatacacatatgaaatgatagagacaaaagatgcaacacacaatacaattatcaatacaaatgtcattcaagagagttgggcatgtaaaagacaatttcttcaagctcttctttaaactttaaggctaagtcttcatgttgctttccctatctctaacatgcgatagtttcaactagtccgctaatcatcttaagatttcttcggtctggtactaca

SEQ ID NO: 100273 - DNA, 308 bp, Glycine max
  unsure (1)..(308): unsure at all n locations
tctgggggaatgtgttgctgaatttttatgttgactatttggaatctcttaagactctgtctgttgaggagcagaggaagagtcctgaaaaggccaccattatggagatagattggtagccaatgcctaaagtagttgtgcttgaatttttactacctcactctacaatnganggtaaaaagagttgagcttgatgaacttaaaaggatatagtctacaacagagcatggacctacacttatgtctctgtatgttgctaaaagataaatagagtgtcaaactggcattgttactgaagatatggagct

SEQ ID NO: 100274 - DNA, 376 bp, Glycine max
  unsure (1)..(376): unsure at all n locations
agcttctagaggagcaacatttgctctatggttttaattcccatcccaagaatatacacaccaaaatgcatcccaagaagtgcccagtcctactttcttccttctatactccccccctatattagtttgatttttattgcccacgttttattatttcacaacctcatcttatccaaacaaggccaaatagcatggcccaaatttcaatcagtgttaattttttctcttttctaaacccaccctgtgttttacctattttgtttttgaaactgggccacaagctgtctctgggtctggaattgaagccncacacaccttggggaaatgtgttttgatgggccaaaaattgtttgatgatgcacccacaccaaaaatt

SEQ ID NO: 100275 - DNA, 235 bp, Glycine max
  unsure (1)..(235): unsure at all n locations
ctctaaatgtaatgcactctaattcggaaggttgtnggttgatgcatgttcaatcatctcttctaatgtgagtgatacttaacagacaaacaccatttgataaccccccgtatttcttttgctgggaagagcaaactataaatctggggaagttgttattggtattcatgagtattaaatgcattaaaaataggagaaaaaatagcaatgtacctctaaattatggtntcttttg

SEQ ID NO: 100276 - DNA, 369 bp, Glycine max
  unsure (1)..(369): unsure at all n locations
agcttggatatgactntgtacatgcagccgatgttagttttattgttgtagncatctaaggatggacgatgatttgatttacggataagggccatgaaggaagcattgctgcctctatgaaagcttccatggcagtggaactcatccacaaatctcctgaattcaggtctcagaatcttccaaaaagccttattaaagttgaaattaaaaccatcgggacccgggcatctatcaccaccacaactcccaacagcatctttaatctcttgatacaaaaaggggcaatgagtccctctctctgattctgatccatggagtggaagaaaaccccatcaagggtgggtctgaaactcttatcttcagaaaatc

SEQ ID NO: 100277 - DNA, 311 bp, Glycine max
  unsure (1)..(311): unsure at all n locations
atcatttttttcttcgncattgaggtgccacttgaactgccaggtctcttcacctttgggcgtattctatgaaagatctgtgcccttttttgcacatgttttgttgttgcatcctatccggaaccatatcaaaattgtactgatacttcctaacgaaggcaaccattatgtccttccaagagtggactcgagaaggtccagattagtgtccatgtaacagctaccccagtaagactttcttggaaggaatgtatcagcaattcctcatcttttgcgtatgtccccattntncgacaatacatctttagatg

SEQ ID NO: 100278 - DNA, 64 bp, Glycine max
agaaaaaaaccacacagccggcaacaagcagacacgcccgaaaaaagaaaagagtggggggaaa

SEQ ID NO: 100279 - DNA, 441 bp, Glycine max
  unsure (1)..(441): unsure at all n locations
agcttctagccaaatggacttacctngaattaatttctttgtatagccctttgagccttgnttccctttccttgttttgaagctcactacaagccttaagtgaaaaaccatgatattaccatatccttaaggaattttggagctttggaattgttttgggaataagtgtggggggtttttgtttcattggacaacttgttttgttggtatgcttcatgatgattttggcctacttatgacattgatattggtaaatgttggacatgctgaataaaatgttgtttctcaaaggctaaagagtaaaaaaaaaaaaaaaaaaatcgaaaaaaaaaatcgaaaaaagaataagaaaagcaataaagttgagtgaataagatcttaaatggcacaagaatgatgaaactcttggntctactcttcatggttaaattttatctttac

SEQ ID NO: 100280 - DNA, 478 bp, Glycine max
  unsure (1)..(478): unsure at all n locations
ctacaatctccctttttgatggatgacaccctgattatctataaacacatacacattctttttcttagtcgatcactcacttaattctccatattctccccctttatttttgagtttaagcttcacttgaaattaagttatttagttatgtgaattcttgatttaattccctattttctctcccctttggcatcaacaaaaagccaaagtgcgtaaccaatataaaacatacataaatgactaatcatacacaagacattcattaaaaaatctaaaccaatcatgaagcanaaacatgaataacccaaattaatatataaaccacatagtcatataacataattcacaaaaattcagtcatactatggaaatattaaaagaaataataaatgttcaaatgtcataacaatatagccaaatacacggctagaaatcanagtactaataatactaaatatttatanagtctaagatgatg

SEQ ID NO: 100281 - DNA, 429 bp, Glycine max
  unsure (1)..(429): unsure at all n locations
agcntttgaatgaaacaatgtgactcttcacatttattatttgaatnncaacattcaagggcactggtaatcgattaccaaaacattgtaatcgattacagcctttttgaaaatatttggaacgttgtaaattcagtttgaaaacattttcaaactcattttgctactggtaatcaattacaacaatatggtaatcgattaccagagagtaaaaactctttggtaaaggttttgtcaaaaactcatgtgctattcaaagttttgaaaaactntttaatacttatcttgattgagtcttttcttcattcttgaatcttgagtcttgaatcttgatcttgattcttgagatcttgaatcttgattcttgtttgaggctttcttcttgagccttgaattcttcttgattcttgaactctctgacttgttcta

SEQ ID NO: 100282 - DNA, 363 bp, Glycine max
  unsure (1)..(363): unsure at all n locations
taaagtatgcccgagtcattcatncctatgagatgtttgtgtattattggctatcagaattgccattccttggagtacggcggtgaaccaagctcatgctttttacaaaatgttattcaagtcaagttgaaatatggaagtacccgctttgcaaaattggggcacaagatgaatcgagtcacatcactgcttcgtttactggccaacatatttaggattggttatgtccttgttacttccagtttcaccttgacaaagatgtcatggaccatgttgaaaatctaaattgattcaaccccatatcctgcgtaaaaattcgcaatacttcaactgtacatcattcgcatacatacatgcctttca

SEQ ID NO: 100283 - DNA, 403 bp, Glycine max
  unsure (1)..(403): unsure at all n locations
agcttcattctacacctgaaaagaggattatatatttgctcaaaagagaaagcttcctaacaaaattnttcatgcaggtgaaccttcttctagtaattctgacttacagtagcctcctatccctcttccattcccacctagagcaattccaaacaaaaagatggaagaagcgaaaaaggagatcttggagaccttcagaaaagtagaggtgaacatacctctgctggatgccatcaagcagattccaagatatgccaagtttctaaaggagttttgcacccacaaaaggaagctcaaaggcaatgaaaggattagcatgggtagaaatgtgtcagcactgataggtaaatctgttcctcacattctngagaaatggtaggacccangtactttctgtatacct

SEQ ID NO: 100284 - DNA, 479 bp, Glycine max
  unsure (1)..(479): unsure at all n locations
tattggattatggggcacccgtcttatgtggtactatttggttatcgggcgatggtgcaaaccaactctcccactttcacaaatcaaacataaacacgccatccccagttgcacaccttttaattgagctcacgcactcctacgtagcccttatactcgttcctctcaacaccgggtccccatcaacccctccaagctgtctcaatatccaaacaattcgatctcatttatcatgaaactaccctaaaccaagaaaacagagtataggcagaaaactctgcccaaaactaatccaaataccacagttttccctactcaaataccccagtaaaattctcttcgttccggttcgttaaccattggatcgccttgaaaattntactggagggttttggtacataaatctacattttgaaccgtgggatcttgctaaacatgcctggaacccgagatgtactactcnttccatgacaagcaat

SEQ ID NO: 100285 - DNA, 355 bp, Glycine max
  unsure (1)..(355): unsure at all n locations
ctgcagcttcacaaatccaacatanaattttctttccattttaagggcagaggcaaaaaacttattcaaacacattccaaacccagcttccctgtcaaaaccccagtaacattctgtttgtctattcgctaccgtggatcgatccaaatttactggagtcctagacataagtctacttgtgccgtgggatctgctgaatagtcacacccatatgtctaccttccataccagcaatgccaacatttctgcacatacaaaatttgtgccatttacagcatttctgatacaggcaatttcaaacctctgcctcatcatttgctcaaatgaccacagcctaatatgttaaactattaac

SEQ ID NO: 100286 - DNA, 272 bp, Glycine max
  unsure (1)..(272): unsure at all n locations
taagcattgttggattatgagaaccattgtctaatgcctacccacttgtgagtgtaattattcttatccacttgatttccggattaaaccttgctagtttttgtttgcacacccaanatcagatcatattatgaacgatacagaaccaagcgtgctgaccataatctgaaatatatacccaggctgagatccgccgaaccctacttcatacgattaaagcacacttgttggagggtcaagacgatccaaataatctgctgagcctcacttgg

SEQ ID NO: 100287 - DNA, 402 bp, Glycine max
  unsure (1)..(402): unsure at all n locations
agctngtattcttaggaatacactggactatacttacttctcggctatcagaaatggggtagatgattccaacttgcaagagcttggtcacctcctttttcaccacatctagaatgatggggttaagtcgtcgttgtggctgcctcactggcttagctccatcctctaaaagtatcctatgcatgcaggtagatgggctaatactaggaatgtttgctaaagtccatccaatagctttcttgtgcttctggagcactaacaacaacttctcctcttgctcggcagtaagggaggcagagatgatcactggaaattttttcttgtcctccaagtaagcatacttgaggttngctggtaagggcttcaactctgatgtgggttggggctgaatagtgggaggaa

SEQ ID NO: 100288 - DNA, 326 bp, Glycine max
tatcgcaagggtttgtggtttgtgctcctctgctgaccaccatacatacctttgcccttccatgcagcaacctggagcaattgagcagcctgaagcttatgctgcaaatatttacaatagacctcctcaacttcagcagcaaaatcaaccacaccaaagcatttatgacctctccagcaatagatacaaccctggatggaggaatcaccctaacctcagatggtccagcccttagcaacaacaacagcagcctgctccttctttcaaaatgctgctggcccaagcagaccatacattcctccaccaatccaacaacagcaacaacc

SEQ ID NO: 100289 - DNA, 437 bp, Glycine max
  unsure (1)..(437): unsure at all n locations
gtcacctgangctgcagcttgagttggttagttatctttatacttttctattcttgaactngagtcaaacttaactgtgatattatatccttaatattgtttttctttttgaattctttctctattttttaaggggtacaaattaatatcccatgactgggattagggatacaaattatagaaaacttgagacaaaagcttcccgttgctaccagtgcaggtgcatcccttatcctaagcagtaagcaggtgatgagttttttttttttttttagttgttggtcatgcatacaaacagggaaagagattagcaatgaaatcattaaattatcctaagctagaccacttgggctaattaattctagagtttaatttctttatattattataagtgtaaacaaaatttatactatcatttaataaaaaatataataaat

SEQ ID NO: 100290 - DNA, 356 bp, Glycine max
  unsure (1)..(356): unsure at all n locations
ctatngatgaatgcaactaaagtggtctaatataatatctttaccataaactaaataaggaaaaataatcattgaaaaaattatttgccaccttccatgttctcaagctcaaacatgcaaaattatagtttgtaggtttgtactagcaaagcatctccttgagaagggaatatgaacttatgctccactaataatgttgagctagatggacctaaaagggataaatgaggaataaagacagtatataagaaactaaaatgagttggcatgcagcaaacaccggctaagtccaatcaatgcttaaaaagtgctagtttggattactagcaaatgaaattacacaccgncacatgtta

SEQ ID NO: 100291 - DNA, 438 bp, Glycine max
  unsure (1)..(438): unsure at all n locations
gcaagctngaatgagttctgatagtactagacattactttctttctgtgttttntaacacacaatttaagtaatagtgataaaaaaaatagtactgaagtattcttaaaatggtattcaaaggaagcacataactgtatcaacaatgacatatcatctttcttttaacaacttttcttattgtcttattctcaaaaccctatctgtttctgcccccttatttatgtntctgatcttatagtcataaatatcactctttnttcttatggaagcaatgaaagggaagtggctatgccatcttttaaccctcaaggaggtatgctttctatctctcttatttttggttttcacttttcttcagtggaaagcacggagttcttaataacatacataaacacacatgtgatcaatagtacatacatatctttaataaaagttt

SEQ ID NO: 100292 - DNA, 291 bp, Glycine max
gctgccgcggcccaccgcgtccttccctctcttgctatcgtttctcccggcgcgcttccttgttctcgcccacgctgcaagaactgtgtccgcgtaagaacttcacctcattcgggtacccccgcgttctcagtattccctcccccgacttggagaatcagccgtgagccaggggacccccggagtcgcccatcccatccccgaactacgcttattgttacttcatgtttgcaggtgtgcaatcactaccatgtatcatcttgttttagagccatagtaatgaaaaaaagt

SEQ ID NO: 100293 - DNA, 431 bp, Glycine max
  unsure (1)..(431): unsure at all n locations
ttaagtcacctgcggcatgcaagcttcttncgganacattccggaagaagctctttcggttgttgttattctactaaggcgtatgtaatgacgactttgcccttgtgtaaatatctttaaattaacgccttcagactgtgtttactgcgcttctttctttttcttcagctgtgattactgcgctttctatctttcttcttccgcttggcttgtttctctctccgcctgctttgaatcttcttccgtttgctgttgcttctgcggtggtcccttcacattctgtggtggtcccggaaatgaaatatttgatattggtggtctcggttccgtattgaagattataatggctgtgtcctatttgcggacgacgccttattcgtttccggttactttatagaaaaaaacagtaaaatgttccggataatttttgc

SEQ ID NO: 100294 - DNA, 391 bp, Glycine max
  unsure (1)..(391): unsure at all n locations
tactaagctttatatggaactaagacattacttcaaatatcttgttttttgattgtaagcatgacaaagaacatgtgtaactgctaatatatctctcacaagatgtnacaaaaaaaaaaaactcaaaagatgtgagaatatcataagcactgttagcattaccacggagggaataattaccatcttcagtagcattttgaagaacttcacaagtagcatcaaacatgcataatatgctccgaacaaaatttaagtgagatccccatcgagtatctgtagttctttgtaatgttccaatatgatttaatccattacttgtttcaatatcatcacttagcaatcaaattgctattattgtcgcatgtgcaacttgcaattggtcatgtcactt

SEQ ID NO: 100295 - DNA, 317 bp, Glycine max
  unsure (1)..(317): unsure at all n locations
agcttgtaggattatggngtacccatcacatgtgttactatgtggttgtcgggcgacgatgcacaacaagttttccacatccacaatgcgcgcatanacccaccatcctcttgtgcccaacctcaactgagctcacgtacctcccacgtagcccattattctcgtttctcccaacacccggttccccatcaatcttccaaactttcccaaacattaaagaaatacaactattcaacagcacaagcttttacaagccaagcaaaaaagggcaaaggcagaaaactttgcccaaaacaccaaccaaattacagtttttt

SEQ ID NO: 100296 - DNA, 349 bp, Glycine max
cgattctaattatgtgggccattatatatatcatatgctgacaatagccgagaagcccgtgaatctcatctggggtggagtaggtgtctgccatcgccttggccttggctaacaagaggggaagttcttgactcccgttcaaggtaagagcaaaccggttcataccacatggtgcctctttgtggtaagagtctacaccctctctctagccttttattcgatatacttgagctactctacgcgatctatgctctgggccgggtagaccaactctcttggtcttgcgagatactaccagttggctcctctccataatctgaacaactctttggactgacagcaatactcc

SEQ ID NO: 100297 - DNA, 427 bp, Glycine max
  unsure (1)..(427): unsure at all n locations
agctttgaggaagaaagaagaatngaatcgattgattgcgttgaggaacaacatgattgatgataaaaaaagggaaaatatcttggtcatagagatcataatgatgtcgttgctgctttttattgtcattgtccagtgacaagattttcacgttaatttgattatcgggggtgaatagatttttttatttgaagtatttgtgatgaaagtaagttggattgtctattatctttttttttgtcctggtttcttgaatgaatattgggtttatggcaaatttggtttcaagaacttgattttttttctaatatgttgtgttttgctttatgatattctagtaattacccaaacacataaaatgaatgtgctttgatgcttttttccttttataatacaaagatttggatagtcttgtaaaggttgttag

SEQ ID NO: 100298 - DNA, 288 bp, Glycine max
  unsure (1)..(288): unsure at all n locations
atcctcagagtcacctgcngcatcaagcttgattgcactgggggctatgttgaatcattttaaatcagncacnaatnaccactgtttgggaatcatgttggagtaatgcatgtaactatttttggtttctcacagctnttggagagcaagataccagaggcatagtcaaagaaagataccctcacagcaagagctcaatctgcaaagattggctttaacctaattttcattctttaaaaaaatgtttgggctttacccttgttctttactaactattctttttttttt

SEQ ID NO: 100299 - DNA, 461 bp, Glycine max
  unsure (1)..(461): unsure at all n locations
cacatgcacatttatgattctntgttccaaacattcatacaaagtagttccattcaaccttatgtcagacataataagcttaattttgtaccacatgtgctaagtaactcacggtcaanataccattcaggctcattcttgcccccacatatgctaagccacctatctcaatgacatttaaccacaactcatcacagcatggtggttttcgctccacatgaacttgactacatataaattttttcaaaacattattatgacatcacttgattcaccatgtacacacaaatatcatacattacaattcacactctagagataaaacaaaaattcaatgattccacaacactcacanatcactattcaagtataacatcaacacatgtattcaatatcatcattcaatcaactcatgtacatgttaactctatgatatacatcaaaatatagcatctacctac

SEQ ID NO: 100300 - DNA, 428 bp, Glycine max
  unsure (1)..(428): unsure at all n locations
agcttngatgatatgtgtcttcaccgacttattgattattttgggtctaaaaagaggcaaatctgatcatcatgcttngataaatgcaaacaaaaaaaaaaaaaaactaaggcaaatgaagagggtgagaatgagggagaagcccatgctgtgactgccattcctatacagccaagtttcccaccaacccaacaatgtcattactcagccaataaacaaaccttctccttacccaccgcccaattatcgacaaaggccatccctaaatcaaccacaaagtatgtctaccacacttccaatgacgagcatcacctttagcacaatccaaaaacacccgccaagaaatgagtgttgcagcgaaaaaaaacctgtagaattcacccaaactccggtgtcctatgttgacttgctcccatgtccactcgata

SEQ ID NO: 100301 - DNA, 383 bp, Glycine max
  unsure (1)..(383): unsure at all n locations
agcttccatacactccttcttgctaccttgttctactcccacgccaccaagnnctccttgcttcataaccccttcgtcttctcctctatgctctgcctccccttcacccaccaactctttctctaaacctcattgcggcaccaaaatgtcgtcatttggaacaccatcatttgccttcatgcacacagcaacaacctccatcaaagccctcaactctttcactcgctcgacacttaccttattgattccaccttaaccccattatcttcgccttgcctgccccaccccttcattacatttccttctctgcaaacgctacccctaacctatagtgcgctaatacctctttggcttgctcttgctgcgcgacctcccgtttaatt

SEQ ID NO: 100302 - DNA, 434 bp, Glycine max
ataaaactcagctgatcctgaatctgattctgaataatacttcttcttgtatcttgaagtggtcttcaaaaatgcctcttgagtcttgaatagttcttgattccttcttgaacatcttgaagatatcctttgattgacctttgagctgtttgtcatcacctttgtcatcgccttttggtatcatctttgatatcatcaaaacatctttgaatcattcttgattcaccatgaagctgtgcttctacagtttcagacaaacgaatcgcataactcatacgacaatgtgctagaagcaatagaattactcacaatgagataacagataactgaatacaaatactacgttcagttttatcacaatagaaataacaaaaataacatgcagctataatgtcaagttcagttctatcacaatggcaataacaaaataactg

SEQ ID NO: 100303 - DNA, 372 bp, Glycine max
  unsure (1)..(372): unsure at all n locations
atcactctcttggctcaatcctagctttacaataccttgaccaaatttcaggattggtccacccctcacagattttgaagctctctcttgtgatttaaccttntcgtgagccttctcatcccaccatcaagataccttatctgttatcccaaaaccttgtgagtcacccaagattactttggcgactttccttatctctttatccatgtcatcccacatgaggtgagcattttcttgtaattactaagtactttcctcaactaaatatgctaaaagccaaaagttgtttcctcaaagccacacttgatcgcggttgagactgtggttttcttaattctcttgattgacatagaaccatatcaatgtgtgtgc

SEQ ID NO: 100304 - DNA, 309 bp, Glycine max
  unsure (1)..(309): unsure at all n locations
agctttcaaccgagcttcgaagttcctcattactttttttatcggntcccgagcgtcaacgggtgagtaccttgaaccaagcttttcgattcatactatgatcccgctgtggtccacatagtgtgtcgagcatttttattctcgttgtgctaactttttatacccccctgttgacgagcttaagccatgttacttaaattatttttcgcttaacgtaaaaatataataaatttccaccgaacgtgggaattgactattacattatcttctggtaaaatacatatcgaccgttcggtcgtgccgtaacca

SEQ ID NO: 100305 - DNA, 471 bp, Glycine max
aaaaccagctggcccactagagaccaaccgttccaattatcttgacatggacaaacagactgcgagaactggctagctacgcacttccaaggacatggaatgataaatacctagaggtctacttcagcataacctcgagtgcgaacccacatggcggacctctttttcctactcaggggtggtgtcccaaatatagaaaaacctaggttttggctagatgggtgttaactaggcacatcttgcgataacacaggggcatttgtacttaaactcatacatctgatagaactctacaccccgtccttctcataaatctcttaccaagacaatgcatattcgaactccaacggtcttgatacacaggacccccttgggaggctcctctaccgtaagcatggacatgccgcccaacagtgacagaggactgacccctctatactccatcctatcacccaacaggaaatgtaaccc

SEQ ID NO: 100306 - DNA, 343 bp, Glycine max
  unsure (1)..(343): unsure at all n locations
acctctaagcgactgcagcatgcagcacanccaaaacatacgagggacgcaattctgtgttatattacagcagtgctggccttttaattacatgcccgtggtgaccacaagtaggacgcagatcaaacaaaattcactaacctggctaaatgtcccaatttgcttctaaaaatcaaacatcatttgattaccacgatattcagatcgctttattaatatatagctgcatacaaacagtgaactttacaatgctatatccccgctacccaaaatgtataaacatccctcccattaaaaaaacttttttttcacatctttctcatgactatgaaagttcccagga

SEQ ID NO: 100307 - DNA, 474 bp, Glycine max
ctcagcttacgctttgattcccttggtgtgacagcctctttcatctgtttttcttgctaatggcttatatgctagcagggtttaagtcttttttcctggtttatattcaagaatatttggctttaccatctttaatttttgtttatctgtattctactgattcagtaaaaaacgttgtggagatcaaggctgaggacgatggagatctatatgacataatcctgcactatctgttccatggtcacctgtgttaagtttaacagtaaagctgcataggatctaattcaacacaatcgaaattataaaattgtaatgctctgttcgtctcagagagatggaacacatctgaagcatgtagcttacatatttgagatctcaatattcaagtcaagctacgctctttagtcccaattatttttaaatatgactgattttcagataagttgaactgtgaagaccaagtgggtctagctc

SEQ ID NO: 100308 - DNA, 231 bp, Glycine max
  unsure (1)..(231): unsure at all n locations
tacatttgctgcccaagtttcatggtcttggaggtgaaaatcctcataaacatcctaaggggttccctattggttggtccaccatgaagccccttgacgtccaagaagaacatatctttctaaaggctttttcttattctttggaggaaatgggcaaagaatggctatactaccttgctcccaagtccattntaagctgggatgaacttaagagggtgtggagaaattttt

SEQ ID NO: 100309 - DNA, 442 bp, Glycine max
  unsure (1)..(442): unsure at all n locations
gctttatagcgcgggtctgggagacaaaggtcaagtgttcgcgatatcttatatgatgttccgaatactttggatttggtacgaccatgccctcctgatttccagctgggaaattggcgagtggaggaacgccccggcatttacgcaacgagcataatgtaaacctttacggttttaaaagctctatagttgggcctaggctttagagtttttccttttgtaaggctttgtgtcttttgtttttgaatttataatacaaggatctttcttcatctgttcctggtctctacccattctcattcatttgcatgtttacttctttttctgaaacggcagatctgatgacgagtcctccgaaggtactaatacctgngacccgcctatcgactttgagcaagaaatgaatcatacggaagatgaaggaaatgaggatgtgggactt

SEQ ID NO: 100310 - DNA, 395 bp, Glycine max
  unsure (1)..(395): unsure at all n locations
ccgcagcatgcagctctccccaatttctatatatgggggagttgtttttgtatatggttcaccccttggcacttctctctctttcgaatttgcttggaaaaattgtttccgcgaagaaaatccaagccaaggcgctttctaaacgtttccgtgaggaatttctcgaactttcgaccgttcttccacattcttcattcgatcttcatcggtcttcgatcttcaacgggtaagtacctccaaccatgcttttcgaatcatnctatgtacccgaggtggtccacattgtgtttccgagactatttattctcatttcatttactttatatacccccttttgacgtgcttaagccattttatttaagtcattttctcgcttaacctaaaaattaaaaaaa

SEQ ID NO: 100311 - DNA, 338 bp, Glycine max
  unsure (1)..(338): unsure at all n locations
gaaaaccttattcaacctttcaagttagtgagaaggataaactaatacatacgtgaacttgtaaaactaaatccttaattgaaagcgtaggtgacaaccatagtgaattactaaacaagattggtagtttacttaaggtcattccagatacccccaagcctcggaaaatacttccaaaatggtaacaagaagtacctccaaattagttaatgttattaatgaagatagtgaccaaaactcagataacacaactgagataggatcagtgtcagaacagaatataaatccaattaattccatacactgganaacatacttctaaatatattatcaacgtc

SEQ ID NO: 100312 - DNA, 249 bp, Glycine max
  unsure (1)..(249): unsure at all n locations
agctnttaccaaagagnttttactctctgataattgatttccagtttactggaatcgattaccagtagcaaaattttgtttcaaaagctctcaaactgaatntacaatgttccaattaatttcaaaatggtgtaatcgattacaagaattaggtaatcgattaccagtgtgtcgcaacgtgcccttttatgggcgagcgaaggcgaggctcacgggtgcgctttccaaaggaggaaagatgcccggagt

SEQ ID NO: 100313 - DNA, 311 bp, Glycine max
  unsure (1)..(311): unsure at all n locations
gaagcttctcaaggaagttttctcaagaaagcttctcaaggaagctacctagtctataaatagaagcatgtgtaacactntgtgtaactttgatgaatgaaagtcttatgagacacacttcaaagttctacttctccccctcttttattccttcaatttcgtgctcccccctctctctttctctccctctttcttttcctccattgaagcatccttccaagcttcttatccaaggctcatcttggtggtgaagctccttcttccatggcttattccctagtggatggcgcctcccttctcctcttctcctt

SEQ ID NO: 100314 - DNA, 430 bp, Glycine max
  unsure (1)..(430): unsure at all n locations
agcctgaagtagagtatgaaaaagccccgnnattacatgcccaacttctttgacnaacatttgcattaattgttggattgtgtgttgcatctcaatttctatcatttcataatgtgcatcatgcatcatcatggacgaactatgagatcaagttttgaaagttagaaaaatatctctagtagtttcaaactcttctgcttcaaacaaattacaggctcgaacgaaatttgattactccaatcgcttgaagctaacaaagaagtgtattgtattggtttaatccattacaagctcattggaatcgaatacacacattcttttgaaacaaatgatgattgtttacgaagtcctactctaatggataccacgtgatatcacttgatacaccaaggaagctcggggaggattgcatcattacttcttcttaaaa

SEQ ID NO: 100315 - DNA, 464 bp, Glycine max
tgcccttctcagtcgcaatgttctccaccatgccaactatgttcttattctccacttgttagttcttgcagcgtctgaacaattcatcaccatccaacctggtgcgcagcaactagttcaacataacaccaactttggaagacagtacgtggtttgaccttatggcctcacgaaaggcgatgatggcgttagctaccttacagcactgtactctccaaatagtgcgagcaatagccctccatttggtgacctctgcctccaaggatgccaccttgtgcaaaacctcttggtgccgttggtcattctccttcagaatcacgaaacttctctggagaaagactatggtataatctgtagtgctctacaccccagctgacctaatatagttcttatcacaaactaacacaaagccaactggggcattctgctttgcttgtaagtgcatccatatgagtcatatacta

SEQ ID NO: 100316 - DNA, 383 bp, Glycine max
ctgtggaatagtcccacctcattaccactgtgaaacaacttgtaagaatattattggattgactcctctgaattcctcattgaatccaaaactagcacgctttgaattcataaatctccaacacaggcctacgttaagtatcccaacctgctctaggggtttgagtcatgattatgggaaaattgattcttgagacacaagccaagagacacgtgtctgctctcgccttcatgaattgtgcctgttatgagtctttatttgggccacggagaaatattctacaatggaggaacgttataatcttcgtgcatgacttaccaaatatctacataacctgtatgtaggagtacattccagcaaccaagatgtcgtagctttctcat

SEQ ID NO: 100317 - DNA, 360 bp, Glycine max
ccatcttaacattccttttagcacacagagactacataatgaaggcttataagatcatacacacatcgatattggtctccaaaatatcttgtgtcagttgccctttgagctcactagccttaagtacatttccctctaatgaatggtggaagattcctatagatgaatggaatttatccatcaaggaggccttactacctataatatgctccaattacaaacagtttagagttatgaagcaatccccagcatcctctacaagtatagaagagcggagaaatattaataagtcgagagaatgtcacaagatatgttaattcaaaggtatgcacgaaaacaatatatttgacagaactcaga

SEQ ID NO: 100318 - DNA, 319 bp, Glycine max
agctttgtatcctttatataagctaatgttgcttttcttaagggagagcaaaatcatttgtccctcatcccttgagctaaggttttggagttgagttatgtctctcacattatacgttagagccctagccgccttctttggctttcgcacataagccctagcgccattcaaccccctttctttgtctttctccatcaacatggtctcacttcaaactctatcctatcacacctgcttttgttgtcttccaacttaaaaaatcatatcccaatccttccttgagaagaataaatatccaatacgtgacatgggactgaac

SEQ ID NO: 100319 - DNA, 318 bp, Glycine max
gctttataactatagacagagggttataatatgtgtgcgttagcaactggcccgtgatctacccacactaactcataattgagtcatatgatgatacaaagacccgcactcagaatcaacaaaacaaggttttgatattaaaagcttatacaatagatttcgtgatctggttataggagttcgttctctttggtagtttagacaaggatctgtttctttttgtatacatactgtcttcggatttcattcgcttgtgggtatcctttatggtaatgcaatgtgtagcttttacaacaaaacaaacaaacaaggttttga

SEQ ID NO: 100320 - DNA, 76 bp, Glycine max
agcttgttaaagaacttagaaaaaatcaagaacatgcttgttctcacatcgttcgcgtggatgatatccactccac

SEQ ID NO: 100321 - DNA, 470 bp, Glycine max
  unsure (1)..(470): unsure at all n locations
tctagccaaatggacatagcttgaattaattccttttatagtttcttttgagccttgntaccctttccttgttttgaagctcaatacaagtcttaaatgaaaaaccatgatatcaccatatccttaaggaattttggagctctggaattgttttgggaataagtgtgggggtttttgtttcattggataatatgtttgttggctttgctttatgatttatttttgggccatacttgatgtacattatatattggttaaatgttggacatgctgaatgaaatgttgtttctcaaatgtttcttgtttctaaaatgtttcttgtttcttaaaaaaaatataaaaaaatcgaaaagaaaaagaaaagcataaagttgagtgaataagatcttaatgacaaagaatgatgagactctcgctctactcttatgttaaaatttatcttacttcttctatttcttatttttcttaat

SEQ ID NO: 100322 - DNA, 427 bp, Glycine max
gcttcataagggaatatagcttattatctttaactaggggctccttaaacctccattaattttcagctttaccttctcctccattattatatcttcatttttctccatgtatctcctcacatgtcttgtgctgaatgttgttaacatgattttttagaatttccaccgattaaacttgctatagaagctagatttgattttctatggctcaaatttcttgttcttgttcttaaaccatgaattgtgttgagtttaggctcctttgagttttgtattgctattttttgtggctgaaacctgaaccataaaattcttacaaaaacattaaagtagaagaaaacctcaaaaatctagagtgacatgttcacctattgtagttttgtcatagaagtgttgctagtcttgaacttgtcacataaatcctatg

SEQ ID NO: 100323 - DNA, 481 bp, Glycine max
  unsure (1)..(481): unsure at all n locations
tgccgctggagctgacccaataactgccctaactcttttattcttggtggccctaggctcttgaccttgacttgatagaacctcttttaagtgaaggcatttgacttgatcccatgttttactaaagtgaacaaaaataggtgcgaattaaaactccgacatctatcatgggtggaatggatgaatgcatgaagaaatgcatataacacagatgcaatntatgaatacgggagcccgagaaattgtctccttcttagatacaacgtcttggggtagcaaagtgcccgacatatgtatntaagaaggtggcacggaccctccgttggtttgacaaagagaggggatcacaacagaatccgtgcgtgatgcatatgcgaaaggcgcaacacangaatgtacaatatgacaatattcacaaaatataagcaaaagggtacatgacagttatgcatggcagtgtgaaaaatggacacagcgtgtc

SEQ ID NO: 100324 - DNA, 395 bp, Glycine max
  unsure (1)..(395): unsure at all n locations
tncaaccagataactcttcattcatctgtgcttgagcctncttatcgagctcctcataacgggtcagatcccttctaactgtcctcaggaagatcacaagaacaatactatctagaaaagtgatcaccatgagcgaattaaggatagagaaccaatgcactctagctccctccatctntaagtaagcatcccatctagacggccacttgatgtcactctcctcaaaggtgatctcataagtgaaaacaacaggctggccctccttgataggcattgacacagtggccggatcacatcggatagatgacgggtacttgtcatacatcttcaagttttttgcagaatcagcattatgcataatactacaaggaatcacctcaaacccaacaaccatg

SEQ ID NO: 100325 - DNA, 312 bp, Glycine max
atcgagagaaatcagacacctttgaagattcaagagttggtcttgacttcaagagaaaagactgggcatcagagaatatgagtgaccatggccgagagttcgaaaacagcaagtttactgaattctgcacatctgaaggcatcacttatgagttctttgagccatccacccaacaaaatggatagttgaaggaaaacaggctttgcagagctgctaggcatgcttatgcaagaactacctatatcttggctgagcctgaccagctgcttatcacacgagcacctcaagaggactcacccctgatgaattgaa

SEQ ID NO: 100326 - DNA, 321 bp, Glycine max
agaatgcccatcctaccctaatatatataatagaagagagcgacactttctatcaaagaaaaggaaatggaaatttcaatccagatgatacgaaaggagagaagaaattcctatctagaaaaataaagaaggaaattccaatcaagaggggagaagcaatagaaagaaaaaaattccgatcgaaaagggagaagaaaagagagtaaatacacatagttctgtccaaaactacaaaaagtgcaaagatcgttgccaatgatactgacatacgaatgctcaatgaacaaaagaaagagctgactaagtgtctctccttataca

SEQ ID NO: 100327 - DNA, 319 bp, Glycine max
  unsure (1)..(319): unsure at all n locations
tgattagacctatgactccgctggtaggatggaaaatattaatngtacatgcttttgcttgtataactgaatatcaaggntatatcaaaatccatgtgaaaagtgattttctcaaatgatacattgaagaagagatatatgtggagcaacctccacgttttgtagactatgatcatcctaatcatgtttacaagttgaaaaaggcactatatgcgataacacaagcacctacatcttggttgaaagattgtgcaantcattacccgacaatctttcgatgaggtcgagtgacaaacattgttatcaaaagaacaacaat

SEQ ID NO: 100328 - DNA, 348 bp, Glycine max
tgctttacctttctttttattggtgattcctcattcctctccatatattattctcacatgtcctgggctaaaagctcttaacatagatactttagagttttcactgactaaacttgctatagaagctagatatgattttctatgggttaaacttcatgttcttgtccttgaaccataaatcgtgttgaagttaagttccatctgagatcgtctagatatttatgcggctgaaacccatacctaaaatcttacaaaatattaaagtacaaaaaaccttacatattagagtgactgttacctattgttattgcataaagcatgtctatctgaacttgccatagattctat

SEQ ID NO: 100329 - DNA, 365 bp, Glycine max
agcttctgataaaaaccgagcagctctttaagtattgtattatgaatacccttacgcttcgcagatatataaggtgacattttaagattccattttctagtacccgggccaaaatgaactcctgcttccatcatctcttccaagattatgtgccaatatctttttgtcatatatatttatccccacacttttctttcatttcaaaatccaaattctataaatttttgaaatgaaagaagagacccggtttctggaataaaaaaagtggtcaaaggaacctctctttaccgaagatggccttgataatatcgggccattttctattaatattaaatgatatctcttatatcttctttataacaaaa

SEQ ID NO: 100330 - DNA, 134 bp, Glycine max
taccattgattttcagtattctttcttcgtacaggcgttaaaaacaatatggagtctccacggataaaaaaaattcaaggctcttgcacataaccccccccccccttaattattgttctttctaaacccccccc

SEQ ID NO: 100331 - DNA, 430 bp, Glycine max
  unsure (1)..(430): unsure at all n locations
agcttataaaaaaagactcgcatggcatataacgttttgtcctaaaaagattaatnttcgagaccacataaatttcctgaagaggagatcctactcatgcccagtagaatgcctatgatcaacaaagatctccctccctccaaataggtaaccgtatgatatgggactcaaatctgacactactaatgcaaacacgacgcttcggtggtaatntaaactaatntgactgaaatacccacctatattcctacggttaatggctactatacgaccatgaccatttccagagaagactattaaattaaaaatgacagctggaactatttgcatggacaacaacatacgcgtaatccactaaataaggccagtgcatggaggtggattccaggacatcatccgacacggttaacaaccgaagttcaaaaaattt

SEQ ID NO: 100332 - DNA, 218 bp, Glycine max
caccaaatgaatgaatctgtcccagacgagtttcctgttcataacccccagagacctctgaacaaaagaccacctacccacaggcgcaatattaagataggaacagcacgggccacaaacctcagtcccaactcacaaaaactctcactcgacttggagaaacacggcaccctcatgttataaacacgagcgatcggctgcacacatgcctggaaaga

SEQ ID NO: 100333 - DNA, 420 bp, Glycine max
  unsure (1)..(420): unsure at all n locations
agctngcgggaaggaaagctatagttccatcgattattttattctgaaaatattggtagtctaacagtgcaaaaaagataaaaaaataaaatcatcaacttaaggtgatatgttggtaccaaagtaaaaacaattgagacgacacagattcattagccacacataaattaaaatacaagacaacacaaaactcaatcaaggactacaattccaaattcatttgtaaatagtgcattgacaaagcattgagaacccaaaatctagaattagaacctttaaaatggcaagcaatgccaacagctagacacaactttgaaatagtagtgaataaatgaattagagctcaaagcagaaagaacatttctataaaaaggaaaccaagcaagactgatccacaatacatagacaaagtactcaatc

SEQ ID NO: 100334 - DNA, 254 bp, Glycine max
cctgagaagcgtcatccattgtgggttcacccagaaatgcttgatttgttgttagaacgtactgtcagaactttctctacatattattgtggagcctttgatcatatgtgctttgatcgtgatcaccaaactaaacttaaatcatcttgttctttttaaggattgctaacttttgagggagtgattgttcacaaaaaatagattgaatgattatgctcttttaatgtgatgcaatgctactagacccggattta

SEQ ID NO: 100335 - DNA, 236 bp, Glycine max
cacataccttttatcttgtatttggtgtggtattggccatcgcccaattattactctttcttatccctcgattctcgggacgacgaaatgtagatgcgaatgcatgcgtgtttatgactaaacattaagttacaacaaattaactggtgtcattcgtgttcaatttcacttatatgcttatgcaccacatttatttgagccaaattgttaggattcaaaacaagagtgtgttctct

SEQ ID NO: 100336 - DNA, 435 bp, Glycine max
  unsure (1)..(435): unsure at all n locations
aatgacgcagcagcacttggaatcgaaacctacgtgggatttcatttcaatgttgctnccaaaaaaacagaaagatgtacctctcacaaacgtttcgactctttcaaattggcttaaagctctttctcaaagctataactcccctcaacgggggtcctgaccacacatgaagagtctttaacaccaagcgtcgttttcactttcaaacaatccctcctttcataccttgacttttccaatcattccttacaaaccctgaatctctttgaacttctttctccttgtacccaaagctctatgaagatttttggctttccaaaccttgaacacctgggctcatcatctttccttctctatctccctgccaaacaaatacgcccattactaaccgcccgaatctcttggtgccctcttcccctttccaaaaaacaaaga

SEQ ID NO: 100337 - DNA, 424 bp, Glycine max
caagctatgttatatacacaaaccaaggtaccattatagttttccatatcagatacaagaacaatgctaataagaattacactgactccagtgaacacagttatagcatcctccggccttagaaccatcagttggatatgactcacgccatctctgccaaactcctctcacactaaattttggcaaaaactcaaccttcaacaagacaattaaattcttagccacaataaaatatttaaaatggatactgtctatttagaggccactagaacaaaagttaggatttcttttctcttgcttaagtttgaatttcttcgcggcagaagtgaaataatatattaccgtggagcctgcatagagaggggccattaaaccattgaaaaacccatgaacatgttattatatatgtaaggactgacgtata

SEQ ID NO: 100338 - DNA, 290 bp, Glycine max
tgctcttggtggggatttagctctatttgagagagcaagaaatgaagagccaatggttgatacatggacggcgatgaaaaagaacatgatgaaaccgtatgtgtccgctagttactcaagggaattgaaattcaagctccaaaaactaacccaaggcaaacagggggttaagaagtatttcaaggaaatggatgtgctcatgattcaagcaaagattgaagaagatgatatcgtaactatggctcgatttcttaatggtttgactaaggatatccctgattatgttgaac

SEQ ID NO: 100339 - DNA, 271 bp, Glycine max
cactaccttagcttctgccatgccaccccgaaagaagagcatcaacagcatttcatcataagaaagagcgcccatcatacagcagcacatatagagatgggcattgggacaagacgccccttatacttgtcgaaggccggcactgtgaacttcggaggaataacaacatcgggtactaagcaaagatccgtcatgtctgcaaacggatagaccccaaatccttccacagccctaaatcttgtctcaaggagaacgagcttcctccctactt

SEQ ID NO: 100340 - DNA, 375 bp, Glycine max
  unsure (1)..(375): unsure at all n locations
gagagctcgccggattacttcttgagaagcctctctgagaaaacttcctggagaagcatctttgagaaaaattccttgacaactatattattatctacttctcgcccctctcatcacttagcacacctccttgagaagcttccttaagaagagttcttacgaagctagagcttggctacacatccctctctaatagataagctcaccttcgggagatgagaagctatagcttacctacacgcccgctataatagctaaggtcacccccacgactaaatacctgataatacgacataaaatccctactacaaagactactcanaatgcctcgcaatacgacggctagaccctatactactagaatggccacaatac

SEQ ID NO: 100341 - DNA, 345 bp, Glycine max
catcaagcttctagagagcctccagtaatttacacttcctttggaaaaacacacaccccttgagacgcccacatcgaagcaggcaatgaactaagaggcaagcacaacatatgtggcgcaacggtggccacgaaggcatgaccataagaaaaaactagaggtctctccaaaaaggaaaaccgagggagtcaccaacaacgtttatctaaggaaaacacagggaaaacacaaaaggataaggaatactctatagttaaagaaaaaggattcgggagccgcttatgcatgggggaacgtattaccactccacacgcccgccatgaaaacgacaatctctcatcgagt

SEQ ID NO: 100342 - DNA, 415 bp, Glycine max
  unsure (1)..(415): unsure at all n locations
gcttgcagaatatcactcctattcaggttatttttcgatggcgcgaacaacacttcattgtagtgaatatttatgttgcgtgtatttaaggaatatgcctcgcaaatatatttaggttgatctacgagcatctttcggtccgtggttttgttgctcctgccgaggattatgaagagaggagaccgngtgcatgtttatggacctctggcaaggcactacttgttttccatgtatccgaaggtgtctagaatagactgacccctgacgtggtgtgctgggatccgtaccgagacctaccgttatttaaagaattcgacggcatctcattattttcttagtcattctatatggggcctcttgacgaccattccccctctggaagggttgatgaatgttggttacatcaaactattcc

SEQ ID NO: 100343 - DNA, 249 bp, Glycine max
tatgtacgacagatttaatccaaatttcatgagttaagagtgaatttattcagctcacattctaagagtactctttagtcaaaattaaaatcccatttaatgaaactagtgatcaaattgtaacaagcctcacatacagaatgaaatcactagtaatgagtagagaagattcatatatataaaatatcacactaaatatatcagggtacgaagattacattcaatcctatgatgaaactagcagataat

SEQ ID NO: 100344 - DNA, 401 bp, Glycine max
  unsure (1)..(401): unsure at all n locations
tgcagcttctcttaatgatcggaacatgtttgtacaaattgactctaatatccaacatgagtaacacttggtttggcttcagtccatgcttatgctaatgaaatatctaaccaatctcttaatgggggaactgttttatatgtatgcaccggttgatagagcttttcttcatatcaaacttgacagggttttgctttaaacatgcatcttaccatgttcaacagaattctgttccttctctcagttgtaccattgtgttgaagtgtgtaaagtggtgtaacttcatgaattaacccctcactttcacagaattccttgaactcatttacacatactcacccccaccatcagttcttagaaacttaatcattntcccactgtgctttttgactaagcacttg

SEQ ID NO: 100345 - DNA, 401 bp, Glycine max
  unsure (1)..(401): unsure at all n locations
ggatcgagaaacatttatgaaagagcttgagactctctacagaccacaatccctggaatataagcctcttaagttttatagagagccactcaattgtcntaagtacgtataatatcccctgtgatgcattcatggaatataagcctcttaagctttatactgtagttgtgctattagtactactgtttggtatgctttccctttgttgatggcctacgtagtgtctatatactcaagagctacacaaacgattgcagacactagttgtatgctatagcacanagagaactaatgtcgtggaagtcaagcattatttgactatgtcctcagtcctcttgtaactttacaaagatctatcattaagattttattcatctaataaccttttgatttcaaagaat

SEQ ID NO: 100346 - DNA, 183 bp, Glycine max
catttttacaaaggagccaaccatattggatcccaaagactgacataccctttgtagctaatgatttaacggtgacctgttctctggctcaatgatagctaacaaagttcccttcatgggtcatcacaaatacatctgacttcaagcacaccaataagtcaagagctgtcaggctagtgacat

SEQ ID NO: 100347 - DNA, 420 bp, Glycine max
  unsure (1)..(420): unsure at all n locations
ngcttcttctggcaacagtaatgccgacatttttttttttcatactaaaccctccaatgccttatgtgccaaatgctggaatccataccaccattgctccttcagctccctctcaagccaacataaatactgctaggtcagcaccttcaaacagatggaatccggaatttagtgcatcccaccatggcaccaatgtttctcaaaatatacagcaattaacacctttttgaaggtcagaacaaataacacttgggaatggcacagtctcttgctttgacgccacaggcccatctaatatatatctttttaagccaaacgctcctctaatcttaggagcgctaatatgtccttcaactctaaaaatcctattagagcacttcgtttgaaggaaaacaaaatattgtgaatccatctaccttt

SEQ ID NO: 100348 - DNA, 359 bp, Glycine max
  unsure (1)..(359): unsure at all n locations
aatgggaagcctggggcaaatggtgagaataagaatgatgtatataatcacnctgtgattggcggtgccatatgacccaaatttcctactagctcaacaatgtccatactcagccaatatcagcccttctcattacccaccattctatctgccaagaacacctaatcattcacaaaggccacccttaatctgtccaaacctgctgcgttatctgatccaacacccccttacataaccaacaccaccaggaagattttcacaagaagcataaaatacccagtttggggtgtgcaattgtccatactttataagaaggtgcatatctccaagtctacctctttttcagacactgagccatg

SEQ ID NO: 100349 - DNA, 416 bp, Glycine max
agctacaagcatctctcatcgctgggtttaatttggttacaattagttaagaccttggtccaattggttgtgaagataagctccaactcacttaaggttttgtgaaatcagctttggattctgctaccacaaatgaaatggagtcgcctatagtgtattgaacgatggggtttggggaatcattatgctaaatgacgttgcccgccagaggggaaagacttggatggtgtgagagaaataaaaattttgagctctggaacaattgcggaatagaaaatggatgggtttggaacaattttggaattgagaggctttgcgacacatgcgaccatgattatcaaactctcaagttaactcgttaactattacgaggttacgaattcacttgtcctctgcgagttgacttctgagtaaac

SEQ ID NO: 100350 - DNA, 368 bp, Glycine max
  unsure (1)..(368): unsure at all n locations
ataccccatccttagagataatatgcccaagatatcctatcttagtttctacaaaagtacacttcttctgattggcaaacaaagagtgttctgatagtctggccaacacttgtctcaagtgctttaaatgaccctcctttgttttgttgtttaccaaaatatcatcttagaaaaccaagacataccttctaagaaaaggcttaagggtggcattcatagcacattggaaagttgctggagcatntgttaatccaaatggcattactagagattcgtaatgccctcgatgagttctanaagctggttttggaatgtctgcctcgtgcattcttatttggtgatatcccacccttannatctatttggag

SEQ ID NO: 100351 - DNA, 440 bp, Glycine max
agcttatccggcctcccatcagcaaagccttcaatgataaatattgcaagcccagggaggcacaacagcaggaggagggccagtagcatccagccgtagatgtgtctccataacctctacaggagacaccatccctggagtccatctccgctcacatgcgaaggatagagctccagatgcacaggtatatgcagcatgtgactggccagcaggcggtcaatcattggggtcagatgcaactaaatgtgaccttcaactgatacactatgcaccataatgtattacctatcaccataatgtattatctatcaccataatgtattacttctcataccctaatttcatccggggatgattgtttgccaacatttgcaacccgtatggttttgtgacgtttcaaaggaaatgttcaaatattcaaagagggcaaaaggcacttt

SEQ ID NO: 100352 - DNA, 301 bp, Glycine max
  unsure (1)..(301): unsure at all n locations
ccgtcttgcaaaattggggcaaaagatgaatcgagtcatatcactgcttcgtctactgccaaacatatttangattgttgatgtccttgttacttccagtttcaccttgacaaagatgtcatggaccatgttgaaaatctaaattgattcaaccccatatcctgcgtaaaaattcgcaatacttcaactatgcatcattcgcatacatccatacttttcattggttgcattgctcattacattctttcctttgaaaaaaanaagagaacttatcattgtattaaaaaaaacacatgcttac

SEQ ID NO: 100353 - DNA, 228 bp, Glycine max
taagacaccgcggcagcaacttgagaaatcaggaacccctataatctcgtatcctgccggacacacatgagcccgcttagagtaaggagagagctaccgctactgggggcataaagaacacggcgaagaatccttaaggggaccaaataagggttatttttggaaggaaattgaattgaactccacccgatgaacatgtgaaatcgtagaggggttctacacccgtgg

SEQ ID NO: 100354 - DNA, 467 bp, Glycine max
tcatgaattacaacgttgattccacgatacattctttattgttgttctaagacaaagtaagagaatgtgtatttcaaaaagaaatatgataccacatttcttaagtggtttatgattgaagaaatatgatacatgggaaggattgaagatcagttcacgagaaaatgaaattgatatcattgtacaccaaactagaattttacttttgtaattgacggtgattttacttttggcaaatggttatgtaagaatgcaagcttctcctcgagaagatatgcttctgatcctaagatgatgagggtgatgatttttacaaagtagttaaatatgaacataacctcttttttttttggcagtaactctatacccaaattggcgtaattgttctttaacacctattgaagcaacttttgctcatgttggttccacaaataactcatttatatgataatattcaaagatcattt

SEQ ID NO: 100355 - DNA, 340 bp, Glycine max
agcttatccttatggcttgccttcggatttcactctccgtgccaccccggaagaattaagccaatcccctaatttcaggggcaactcccaccttatgacgactattcccggcatgacgatgaggaaggagatacccatcttggccccctgctccaactcaaagatctgtcccccatgaactaccccaaccgaacatagtctgccatatcccggctgcacccacacccgtaaaagattatgttcccttctcggaagataaagggaagattgacgcgcttgaagagaggttaatagcagtcgagggccttggcaattacccattctcggatttggcggatta

SEQ ID NO: 100356 - DNA, 340 bp, Glycine max
tgagatgaggaagtgttgaagggtgatacttcctgcttttattgttgaccacacagtggtacctggagatatgtcgcggtggcaagagacccggcgacattatattggtgctatgcccaaaaccacactgtccaatcccgaccaacccgggcatagtcggtcagtgagagcctgtgatgtacctcaacaggcgaacctcctggtcgtcatccgataaaaggagaacaagaccacaaagcaatgaggcttggggtggctggcccctgcgaattttgctaacatgtggattgtggcctctggtaattcattaccaagggggggtaatcgattacaacgctta

SEQ ID NO: 100357 - DNA, 442 bp, Glycine max
  unsure (1)..(442): unsure at all n locations
agctngacttanaaccaatatttgtgtgtctacctagccattattgtctataaagaatcaacaagacgttttgaaattgtgcacaccgactaaaccatgtgaacatcttatagatggatatatcactcaataggtttggtcctttctctcaaagcatacaagagtgccttgagagctttgtatctttacaagaatttacagaaagatttaccagacagaatgaaaaaatgattcatgtcttgagtctaaaatgcttcttctatatatagatttcatctccaagtattcataatctcttaatgggtgaattctatactttgttcttcgtctgaagccttgagtctgttgaggcatataacgctcgcataaaagcatgacattcttatgcaaagctcaggggaaagatagtgtgtctgtacttcatcacgaaatcactaattca

SEQ ID NO: 100358 - DNA, 280 bp, Glycine max
aatcagaacagccgagaaaaagcacctacactctccctaagacaaaaagaaaagaaaagaatgccggccccaaatacacttaaagaaaaaaaaactaaagaacatccggacccaaggaaaggagatactcacaaatcccccaccattgctggaaaactcttgacctaccaagctataaacacaccggctcgaaaggaaaagctctatgtaagcacgcccgtcaacatatgcagcaacaccacccttctgaggacctttctcaaagcctccgcacctcctc

SEQ ID NO: 100359 - DNA, 219 bp, Glycine max
  unsure (1)..(219): unsure at all n locations
gcatataagaggatttacaagatacttttattgggctttttcaggactgttaaaagggcatgtggtatttactgatgttgttacatggtgttgtgaagattatgcaacaaaacttggggtgccacctgttgttgaccattntacacatatctcatctatatcacgaaaaattgcatttttaaagctaaaattaacataaacacgcaaaaaagaagctta

SEQ ID NO: 100360 - DNA, 277 bp, Glycine max
ctcgactggaccctttcttcccttcgcaacttgagttcactattgctaccccatagagcttttatattattgtttcggccatactctaccttgcgagccctcttggtcttctcttcaacggcccttacggtaattgcattctctttccgttacccgggacacttctttcgaacgtgtgtagcagccaacttgaacttctcgctggcgagttttgctctttctaactcgcttttgagagcatggactttctcgtcctctttccgtgcttcagaatctc

SEQ ID NO: 100361 - DNA, 270 bp, Glycine max
  unsure (1)..(270): unsure at all n locations
gactatggcagtcattatggcgctatactgctgggagttggaggccctcctctccattaaaattttggaattcgccngagccaggtttccaagggctgcaccactggcagcatctatcataccactctccatattactgcgcccttcctaaaaatattggagaagaagctattctgatatctgatggtgggggcgactggcacatagattctttatctcttccagaactctacaggctctctccactgagttgtctaatacctgagatat

SEQ ID NO: 100362 - DNA, 440 bp, Glycine max
  unsure (1)..(440): unsure at all n locations
tctagccacactccagaatttctaaagatcccacggttttattatggaaagngttttgtgaagttgcagaccatatttcgagaagatccaacggttaatgaaggctgggcagcgtttttaccgaggcagcttcatgtagctttctctagaagcttcattaagaggcttcctctagaagcttcctcgtggcttctttgagaagctacatccttatctatccacccctctattaactaaattaacttccttaanaataattacggatgaaaataacgcaacacataatcaaacatcanacataattactaataatatatagatatatatatatcagggtgttacaattatcactcagatcttgactagttaaaccttctgaataaatgagttatcccgcgttttactccaagatcatgcgaatanatactccacatttatct

SEQ ID NO: 100363 - DNA, 439 bp, Glycine max
agcttcacatatcgtgtgccttactatgtgaagttggtctttctcacatggcacgtgaagtttatgatgcatataaattcataaaaggatgtatttcagttcgtcccacttgttcttcgtgaaattaagtgaaactcaaatggtcaggatgtgaatagggagatatacagttggtatggaaggaggaataagttgtgggattgaattcttttactaacaagaattaacaactattatttgttgattaaaaatcaataaccaatgtgaatagttaaaatcaaagagagaaaaagttattttgtatcatattattttaacggtaaatactaacctgcattgattctttaaaataaaagtaaccttggattgacattaaattggaaaattaagtgcttttctatgaagcggtattaaagattttatactataattgttaata

SEQ ID NO: 100364 - DNA, 337 bp, Glycine max
  unsure (1)..(337): unsure at all n locations
catagtagaatactggttatgtgtctactatcaatgtcatcatttttttctccgtcattgaggtgcctcttgagctgccaggtatatacacctttgggcgtattcttttgaaagattcgtgcccccttnttgcacatgtcctgtagttgcatcctatccgaagacattatactgacactgcctaacgaaggcaaccactaggtccttccaagaatggactctggaaggttccaagttagtgtaccangtaacagctaccctagtaagactntcttggaaggaatgtatcagcaattcctcatctttggcgtatgcccccatctttcgataatacatc

SEQ ID NO: 100365 - DNA, 356 bp, Glycine max
gacctctaagtcacctgcggcatgcaagctttataagtgcgggtcagggagacgaaggattgtgttctccataggtgaagacgaagtggcaggcgccttggattaggtacgaccatgcgctcctgagtgccatctgggaaattggcgggtggaggaacggccctgcttttacgcaacagacataatgtaaacctttacggttctagaagctctatatctggggctaggcttaagagattatcattaggtaaggcttcgtgactcctgccttagaatttaggatacacggatctttcttgatcggttcctgggctctacccagtctcattcatcaggatgtggactacttgttctga

SEQ ID NO: 100366 - DNA, 148 bp, Glycine max
atcttttaggccgaaagatcggtcattatctgttcctgcgcgcactcgtgattatacattcttctggatcgagtgatataggggtgccatcgatgcgttcttccttatgactaagttcctcaagaaataaacaacggtgagtctgcta

SEQ ID NO: 100367 - DNA, 274 bp, Glycine max
agaatgtcattcttccctcgaacaaaaaaagggagaggaaaattccatctcagaggagccaaataggagaaggaatttccatcaacggaaaaaaaaaggaagggattccaatccagagtgggaaagccaaagaaaaaagaaattcccctcacgatggggaagaaataaaatattaaggaaaaagttcccatcaaaaaataaatcccaaaggcttggaccgacaatatctaacaatcagaatggtcccaatgaataaaaaaaggaagggacctta

SEQ ID NO: 100368 - DNA, 279 bp, Glycine max
  unsure (1)..(279): unsure at all n locations
atactaagcttcaccttggtgctatttatgctcttatgttgaggagagcattttcgcgtcgtgaagtgcgtggctactagtgggacttccaaaatccaggntcgggtgtacttctttccctctcgattttactgggtatggcggtttgggagatatgaagggtagatttgttacgtttctgctgtgtgatgattatttgtgaagacatttgttgaaagcttgtcgaaattgccatgtctgggtgagttagatatacccatctctgatttagggttttgt

SEQ ID NO: 100369 - DNA, 187 bp, Glycine max
gcttgattataccactgttcacattcaccctagacgtaaacatctttgtaaataatgaaaactgtttgaagaatgcgatagtaaaatggaatcttgtcacttccaaagtcttgggatattgggggccattgatcccagaaccttatcttgaaatgaagttgcgtcattattaacttctaaaccaact

SEQ ID NO: 100370 - DNA, 193 bp, Glycine max
atgttcactctacggacgtggcttacgaactctgagaaagattatactattcatactatcaatggccaagtggcattagacaccgcttttgcatcagtatacgatagatacattctactaacagatgtataaatactgcacccatagactggaactctctgagacccgaattgtcagaatttggaaccatatc

SEQ ID NO: 100371 - DNA, 260 bp, Glycine max
ttatctcccgctgacctacgattttgagaggggagtactttcactgtgaatatactataaaaaagtctgccagaaaaattaaagacctacctcactatgtcactagtcactggatatctttaagcttttttataatgccttgctttacttttgttttacgtctatgctactcagctaaatcaaattcatggattgccaataaatcactcgagccaaaaaatcttagacaactagattaagatacaatagaagatctaaga

SEQ ID NO: 100372 - DNA, 294 bp, Glycine max
  unsure (1)..(294): unsure at all n locations
aataagctgacccgcctcctcataactgaccaagaagctcttgttgttatatcccgtaccaagcacgttaatgtagatgacgtctcttgattangggtgcaaaaaacttaattgatatagagattatattgtcataaaaagatggctggcgtatcggctcccctaagtgtataaactcagctaatttgactgtgactgagtgtgtggctatgacttgatgactagatggcacgcgataccacatgggatttatttctctgtatgaccagaatatgccattgatgatgcaacatg

SEQ ID NO: 100373 - DNA, 436 bp, Glycine max
  unsure (1)..(436): unsure at all n locations
tactaagctttcattcgtgtctcttngcattccattctgcactgtaactcactcccttctgtaagtgcactcccccttaattctttggctctccattgatgtgttttagtgccttagntgttcaatttttgccaatatcatgagacaatgtatgcttgaatatacgctctgtcgtctaaattggaggtgtcataccctaatttcgtccggggattattacttgatgacatgcaacctttggttagccgctatgggatacttggcgtgctttgttgcacaataaatgaagtcccgagacgtctcagaaatctaaaggaagcaggcttgcgcgatccgtgaaattccgtaatgtggcggaagtcgaaaaaaggtcgttttgcgcaatctttatagttccgtaacttcttcgaacgctaataaagagtaaatacataat

SEQ ID NO: 100374 - DNA, 336 bp, Glycine max
  unsure (1)..(336): unsure at all n locations
acacccaaattgggcctctaaaccttcaaatctcacactttttcaactaccacactaactttcttacatttaacctctagcttactctaaccaatctctctaccaggttactaaatgcattttagcatacatatacatcaaaacatcattatttaaccatcaatcaacatgggcaagtttgcttaaattaaacatatcaaggtttagcatggattacaacaatntccttcacaaacaactacctatatgtgataacctagtagaactacccattatagctcccaagaacccaacaccctcagaattcaagtgaggagaagtccacccttacctgga

SEQ ID NO: 100375 - DNA, 412 bp, Glycine max
tgagagaaaatgattattaaacacacaaaatgaaaatactaagtatttattacctatacttaacagaaaatacttataacactccaaaataaccataaattgggagagtttgatataatttatacaagttttatacacaaaagttagtcattttcatcgactaacactgacacaaaaaatcagggaccagctggtggagtcaatcacaaaaaaagtgactcgacaactaatgtccttcagctagatgcagtccaagtttcaatcgcagatgcaatcacagggactcacactgcctcctaagtctgaggttggtccttcaattactcatgtcagcacaaacgagagttgtgttgatccctcatggaacgacccagacacagctgactcagagaaatgtggattgtatgtcaaa

SEQ ID NO: 100376 - DNA, 452 bp, Glycine max
agtcttcacaaataatcatcacacagcagagactctatcattatctacccataatatctcccaaaaccccatacccacgaaaatcaagagggaaagaagtccacccaaacctgaattttcgaagtcccactcgtagccacgcacttcacgaccccgaaaatgccctcctttcgcgatttggagcagaaatgagtaccaaaggttggagctttgttggggtttcaatggagaatgagggaggagaaaatggcaacgtgagagagagagagagctgtctgaaaaagtgtgggggctgagtgatgagagagaaaagctttttggttttaaataaaagggtttcctcttttttttttctattattctattcaagctctgccacatgtccctatttgattggagcaaaaagggcccactttctctttttgactgtgacccatactcagtcacaaaag

SEQ ID NO: 100377 - DNA, 432 bp, Glycine max
  unsure (1)..(432): unsure at all n locations
agctntaagtgtgantcctttctttntcttatcattctcctcatggtgattcagncctattagntctatttcatgttcctggaactttcccaacaaagttgcgagagacatggtaaaaatatcccttgattctggaataatcggtacctttgggtatcattccctgcttaaacatctcaaaactttattaataagatgctcattgggaaatatctttcctaatgatgcaagatgatttactatgtgtgaatctctttggcatgtcctggatagtttcattaggattcctcctaaacaattcatattcatgagttaagggatttattctagacctttntacatttngtggtccttcatggcttanctngtaggtatctcacatatctttngcactcttgcaatttgacacccaanagtattcattcattccta

SEQ ID NO: 100378 - DNA, 491 bp, Glycine max
  unsure (1)..(491): unsure at all n locations
aactaagcttaagaataatggcctcggcanacttcttattcccataaggatattaatatatatgcctcctatttntaatggagaaggttaccactactgggaaacccgaatgcaaatcttcattgaggcaatagacttaaacatttgggaagccataaaagtaggaccttatgtacccaccatggtggctggaaatgcaacaatagaaaaacctagagaagagtggactaaagatgaaagaatattagtgcagtacaatttaaaggctaaaaacatcattacttctaccctaggaatggatgaatactttatggtttcacattgtaagaatgataaggatatgtgggacactctacaagttacacatgagggaacaactgatgtcaaacgatctaggataaatactntaactcatgagtatgaattatttaggatgaagacaaatgaaagttacaagatatgaataaaagatcacacatatagntaatcat

SEQ ID NO: 100379 - DNA, 499 bp, Glycine max
  unsure (1)..(499): unsure at all n locations
acactataaaactaagcttggagcttaaaataacaacaataatgaagcatgggttntttatttacacttaaaagctactttaaatttaaataactacttttaattagggttataaaaaacttaatttatatagtgtatatatgttcaaataattataaatgaagattgtgcagccaaatttttttattgaattntattttttatatgattagtataaataattttatcttattaattaattaaataacatcttaaatataactttaaaagtctttttcacaagaattaacatttttttaaaaatataagcttggttggcaacgtgaaaaatatttaattattaatgcatttcaatcaaatcccttttaatcgtgtgctatagttaaaatatcatataataaaaaaagtcagaaactattattttcttaaattntcaaattttgttagaagtacaatataatatatgagtgacacataaaattaccagtaatatatcttg

SEQ ID NO: 100380 - DNA, 427 bp, Glycine max
  unsure (1)..(427): unsure at all n locations
tcatgagtatctttatctactaaactttttactttgngttgaccttcacaaaaaaatatcaagaataccatctttgtgttactcgattgaatccgtattccaaaccattcttcttacaaatgaattataaaatctataacctttcaagagactcaactccaacccaagacaaggctggatattcatttcttcagcatcatttgaagcatctccgtgcataacctcctcaaacgaaattggtgtatccatgggcatgacattaatggactcaatttcttgtgtttctatattactaagagtatctgccatcactgcactagacaagtcttcatattntcaataatcaaaatttgttaaatccaatttatgaaatgacntagtgagcacggagtatttgcatcattgacttaataaaaaaaataaataa

SEQ ID NO: 100381 - DNA, 305 bp, Glycine max
tggtcaagaaaatttgcctaatttggggaaaagctgaaaaatgaaaaaaagttacttcacccaccaacattagtgatgttaaaataaaaaaataatgtgtgtgacagaggtccttcacttggagaagatactggaaactctggttatacaaacatgcgataagcaggattggcttttaaatctacctttgatctaacaaccataattttgtgccaacctctacagctgaatagactttgatctgtttacttttgatgaggctgaataatgcaaatggcctctgtagtgtatatgatagtaccact

SEQ ID NO: 100382 - DNA, 422 bp, Glycine max
  unsure (1)..(422): unsure at all n locations
agcttcaacattcaatttcgtgcgtctcgatatgatacgggactcaatcanacattcgagtaaaaagttatgggcgtctgtattggctcagagcttcaactttctatttcgagcgtctcgatatgctacgggactcaatcagacatccgatgacaaagttattgccgtttgaattggctgagagcttcaactttcaatgtcaagccgctcgatatgttacgggactcactcgaacatccgagaaaaaagctattgtcgtttgtattggctcagagcttcaactttccatttcgagcgtctctatatgttgcgggactcaatctgacatccgagtaaaaagtgatggtccgttgtatcggctcagagcatcgacagtcaatatcaagcgtctcgatatgatacgggactcaatcatacatccg

SEQ ID NO: 100383 - DNA, 385 bp, Glycine max
  unsure (1)..(385): unsure at all n locations
gcaatgtcggctganaaatatccgtcggggctatttaactgccgatgtcggctattgttttttctattccacccctgaattatatttggaggatgcctattacgaaatgttcggtcggggtcatccggtcatgcttctttttgaggcctcgatctgtcgtctttcctagccggccgacgtcggctagcatttttttcgatcaatatctgtgtgaatcatgtttttttttgccaaggagggctaatgttttcgtggccgacaaaatgagaacatgccattgtcgggcgacacacaatcccgcacgagataccctagccgacctacattgtaattttttcacgcagtaccgagcgacaaaacttcgtctaccatgaagaaatattat

SEQ ID NO: 100384 - DNA, 272 bp, Glycine max
  unsure (1)..(272): unsure at all n locations
gaacaatatgatcactctacaacatattgaaattaaggcatcgtttgagacaactacacatgntggtgggcatgttttaaagttaccttatacaagaaactatttggcatggtatcaaggtattgtgtaaaccaaaatgttgcttgagttgagcatgtaaattatgctaacatttgatagtctcattatagatatataatgagaactactcacggtctttcatgtgcacgtgagctatctagatatgttctttgtagcataccacttgacac

SEQ ID NO: 100385 - DNA, 382 bp, Glycine max
  unsure (1)..(382): unsure at all n locations
actaagctatgatcacatatntaattntcgtggaacctaatgatgattcacaatctatngaagaccttgatgatgatgatggagatggagatggtgatgaaagtgatgatattcatggagatgatccaattagaggattggacatgcttctttgaaaacatttgtgctttttttaattatttaaatgctttaattttgaacacttatgcattgttgtgcaactctatagtcaactcatagactcttacgagattacaccagtccactccgagaccacgactctgcttcgactctggtagaaaaggagttttgctttcgagtcagctcacgggactgaagtaaacaattaaactccggagagtctatgagtcgaatctagagt

SEQ ID NO: 100386 - DNA, 482 bp, Glycine max
  unsure (1)..(482): unsure at all n locations
catgcaagcttgtaactagaaaaggggtgtgtaatttttctttgttccatatgaacaatcattcccccactcccaagaagtcttacccgagtgactcgtgggagatatccgngaaagcaaagcgttccataggtggaggtcatacacaaacaagcctattccccacttaaaatctcaactcccaactccctcaaaccattgccctatatcacagttggagatatacttttgctccgataaagaacagagtctatggagtgaaaggcaaataggtgcttcatctaaacgattatccttacaaaactcggcgaccttaccatngctaatataccaagttaaagcctcctcaaaccacctcacactatattcaaaagtgctcacctaccttaggccttgctagcatatagaaatgcccacaataatcctgctactaactaaccctctncaccctccatatctagagggtatgacctctctgcata

SEQ ID NO: 100387 - DNA, 398 bp, Glycine max
  unsure (1)..(398): unsure at all n locations
acacataaaactcagcttaacaagcatcttttcgttaanaatcaccttataattatctattgttccatccattgtattgaagccactgattgttaacaaacaaataatactcaaacctattacatgtgggtacctattagagatatgtattctttatatgtgtggatgcgaattcttttgttatccctacttagtatccaaaatcggtagtgagccattagtgtatgatgtatctctccggccattataacgattctttccacttacatatctctcaaacaagataaggggtatagataccaatttattgcatatattctaaagagagaaatagtgatctagcggaagaattgctaatatcttattaagaaaactctatgtacaaagcataaacatat

SEQ ID NO: 100388 - DNA, 350 bp, Glycine max
  unsure (1)..(350): unsure at all n locations
ttaataccagacagtgcttgtaaacaggacagtcaaagaaattaattgatctattgccagagctggaacgatcatttccatttacaagtttaggtaaactttaggcacacgcatatgttggataattatgatgaacaaatggctgaaggtaaaagaaatagctgtgacaaataaaccatgtattaaagagatactagtacgaatattgagtacgataagatacatgtngataatttttattttattaatacttatattntataccanataaaacataatttatatttataaatacttatantttattaattnttttcttcatttccttaataaagctgatatttatatta

SEQ ID NO: 100389 - DNA, 404 bp, Glycine max
  unsure (1)..(404): unsure at all n locations
aaattccttggcacatctnctctgctacgaaactttgaagcagtctcctctaggtcgataaattcttcccttttctgagcctcaacaattgcttttttctcttctgctaaccggtggatttcagcaattttattcttcattttttcaacatattcggccttctttttttccatgctttcctgataaaagaatttcttttttaaagtaacatacagctaatttataaaaccaatcatattgatgcattaattgaacataagtctggtgacacaaagaagatccaattctcttgccaattgtcatggctagctaacaatcacagtgttcacgcagaanaccttcgagtttaatagttaatcacctcaattttcttgagttgtgcctctacggatgctttcttgcta

SEQ ID NO: 100390 - DNA, 372 bp, Glycine max
  unsure (1)..(372): unsure at all n locations
tatgctctggaaaggtcttactataaatcaatatatcatcaaagaaggcaataatgaacttgtgtatgtatgggccaaagattgtgttcatagtggcttggaaggacgatagagcattacacaagccgaatggcatcacacagaattcgtagtggccatggtgagtacgaaatgcgattttgcatatgtcatcttccttcattagaatttgatgatacccctataagaggacaagctntgagaaccaacatgtgccccttaattcatccagtaactcgtcaatagtcagaataaggaatcaatctttaaccgtgatagcatttaaagctctttagtcaacacaaaaacgcctggattcatcacnatttttta

SEQ ID NO: 100391 - DNA, 432 bp, Glycine max
  unsure (1)..(432): unsure at all n locations
aagatataagctacctctctttaatctatgcttaatattattagnattgcagcttagagcagtaggggttcttatgtagttttgtatggtaatgatagccgaggacccaactacgcagcatgtacgttcttgtgttacagtagggctgtacaaaggctacaggcgaacataaatgtcaaaacagtgatatctccataaatgtcatctttattggatttctacccacatgtatgagagagagaaagagtctgtttgtaatgtgcatgtatgagaaacgtgttcggatatttattcttttcttctcaagagttctataaatagtaagaaaactaatcagaatggatcgattttgaaccctatgcagatttcactcattcagcttattttatcagaatatacnataacatgtatcgattttaatgggtagatcta

SEQ ID NO: 100392 - DNA, 463 bp, Glycine max
  unsure (1)..(463): unsure at all n locations
ggcataagttattaaagcttaaccatttgttgtttactactctatgacaaagctaaaaccaaaatctgaatgcttaaccaccatacaagacaaaagctaaaactattaaagccaatagttactccccatcaaccaatcttcatggaactacaacatttccactaaaaaacacatgcatatttaagaaaagcaaactcaatagtaagatctcatgtttgagctataagaacacttagtaatttccttcaatttccttctaatgtgcagttaattacctaaactaaactacatgtgccattatattattactcttttaatttagtcactaaattagtcattgaaaatttaaaagtttcattatattagtcttccgatccaaaaagctatttaccaaattagttcttaagctatcttttatcaacactntaatactccatatataaggatggatgcaatcctaccc

SEQ ID NO: 100393 - DNA, 473 bp, Glycine max
  unsure (1)..(473): unsure at all n locations
gctatganaagattcntcctttgaatcctgtcatgaccaaaatatgtgtgcatatatttatnntttttcggttcttccctaaaattaatatttctttattccgttcttctggctaaataatataaatattaacttctacataaaaaagtacaattattcaatgctagtactatatcattnnttgatatgtttctttctttttcactacaaatataatntaattgaataaatatacagctataagcaatttcttgtatacattgctaataattctatttttggttccttctacaagtgtgtagtgattatttnttataactacttactanttttatatacttaatattatntatacacgtgaatgcgtaaatttaagcttatatgatagggtacgctatatatatatatatgttcttaatncaagttgattttcacatggaccctatatgtaaaatatnttataattagcttat

SEQ ID NO: 100394 - DNA, 432 bp, Glycine max
  unsure (1)..(432): unsure at all n locations
cattagatgatgacaaaggtgatgacaaaaagctcatagatcaatcaaagaacaactcaagtaaatcaagaagaatacaagacacaagaagaaagtttagagtcaagaatcaagattcaaggttcaagatctcaagaatcaagatcaatattcaagactcgagattcaagaatcaagagaaggtttaatcaagataagtatgaaaagtttttctcaaaaattgaatagcacatgatttttcacaaaacatgtttaccaaagagtttttactctctggtaatcgattaccagattgttgtaatcgattaccagtagcaaaattggtttgaaaaattttcaaattgaatctacaatgttccaattaatttcanaaagctgtaatcgattacaatgttttggtaatcgattaccagtgtctttgaacgttgaaat

SEQ ID NO: 100395 - DNA, 491 bp, Glycine max
  unsure (1)..(491): unsure at all n locations
agcttgctacaattgcaagtttaaaaatgtattttttttttcatagctctcaaaaatcaaaaatggggagggaagagtaaaatatatatacttttctaataaatccagctaacattgtgattgtgtcttgtcaactactaccaaggatgcatgaataataatctagntatctaattatntgctatctccatctgtatttattggaggtatatatgtggagtgctgatgcaatttccggtttgctggggttatgcagtatttatacttactgtttggtacgaagatcatatccattaaccttaggcttaacctttgatctttactcaaacatgattctgatttatgtaccactgatntaggtaccagttatattaataacctctttgctaataaaaaaattataattacaatnggaagcagataaataaataattacaattggaagagactcanatccangtaccccaattactaccacaatggtcatgtta

SEQ ID NO: 100396 - DNA, 427 bp, Glycine max
  unsure (1)..(427): unsure at all n locations
nggattgattcggtctgatgagggatcgaggtttagtaatttatgctatttcatataacacaagagcatgattgattagagaaatatatttatatgcatcagcttgtttgttagaaagacccaacatttctacctactgttgtcacttttacttactttgcattttatagtttttagcataaaagttagtttaaattctgtttgaaattatcaatcatacatgttctctcaacattgcttcatttctgaacttaattcaggctaacattagtttcctatgttcgatactcggattcatccattttaatttttaaatacttgatgatccgatgcgctttacggcaaatcggatttcccttgaatatatttgaacgaagaanaagtggaacaaaaagcaaccgcaggggaaatccaacaaagtatttat

SEQ ID NO: 100397 - DNA, 393 bp, Glycine max
  unsure (1)..(393): unsure at all n locations
tgatcaagaatgagagggatgagcttatccccacaagagtgcagaacagctggcgagtccgcattgattataggaggctgaaccaggcaaccagaaaagatcattgtcccctgccattcattgatcaaatgcttgagcacttggcaagtaagtctcattactggtttcttgatgggttttcttgttatttacaaattcatattgctcctgaggatcaagaaaataccacattcacctgtccctttggcacttttgcctataggaggatgccctttggcctatgcaatgcccncggtaccttctagcgatgtatgcttagcattntcagtgactttttagagaagtgcatagaggtgttgatggatgatnnntactgttatggatccctctttg

SEQ ID NO: 100398 - DNA, 448 bp, Glycine max
  unsure (1)..(448): unsure at all n locations
ctattcaagacanagaaattaaagatattcaagatgtatgatctagacagtctctagagtcttaggaagggtatattaaataggaagggaatttctaactgaagtagcaaaaggtttggccaagaaatttaagttaaaaagtctttttcaagaaatttactctctggtaattgattaccagaggatgtaatcgattaccagtggccagaaatgatttacaacagctattaaaatttgaattcaaaatttgcactgtgtaatcgattacacatatatggtaatcgattaccagcagttattgaacgttttaattcaaattntaaagcttgtaatcgattacacacatactgtaatcgattaccagaggaagttttcagaanatattctcaacagtcacatctttntatttgattcttanatggccatcaaaggcttatatatatgtgac

SEQ ID NO: 100399 - DNA, 369 bp, Glycine max
  unsure (1)..(369): unsure at all n locations
tcattacatgttgccgagatgtttaaaatttcgtatatgctaccttgaccggaattggacgatattgttgttttatggaagttctcaagttaaaaatgagttctaagtgttaaaacttagggttaaccttaaatttcacttaaatcggagttttctagcaaaagttatgaacacaactagttntaaggatattttgtaggattaaatttgtcatgaaataaaatggtggttatggatgtatggactgtttttcttaaagagttgacttcaaaaatgagtctgttaggtgtgaaaatatagggtatcaagtaaaatttatgaaaaaccaattttcgaaacacttacaaatttgaagacatgtttaaaagt

SEQ ID NO: 100400 - DNA, 402 bp, Glycine max
cgataaatatttatcagaactagatgagtctttagcagatcttctactttatgacaactctatagcaaccagttcgtgcaaataaaatgtagatatagaagcgtccactccacatgaatttcaagaagcatgcactagatgcatgatgagaagaaataatgtagaaagtccaactattggtgatctagcagatcatgttcaaacaagatcatcagtcaaaacacgaaaacacactacactgatttctgaaatggaacccatacacattgatgatgcaatgcaagatgacaactgggtagaccagcacaacatgaggttgattgattctagaagaatgatatttcgaaattagttgaatttccaaaagaaaagaagactattggagacaaatgggtctttcgc

SEQ ID NO: 100401 - DNA, 493 bp, Glycine max
  unsure (1)..(493): unsure at all n locations
catgcaagcttgtcncaccttccaattgatgtacatcttatccttgcattgctggangtggaggacgactcgctcttcatgtgcagcgttgagcaaaacgtctcgttggaggactacttgagaggccggtggagtcgctcatcaagctntgattaagcanactactagcaaatggctagaagaataagaagggatggtgtttttgaaatctaaatccttttgtagataattttgccgtgttgcatgtgctgtgaatgtttctatagatgggtttaggatgagaggttgtttgtgtgtgccctcctccttcccttgattggcaaggaaactatgccttgtaatttgaaggctagatatcctttgtcgttttacttaattacttggtgctagtttcaatccttaatctcaattcgattgagtgtaatatggtctggtgcgaagaataaaagatgaaaaagttgtatcttataactacataatgagtactggtctc

SEQ ID NO: 100402 - DNA, 437 bp, Glycine max
  unsure (1)..(437): unsure at all n locations
ctataaaactaagcttagtttccatttttttaattgaacgntttttaatttatatatataaccccggataaggataaagccttgatcacatgcatgaattttaatttatatatataatcctgtttttagtaatttattttaaattttattttatttttagaaaaaaaagacattctaattaagccttgatccgctgaccttttacattataattaaattcattttattaagccttggtttattgtaaattaaagctcaaactcttacaagttaattatgctttttctttatttactttgaagttctaaatttatactatgggtatattgtgttttaaaagctattgagaagaaacagtggtaatttaagtatatttgctagtactatatatatttcaattctgagagaaattgtcacttgggtttactctatttctc

SEQ ID NO: 100403 - DNA, 433 bp, Glycine max
  unsure (1)..(433): unsure at all n locations
gctgcacttctaaggaatcaactctgttttcagtttgtcaccttaaacctccgttaattattagttataccttctcctccatcgttgnttcctcatttttctccatgtatctcctcacatgtcttgtgctaaatgttattaacatgattcttttgagtttccaccgattaaacttgctatagaagctagatttgattttctatggntcaaatttcttgttcttgttcttgaaccatgaattgtgttgagtttaggttcctttgagtattgtctttttattntattgtggctganacctaaaccataaaattcttacaaaaatattatattagaagaaaaactcanatatctagagtggacttgttacctattgtagttntgtcataaaagtcatgtctagtcatgaaacttgtcacatatgaattcttatgtt

SEQ ID NO: 100404 - DNA, 462 bp, Glycine max
  unsure (1)..(462): unsure at all n locations
atcacgaaatggtatctgggttattatactttggttatattcttatagcatcctacgccttctttgttgtaaccggaaccattggattttacgcgtgcttttggttcactaggctcatctactcctcagtcaagattgattagttatagcaaccagtggttttggattaatctactacacttcttgaaggacgaacgaccggtttgtgtaaggattttgaaattcacgtactgtcatgttcagaatcagatgtaacctattcgtatacaattttgaattgtgacgactgctattctttngtttcaatatctttttacttgcctgagatatcgaagtataagtttttaaggtgtacccttcggtctaactaggctgttgttgttcccgcgtactactgtccgagattacacgttggctccttgtagatgatttctattttaggcgggtatacaaatgatatct

SEQ ID NO: 100405 - DNA, 435 bp, Glycine max
agcttctaacaatccgcaccctcgtctcatccttcagttcctcctccgaccaaacccgcctggccgtcctccgccacctacgccgcacctccgccgaagaccccgccgctcgccccctcatttccgccgcaggcgccgtccctctcctcgcctccggcctctactccccctcccaccccatccaggaccacgccgccgccaccctcctcaacctctccatctacgaccgtcgccccctcgccgtctcccccgccctcccggacgccctcgtccaccttctctcccgccacgccacctactacgctggtctcggcgtccagtccgccggcgccaccctccacagcctcctcgccgtcgtcatcgaggtccgccccataatcacctctaaacccgacatcatccgggccctcgtcggtataatcagtcactctgatt

SEQ ID NO: 100406 - DNA, 482 bp, Glycine max
  unsure (1)..(482): unsure at all n locations
actcagctcgcttctcacaatgcaggatcaattntacactgtttgtttatttctatatgttggaacccagnacacgataataatggtataatttgtggctctggttcacgtattgtatggtcataggaagtgattaactcattaatcgtaatacgtgaacgatgaatgtgttgatgacgcaatagaggtttatcatccatgagaatgatgtcaaatggtaaaccgaatacaaatgatataaaatttgaagttgggtgatgcaaatgtggtattgacatgcacctgccatctatttatcatttaaactgtgttcaagtttgcaagcacaaatacacttatatattgtcttattgtaaggcctcgagattccaaagcacgttaacatgactatggtactgtgatgcatcgagaatctaattcatgtgaatcaatgaaattntgtgcaccattgtcacttgtatgcgtatgttaactgcattaac

SEQ ID NO: 100407 - DNA, 452 bp, Glycine max
  unsure (1)..(452): unsure at all n locations
agcttcggngcgagtctctctattatagtcatgtccttcaatgccaccaccgcatcgtctgtttcctccagatctaagcttttcttttttttcaaatttgaggttggtgataaagaatagaggatcggtaccttgcagtcaggagaaggtgggaatagggtgaatttcataggggggatgaaggagtacttcgggtaaaaagaaaataaaaggaaatattaaaaagaatctgaaacattaatttaaaagctgaaagatctaatgatccataaaaactttcccaccctagaactggtctgattcgaaatagcaaagtcagccaaagggatatcctcctatgccacaccaccatgcatgcaactacttggacgcgttctaaggtgaagtttggaaattcgtacaacactcgtgtagcattaaaatgatgggtagtagcaggttttctatcggaa

SEQ ID NO: 100408 - DNA, 477 bp, Glycine max
  unsure (1)..(477): unsure at all n locations
agcttctcgaacgtgatcaatacattcattgttatatattgaaggatgaagttgtggtgcgtgatcntgtttggtgtcacccagatgcagtaaagttatacaatgcatgtcatctggtgtnttttatagacagtacctacaaaacaaacaggtacagactcccactacttgactttgttggaatgacaccaacagcgatgacattctctgctgggtttgcatatctggaggctgagcgtgttaataatattgtatgggctttggaacgatttcgaggcctaattttaagacacgatcgcctccctcttgttattgtcactgacagagacctagcactgatgaatgcagtgaaaactgtgtttcccgagtctaactaatttgtgtgcaggtttcatatcgataagaatgtgaaggcgaagtgcanatctntaatcgggaaaaaaaatgcgtgggactatgtaatggatagctggggta

SEQ ID NO: 100409 - DNA, 431 bp, Glycine max
  unsure (1)..(431): unsure at all n locations
ntntggagtagaaacatgggaccaactcattntatttcaaatttaaagtcgnatctagtcaaggtctgagagaccatacaagtttcctaacgatttctaattatgtgggccattaagtctatcatatgctgacaatagccgagaagcccatgaatctcttcgggggcggagtaggtgtctgccatcgccttggccttggctaacaagcggggaagttcttgactcccgttcaaggtaagagcaaaccgatccatccacatggctgcctcttggtgtaaagagtcgatcacccttcctctagcctctttttccgcgtatacttgagcatactcgtccgcgattctatgctcgtgggtcgtggctagacctaactcttcttggtacttagcgatgatagctagcatggtggtctccgtctcgcataaacgctg

SEQ ID NO: 100410 - DNA, 251 bp, Glycine max
  unsure (1)..(251): unsure at all n locations
taactttttcttaaaatctacttaggaagtgacaaagtagtgatatttctccagtagactgcactgatctgtagcgaaacatganaaatgcatatacacagagaaaagatatttgattccattanatcatggaaacagataagaaagcgattctcagcctgaattgtaaagagattaaactactaatgctaacaataatgacctgctgcccttgtgaaagcctcgtaaacataatctcttgaccatataca

SEQ ID NO: 100411 - DNA, 248 bp, Glycine max
cttttgacatggatccacacatgagagcgaatatataatgcatactacatggttaacagaaccagaaaacgagacgtgatcacaggtttaatttcctgctaacataactaatatcctacggcattaatatttattgataaaaaaacataaacatcttcatgagtgtctctgctaccacaattccattgatgccacttgagaaggtgcgtgtcacctcacattatcacacactcctcaacctaggagat

SEQ ID NO: 100412 - DNA, 312 bp, Glycine max
  unsure (1)..(312): unsure at all n locations
attctaccaaggtctccccacgaagataacttaagctagactaaaaagtactgttttggagctatgcagccacatcggtgttttcacaaaagtgctttttgttcggtaatccattcacgtgtattttctctatttcaattaaaaaaaaattcaaatcacgattacagggtaaattaacacttncacaaggtcagcctagttatccaacattacagattagtaggtaaaagtacctttattcccacatanagtcgcttgagtttaaaataacatagcacttttgaaatgatatatttcatgctttattttccc

SEQ ID NO: 100413 - DNA, 470 bp, Glycine max
  unsure (1)..(470): unsure at all n locations
cccatcacatgtggtactaggtggctgtcggtcgatggtgcacaacaagtttttcacatccacaaagcgcgcataaacccaccatcccctgttgcccacctccaactgagctcacgtactcccacgtagcccatatcctcgtttctctcaacaccgggtccccatcaatcctcccaagcttccacaacatccaagcaaaacaacattcaaacagcacaagctatcacagccaagcaaaacagagcaaaggcagaaaactctgctcaacacatcaaccaaaatcacagcttttctcacttaaagaccacagtaacaattccttcgttccaattcgttaaccgttggatcgactccaaatttttactggaagtctctagtacataagcctacattntgaccgttgggatctactagcaaacatncagaactcattctgcactgctctnttcacagccaaccacacacaagca

SEQ ID NO: 100414 - DNA, 368 bp, Glycine max
  unsure (1)..(368): unsure at all n locations
atctacatatatcgtccatactttgtcaccttctgggcattctgaggtaacttggcaatgaaatcggccaaagcttgcgctntaattacttgtcaaagctaaaaaagaatgtcatgctctgaaaactcaatggtccatgcaaccatcattccagctaagtcaggtcgatacaagatttttcagatgggttggttggtctgcaccactatctgatgctataggaaatattgtcttagcctccttggttgtgttattagagcaaaaaccacctattcaacttttgggtgcatgtgctcaacccctnggagtgtnatactcatgatgtagatcgacctctgttgttacatgttttcggaccaacgcacacc

SEQ ID NO: 100415 - DNA, 472 bp, Glycine max
  unsure (1)..(472): unsure at all n locations
ttaatgtngtatcagatgatggcttaagcgtgttattatttgattcttcaaacacagatttgcgcaacataatatgataatgcaaatacatgcagtttttaacatttgtatcgatttgcatctaatcaaaataatcaggagtcctgatttgttttaagacatagatgtcttttgacttgacaacacattaagaaacaacatatatacagagtcaatgcacatgcatcatccaccttcaacacacaaaatcattttcctcaagcaccaaatagacaataacattatatgtatgttgaccccatggaaaaccataaaaaagttccccaactccccaattggtcttcacactcacataaattagacagatgaacaaaaacaccgcgtgacctcctcataactcatgaaatagaaagccacttcacaacanataaggagccatttctcttacctttagtcgcgctcactccctaat

SEQ ID NO: 100416 - DNA, 431 bp, Glycine max
  unsure (1)..(431): unsure at all n locations
agctttcttganaagattcctaaagaagctagagcttatctacacacacctctctaatagctaagctcaccttcttgagatgagaagctagaacttagcttcacaccccctataatagctaagctcacccccatgacaaaatacatgaaaatacaaaaaaaagccatactacaaagactactcaaaatgcctcaaaatacaaggcttaaaccctatactactagaatgggcaaaatacaaggcctaaacgaaggaaacaaacctattttaatattttcaaagataagcgggctcatacttagcccatgggctcaaaatctaccctaaggctcatgagaaccctanggccttcctttggatctctggcccaatctacttggagtcttctatccaatgccctngcggngtaggaatgatcaccacaatctgat

SEQ ID NO: 100417 - DNA, 477 bp, Glycine max
  unsure (1)..(477): unsure at all n locations
taattaacctgaaattaagagaaaatgattattaaccattcaaaatggaagtactaagtatttattacctatacttaacagaaaatacttataacactacaaaataaccataaattggaggagtttgatacaatttacacaagttttatacacaaaagttggtcgttttcacagactaacaactcccccaaatttacagttttgcttgtcctcaagcaaaaagagaacagctcacttgtcctcaagtgacaatgacatgcagtgactatgtacaaaggtgtatgaaacaaaagttactgattgcatgataagagaatggagtaaaaatgccctcatcacttgtctttcacaaggtatgcagttatccaaagagaagaataaaatgtaactgaacaattagatggagctaatgataagatagatattaaggaaagtagcttanaccatagtctcatggctactggttcactcaagcat

SEQ ID NO: 100418 - DNA, 398 bp, Glycine max
gcttgttgccattagaagagaatgtcttgttattgtgaatatgactgaaaatggtagtcagtgtgtcagattgattgtgaaggaatgcattaaccgcatcccggtgagagtgtgatccttaaattttgagagaaacgactatcatttagtactgatttttgcgtgaatctctgaagtatggactgaatgcatgaaattgaggatgatgaaggccatgtttgattgtgatagccacttatccaaaaagctgaccatgtgcttgaatgatttaccccttgcacccagtttgagctgaataaattattgatggattgaatctggactctatacagtgttatcttctgctaccttgacttaggttgtacgagagcatcatccacagtaagcgtggtcaaagc

SEQ ID NO: 100419 - DNA, 473 bp, Glycine max
  unsure (1)..(473): unsure at all n locations
ctttttgcaaagaaaataaatcattcgcgagagcaccacatcttatataaacaatatacttgngccatgggtaatcttccttgtaaccgagaatgaagggtaggatgtcaacttctagctttcaaatgaacacgcaggggaaacatcgggctaagctgaaaataaatcactcatagtgtataaaactcacaaggcaagtgtcttatcctattcccaaaccataactgcaccaggactctattttgcacgcaacttcctatcgaatcataaatcaaacgtaagatcacgaaccaataggattttctcgaggtcagtgtttttggagaggaatctgggtgtttcggtcttttcctctttgttcatgtggggtgggatatttccagtcaagaatgattctgagtggcaatatggcttttggagactttctatcctgcttctttcattgatcgagaaatgcttcttttcctttttac

SEQ ID NO: 100420 - DNA, 464 bp, Glycine max
  unsure (1)..(464): unsure at all n locations
agcttgaaatgaggaagngnggaatggtgagacttcctacttttattcgnngaccacagagtggtacctggagatatgtcgcgggggtcaggagacctcggggacgtcagagtggtaccaggctgtgtaatcgattacacagagtaacaagccactggtaatcgattaccagttatgtgtaatcgattacacagtgcattntacaggttttcatgttctgaagctgtgtaattcgtgtttggcctctggtaatcgattaccaaggctgtgtaatcgattaccagagatgaaaagccttgaggtacancctttaattgcatgtagtggttatgagacgcattgngtgctaccgtagttagatctctcgtgaaagagtctacccctttcttttatttcttgtagatcgtgatggcggcgcatgtaatccatgatcgagtggagatggagtgcctatagggagcttg

SEQ ID NO: 100421 - DNA, 450 bp, Glycine max
  unsure (1)..(450): unsure at all n locations
tcgattacacacatactgtcatcgattactttagaagtttttcagaaaatattctcaacaggcacatctttttacttgattcttgaatggctgacaaaggcctatatatgtgtgacttgggacacgaatctggcaagagtttttcagaacaaaaaggtcttatcctcttaaaaagcaaatcgacatatccttttacaaattccttggccaaattacttgtgattcaataaggaattatttgagtgctcaaattgttcaatctatctctttcaagagagatttcttcttttcttcttcttcattctgaanaaagggattaagagaccgagggtctcttgttgtgaaagaattctaaacacaaaggaagggttcgccttgtgtgtttagaacttgtaaaaggaatntacaagatagtggaactctcaagcgggttgcttgtggactggacgt

SEQ ID NO: 100422 - DNA, 482 bp, Glycine max
  unsure (1)..(482): unsure at all n locations
gcaagcttgatgattacattctccctctttttttcaaattcttaattcttcttgacatcatcaaaatcttcatgatntacattctcccccttcttgatgaggacaaccacctgtaggttagaagcaacaacaaagaaaaaatatttatttgcatatagtttactcctccttggttttgcaatgattgcttatatgagacagttgaagaattcatatttttcatatgtaaacaaatggtctcataaacaatagataatttttcttactattttatcttttatctttctctcccnctttgtcaacatcaaaaacaaatcatgaatagagaggaganagatgttaccactttttgcaatgtatgagaatcaagtgataccaaaaggcattaaaacaatcattcaatattaatcaagcaaaaacaagtacaataacacatcaatcaaacacaatcaaatacaatcaatcatcanatatttcaaatc

SEQ ID NO: 100423 - DNA, 443 bp, Glycine max
  unsure (1)..(443): unsure at all n locations
cggaagggatgcttcaatggaggataagaaagagggttataattatagaggggggagcacgaaattgaaggaagaaaaagggagagaagttgaactttgagttgtgtctcacaagactctcattcatcaaagttaccacaagtgttacacatgcttctatttatagactaggtagcttccttgagaagctttcttgagaaaacttccttgagaagcttctttgagaaaacttccttgagaagctagagcttagctacacacacccctctcataactaagctcacctnctttagaagcttctttaagaagattcctaaagaagctagagcttagctacacatacctctctaatagctaagctcacctccttgagatgagaagctagagcttagctacacaccccctataatagctaagctcatccccatgacannaaaaacatg

SEQ ID NO: 100424 - DNA, 369 bp, Glycine max
  unsure (1)..(369): unsure at all n locations
catgcaagcttctcggtatattatgcacctgtatcagactctccgggtgtataagttatgagcgggtgaatntctcgagagctttcgntgttcaatttcgagcgtcttgatatgttatgcgcctgaatcggaccttcgagtgagaagttaagaccatttgaactgctcaatagcttccactattcaatttctagcgtctcgatatattatacgcctgaatcggacctccgagtgaaaagttgtgaccattttgaattctcgagagcttcgggtgttcaacttatagcgtcttgatntttatgtgcgctatcagacctccgagtgaaaagtatgagatttgaattctcgagagcttctgttgtcaattgc

SEQ ID NO: 100425 - DNA, 450 bp, Glycine max
gaagacttccttgagaagctagagcgtatctcacacacccctctcataacaaagctcacctccttgagaagctgtcttaagaaaattcctaaagaagctagagcttatcaacacacacatctctaatagctaagctcacctccttgagatgagaagctagagcttagctacacaccccctataatagctaagctcacccgcatgacaaagaaaagatgacaataccaaacaaaaagtgcttactacaaagactactcaaaatgccccgaaatacaaggctgaaaccctatactactagaatggccaaaatacaaggcccaaacgaaggaaaaacctattctaatatttacaaagataagcgggctcatacttagcccatgggctcacaatataccctaaggctcatgagaacactatggccttcccttgatctctagcccaatctacttg

SEQ ID NO: 100426 - DNA, 465 bp, Glycine max
  unsure (1)..(465): unsure at all n locations
ttagagcgacctgcaggctgcagcttgaaccagtggaaggatgcaatttgttgtgtggaaaaaatgtaacatccagattcatcttgacttatgacttgtgaataaatattntattgtaaattatgatgttcacaacaccaagtacgtagagaatgacattgctttagcttaattgatggtaataaatatattcacatatcttttttaattatttttacctatataaaatccacataaaaataaattatgtttttaattaatatttagtagtaaaaatatagatatcatatttaaaaaaatacaaatgttgtgaaatattattgtagtaagaatatcttatattacaaacatagataatttatgttaaaaatactgaaatatttatcatccagaatacaatacacatttgtaagatataaaatagatgtaaattagaatcaataattaaataaaagaatgtgcatt

SEQ ID NO: 100427 - DNA, 318 bp, Glycine max
  unsure (1)..(318): unsure at all n locations
gagaaattaccaaagcccttcaaagcaactccttcagaaaaagaaataagtgcaaatcattcaggcgagcgtcattanacacacatagtactatcacgccggaactcatttattgcacaagcgaactattgatccacggtgatatgattacttccacttttacacaaaaagagaagaatgggaatgacccacctcagtgtttggctgcccacgcggatcaaaattactatatgcatgaactttttttttaacacgctataatcttattgagaattatgcccatcaacatatatatagcataaaatccttaaattttat

SEQ ID NO: 100428 - DNA, 297 bp, Glycine max
  unsure (1)..(297): unsure at all n locations
agctntntattctaatttagaaatccatgaatgtaccctaatgtctgaggtttatgggattaagatggtcattgactagtccctattttatgatttaacccaattgccaagcgaaggtgtaccatttgaaggtgcattgattgatgattggaagtttgatttctttgtacatgatgcgccgccggtggtttgcaccaaccaagcggatatgaccggaaggcttcttgccggttcattgngctttgaaagtcgcatcctccattaccttattgttcgcatcttgcttccgagatcttc

SEQ ID NO: 100429 - DNA, 162 bp, Glycine max
  unsure (1)..(162): unsure at all n locations
agagaaaatgtcggggtaggaccgggatgctatattggctattattttagnnaatccatggcacaagtctccatctgagtggagcaaaataggccctcttatccgtttgaccgtgagccgtactcacacgcataagtggggaaaatctgaccctctagacgc

SEQ ID NO: 100430 - DNA, 354 bp, Glycine max
  unsure (1)..(354): unsure at all n locations
acataagcacactttgtgtattggcctcattgtttacatgtcttatgacacctaagtacacttagtgaaaaaatacttgatttaggattaagtgggtgaaccataactataaatcactaatcataattagtgaaatttttgcttccaaattggcttcaccaattcaaattcaaattaagtgaaatttgaatatctatttcaaattcccttcaatntgtgtgacatttaggctataaatagaagttntgtgtgcgcatttttcaacttaatcattgagaatatacttanagtcatacctattgaggataaaattatgctcttcttctcactatctttctacgtcaactctatcat

SEQ ID NO: 100431 - DNA, 472 bp, Glycine max
  unsure (1)..(472): unsure at all n locations
gtgagcaggtaaaaagattcgtcttcaatctcttagaggtgactntgagcgtttgtttatggaggagtccgagtcaatttctgattatttttctcgagtattggccgtagtcaatcaacttaaaagaaatggtgaagatgttgatgaggtgaaggtcatggaaaaaatacttcgaactttaaatccaagttttgacttcattgttaccaacattgaagaaaacaaggatttaaagaccatgactattgagcaactcatgggttccttacaagcatacgaagaaaaacaaaagagaaaaattaaacaaaaggaggctacaaagcaactactacaactcaacgtaaaggaagcaaactatgcaaattacaagagccaaagaggacgaggtcgcggccaatatcgtggacgtggacgatgacatggaggagaaagaagaaggtggtacaacaaccactccaacannatcaacaat

SEQ ID NO: 100432 - DNA, 437 bp, Glycine max
  unsure (1)..(437): unsure at all n locations
atagtgaaggccatgttatatataataacagccagtggctttgcattttggtggtttgtttctttgcgtggttcctcttaatcttgtngcatttntcataacanggaacaaggaatgaaggggagagataggaaaattatatgaagttctgacgaacaaattagtttaatagtaatctaatgagtgacagattgatgataagctaaagggcaatttatttattggatatacgtgggtacttgngatctgaaccacctaatcatgtgcaactgatcactgtcaatctttggactcatttgaaatctcctagacatcatagcatgcacagaatgtgttccagaactgcttataatgtcaaccccagtgagtaattacctggtccaatattcttattaagcattcacagctntcatattcagttttttcccttctttctt

SEQ ID NO: 100433 - DNA, 454 bp, Glycine max
  unsure (1)..(454): unsure at all n locations
gagacgagttcacagtatcgccaaagctccttctccgtcttatctttggtgatttcggccgngtcagtggcagctgtcactcaccaaaccaaattcaatgagtcatttttccaatcaaaaagaaaaaaactcttcaatattggaaagaaccaaaaatgatgttatgcatgacaacaaatgcataccttctttagttcggtcttagggggaggcccttcatagtaaaaacttggtactggatttgctttaattaccaagttctttctcaactgcttgatggctgcttcttgctcttcctatcattgttaattattaaataaacaataaacaagttgtttgatcaattcaatgtgcacaaggtaacatggcaatgggaggataaacataaaacaagaaaagaccactgtacctttagccctgcctcatactggttnttctcttctcgaagagctcg

SEQ ID NO: 100434 - DNA, 380 bp, Glycine max
ctgaagctggcggaacccctcctttttccctattattgggaattttcttatattggctcaccctttggaattagattctttgaatagagagaaaatgtttcggaaaaaataataccgagcccttcgtaagctttgagacatttcggagcgattctaagattcttcccgtcttcatcgtcttcgtcgtcttcgcgtcttcgtcttaccggaagttctgaataaaccttcattattctatggccctatggccccactgttacggctttatttattcgttgtttccgacccttttacggcttaccttttaagcgttttcactatcagaataaatgaattcaccactttggtgaaatcgttatcttgttaataatcatcatctt

SEQ ID NO: 100435 - DNA, 466 bp, Glycine max
  unsure (1)..(466): unsure at all n locations
tactcaagctataagctctagtcttcatgttgttcatgctgctccctctatctctaacatttgatttttctaagaggaagcactcgtcacttccctaactaattgccgcgatatctgggcgttggagcacgttggattttcacacttagtcgggtgaagatctgattatgaggggtccaatgagaagaaaaggancnctgngaagtggaccacgacagaggatgacgatttgaccttgaggaggatagctcacattttgtggcattctatggccaccaatatctttatctcattaccaatgtcaacttaagatggatgggaatgaatattcttaatcaatttaaaaacatgaaaagaccaanataaactttctaaaagatatataatcaaactgctaaattaaataaaggatcgagatgagcattaagcctatattataacaataattaagtaccgaagggatcta

SEQ ID NO: 100436 - DNA, 466 bp, Glycine max
  unsure (1)..(466): unsure at all n locations
ctgcagcttctttgaaaaattccttgagaagctatatcttatctacacacacccatctaaaaactaagctcaccttcttgacaaaattcatgaaaataccaaaaaaaaaatcctacttcaaagactacccaaaatgccctcaaatacaaggctaaaaccctatactacaagaatggcccaaataccagggcccaaaaaaggaaaaacctattctaatatttacatagataagcgggctcatacttagcccatgggcccaaaatctaccctaaggctcatgagaaccctanggtcttcccttggatctttggcccaatttacttggagtcttctatccaatgcccttacgaggtaggatngcatcacttggcacctgtccaagaaaggacagccgctcatccacacgcaaccttcgcttcgcgacagttccaaccctagcatgagtgccaatccggggaggaacact

SEQ ID NO: 100437 - DNA, 470 bp, Glycine max
  unsure (1)..(470): unsure at all n locations
ctaagcttgactccgcganngtgatttagccttaatttcactntagttattattctattcaattaagaatgagaaatcccaaagagaaaacgtccgattgatttttcgctttatttcactaaaagggcattttttgattattattttacctcttttttgatttccaacgtggttacggcacaaccgaacggtcggaattcatttaaaccgaaattaacggatgatacgattcatacgatcagtggaaatttattttatttttagattacgcgagaaatgacttanataaatggcttaagcacgtcaaaagggggtataaaaagcgaatgaagacgagaataaaaatacatgaaacataatgtggaccaccacgggtacatagaatgaatngaaaagctcggtttgaggtacttacccgttgaagactgaagaatacgaagaacgaacgatgaatgttgaagaacgatcga

SEQ ID NO: 100438 - DNA, 489 bp, Glycine max
  unsure (1)..(489): unsure at all n locations
gcttctctcggaccttgaacaagcaatcaacttctctttcagaaccatgctatgtgctcgcgactggtccctttcttcccttcgcaacttgagttcactattgctaccccatagagctccgcgaaatttgttccggccatactcttccttgcgagccctcttggtctctcgttcaagggctcttgcggtaattgcattctcttcccgtaacccggcacactccttccgaacgtgtgtagcagccaacttgaacttctccttggcgagttttgcctttcctaactcgctnttgagagctnggacttcctcgtcctcttccggtgcttcaaaattcccttcgctgacgactnttaacttggcgagccaatctaaacctcgtatgcgaactntcagccattcgtggtacccaccaatgatgccattacgaatgcctctaagctcttgatcttntcttaacggngtttccccatgcctatggantctttgata

SEQ ID NO: 100439 - DNA, 419 bp, Glycine max
aaacatctcaattaaggtgagcgtcaatcttctcattatttttcttttcaaagaataaattaaaatcaaacctcaacagaggaattccttaaccccagtctctcaccaaaaaaaatgatcaagcttcaattcttacaacacacttttgtgtgcaactcaaaatattaccttacaataataaaataagtgagattaaaattaaataataagaaacaaaacacaccaatgttttatccatggttggtgatataataataataactaataataatgtaactatacacgttaatatttagtaatatatgtatctactagaaaaaatcttatttcattacgtgattagatataattcacaatctgacgtgggtaagaaattcatataattcatataatgcgcctacatatatgatcattattat

SEQ ID NO: 100440 - DNA, 412 bp, Glycine max
  unsure (1)..(412): unsure at all n locations
catgcaagcttgggctatgattatattctccattttatggatagngnngaatatccttggaatttagccattgttggtaacttaattggtagccttctttcagaaggcaacaatgcattgtcactgtcatagtctctctcctctctctctctcttttgcactctctatatatatgtacctatttgaattcaagcaatataaggaaaagtttctttactttggtccttcaactcgattcaatactttcttttcttaaatatcatgttattccttacaatatttctttttacttttccttcttataaaattattatntctattttaatccttataaattaattttttatatttctcgtccttataatatcttaaataactattttttactatgcaaaatgctatttaaagtatt

SEQ ID NO: 100441 - DNA, 359 bp, Glycine max
  unsure (1)..(359): unsure at all n locations
tatattcctgaagaggttttgaagtttatcaattcagtaattatataaaaaatttcatgtcaggaaatgagataaatgtnagagacagaatagaataatggttgaacataaattaaggaatgataatgtttaatataagtacaatttaccaagtacatttgctttctatgtaaaattaccatttttctaccattacaaatatacacttgagtcattcatgggcttttaataccaagtttgagcataactcatttatgtaattgaacttaaagtcaaccttgagcttgtgtgtctattacgacaaatgagcttgattgagaacttaatgagttgagctaacatagtccatgaactactca

SEQ ID NO: 100442 - DNA, 258 bp, Glycine max
taagcattttaaggatatgcaagataaggggctcctacctaaccctgttacttatgggacacttattgatgggctttctacggttggcagagaagacgatgcctttaagattcataagcatatgttgaagcatgggtgtgaacctatctttgaagttatagagcacttatgacttgcgtgtgttaaagaagagggtctacaggccttcagttttatttggatatttgaaaaccttcgtgcagggacgacattcaatca

SEQ ID NO: 100443 - DNA, 381 bp, Glycine max
acgacaaacagcactgcagcgagcgcatatccatacattggaaatggaaccgcatccaaaggagagacctacatgatatgtgaggatcccttcagagagctacgctgtgctcagagagacccttcacttgaaatgagcctctctggaggctacacatagaatttccgcgcgacgagatttggcttaaaatgcaatacatgacacacctgagactctgaatatctgaatgatggaaagtagggacaattatgccacaaacgaggagcctctttaaatctcaaacaaggtagagcatatgcatacgatacatctgcgggcagaaacaacgtgtaagtgtatacagcttaccttagttctcgaatgatccttatgatcaacaac

SEQ ID NO: 100444 - DNA, 450 bp, Glycine max
  unsure (1)..(450): unsure at all n locations
ttataagactgaaaatggtaaactatatatcaatgatcttgtggaagtctcggataatggtaatgtcatgataatagtatttgtatgtcattttggtaagggaaacacacgtgaagtgctccctgaatttctttttggaacttgatctatcttaaccatctggatgctgctaagttagtttgtttgaagctgggaatttcaatgagtctcgtgacaagcacgttttgctagagagaacttccaagtttcaaatgttagattcttgtaaccataaactcacttgtagtagttatttttgtttgatcaaactcggagtcttacattagtttatatagtttggtttataaattaaaaattatggatcccaacattcttatntatgcttacaatgtccatatgatgttccagtagctaatgcttgtagtagatctgaagctattccctcagagt

SEQ ID NO: 100445 - DNA, 337 bp, Glycine max
  unsure (1)..(337): unsure at all n locations
gattgaaatctgggctctcctgaagggtctgttgtaatttctccatganaacaaagntgggtagagaaaggatgagacattggccctcgggaagtgggtcaatgcataaaagagcatccgccacgatgttggaagcaccgattttatactagattatgtaatcataactgtcgcaacctaatcttctacgggagggtgaggggaaaggtaaaagagcttcttccaagaaggaaaatgcatgggagtcgccaccaacattcattcgaggaaaatgttagaaaaatccaaaagaggactgcgaatattgaaaataagggattgggagtagctcacgcat

SEQ ID NO: 100446 - DNA, 446 bp, Glycine max
  unsure (1)..(446): unsure at all n locations
catgcaagctggngcatatgaattatatgatcaatgttgataatatttgtatgacacaaatttcaccatataaatgaactttcccttctcaacatagtatggtcaaggaaatcttgcanttttttataaacaagtaggtctgggtttctgacctatatttgaacatagttcttgatatgttgtaaaataggaattaagagagaaagtaaaaaaagttactctaatgggatgcactagttattcaattgtagcacaagtgtatctcatcttgctttaatatattgtgatcagatttgtagtgcaagagcttcaccaattaattaatttactcttattggttattgaatttgatttgtatatcaagaaatcagctgggatccacattggttaatgacttgcaagaacaggaaaatgagcttaagcaatatatggtgcaacttgaaaat

SEQ ID NO: 100447 - DNA, 372 bp, Glycine max
aactagctgcttttgggatacaagaacgcccgattttttttatctaatgactgccctcacctactgtctcgtggggggtatgaactgcttgactagaaacttatggaggagaagagcatgcgtggacatgaggaacattcgtgtactgaaagcccaacactgaacgtcgacccaccatccctagtagcgagacacttgatgtggaagatcgcccgcactaagcggcatggccaaatgacgtctgttgtggctcaggaaattgcggactaaattgtcgggcttatattgttttgaggtctatcattggccaagagtggttcgctaacctaatccaatttgttttattctgactcaaccatttgtatatgcatg

SEQ ID NO: 100448 - DNA, 481 bp, Glycine max
  unsure (1)..(481): unsure at all n locations
agcttgtttttccagggaatgactctgtcttatccattggtacatnnaaagcaccagaaagaatagcagcactatctccagcatcagcataatgtccatgaattacatatggccagacaggttggcccccaccaacttgttcactcaatacttttgacatattgagaatgtgagctaatgctccatccacaaattcttgaatataaggccaaagaagttctttccggaggtatttattgcgtggaccgaagggtattcttatgatatatgcaccactgctctccccaaggttatcatcatcatcatcacccggagttagcatttctgtaggctctccatagctccagtcaatntcaggtgatgagatttggcgtgtaaacagatccaccctatatactccagtgcatttggcatgtgcacgagcaagttctaccacatatttaatctgganatacattggttctagcattaatcaccattt

SEQ ID NO: 100449 - DNA, 413 bp, Glycine max
  unsure (1)..(413): unsure at all n locations
tttgccttcactgttgtgaataacagcaccacattatgttcagattcctgaagntatcagtcatgaatccaaacctgtcgggatgaagggtattntgcatttccttgcttctgcaaatgtcatgaactatggcccaaatgtttgacaataagccagttgtggttatctatagaagaataagtttgtaacttttattgatgaatttgatattagtttacagtgatatatatacaagtgaacaaccctaatatgtagtgaatgaagctaccaatctcctaataattctcaacaaatcagaattggaaataatagattngcacggcttaataattaaaggaagggaaaactaattattatgattgatatcctcccgcaacgtgataatctggatgagagatgcaacttggacagta

SEQ ID NO: 100450 - DNA, 460 bp, Glycine max
  unsure (1)..(460): unsure at all n locations
agctngaaagatnggccgcttgaatngatattgcactggatctgggtaacaagttgtactttaaacattaaactggtnttttatgatatattcacaaacatatttgtctttnttattcgtttaaactttgtagttgcagagttcagatgtatattgttaagcaaataagttggtaacggaagtatgagcctaaagctacagagccaatagaacaagcaaacattaatttattcctaacaggcaattaagttgacaagcagggccgtttatatttgttggtaaaactaataccgacaaacatcattatttgaatcaaataattagttttcatactntattaanaactgggtagcgtgatatggtatggatacgggaacaattaaacaattaacattagcaatggcaaattcagtgctggcatgcacgttgtgtctgaaactagcgcgggtcatatctagca

SEQ ID NO: 100451 - DNA, 392 bp, Glycine max
  unsure (1)..(392): unsure at all n locations
tcagtttgaattcagaggaactgtttgagttggggattgtttgtaaaacaattntttccacagaacacagtgctcctctgtcgataaggatgcacttcaattgaaccaaacctgcgaggtgcagttgctttagtttctgaaaccctccacattgaaaattcaaagtttcaccttcataagcattgtcacttaaaaagaggagcatcaaccttggcatattttttagtgatttcaatgcatcattantcaacctggagccgcccaaatacagttgcacaagatttgggaactgtgaaatccaattgggaaaccttgttaacttcccaaataggaaaagcttcctaagtgtagacatatgtgacgtaatgtacaagtcaattacttcactctca

SEQ ID NO: 100452 - DNA, 412 bp, Glycine max
  unsure (1)..(412): unsure at all n locations
tgcaagctntcagttctctatcgtgttccgatgacacgttaattatgaactcttcctataaacatcaattagaagatgttgattctgttggtcaaatggtgttattgttgtgactactttatattttcgttagattccaagcattatttccgtctataggggttgctcttaactgattgttttgagttattaattattcaagttgatttgattggaatagtaaatctggatctattatgtaatatattagggacgaaatcttgcacattgagaatgatgtagtctcctcaaatatttgataaccattgttttcgagtgatagatgttgtctatgtcaaggctgtcgatgaaattagcaatgatggacagacttttgcgaacaagttttgtattgccatcacagaaaagcatc

SEQ ID NO: 100453 - DNA, 437 bp, Glycine max
ctcggtgagtaaggccattagaaggatcttcagttggcattgtatcaagaattcctctagtgccatcttctctttttaacctagtactagaagatgattccaaatctcttgtctccacatgagcagtagagccctttcaatctaaattctcacaaatggttccttgtgaacaaatctgatcacctggtatctcaagttcgtcacttaccatgttattaggttcacattgttgagaatctatagtagggcctgcttgtcagcttctagctccagtttcttcaatagtattaacatcaatatcatcctcggatgaggtatcaaatgtgttactggttgcttgactgttaccaaaattgtcctttgaaaaacgaaaccttccctattcaaaagttaacatcattggcataaagcatatacataaaacaatttaacatgga

SEQ ID NO: 100454 - DNA, 331 bp, Glycine max
  unsure (1)..(331): unsure at all n locations
ttttcccagaacacatgttcctctgtcntaaggatgcactttaattgaaccaaacctgcgaggtgcgagtgctttagtttctgaaacccttcacattgaaaattcaaagtttcaccttcataagcattgtcacttaacaagaggaacatcaaccttggcatatttttaatgatttcatgcatcattagtcacctggagccgccaaatacagtgacaagatttgggactgtgaatccaattgaaacctgttacttccaaatagaaagcttctagtgtaacaatgtgacgatgacaagcaatacttactctatcactgcgcaatagagttttt

SEQ ID NO: 100455 - DNA, 447 bp, Glycine max
  unsure (1)..(447): unsure at all n locations
cgccttacaatgagtggcgatggaggttaagcgtgaagtggttccacagtgacccaattattgaattccgtcaatcggtgaaaaaggtggaattacctatgttcactggngaagatccttgcaggtggactacaagagctaacatttattntaaatcaaggagacaactctagaaatccatgtgggtttggatcaattgtgcatgaagggatctacaatacatttcttcaaaccattgttggacgatgaggttgaaatcacctgtgatcatctcanaggcaangtngtggagggataaggcgacattggcaagggagacatttataaacaactcgcggtgatacattaatgcaacanagtcaatgagtacatncatgaattcaaacattggttgcgcatgtatcccatttaccagatgatcaatactttggttactttattaatgga

SEQ ID NO: 100456 - DNA, 483 bp, Glycine max
  unsure (1)..(483): unsure at all n locations
agcttgccacccagctcgcccaggcgagctatgttgctttcttcagaaggcaccgccttctattggttgctattgcacccctcctcctttttactaaatacaccccttgcctttttttgctaattctttttctgtaacgntagggaaacttacgaattacgtaacgatacttgttttccttccgtaatgttacggaaccttatggattacgtaatcatcccttttttgcctttcagaatgttatggaactttacggattgcgcactaacactttcttttaatttccggcatgtcacggaacttcacggattatgctacaatgctttcttttgactttcggcatgtctcggaacttcacgaatngcctaacgatgggtgtcaagtacctcgaagtggtcaaacgagggtcgcatcccataaatggatggtccccagacgaaattagggtatgacactggtgcagtgacttcttttgataccgaa

SEQ ID NO: 100457 - DNA, 394 bp, Glycine max
  unsure (1)..(394): unsure at all n locations
agctngatggttcttagtagatacttacgtttgtaggataatataatggtggtgatatccattggagcatgatgatttctgtagctaaagaggctgaaattttgacttggaaggtggaactcaactagacactagctttcatgaaaggtgatgttttagaattttagtacaggtaacagaatcgttataggtacatgagggagtttatggtagtaaagtaaattgcaacttcaagagaatgaagtctcggaaaattcatgcttaggaacagatagactaaatttgactgggagacgataattccacagngtgtgaacattgcattgtgatggctcacgctcattgaatccaatatccaagatggaatgaatgaatcgcaggtctgaattggggg

SEQ ID NO: 100458 - DNA, 408 bp, Glycine max
  unsure (1)..(408): unsure at all n locations
ctaagctatagcatgtgaaagactgtnttaagggacacatgtgaagtgttcttgatctatttttatatcacgaatattatttatgtacctagtttaatgtgcatatatacaagcatttgtatattatatttgtgcataaatattgattctcccttataggcaattaagttttatcgctgtttcaatgtttgtgcgatggcatttactggatccggagattctaatgacggacttttattgccatcatattgtgagcatgaaaatgcttgctctagcccctaaccttagttatctttacaacattttttcatgcaaaacatgtgttaagttctactggcacagattcattatagagcgatctgaaacatccctatgatttgtgtttatctgaccgagacgggactaata

SEQ ID NO: 100459 - DNA, 195 bp, Glycine max
ggagagagtaagaggaaattgtttatggaggaaggggtgaaaagaaatagaggatctgggactagaaagaaagtaataagggggaaaagagaatgaaattggagagagagagagagaagaagaggaaataaaaggaaaaggggaagaataaggatattatagaaagaattgaagaaataaaaatgatgagaggat

SEQ ID NO: 100460 - DNA, 405 bp, Glycine max
  unsure (1)..(405): unsure at all n locations
agcttttcctctaatttctctcgaagggtttcaagcgttagagagaaggagaaaggattagagctttcattttattggtctcgtgcgaggaacatttctctcaccatagatattatttcacaaatcccaacgctgaggatgtgcaaaaatgaattctaatcctaattttcaaatttcaccatgatccaacagttaacgagtccaggatcgtagttttattgagtcaagtttaggtgtatgccggaaaaagagagctacgtatgagtccgagatcgtagtttcacacaacatattttttcgcaaatctcaatggtggggatgtacggagatgagttatgaacttggtgttcaaatntcataacaattccacgattaatgagnttggaatcatagntttactgtgat

SEQ ID NO: 100461 - DNA, 449 bp, Glycine max
  unsure (1)..(449): unsure at all n locations
agcttgagagnttatgtaaactcatgagttatatagactcgactcgtggactcaacttgtaatctcataagagtcaatttcatataaaaataataacaaaatatttataaataacatatcaattaaatatttcaacaatataataaagtaaaatagtaaattataaatttaacaatacttaaataatcaagtctagtaatgcatcactactagataacaanttgcaaatgttatagtagtggtaaagtattctcatcaagggtttgatgttattagagaacaagggttgatgttattagaggtgagaaatttttgattcagaaacaatacaataaatggaagtatgttgaacactaaacagacatnaaataacctaanatgaacttacgtttggctaatttgttaacttgtgactcatgacttgggaaaactcgagagttatgagttac

SEQ ID NO: 100462 - DNA, 375 bp, Glycine max
  unsure (1)..(375): unsure at all n locations
agcttgtattcttaagaatcacttggactatactcacccaccggctatcagaaatggggtagatgattccaacttgcaagagcttggtcacctcctttntcaccacatctagaatgatggggttatagtcgtcgttgtggctgcctcactggcttagctccatcctctaaaagtatcctatgcatgcaggtagatgggctaatactaggaatgtttgctaaagtccatccaatagctttcttgtgcttctggagcactaacaacaacttctcctcttgctcggcagtaagggaggcagagatgatcactggaaatttttccttgtcctccaagtaagcatacttgaggtttgctggtaagggcttcaactctgat

SEQ ID NO: 100463 - DNA, 403 bp, Glycine max
  unsure (1)..(403): unsure at all n locations
agcttacaattccctgaaattagaataaataatttgacatattnttttgttgcattgcgtttaagtttttctcagtctttagtatgtatttatagctgttccatgctctgaagttgtttttttcaatttacttcaataataataacctacatgcatgattgcagagatgtagaacattgtcgtacctaactctcacatgcaccgagaaccccattaatgtgtggtgttgcacagtgttcactcacatgcaccgagaaccaaaataatatggttctcaataatccacgtgggctcgacacccgatgcagaacacttgcagtcacacttattgatgcacgaacagtctgtcgctttaatgtgtgttgttgatactgtcactcaatgcactgaaaccccataatat

SEQ ID NO: 100464 - DNA, 318 bp, Glycine max
ggatgtgccaattgtaggtggaaagttcatgtggatcagtgccgggggtaaagttgttatcagacttgataaatgcttaacttgtgcaggatgactatctaaatggcccaacatagtgccatatatcctccagagaagcttctcaaaacactgcgcctgtgtcttaaaacatgttaatcaagattgggggccttgaccctttcgatccatcaatgggtggttctcacacccatctttcctaagttttgtacaagagaagaaaaatagcttcaagattgatgggtgggctacttttgttattaaggataaatttaaact

SEQ ID NO: 100465 - DNA, 433 bp, Glycine max
  unsure (1)..(433): unsure at all n locations
actcatgaggcccaagcacagatgccacatagaattatcattggacacatagcttccagcttgtgaaatagttgagacacagcatgtcgcagtggacccttgcagaatntacagatttctttgctttgtcacatgcaatgacacagacttcccttttccctctaatttgcataactccaccttcaacccagcaagaataaccttttgaatccatggcacccacagagaactatattttcttgagctctggaacatgatcaacctcgattaagggtctaacaatcccatcatgaatcttgattggatagaacctatatgatgtgccattattttctcctatttttaaccctttctgcccattnatatacttgatagctaattggcaatttataggcagtttatatttgggccatcagctattgatgtttaatct

SEQ ID NO: 100466 - DNA, 331 bp, Glycine max
tctcaccttagtaagcatgggaacatatctatcggcttgagggtttaccaagtcaaggttaaaggcctagataccaccagcatcaatgaattagggcggctgatggaacctctccaaatgcaagccttccgcaagacttaccgaaagatcttagagttgaccatagcagaggtatccataaaagccattgcatcactcacccaatcctacgaccagcctttgagatgctttacgttcggagacttccaattggtaccaaccattgtagaatttgacgaaattctagcatgtcctctcgggggaagaaaaccatacctttcctcccggtgtc

SEQ ID NO: 100467 - DNA, 275 bp, Glycine max
  unsure (1)..(275): unsure at all n locations
agctntaactcggatgtccgantcangcgcataatatatcgagacacttgatattgaataacataagctctcgagagattccaatggtcataacttttcacacagatgtgcgattcgggcgcataatatgtcgagacgctcgagattgaacaaccgaagctgtcgagaaattctaatggacataactattcactcggaggaccgactcaggcgcatgatatatctagactctcgaacttgaacaacggaagctcccgataaattcgaatggtcat

SEQ ID NO: 100468 - DNA, 471 bp, Glycine max
  unsure (1)..(471): unsure at all n locations
aactaagcctncaccantggtatctcgactcctatgggcacaagagacgttactaacttatcttcctgnaacaacaatcttcttcatcatatcctccagttttacatatacctcgtttatctgtggatgactggtttcatctacagtaaacacatgtaccctgttatcaagctctatccagctacaacctggactctttcgaattcctttcactttcattaactttctcatatcagcaacattttctagctccccagactctgcatatatatttgctagaagaacatagcctccagaatcttcaacatttaattgcatcaacttctttgcggcacgctctgctagtattgaatcgtgatggattcggcatgctcctagtagagcaccccacacagcggcatttggcttataaggcattccgtctattaaattcttggtctggattagtaaccctgcttggtcaagcagatc

SEQ ID NO: 100469 - DNA, 321 bp, Glycine max
  unsure (1)..(321): unsure at all n locations
agtgatttcacgaagggtttcgaccgttcttcgacgttcttcattcgttcttcaccgttcttcagtcttcacggggtagtacctcaaaccaagcttttcgattcattctatgtaccacgttgtgaaccanaaaaaagagggtaataataatataataataaataaataaaaaaatacctctttagtaaaataaagtgaaaaaatcaatggacgttttctctttggggattctcattcttaatcgaatggctaatactaaagggaactaggctaaatcactcgcctagcagctcgtcacaaatatgttttggagttatattt

SEQ ID NO: 100470 - DNA, 479 bp, Glycine max
  unsure (1)..(479): unsure at all n locations
agtgatagaatcataagcaaaggtgacaatagattaatttaattataactcacttaanaaagaacctaatgcactgtaactttntcataataatacctcaagttgcctgagacttccaacattttgggagttacttccaataccaagtgagcgtgatgaaacatcagtgcctccatgcaaacgtttcataagttntacacacatatcccttgcttctgcaaccttggttagtgcatcttcagtagccaaaaattgttgaacatgagctttttgtgaatagagatacaacacaagttcaataactcctcttatgaaaacaaaatatgcagtttaatgatgaatccataacaatgttattttcatatgtgtgcctgattgaagaatgcaagtttggattataacagcaatagcatatgtaatatccttgtcaataagaacaaactaacagaacattcattaagtggtaagttggatgagcg

SEQ ID NO: 100471 - DNA, 461 bp, Glycine max
  unsure (1)..(461): unsure at all n locations
agcttatntagtcaacatcataaatagacatgtactanaatacccgtacccgtgaatacccgcccgaatccatcccgactttcacgggtaatacccgagttgactgagtatgggttcgggttttccccgataaccaaaagtcggatataggagtatgggattactagatccgtcctgatcccaaacccgaacctgccctgttacttaaaatctttagaatttttgcataatttaatcaaaagacatacaatttttattactagttaattgtattttagaatttttacataatttaatattattgtcttaacgaattttgtagacacatgcgctataataaatttatggatatataagtagttaaaaataaatgtttaacaatcaatttattttttctaaaatcaaatttttaatatttcttntaagaaaatatttntctaattcgaatcgagtatggaaag

SEQ ID NO: 100472 - DNA, 356 bp, Glycine max
  unsure (1)..(356): unsure at all n locations
ttatcagcgagcggcaaaggattctccttcattctagcatacagtctaacaccgcagtcatgacggtttagatttgcaaatgctgatgttattgcacctatatagaacagtgtctgtgaaacaacgcccttcaatacacatttcattgttcagctcatggacctttctatgatgcccntcttgcatcacagagattgaagtgcttaccgtaggtctgntcttgcgaacgttaatctgtgttaatacacatgatgccctgttgaccatggcctcgattggctttcacactacaccaaacatcctatgttcatgcaagcagggaatcaaggccatataagaggtcgagtcatgttcaa

SEQ ID NO: 100473 - DNA, 379 bp, Glycine max
  unsure (1)..(379): unsure at all n locations
atggcctcagcagactccttatttcctaaggatatttattttatacctccaatctttaatggagagggttaccactactggaaaacccgaatgccaatttttattgaggcaatagacttaagtatttgggaagccatagaaatggggccatatatacccaccacagtagaaagaattaccatagatggtagcacatcaagtgaaagcataacaatagaaaaacctaaagataaagggtctgaacaggatataatacgagtacgagacaatntaaaagccaaaaacataataacatctgccttgggaatggatgaatatttcagggtttcaaattgtaagagtgctaacgaaatgtgggacactctacaattaacacatg

SEQ ID NO: 100474 - DNA, 435 bp, Glycine max
  unsure (1)..(435): unsure at all n locations
agcttctcaattccctctntccaatcgtctctatcatgcttttagctcctggaatgccatctctgtagcttcttcagatcccaattgctccgtatgaaatcatcagtttcttacatttcttacttggagaaagtgatccaaggcaagaaactgcatactnttttgcagtggtctgggggcttggatcaagcaactggaccagatttggcacacttttatcatccttcttaacctctctccgattctgggacagaaccattaggcttgaaatcgctggagcagcaacctctctagcattanttgctntagcctcaagcatctttataagaagagggatgcacccggcttcaccaactattttcttcatctccattgagctgcaaacacggcagatgatagacgcagcagcttgttgagcacccaatgatccggact

SEQ ID NO: 100475 - DNA, 476 bp, Glycine max
  unsure (1)..(476): unsure at all n locations
actcagctgattctgttttttatataaaacttctctacattttngtttcttgaacaaaaacattaattaattagcaacacatttaatacattctttatttggttgttttaacagctttatttgaaacttgttaagactcataacatgcatggtgcgagtttcacttcttttttaagtaattaagtataccactcatttcttttttgtaattcatagtaaatttcagcaaataacaaaaaattctattaaaaagaatatatagttaaaatttgtgtagtaattctctcaactctcaaggtcaagggattcatacgtagaccaaatatatctatcaagatagactcaacggccaagatccataacttcctcagtcctcagccacaaaacatataagcttagttttattgcatataaaacaaaataaagacttgcaagaagaaaattcgtaatagacgagtatattcaaaacttccatg

SEQ ID NO: 100476 - DNA, 485 bp, Glycine max
  unsure (1)..(485): unsure at all n locations
agcttgccgatttagtgttcactagcgaaatgatcgaagtgggtctgagaagaggcanatatgattatcttgctttgatgaataggaaacctggggcaaatggacagaataagaaggagggaggaacccatgttgtgactggcgttcctacatggccaaatntcccactagctcaacaatatcaatactcagccaatatcatcccttctcattacccaccaccctattagccaagaacacccaatcatccacaagggccacccctaaatcagccacaaaacccgcctgctgcacatccgataccaaacaccacccttaacacgaaccaaaacaccaaccaaggaaggaattttccagaaaataagcttgtagaattcactccaattccggtgtcgtatgctaacttactctcttatctnatcaataatgcagtggtagccataatcccagcaaggattcctcaacctccactttcccgaggatac

SEQ ID NO: 100477 - DNA, 243 bp, Glycine max
gaacgaattaaagtaaaacataaacaacagatcaaatccgctccaataacaagattagttcatctcacaagattgtgtcaaaataatccataacacagcagaagattaccctgaacgggttgcattccacaatctgaggaaccactagaaaggatgaccttgttcagtatatggattcgctgcaccgactaaagtggggcgagttggcatcatcgttgctcatgcttcaccctgtggaagagt

SEQ ID NO: 100478 - DNA, 369 bp, Glycine max
  unsure (1)..(369): unsure at all n locations
agctntaagtgtgagaattgaanatatagagttattatgtgtggtaagatcatctaattcttctcatggaaaagatgatggatatgaagaggatgagagaggatggaggaatgaaagggatagggagagaagaaatcatacaagatatggaggtagacaaagagaggaagggattgagggagtgaaggtgaagatccctacttttaaaggaacttgtgatccaaaagtgtatcttgagtgggagatgaaggttgagcaagtttttgcttgctacaactacaatgaanaagaaaatatcaggtctccctagagnttgagggatatgccttagtgtggtagaatcaagtgaggagtgatgtngagaggatg

SEQ ID NO: 100479 - DNA, 426 bp, Glycine max
  unsure (1)..(426): unsure at all n locations
tctcggctcatgcanggaacgcctctagttcaacattcgtgttgtctaatgcacccacccagagggaagctccccaagtttcaactccgaacgcgactcgaccggccggtaattccaacacgacaaggaacttccctccgaggccgttgccggaattcaccccgctcccaatgacgtacgaagatcttctaccatccctcatcgccaatcatttggccgtggtaactcccggaagggtcctcgaaccccctttcccgaagtggtatgaccctaatgcaacttgcaagtaccatgggggtgtcccggggcattccgtcgaaaaatgcttggccctcatgtacaaggtccaacatttaatggatgctggatggctgactttncaagaggatcggcccaatgtgagaaccaacccgctcgccaatcatg

SEQ ID NO: 100480 - DNA, 475 bp, Glycine max
  unsure (1)..(475): unsure at all n locations
agctngantactcaatgtagcatatcaaagtgttccaaacttccagtgccccagtattgtctcgcagatgcaaataagtcaccttaaagtacaactgaatttgattgtgaattcagcgtattcattaaaaactcacttagtttgaccgatttctttaggcatctctactggatgatgttntgttgtttcactcgtataaatcagatntatcatttntctaaatgttggtttttgaaatatttacagttgaaaatcctatttaccttagccatctgccatgttttcttatatacagagacacttgttcattctacattggaacactgtgatgatgcggatttcacttttactgtcttcttcaattngaaagagtacatagtatatgtaaaacagaggccttatctccacacattcttggagagggtatcagagatgtttgaagtagtaanttttactgccagccaaagcatatatg

SEQ ID NO: 100481 - DNA, 432 bp, Glycine max
tcttatccaaggctcatcttggtggtgaagctccttcttccttttcttattccctagtggatgacgcctcctctcacctcttctcttttgtcttccgctgcatctccatggtggaaaatcaccattgaaggacctcatttaagctcaaagatctagtctccatagaagccccacaagcaagcttccatcaagtggtaatcagagcacaagagcttcaagtaggtgctccttaaacctccattaatttttttgctctaccttctcttccattgctgattcttcatttttttctccatgtatctcctcacatgtcttgtgctaaatgttgttaacacgattctatagagtttccaccgattaaacttgctatagaagctagatttgattctctatggttcacatttcttgttattgttcttgaaccatgaattg

SEQ ID NO: 100482 - DNA, 391 bp, Glycine max
agctttgagccaattcaaacgacattatctttttattctaacgtctgactgaacccaccgtctgtatgcgatgttcgcccaggaatgttgatcctctcttgctatctaaacaataatgacttttgatgcgcatgagtgactcgaggctcttttagatcgagacgctcgagattgaatgttgaacctctgatccatttctaacgacaataactttttactcggatgaccgactgagtgacttaatatgtcgggacgctctaaattgaatgttgaacctctgatctaattcacacgacattaactttatattcggatgtctgattgagttccgtcatatttcagacgctcgaattgaatgttgaccttcttaccattcaaacacaattacttt

SEQ ID NO: 100483 - DNA, 173 bp, Glycine max
aaaaaagctcgcgtaatttgagcgtgtgtatatacgggactttttttacttccggcaaaagtaattgcagatgaattggctcaaaacgtaaacaatcaatatcgagcgctgggttatattatcggagtcattctgacattcaagtaaaaagttattcgcctatgagtgggctt

SEQ ID NO: 100484 - DNA, 444 bp, Glycine max
  unsure (1)..(444): unsure at all n locations
agctttgggntcatgtttgttcattccaatacctatgggaggacatcgatgagctaagtcaatagaaaggcttatatgtattaacctcattaacccgtgctttcgctctacttaaattggggtacaaagttcaaattcacattggcacaagtagctttcggtatgatcattggagggggggacaagcttctggcctaggaagtggacatgattcatatccatgatgtggatctgaggatatgtgatgtcttttctagaggatggaaattggagaatctttatacaaatataactactgaggttagggatagtattcttggtatgagtggtgttattcacccaagcatccttgacacgtgggtctagtcagatgaccttatnggttagtattctgcacatactagttacaattggctttngaagcaagtagagttgaatccaaat

SEQ ID NO: 100485 - DNA, 323 bp, Glycine max
agtgtaccagatgactgctgttccagccaaactatcttgaaagaaatgcatcaataacttctcgtccctagaatatgcacccatctttcgacagtacatttttaggtgattcttaggacaagttgtccctttgtacctatcgaagtcaggtaccttgaacttcggagggatgacgacgtccgacactaggcacaggttggtcatgtctgcgaacggataatcgctgaatccttcaacagccctcaatctctcttcgatgagatcgagtttcccctttccttccgctgccgggggaggccctcccacggacaaaaacattggct

SEQ ID NO: 100486 - DNA, 492 bp, Glycine max
  unsure (1)..(492): unsure at all n locations
tgtggatcatctatatcaactgcggatcaattaanacctatgtatattaactcattgcatatgtggatcaacctgaatgagttgggtgcacaaaaatattttaaaaaatatacatggatatttttgtcttttcacgttaagtgctgggtacatcaacaataataatgggtgcacctagcaacacccaatatacttatgttaataaagaggaatagtggggtgaataaaaaaaattaaaaggaataattgggtaaaaaaataccagaaccacaagggaagtgacagctattctttgttcaaagttcaaagcatcaacaacctatgctttccgtctgcacaataccccaacatgccaattaagttcatgaggttaagccttccaattatgcttacttcagccagaaagtcgctactcgattatcagacaacacacccttatacacaatatctccagcaccctttccaaaatcagattcctccttgcactcggcg

SEQ ID NO: 100487 - DNA, 486 bp, Glycine max
  unsure (1)..(486): unsure at all n locations
ccttgaaactcagctaagactaatacaaggcatgggaaggcccatgacaggagctttatctataaagaccaagtagctntacattatatagtggctaatatgagggtaatccaattgcatgaggggacccaatatctagaggcctgcatgcgtgggttgctagtcacatatattgcttgcttggagtgagaatatgaggcaattattgacttaggcatttaataaaataataataataataaatttctagtaacttgttttgagacctagacttcaagcttaattatacctcacgtaaccactaaagcattttagttatgcttacaatgttgagattttgtttttcttttattttctaacaagtgcataagaactgatttgtataaatcatttttttgaagtgaatagacaagggacttttgttgggttttatgattgaagcgtgagaaatgtctctgcaagggttcttcctttgaactattaatc

SEQ ID NO: 100488 - DNA, 468 bp, Glycine max
  unsure (1)..(468): unsure at all n locations
catcaagcttgtagtggtgtgggaagctataatcatttcttcttgttgcttatattggagtgaaatttcagttctcataaaatgtataatatgataaatcagtaatgataattaaattgtgaaattccataaaatttttatttattggttggctttatgtctgaatgtgtctatgtgtagtaaggaatgattaaggctctgaaacttagcgtaatagaatttatgttgaatgatgcttctattatggntagccaaagaacaaggcctctgtccaatgctttctctctgtgtgcacttgctacatgtgcatcatgcccaaaataatataaattcattntacaataatgatcatagggagaaaataagtatccaagaggcagttgtgttgtgaaaaagtcacgactttcgtgccattatatcccttaagggatcataatctatngaataaatcatccctagtgggacaac

SEQ ID NO: 100489 - DNA, 450 bp, Glycine max
ctataaaactaagcttcgaatccgcggcggcgcgtggcctacggcggacgcgcgttatggttatgatgcggctctctcggcggcagattgcggagtttgcctccagggcctctctccgggggcgccaacgcggggatttgatcagtggccatgagagtgggcgagtgggcaacggctgaaaagttaacaataacaaccgcaaaacgaggtaaaggcaaaaatactgtaagacgtaagtacagacattgcgctctctcactcaggtacagtaccagtagccgcggatgtacatatactcgacgtttgaagactagtgaacgtgtgtattgtgtggtccacctctcattctctcagaacgtcaattgttctcagattaacgagaataaaattgcgggtggcgggttgtacatagtgcatcatcaatccgcaagccgactctttatatattct

SEQ ID NO: 100490 - DNA, 423 bp, Glycine max
  unsure (1)..(423): unsure at all n locations
gcttaatcatggncgactctctgcattctatgcttcttaagaaaaatgccaactcccncaaaaagttgattcaagcttaataggtgggttggtccgtgctcgcaggcttaacgcaaatctgaatcgcttatcgcgcataagtggattgtggcctagcgtgcttctttcgcttagcggatgagtngaagcagtgtgcttgatgacctagagtggtgcgatcagcgaacctaacagctcatcttcttctggattcttcgtcgcgcttatccactgagtgtcgcgcttagcgaatgctcgctaagccagcagattggcttatcgagatagtgaaaacaacactttngccaatttgcctaattaacctgaaattgagagatattgattattaaacacacaatacaaaagtctaaattatatattacc

SEQ ID NO: 100491 - DNA, 493 bp, Glycine max
  unsure (1)..(493): unsure at all n locations
aaaactaagcctcgaccaaagcaactcanaatctaggtatctaagacccctctattatttgattttcaagggtngagaagcgaaaatgagaatggggtaaatttggagcaaactctcacctcacacaagtctataaccttaatctaaacttgctcaaactggttttacgcctaaaattccaccgaatcaaaatttgactcctcaacacccaatttaccctagaaatggctcttgccttcactttggacattcatttttctcctttgcacagcccaagctttcccatagtcctaaatgacatttcaaactatgattaactccctttaacctccaattaccaccaaatccagatttaacctgttaaactctcaaagcatcactcttttccactcatagcactacattctcactttctaaccctaggttaactctaccattcatctctagcaggtntncataagcaatttcagcacacaaacatcacaagcatcat

SEQ ID NO: 100492 - DNA, 117 bp, Glycine max
  unsure (1)..(117): unsure at all n locations
taagctgcttcttgctgacagggggacggtgagaangactgtatactgtctgatggagggggagaactactggaaacggcagttgataccgcatgatcgtcgcacaaccaaagaggg

SEQ ID NO: 100493 - DNA, 493 bp, Glycine max
  unsure (1)..(493): unsure at all n locations
atcctctgagtcacctgcngctgaagctgccgtggactgacccatttctgttcttctcctttagactggtnggccctaagctcttgaccttgacttgatagaacctccttttaagcgaaggtgtttgacttgatcccatgttttactaaagtgaaacaaaatcggtgcgaatcaaaactccgacatctatcatgggtggaatggatgaatgcatgaagaaatgcatatgatacagatgcaatttatgaatacaggagcccgagaaattgtctccttcttagatacaacgtcttggggtagtaaagtgcccaacgaatgtatttaagaaggtgacacggaccctccgttggtttgttaaagagaggggatcaagacagaacccgtgcgtgatgcatatgcgaaaggcgcaacacgggaatgtacatagtatgacaatattcacaaaatataagcanaagggtacatgacacttatgcatggcagtgtgaaaaaa

SEQ ID NO: 100494 - DNA, 465 bp, Glycine max
gcttcatgcagactcgtctttattcttaggtagaccaaagggccctatctgatatgatactggaaggaattccatgttgtcataccctaatttcgtccggggacctttgctcgatgacgtgcgaccattctttggtcctcgtgaggtgcttggcacccatcattatgtcaattgtgaaattccaggacatgccgaagaaccaaaaaaatattgatgcacaatccgtaagtttccgtgacacaccggaaatcaaatggaagcatcgttgcataattaagtgaggatccgtaacattccgtaagtcacaaaggggatgattatgtaatccgcagggttccgtaacattacggacagaaaacaagtatcgttacgacattcgtaagttttcgtaactttacgaacaaagaatcaccatacaacagcagagggggtgtacttagtaaacatgggggtgcatatagcacc

SEQ ID NO: 100495 - DNA, 385 bp, Glycine max
  unsure (1)..(385): unsure at all n locations
accaaaattgcattaccaatgaatgcttcatttacccaacaacatttatgagtacttcatgttgtggatagatctaaagttggcatccaggttgaagaccagtttaccaaatctagatagattctagatgactacaaagttntctcacagggtcaaatcctttggtttggtttgtgtgtgtgtgtgtgtgtgtagcattctttcctatattacttatttctttttaccccttttgataaatggacagactatagacatttcacaagagtgtgtatttcttgattgaagtaaaaagacggcataaaaagaatgtccatatctttgaatggtaaacataaggcttctttttaaatacgtgtcagatacatgtgtgccaacttttgtc

SEQ ID NO: 100496 - DNA, 454 bp, Glycine max
  unsure (1)..(454): unsure at all n locations
agctttggttatgctgngaacgcctctagttcaacatccgtgcagcctaaggcacccgcgcagagggaagcttcccaagttccgactccgaacacgactcgaccgggccgtaatttcaacaccacaaggaaactcccttccaggccattgccggaattcaccccgcttccaatgacgtacgaagatctttaccatccctcatcgncaaccatttggccgtggtaactcccggaagggtcctcgaaccccctttcccgaagtggtatgaccctaacgcaacttgcaagtaccatgggggtgtcccggggcattccgtcgaaaaatgcttggcccttaaatacaagggccaacatttaatggatgccggatggctgactttccaagaggatcggcccaatgtgagaaccaacccgctcgccaatcatgganggggagaggttaatgcagttgagtc

SEQ ID NO: 100497 - DNA, 473 bp, Glycine max
  unsure (1)..(473): unsure at all n locations
cgcagccattagaagagaaagaacatgtgattagttttatgtctgaaaatattactcacttcgtcagattgattgttaatgaatgcattaaccgtaacccggtgagagtgtgatccttaaattttgagagaaatgactatcatttagtactgatttttgcatgaatctctgaagtatggactgaatgcatgaaattgaggatgatgaaggccatgtttgattgtgatagccacttagccaaaaagctgaccacgtgcttgaatgatttatcccttgcacccagctttgagttgaatgattgagtgattgattgaaccttgagcctatacagttntatctcctgctaccttgtcttaggttgtaggagagcatcatccacagaacagcttgggtcaagacaaatttgtcccacacttgggggagacactgggtaagaaataaaatggtcaaaagagagcagcatatacacacta

SEQ ID NO: 100498 - DNA, 464 bp, Glycine max
  unsure (1)..(464): unsure at all n locations
cttcgcanagcttatggtaaaatctgggacctagccatggtttaagtctccatagagtccattgccttcctcgcccagtattatgatcagccgctgaggtgcttcacctttggggacttccaactataacctatggtagaagaatttgaagagatcctacgatgccctctatggggaaggaaaccatacctcttcttagggttctatccctcattagctagaatttccaagatagtccaaatctcggcgcacgaattagaccacaggaagcaagtcgaaaatggggtggttggaataccgagaaaatatttggaggcaaaagcaagaatcttggcaggtaaaggcgagtgggccccgttcatagatattctcgcactggtgatcttcggaggagtcctctntccaaatgtggatgggttggtggacctggtagtgatcaacgcttttcttcgctatcataacca

SEQ ID NO: 100499 - DNA, 340 bp, Glycine max
  unsure (1)..(340): unsure at all n locations
atagaggatgggaagctcaccaagatgtcttcctcgcctgatacgatgaccagatgcccttccactatgaatttcaactnttggtggagtgttgagggaacaactcctaatgagtggatccacgggcgccccaacagacagctgtagggagggttaatattcattanttggaaagttacttgacaggtgtgagggcctatctgtactgngagatcgatctcttccctaacctctctgcgggtgccgtcgaaagcacgaaccacacgtgaactctgctttaagtgggaggcattgaatggttatttctccanagtgctcttatgcatcacgtttaaactgg

SEQ ID NO: 100500 - DNA, 419 bp, Glycine max
  unsure (1)..(419): unsure at all n locations
cgttgagctnntaaaattaagncaataaataaatttttataattnnttaagnnctttacaaaaatttctgatgtgagggtgggaattctaaattcccttgaagagattatatatatatatatatatatatatatatatatatatatatagatcgtnataaacaaagatttatgacaaataaatattttttttatctttacactcataattcttctctcattctctntctttcaaatntgagaaggaacacatatttaagaaggacatataactattctttcttttctttctacaagattcattttcaaacagaaaagaataactgggtccatccttttctttgatccttcatctacttctttgctgtataccacacaaaatgaaagggtcaaattatggatcatttctaacttacgtga

SEQ ID NO: 100501 - DNA, 458 bp, Glycine max
  unsure (1)..(458): unsure at all n locations
agcntttatggttcattcatcatttgccaatattcattgtgactttatcctccaagttttaaagattcctctttataccatcttgtttctttataactttctctaaaagaaacatttattcttctttatttatgctatgtttgatatttctatattctcagccatttaacctatgtaaaaagcttgaaagatatatctcataatagaatagtgaatagtaaaaaaaattgctgggttgcctgggcaactaatttatattatcattngaactanaaatagcatcatcctccataaaggaggttacagcanaatctggaacagagttataaaaacaaacatctgattttaaaagatagtccagtcatggcaaatgagtctgtcatactgggtaccgattaatctttctttttgctctaatatgttattcttaactgattaagaaattagcaatatacctt

SEQ ID NO: 100502 - DNA, 356 bp, Glycine max
  unsure (1)..(356): unsure at all n locations
gataatgactgatattataggtaagaactaatgggataaaggcatttngatggcaaagtaatagtgatcacacaaatatagtcctttacatgtttaggtagttgtctttggtggntaatgcaaatagcagcgttgacaacaaaaatggtagagagatggactgaaagaggcaagggaatatgtgttcataaaattgagcattcctggatatcaaaatttctttgttatgaatgtcatatgctaaatatcctntaactcctgccttgtacccccccaaaaggcatatttttgggctctacnaatcaaatttcctctgtaggcagcagcaagtgtagaaacataacagacacagtgag

SEQ ID NO: 100503 - DNA, 274 bp, Glycine max
acacctcgatgactcgtgctggatccactattctatatggagcaggtgctggtaggacacacttcacacgctggtgaaacactcgcgcagacacccctggaagtacctatgaacccgaaatgatgacgatacggccatacaatccggacctctcattgcctaagatggtctatcatagtctggatatgcactgcattaccacacgatcgtgtgataaatgcgctgccttcatgaactacttgagggctcagatacaggattgactctttcacac

SEQ ID NO: 100504 - DNA, 233 bp, Glycine max
  unsure (1)..(233): unsure at all n locations
atttgtacccccatttttactaaacgcactccccttctttttttttgggaattctttttccgtacgttccaaacttcacaattcgtaagatacttatgtttcttcagcaaggttaccaatccttacggattatgttntactctntttagcttcgaaaagtacggaacttacgatgccaaaaccctttttgattcgccatacgaattcacgatgccagcctgttctttgatttg

SEQ ID NO: 100505 - DNA, 398 bp, Glycine max
actaagccttatctatagataaggtctgtcattgatgaattcattgattatagacagtcagctctctttaaaggaagacatatacttcatgggatcctgattcttaatgacgcggtggaggaagcattggattccccaaaggatatgtcaaaaattaatttccttacaaaggaaatttctgtggggaggagacaatactcataataaaattccttgggtgaaatgggctgatattcgtctaccccagaatgaggggggatgtggtataaaggatattttcaagttcaatgtatccttgatgggtagatggatatgggctcttgcatctggtcagcagcagctttgggtaagagctctaatctctaaatatggtggatggcctgaggtctatcatgata

SEQ ID NO: 100506 - DNA, 424 bp, Glycine max
tgcaagcttataataagaatgtgaagtctaaaacttttaatgttggagatttagtttggaaggttatccttgccatggatagtaaggatcgagccttgggcaaatggtccccaaattgggaaggaccgtttaaaataattcatatctattcgaatggtgcttatgaattagaggaattaacccctcagaaacgtactttgagtataaatgtgtaaatattgaaaaaatataaaccaacattgctcgaagttaaaataagcatagaatagacagaagtaatggaaacataaaaatggcgataacagtataattgccacgaaagggcatgtgtcatatttacatcaagagtagaatcgatatacagatttcgaaatataaaatcataagttctactaatgcatgactaagtcctcatatagtttct

SEQ ID NO: 100507 - DNA, 363 bp, Glycine max
  unsure (1)..(363): unsure at all n locations
gcttcaacatgaacagaagttggctgcagtcttaacttgttcttttgctntcacactaactcagacaaaatgtngacccaatatgcttctcaattcaagaaaaccatggttacattcattattgacttttggacaaggaattcacgtaagtaacaactagttgcgagtaaaacttacatattattatgaaagaaatgagcttatactcttggaatagatctatcttctacccaattgagttttttgagggcagctctagtgcatctggatttacatgtgtcaatcgtngaccagacatgacacataacccacaccgcaggagataacatctagcataaatacaggagggagttgatgttttta

SEQ ID NO: 100508 - DNA, 464 bp, Glycine max
  unsure (1)..(464): unsure at all n locations
agcttgtaaagaactgangaataatcaagatcaagcttgtacgcacatncgtcgcgtgtatgatatccactccacaaggttngaagtagaggagagcttcaaccctataacgcaacatggcggacaaaagtgggcagtaaacttgaatggtcgtcatttgcaatgcggaaggtattctgcgcttcactatccatgttcacacattattgcagcttgtggtacgtgagcatgaactactaccaatatatagatgttgtttatacaaacgagcacatcttataagcttactccgcacaatggtggcctcttgggaatgaagcggctattcctccttctgatgacgcatggacacttatccctgacccaactacaattcgtgccaaggtcggccaaaatcaacaaggataagaaatgagatggatngtgtcgaaccatctgagcaccgaacanaatgcagtagatgt

SEQ ID NO: 100509 - DNA, 465 bp, Glycine max
  unsure (1)..(465): unsure at all n locations
gtacactgggcaatgtaaaattattggggacaacaacatatgattgcctcattcgacaaaacaactccaaagcctctntacttttatcactctgagcataccgtgatatcatgagactccaaggaataagatcatcttttggcatttcttcaaaaaactgctgtgcctcggcaatctctcctgacttagtgtacaattcaagcagtgcaatgccaacataaagatccctatcataacacactttcaaagcacatccatgaacacttttcccaaccttaaatgcttctagaccattacaggacttaagtgcggcagaaatggtaaaattgtttggcctataccccataatcctcatctggcagaaaagtagcaacgaatcctcatggcagtaattctcagcatagcaagccaccatcccagtccaagataccatgtccttaaaataaattccatcaaaaacttgac

SEQ ID NO: 100510 - DNA, 490 bp, Glycine max
  unsure (1)..(490): unsure at all n locations
agctntaaataaccaaatatattcacacaaatattcatttgtaatctacacacaatgaagaatcaagggggtgtaacacccctagttatgattggaatttttcttaatttatttttaaaattatggaataaaagaattaacttaagaaaaattgttcaacgttttttttagaaaatcatgattgggaataactntgtttcctttaaaacgacattacttgaaatattnttaaaacgataagccatatttaaataattcttgttatacgtaacatatggcatccatcaacattatgaatttcaataagaaatgatttaatttataaaataatttatttccattaaacccatacaaaacaataaaatctcatttgtacattctcgataataccttgttaaacaattacattatgcaattataatacatngttacattcctaanattaggtacttaatacatctgagtcacataccaaagaatgtaacatcat

SEQ ID NO: 100511 - DNA, 77 bp, Glycine max
  unsure (1)..(77): unsure at all n locations
gaggtttaacttgcctgggcgagtggctaactcgcctgngccagtgcatgtctagagtaaaaataaaaacggggggg

SEQ ID NO: 100512 - DNA, 398 bp, Glycine max
  unsure (1)..(398): unsure at all n locations
agcttaatgttataatttggccattcttgatttatatatatattgcctagngctgtctttaatcttcaatntcgtactgttcaataaaaaaaattaataaaaaataaaaaaaaattcagttgctgcaaattctgcaatttcgtactattcaaaaagaaaaaaaaagaagaaaagaagtgaagttgaataaataaggtcttgatatgagaacttgatttgggagccttggttgattntgttgatattagagggtttgagtntactacttgtgcttaatttccacttattccccattgctcctctanttccttgggatgtagctacttattccatatttttcttccctaccttgtccatggccccattacaacctttaaagaccttntgatcctcatatg

SEQ ID NO: 100513 - DNA, 392 bp, Glycine max
gatgcctaggggaacctagtctctttaattggtcttgaataacaaatctgcacttgtcgccagactctgtggtttatgctcctcttacgaccaccacacacacctttgaccttctgtgcaacaacctgaagcaattgaacagcctgaagcttatgctacaaacatctacaatagacctcctcaaccttagcggcgaaataagccacaacagaacaattatgacctctccagcaacaggtacaatcccgggtggaggaatcatcccaaccttagatggtcgaatacttcacaacagtagcaacaacaataacaggcttattttagaatgatgctggccaagcagaccatacgttcctccaccaatccagctgcaacaacagcaacaggcccag

SEQ ID NO: 100514 - DNA, 294 bp, Glycine max
  unsure (1)..(294): unsure at all n locations
ctgagaagtggatgactctccgatgaatagccagatcatgtgctgccctgttcatacaaagatgcatagagcctaacccgcgatgtgtagattcatagacactaatctgcacaagatctacttcaaggtacgagactgcatgcttgtttaattaaaccccatagaaccactttgtgaaagggctatgctattataactcgtgtgacggcttctagagaccctacctaatattacagagaattggcatcggggcactataaagaccatttctcgacngaactcctttacgccctg

SEQ ID NO: 100515 - DNA, 474 bp, Glycine max
  unsure (1)..(474): unsure at all n locations
agcttttataactaatattagtgatcttacaaagatcaagaataatcattttaaatttcagatggataaaaataaaagaataatttagaggccaaaatcaaaattacctcatttaacaaaaactaaaaccatatntaattatattatttaatattaaaacactagtcaaactttcccttgaatcaatctcaatgagcatggttggatttcttgtatcatgaattgtgctttctctcattcaataaccatcactacgtctaaacaaatacataaatcaattattttnttggttaggggaaggggcatttattagccctcaatacataactccatagaaaaagaaagcttaatccgacaaacatcgggaaggcttatgcatttttctttttgaaacctcataactggtccagcaacccgcagacaatngcaaagatctcttataccttgacccgtgcncatggctttgtcaaacac

SEQ ID NO: 100516 - DNA, 351 bp, Glycine max
  unsure (1)..(351): unsure at all n locations
agcttgaaactagaccacaccacangtgatggtgccattgtatcatgagtgacagctggccatggacaatacatataatgtttagatgattccctgggtcttcttaacccatcatttgtcttcatatttttattacctgtttagccttcaccaatcttatgacgaacttggtcatggtagttaaactgcctctgacggaaacctctaaacgatctagcattccagtcatttctattccgaaacctcctaatgtgngaataaacatatggacatgactcagatcataaattgatatggctaccgcattcatgtgagatgaagggagggattggaaaagagatacacacacat

SEQ ID NO: 100517 - DNA, 281 bp, Glycine max
tcatccacatgctcctggggattctaatatttacacccaaccacaagatgtgagctctgattctgcagctggagaactaagaccctcacaaatgggatactggacacatctgcgagggtcatttaccctgttgctaaacattggaactgcgtaacccagatagtagtcatcaaagaatcgtgagactatctgacgaaatccagagactcaaaactttatgttgcaggactaacacccaaactacagatggatgtgtctaagctgaagcaatgatagatatt

SEQ ID NO: 100518 - DNA, 442 bp, Glycine max
  unsure (1)..(442): unsure at all n locations
agctttcttcatttggttcttttccgacatcttcatcatcggagccacactttgagtcattagatagtgcttcttccccttccatgccaaagatggntntttcatcatctgtttcttctatgttttcattctgngaacatcttctatcttcatanctattttcccattcctccacgattttcaagttgtatatgtgaccgtatgttgattccgaccttccgcactgtgtttatgtntgtcgaccaactcgttttcacccaaagtctcgcatattccaacctctccaaagatgaagtattttcatccatggaaacgactatccccatattgntcagaatctttgtgaatccttcttgattccaacaatgtagtggttctctaaatagccttatccaaacccatcaatttcctgtgacattccttggagaccatgcttcgacag

SEQ ID NO: 100519 - DNA, 401 bp, Glycine max
gcattctgacaagaatgtatacctacttagtaatatgaagactagacaaaagataaatgaagagggaattctaatgcaaactatgaacaatgtatagatgtcatgccatgactagtaatttatcgaattactagtcaaaattgaattgagagaagctaggcaacaaaattctataaatccaacttgctccatttcaaaacagacaatggccagccattctacatctcttattaatggcattcccatcaatgaggcatctaaccttgggtggcagcagcctcaagttatggcaaaacccatcaagtgataaaagaaatagccaaattaatattgaatattgaaatataaaattcttaccaatttccactaaatgtgtagttggtaattatcatctaaaagtc

SEQ ID NO: 100520 - DNA, 428 bp, Glycine max
acttgctaaacatctctcccaaaaagactaggatctccacacaatttcaatttgggggagggttgaggggacaacttccaccgagtgaatccatggtcggcccaacaagcaactataggttgggttaatatccattacttgaaaagtaacctaacaagtgtgtggtcctttctaaactgggagattgatctcccctcttacttcccggtgacttctgtcaaaagcccggaccaccatggagcttggtttcatgtgtgaggcattgaaagacaatttctccaacgtgtctttgggcattatgtttatgctggagccattgtcaatgagaaccttggccatgatgtgatccatgcatttgagagatacatgcagagccctattatgttctcgtccctcaatgggaatctccttctcagcaaaggtgagtg

SEQ ID NO: 100521 - DNA, 373 bp, Glycine max
ctataatgcttctgatacgatcatgactcagtattccgcatcgaagtatggtttatctgaatatcctgaaataccgtacgaggaaaatcactataatgctaaagtgactcaaccatgctctaaatgatattaatcactcacttatccatgccttgtatgatcttaacgatcctcatttgatatatggcttgggtgggttcgtgaaacttacgcatgccaacttgtctgattctatcttggaaggggatattgccacccacatctctcatctatagaaattagggcccgtcttcagcaatgcttatatcttaatttccaagtgatcttcctattacttccaggttgggcctaaaaaaacataatctctatttgc

SEQ ID NO: 100522 - DNA, 263 bp, Glycine max
gggtcggcagtgctaggtttcacactctggttcttttactcacaggcatttttaccgggtactaggtattcactaactcttaagtattttacatcactacatctttggacatgcacatagtttcgcaaactactcgttttagctcatggttgacatctccccctctgcctgttctaataactactagattttggctaatgccattatttataactagccgtttttgcccaccataggttttctacatgataattttttccaaa

SEQ ID NO: 100523 - DNA, 349 bp, Glycine max
catgctagcttattaatccttctatgactgatcaatatgttgttaaattcgaaaatttcattatctgacttttgaaataaataaaaaattaatagtgttgcaaattacatataatatataaattttgtaacttcatgtgtttaattagaacattgaaaattagaaaaaattataactaaaattaatttcttattttattctagtcgattaaaatgatgtagcaaagtaatctaaaaataaatataagatacgacacaaacaaaggtttatatcactttttttttccatgtattccataactaatttacatttaacttgtacggttggatgagcgttggtaaacaaaatt

SEQ ID NO: 100524 - DNA, 486 bp, Glycine max
acactatcagaaactcatagcttggagctcaaagaaagtttgtctttttgcatgcccaactccttgagtgattattgtattgatgggggcatcttaacctttatcttttcatatgttcatcatgcatcatcatgtagagttaggaagagtgtttctaaagttagaaacttctttaatgcatagtactctttgttttaatcgattacaaggctattcgtaattgattattcaagtttttgtagcttgcaaacatattctagttttacctcccctcttggtttgcgagttttgtcatctttttcaattggtatcagagctacatcttgaaatttgcttaagatcacaatttttctataatgggctataaacaaatcactttcaaagagggtgtctctctcaaccgacctctattgttaagggagaacacttctcatcttggcaaataagaatagaaatctttattcagtcaatcaatcccagtgcatg

SEQ ID NO: 100525 - DNA, 357 bp, Glycine max
  unsure (1)..(357): unsure at all n locations
tgcagcatgcgcctaactatattgagtgcagaacttatggtgatgcagcaacccacaattaaaacttaacattgtnatggatggagctaagacagtttgaatacctaaaaatttattatatgctccaatttatccctgaaattacaaaacgtcttcaatntattattttttaaaacaaaaagacagagttacaaggagtactcccattgacatttttcaaaatcactgtcttccaaaggatctttttaaagtgtctgcctttaaagacgagccaacccaatcaccgatataaaactgtttattttaaatgattttgagctaatgttttaaaactgttcattcatagtgatttgacat

SEQ ID NO: 100526 - DNA, 288 bp, Glycine max
  unsure (1)..(288): unsure at all n locations
taaccccanaaagaaagggaattatgttgacattatgttgactgtacacagctggcatgcccngacnngnnnangnnaannanngttttgttttttgttggtttatttttaattttatgggcgnccccccgaacanangnaaagggnnnaacnngggnagagacaaaattttcttttgggcaaggcatgttgaaatacttgagacagaggaaagactttgagcatataaatcgtattatcgtgattacctaaacgcccacaantgtactcatataacatgccaatcag

SEQ ID NO: 100527 - DNA, 305 bp, Glycine max
cctttgatgaggttggaccattttaacttttatatccgtggatagattacttggaaatcttctgcaagcttggttaacaaacctcacctgttttctacataacatgttaaagcaagagtacaaatccatacctcttcaattttctgcacaattgtccattaccattaatactttcaactttttacagaatccccatatgagtcataattttgattatccctaaattgagaatgaaagctctcatataccgttacttgaatacaattgacatatttttcatctaatagattaccttctaagtaatt

SEQ ID NO: 100528 - DNA, 166 bp, Glycine max
atactgttgaagaaattttcaatcccgattagcttaaaataatgtaaaattaagtatatacaaagtagggtattctttttcctattagttaactttttgaaattaagttaaataatggtatcacagtctatataagagagggaaaaaactcttccttaataaataa

SEQ ID NO: 100529 - DNA, 467 bp, Glycine max
  unsure (1)..(467): unsure at all n locations
ctagataatatggctgccaacttccttcaaagactggatgtgttttatcttttaacgacccaacagaaagtaatgattgatttccaggaaccttgtgaaaaactaatgtatttttcatgggccaaaagtataatctaattggaaagtatattatatttgatattttacctggtatgccagtgaaaaatgctgaccaaacaaaaaattcaagagaaatcattcacaattntttttcaaaatattttcatttttatgaaaatatagatacactaatattactggattgatgccgccacataatctcatttgttaacaactccatgaaaatgaatttcatagatagataaaggttaccacgtattgtcttgttaagaagataatgaacttcctcatgatgttcatccacttggcactganaggttaaggggccaaaanttgaatattagtataattagtattatatatat

SEQ ID NO: 100530 - DNA, 341 bp, Glycine max
  unsure (1)..(341): unsure at all n locations
acggcagcataatcaaaattntaagcataactcaaacgcactaaacaataatattttatctttcccatcaataaggcttgactgccattcataaagtgaggggggaggtctgcattatgcatgaattcacagtccatcgacaggggaagcgtcctttgggctccactcttaatctttttcctcccttcatgtgttcagaggctacccatggaaatgggtagctaaatcctacaccattgtggttagatgcaaccaaactcataaactcttctatcttgtgatattctaatatatatatatatatacatatatctatctactattgttaatgttaatgcttg

SEQ ID NO: 100531 - DNA, 341 bp, Glycine max
agacccgggattctataagttacctgccgcatgcaagcatgaccactctagatgttcttcaatatagtttgtcatatacacctgtaagaatttcaagaagctcatggttttagatgtgccatcactcaattaaacatcaacatctttcgtttccaatcacatatattaattttctgataagaaaacccataagaaactttctgataacaatgcttccgttctaattgatgtaataatattattcatattatactagtaattatatatcaacacccgccaatataaacttgatcgttgaagtgtttcctaagtaattatgatcaaaattggatgcctggatg

SEQ ID NO: 100532 - DNA, 454 bp, Glycine max
  unsure (1)..(454): unsure at all n locations
tgaccaaactagtcatgcaaagaggggggaaaanatnangtattttctatttttgcatagcggntaccatatttgagttagcttctgccatagcattagtggcctaacatgctctctataaatttgtatgctataatggcatttaattaataaaggataattcaatgaagtattactatgccttgttatttctcagctgtggttagtttcaacaattgatatctatccaatggctttcacgggcttcagattattttaaaacagtttgtttgatctgcgatggaattgagttataataataataacttatatggtcttatctgaagtttaaacctagaattttcagagacatataaggtcatttctttcttttaaaaaaaaaattaaaagaggaactgtactcgctgatggaacaaacacagttttgcagtttgcttcatctcacaagatatat

SEQ ID NO: 100533 - DNA, 402 bp, Glycine max
cgccgcatgcaagcttcgtaaggttgtgaactgaagaatactatgggtgtgtgtaactaaactctttctctgtatagaagccgtctcacatcaccttttcacagatgttatctcaagatatcttctcagggaagttttcttacaaatgcttattatggaagcttcctagtctataagccacacttaacgcaccatccgtgtcgagattaggaaattactggatttcatcgtgagccctaaagggatataagaggatcctgataatgagatacccatccttgaactgccctaaccatgtacaataggcagatcggggaatactgggcgtttaactacatagcaaactcctatacagttacgcgtgtctgtgagccaacgtctagctattacgcatatacaata

SEQ ID NO: 100534 - DNA, 374 bp, Glycine max
gaataacaaatctgcacctgtcaccagactatgtggtttatgctcctctgccaaccaccacacagacctttgcccttctatgcaacattatgaagaaattgaacagcctgaagcttattctgcgaacatctacaataggcctcctcaacctcagtagcaaaatcagccacaacagaacaattatgacctctccagcaacaggtacaatcccgggtggaggaatcatcccaaccttagatggtcgaattcttcacaacaacagctacaacaacaaccaccttattttcagaatgctgctggcccaagcaaaccatacgttcctccaccaatccaacagcgacgacagcaacaaccccagaaacagcaaacagttg

SEQ ID NO: 100535 - DNA, 439 bp, Glycine max
  unsure (1)..(439): unsure at all n locations
tgaggctgatcaatngctccacgctgctgcatgtgagggcttatgtctgtatgggggccaacagaggagcgcatacctcagacccttgcgataggaacagatttctaatgacaacgcctactcgggatgcacgttaaccagtgcatccagggctgcttcaaggctactagctaccaatgatgccgatggggtggtagctacctcatgcacatcctctatatgaactatgtgcatcacattctgtgacatagacagatgagagttggaagccatgctctcaataaaaactctggctgatacatgagtcatgtctcccaggagctccccactggcaggaactatcatacatatctgcataatactgagtcctatgtagatatatctcataagaagctgctcctcagatctgatggtggaggcgaactgcacataatggctt

SEQ ID NO: 100536 - DNA, 476 bp, Glycine max
  unsure (1)..(476): unsure at all n locations
ngaaccttgcttgtntcattngatgataacttgggtattttatttctgtttaaaaactcttcctaagntacttttaaatctattactttaaatataaaaaacatttttatgctctaaaagatgaaataaataaaatctacgttgagtgtgtcgagttattttataaagaaaataaaaaatgttaatataaaaaataaaaaagtttattataacattttctactattaagattagaagatagaaatttgaacatgaaaatggtgaaatttttataaagaagtttttaagtcacttatttaaaatataaaaaaagtgagtgagttatttgcaaactattagcatcaatcctataaagtcagagggaggaacttatttaaatatgtaatcctaacttcaagtttgaacatgtttatttagctaaataaaccaacttgatcaacattcatgttgctaaccttggcattaatcatccaatt

SEQ ID NO: 100537 - DNA, 235 bp, Glycine max
  unsure (1)..(235): unsure at all n locations
tggacctcgcntttcaaggccaagcactgttcgatcgagtggcctgtggttcccccatggtatgcgcaggtcgtgctagggttataccattttgggaatggagactggaagatctttcccgggaccacgacaaccaattggttggcgatgagagatggtaagagttccccatatgtcattgggatcggggcaaaaatttgtgcccgccttggcaaaaagttccttgccgtgtttg

SEQ ID NO: 100538 - DNA, 221 bp, Glycine max
tcactaaataaggattttttgattcatacctgaggttttcttaccgagtaaaaaggattatttttgacgtcgaacgccttataatgaccaactgccaagtcaaaagaatagtcccgattcacccttaaaaaagaactatgttggtctgatttcctctctcttttagggtgcctatgatcaaatacctcatttttgaccccctcccacattatatatactca

SEQ ID NO: 100539 - DNA, 474 bp, Glycine max
gaaactcagcttgttagctgactctctcctatgtgtatatatatatgttatttgaatgatataaaattttcaactgagggaaaaaagttctctgctcacatattcaaaacttcaagttggtaccagagcgggtcgtattcaccgtcgttcgccgccgtcgcgccgtcgtccgccaccgtccgtcgccgtccgccggccgtttcaaccggcgactacagggttttgtgtgcctcgaggagcgcaactcagcgcaactaaccgctgggccaggagcgttcccacgcgccgtcacgcaccatatatgtgcgcgccaaacgccggcgcgtgaccaccacgcgccgccctccccttgccggaaacgcgccgcgttgcttcccgccgtctcgtcgggctcttctgagtccatatcagtcattagtatttggatcggcacttcgtagagtgaccatgtgccttccttgtctctctactata

SEQ ID NO: 100540 - DNA, 189 bp, Glycine max
ctgattcttgatctagaaccccattaaaaacccgtgcacgttaatttttggtggcagctttttagggagaaaggaaggacatgttgcatattaaatgcttttattttaccttttggacattcctataaaaaaattaaatcttttgaatcatacatatagcgttaaaccataagatttttctgaattaat

SEQ ID NO: 100541 - DNA, 465 bp, Glycine max
agagatgacgaagcgtagaagggcgaaacttcctgctgttattgttgaccacatagtggtacctgtagatatgtcgcgggggtcacgagaccttgtggacgtcacgtggggtgctattgcccaaaaccaagcttgaccaatcccgacccaacccaggcatagtcggtcaatgagaacctgtgatgtacctaatcaggcgagctcctggctgtctacagataaaatgaacacatgaccactaatccaggatgctcgtggtggctggccagctgtgaatattgtgtaatatgtggattgtggcctctggtaatcgattaccaacggtgggtaatcgattacaacgcttaaaaatgaatacaggacgctaagatggtctctggtaatcgattaccacggcgtgtgatcgacttccacgctcgaaaactacgtcaagaagctaatgaagcctctcgtgatcgattacca

SEQ ID NO: 100542 - DNA, 351 bp, Glycine max
  unsure (1)..(351): unsure at all n locations
gtttttttttttgttcttggaaaccgaccccgccccaagccccnnnnngggggnaaacagaatagagganatagaaagagcaaacatattgcttttacagaactgagggattatgcgaaaatccagtgtgcaaatgtattattgggagtaaccaaacatgtggcaactgaatttactctgcaacagtacattcaacacttaaaaatacttcatgaacgtccaaccatttggtattccattttcatgttatacgcggcgtttccttcatctacgcaattgatactcgctgatcaacaaaggagaagctacctctaatttctcacattcacttaaaggcttccatgcaaaatc

SEQ ID NO: 100543 - DNA, 465 bp, Glycine max
  unsure (1)..(465): unsure at all n locations
ctattcaagacaaagaaattaaagatattcaagatggatgatctagacagtctctagagtcttaggaagggtatattaaatatgaagggaatttctaactgaagtagcaaaaggtttggccaagaaatttaagttaaaaagtctttttcaagaaatttactctctggtaattgattaccagaggatgtaatcgattaccagtggccacaaatgatttacaacagctattaaaatatgaattcaaaatttgcactgtgtaatcgattacacatatatggtaatcgattaccagcagttattgaacgttttaattcaaattttaaagcttgtaatcgattacacacatactgtaatcgattaccagaggagtttttcagaaaatattctcaacagtcacatctttttatttgattcttanatggccatcaaaggcttatatatatgtgacttgagacacgaatttgc

SEQ ID NO: 100544 - DNA, 257 bp, Glycine max
  unsure (1)..(257): unsure at all n locations
tgcaagcttctgaggaagctacatgaagctgcctctgtaaaaatgctacccagccttcgttaaccggtggatcgtctctnaattggtcttcaacttcacaagaacactttacacaatctgaccattgtgatctttgagaagttgctggagtgggtgcgaagccttcgtttccgaaagcattctatttgaggtttcacccttgctttttgttccttagagaaacacatttttctccttttttttttcaaaaccctttt

SEQ ID NO: 100545 - DNA, 398 bp, Glycine max
aaaacatattgtaaaaagttgaatccctttaaaagcatagagtaactaattgtatccgcattcaataattcttgttgcacatcacatggtatctcacatctgcatgggagggtagagagtcttatcaaaactagctgcaatcagatggcaaaaactgtacacatgtctattgtggaggtaatcattatcatgagaaaacacttacataggcaagagaaaacttagtttcagtacccctggtattgttttgcaatcaaaattaaagtttcactttggtagcccatgcaataaaagtttacagtaaaggttgttgctagttatgatggtgaaagtgaaactctaatattgattatagataatataagaaacatttagagcatctccaatggggcaactat

SEQ ID NO: 100546 - DNA, 373 bp, Glycine max
  unsure (1)..(373): unsure at all n locations
agcttagagaatgnttgggtgacacaaggttgacaaattatggtaaagagaaaagtgaaaaaggaacaatgtttgccatcttattttgaaatggctatccaaattacttatccctattttggaataactatcctanaatatgaaaaatatgaaaatcatattttggaataactattatagaataagtaatttagaaacctatttcagaatatatattctaaaatataattttcatattctgaattaaatattctggaatagggatacatttctagaatggtcattctgtgataaagagacggttaatttatgaatttttaaacattcgggggtgtaacgcaaaaaaatggtacaagaagcaattgccctttat

SEQ ID NO: 100547 - DNA, 464 bp, Glycine max
  unsure (1)..(464): unsure at all n locations
tgaaccaaaaccggtgagagtgtgaccttaaattgtgagtgaacgactagctgtgagtgataatctttgcatgaatctttgaattntagaaagaaatgtataaatgaggccatgatgaaggccatgattgtacatacacaagctcttttgaccaaacatcttaccttaaatgataattgcatcctttgctccctttttgacctgaatgatattgtaaaatctgataccttgtttagattctaggagagcatatggttcaaggcaaatttactctaaatttgggggagggaagtcaattccaatgaaaagaaaaaggttaagcatcagcacacacaacaaataagttgtatgttaaaaaaaaagaataaattatgttgttacaataaggtcaaaagccaattgaaaggaaaagatagtgagaaagctactggtataatacaagaccattgtgataagtcaaggat

SEQ ID NO: 100548 - DNA, 412 bp, Glycine max
  unsure (1)..(412): unsure at all n locations
gcatgcaagcttgcacttgaggagggaaggatatttgctactaatgaacaactttcttaactatttgtgcttcagattttactggttctttttgctaatatgtaaatataaatagtataggctatggcgtaaatgtgaatgtttgtatacatgantttgatgataccaaagaagaatcaaacaaggctgcttcaaatgattagcatttgcttcataaataattcaagattgcttcaacaaacaaagccttgtttcaagattcactaaagaccaagccttgccttaaaacaaagtgctttcaagacatgcaaggctctggttatcgattaccaggaagtggtatccattaccagaagatatggttgagaaatagctgtaggaaaagttttaaatttgattttcaacattaatc

SEQ ID NO: 100549 - DNA, 472 bp, Glycine max
acactatgaaactcagcttctaaggaagctacctagtctataaatagaagcatgtgtaacacttgttgttactttgatgaatgaaagtcttatgagacacacttcaaagttccacttctctccttcttttattccttcaatttcgtgctccccccttctctcttttttttcctccattaaagcatcatcttcaagcttcttatccaaggcacattcttggtggttaagctccttcttccatggcttattccctggtggatggtgcctcccctctcctcttctcctttgcctttcgctgcatctccatggtggaaaatcaccattgaaggacctcattgaagcttaaagatccaacctccatagaagctccacaagcaagcttccatcaaaatcttcttctcatcaacctcttcatttcttcccaactatccaccaagggttcttcatatcttgccctttatcctctgaaatt

SEQ ID NO: 100550 - DNA, 273 bp, Glycine max
tcgtcacctacggcgaagctccgacgagtacctggccgatcgcaccctcatttccgtcgaagggccgatatggtccttaccttggtggtgtaaaacctctaccaccccagctataaccaggccgatgtcaccgcctttaaccgatacaatttcgagcgtcgctgtcattgcggtaccgggcatctaacatgagcacttgacccttattgtcactacacgccttattatgtgtagtgtacacagagatatcgccggcggcacccggcacagatt

SEQ ID NO: 100551 - DNA, 443 bp, Glycine max
  unsure (1)..(443): unsure at all n locations
gcaggagtcaatttacactgttngattatggcaatatgttggaacccagtacacgataataatggtataatnngnggttctggttcacgtattgtatggtaataggaagtgattaactcattaatcgtaatacgtgaacgatgaatgtgttgatgacgcaatagaggtttatcatccatgagaatgatgtcaaatggtaaaccgaatacaaatgatataaaatttgaagttgggtgatgcaaatgtggtattgacatgcacctgccatctatttatcatttaaactgtgttcagttntgcaagcacaaatacacttataatttgtcttattgtaaggcctcgagattccaaagcacgttaacatgactatggtactgtgatgcatcgagattctaattcatgtgaatcaatgaaattttgtgcacattgttcacttgtatgcg

SEQ ID NO: 100552 - DNA, 249 bp, Glycine max
  unsure (1)..(249): unsure at all n locations
agcttggcaacatgtgataaagtgtctgaaaaatctattccagcttgttgtgtgtaggctntagctactaatatgagctttgtatctgtccactaccattaagtttataattgagctggtaaacccatctatatacaatacagtgcttgtcagtaagtaaaagactataaaacaatgtatttgctctaatgcttaaattctataacataacttgattccactagggtatgaaatggcttgataataaaa

SEQ ID NO: 100553 - DNA, 462 bp, Glycine max
  unsure (1)..(462): unsure at all n locations
actcaagcttgtaaaataatttttttttcagtagacttcacactcatgtttacaaataagctctcattntataagaacttatagaataaatgcttagttaacttgtttaccaaaacatgccaaagtctcaagtaaaaaacctagaaaggaagctataaagaatttaaaaggtcagtcacttgtaatttagtaaaaagtcatataaagcttgtacatagttgtttccactaaaagctagcaaagatgttgggctattatcaacataatgaccttaatcgccaagtctgtgttatttcaaatagcaagcaccaattaatataaattatacaaagagaagagaaaaatagcactggaattaattgatagaaaaactcacagaacaccataatatgataaggtagccatatttaattgaaggcacaaaatggagaatagaaaangaaggtacccatatttaattga

SEQ ID NO: 100554 - DNA, 449 bp, Glycine max
attatacagctgatcaagagccaacacataattacttgatttctcacaatatacatcaaatagttgactagattttgttgtactatctttctggcggcagatgtgtgctacgacttgtggcaagagcctcttctaccttaaaatttattttggaatatgcattattggtccactaaatatttttaatttcccactaatcaataagatatataaacatggagaaaaaataaaattttgttacctgtcaactacaagataaaaaattatattattttgaaccccagacctaagaaacccccttactctttggtctattttgcattcggtatgtgagagtcattgcctatgcataaatttttaataagaaatcaagtgtagatagtaacttcttgatttcccctgtaaaatatgtcacatttcaatataaactaacatagtaatgtcaatga

SEQ ID NO: 100555 - DNA, 261 bp, Glycine max
  unsure (1)..(261): unsure at all n locations
cctgactcaccatanatcttgacccatggtgagaatgtctatccttactctctgagcatattagaatataacgaaaacttccaatcaaaaataaataaaatgaaaatttccactgaaagccaaaaaagaaaaaaaggaaattccccatcaaatatgggagaagcacaagaaagaaaggaaattcccaatcaaagaatgggagaaagtacaaaaggaataataagaatgacagaaagctcctgatcatggatccaaggaaaa

SEQ ID NO: 100556 - DNA, 454 bp, Glycine max
gtatgaaggtgagtgtgatggatgaaaagatactatatatataagttctagaagttggaaccttgttggaaccaggataacaggatgatgcgtcaagctagtgatgttaaaagagcgcttattgggaggcaacccaacttttctttcccttttctctttttcattctgtatctcttgcatgtagttaggatagttgcttgtgattgtgattaacttttcaacttgtttagtagtgaacaagggggtttttaggcataggtgaagagatggacaaaaaagacttagcaaattttttttccagttgtccatccgctaagcgcaacccttgcgctaagtgccatcttttcatgcgttaagcctgagcttgctcacgctaagcacttagacccttgattagttggttgaatagttcagctaagcacacatcactgcgctaagcccaacatcttcactg

SEQ ID NO: 100557 - DNA, 375 bp, Glycine max
  unsure (1)..(375): unsure at all n locations
agcttccatcaggatgtcttattgagtcccgtttatatcgagacgctcgaaattgaatgttgaacctctgagcattttcaaacgacaataacgttttactcggatgtctgattgagtcccgtcatatagcgagacgctcaaaattgaatgttgaacctcttagccaattaaaacgacaataactttttaatcggatgtatgattgagtcccgtaaaatatcgagaccctcgaaattgaatgttgaagctcttagccaattcaaacgacaataactntttactcggatgtctgattgagtcccgtaatataacgagacgctcgaaattgaatgttgaacctctgagccaattcaaacgacaataactttttactcg

SEQ ID NO: 100558 - DNA, 478 bp, Glycine max
  unsure (1)..(478): unsure at all n locations
ctctagcttaaacattcactttcgagcctcccgatatattacgggactctatctaactttctatataaaagtnatggtcgnttgaatttgctcagaggttcaacattcaatttcgagcgtctcgatatgttatgggactcaatcagatatccgagtaaaaagttattgtcgtttgaattggctcagagcttcaacattcaaattcgagagtctcgatatatgacgggactcgatcagacatccgagtaaaaagttattgtcgtttcaattggctcagatgttcaacattcaatttcgagcgtctcgctatattacgggactcaatcagacatccgagtaaaaagttattgtcgtttgaattggctcagggcttcaacattcaatttcgagggtctcgatatattacgggactcaatcagacatccgcgtaaaacgttattgtcgttngaattggctcagaggttcaacattcaatttc

SEQ ID NO: 100559 - DNA, 374 bp, Glycine max
  unsure (1)..(374): unsure at all n locations
tcgagctcgtttgaacaccgaattgattgaacattgtctgcagtggcttgtntggtttggaatgagtgtgtgaaagttgatgattgagcaaatgtatgaattggatggattgggatggttggatgatttttttgatggagatttgcatcatttgatatataatgtgcatttgattggaaatatgttctgaaatgttatgtgggtggctttattatatgtaaagaatggctttctcgtgttcctattaaatttataggctttaaattttaaagaaaagactttattctttgtttaggtttgatgaaatctcataatatggtttctctaattaaagttgtgtttttattgcaatctttagtataatatattctttt

SEQ ID NO: 100560 - DNA, 466 bp, Glycine max
  unsure (1)..(466): unsure at all n locations
ngtggactataccttcgaccgaacacggccatgtttctgtctatgcccggattcaatgtgggctgcagcaccggctccgcttccctaactgtactggaggcggttgcggtggctttatcctctatggttttctggagttttaacatgacctccgagatggaagccatttgatcttttaaggccgatagatcggccttcatctgttcctgcacgccctcttcattatccatttttctggatcgagtgctaaaggggtgccttggtgttttcttagttatgatgaaattcctaaagaaataaacaacggtgagtatgccaccaaaacatgagtatgcaaatggatgatcggagcacttggatccaccccaagatttttagataacgtaatgagtctagaacttctcatnttataaaaagaacaaagctgtcatctagccaagattatacaaaggtgttacaaaagaac

SEQ ID NO: 100561 - DNA, 412 bp, Glycine max
atgctagctaaagattcctatgcatgaaggaagtatgctttaagaagagcgtcgttatttccaaatagaagtcaatagcaaaattaaataagtcttatatgaaaaatgataagaacaactaattaaaaatctaaaataatgtagagataacttcaatataagtatagatatgcttattatgattatcatatacaacataattatctgggtgtctaattggttgagattttatataaatgtgatatactcaagaatactatgaaaagagtgggatgttagatactatgagttatattcgatcagctcaatgaagaaaaagattagttttgaatagtgagggtgaaattttatacctttgaaacaggagatgaaaataattaattgactcatttttgatggttgaataaagaat

SEQ ID NO: 100562 - DNA, 452 bp, Glycine max
acgacaattaattttacttggatgtcctatggagttccgtaacatatcaagacgctcgaaattgaaaacggaaactcatagcaaattcaaatgacaataactttaatctcacaagtctgattgtgtccggtaatatattgagacactagtaattgaaaatggaagctcgtagcaaacacaaacggcaataactattaactcggatatccgattgagtcccgtaatgtatcgagacgctcaaaattgaaaagagaagatctgtgcaaattcttacgacaataactttttactcagatgtgcgattgagttccgtaatatatcgagatgcttgaaattgaaaacaaaatctctgagcacattttaatgacaataaagttatactcggatatccgattgagtcctgtaatatatccagacgctcacaattgaatacagaagctttgatcaaatat

SEQ ID NO: 100563 - DNA, 465 bp, Glycine max
  unsure (1)..(465): unsure at all n locations
ttgtaaccagcgaggcgtcggagaagggcaggtatggatagttttgttacagtgaacggngatgacatatgctgggccttggggtcgcttggttttgacgactatgcagagccattgagaaggtatttgcntagatatagagaacacgaactagatagagcaaataacccccccaaaagaggataagagcctctttagtataatttctctcatagatgatatgatatctataaattaattaatatttagttaatggagaattaattgtagtttaaaaaaaaaaactcatttcattattttcttctcatgtaagaggattcatagaaaagcttatccaaacacgtcttanaatttaaccagaggaactaagcataagtctgagacaggctagtttaaggttttgaggatgatgagataattaattcatttaacattnttcttggctgttggtacgcatatctatat

SEQ ID NO: 100564 - DNA, 328 bp, Glycine max
aggctgaatctgtcttaaccagcgtcacctattttcttctcattcgatataacaagacttttgatttccaacccaaaatatctgcgcataaccaccttgaataatcttcatcctatggtccattattataaaatgtttgtaaatgtcacttccatacaaataccttaagacagatatgggggacctttctttttagtaccggtccaatattttgggatctctcgcaaaccaataatctttgaaatgctattcaggcaactttgtatcctgtttcaaaaaaaatgaaaattgaaattttgttttcgccttttaggggggtcgttatttt

SEQ ID NO: 100565 - DNA, 457 bp, Glycine max
tcacaagttcataagcaataacaatatcatcagtatcatatatcttttccagaatctgcaacacaaaagaacagaatactttagacctattacttggaaagacttataaatttgataacaagacaatattgaaatgcattcatgcacaagtaaaacatcaattatgggaataacagtttaattttccaaactttaattagtgattccaaatgcatgtaaattgctttctggaagttattttttaacttatggaggagcgcacaatccattttggaaaaaggaaatgacattccagtgcctttggaagggtgagaagtcactaatatgcattatttacaagtcttgtgaagagttgaggcactcaagtcagagaagtgagtgtgagagatcacttgaagtagtgagtgtctcttgtgagtgagtgtttttaccattccttgtaactcttaaataggat

SEQ ID NO: 100566 - DNA, 355 bp, Glycine max
  unsure (1)..(355): unsure at all n locations
agctntntagcttttcattggtgtattttgatctctctttggagctctaaattgtgggaatgtgctcaaatatgtggggcaattttggtttgttttcttgcttgattaagttgaattggggatttgtatgagatggccctaggcctattatgcattttgaagtaatggggcatgccacattgtccccgttctcttgctattgatgcctaaacgcgtgcccaccaagtgttcggtgaaatgcctcaacggcattatcgcgtgattgttgtatggaaacaacccatggggcaattttggttgcacatatttttgagacatgcttttattttccaaagagcttaagtaataccccgca

SEQ ID NO: 100567 - DNA, 452 bp, Glycine max
  unsure (1)..(452): unsure at all n locations
acatcttgacttgctttccaatctgacattcaccacagattctgccttcttctattntcagattggggatgcctctaacagcacctttgtcaatgattttcttcatgcctcttaagtgcagatgtccaaatctttgatgccatattctgacttcatcttctttggaggatagacatgtggaggagtagctggtttcttgaggtgtccataggtaacagttgtcctttgatctgctgcccttcattagaacttcactcttctcatttgtcaccaagcattctgactttgtgaagtttacattgaatccttcatcacacagctgactgatgctgatcaggtttgcagtcagtcccttcaccagcagtactttgttcagactaggaagtccatcatgaactagctntcccattccaatgatctttcctttagagccatctccaaatgtcacatag

SEQ ID NO: 100568 - DNA, 361 bp, Glycine max
ctcgcccaggcgagcaatgttgcttcctccaaaagcaacagccttctggaggaatcttctggagggcccaagtgggcctaattgctttttgcacccaccctttttactaaatgcaccccttctatttttttggtaattctttttccggaacgttacgaaactttatgaatttcgtaccgatacttattttccttccgcaaggttacaaatctttacggattatgtattaactcttttttacctttcgaagaagttacggaaactttcggattgtgcaaaaacacctctttttaactttcgccatttacggaatttacggattgcgcaagcctctttcttttatttttacacgtttgggact

SEQ ID NO: 100569 - DNA, 446 bp, Glycine max
  unsure (1)..(446): unsure at all n locations
acccatcacatgtggtactaggtggttgtcgggcgatggtgcaaaacaagttntccacatccacaaatcgcgcataaacccaccatcccctattgcccacctccaactgagctcacgtactcccacgtagcccatatcctcgtttctctcaacaccgggtccccatcaatcctcccaagctttccccaacatccaggtaaaacaacattcaaacagcacanactatcacagccaagaaaacggtgcaaaggcagaaaactctgcccaaaacaccaaccaaaatcacagcttttctcacttaaagaccccagtaacaattccttcgttccagtttcttaaccgttggatcgactcgaaaattttactggaagtctctagtacataaatctacatttggaccgttgggatctactagcaaacatccagaactcattctgcactactct

SEQ ID NO: 100570 - DNA, 456 bp, Glycine max
  unsure (1)..(456): unsure at all n locations
tcaagctctgcagcactaatnggtgtccctttaaaccaacatttgactatggataacttatgtgcagntaaaggcatgccagttctatgtagaagcttgcaataggtatggataagacaataaaggagattgcatgactggggagtgagcgagttctttaatgtgctaaatagccaaagaaaattaaaagggttgtggaactaacataaaattaaaaattataaggggttgtaacatgtgtctgtaaatggcgatgaaacctgttagagctcttagagtcaaaggacaccagtgtnatccaaaaggtgcaatataaatgtctcccataagcaaaattagaaaagactaacctttgcatggagctgaccatttgaaaccaaaacagatctatcaaaaacacaaaactttcctccatccatccgagaaactgtgccaccagcttcctcaaccatctac

SEQ ID NO: 100571 - DNA, 304 bp, Glycine max
aaaaccattaagagtgtttatatatacaacactatcatgccaattactctaatatttaaactgcataataagtacttcttaaaagtttaaaaaacccattctgttgaaaatgctataagttctcaatgattaaaatgacataatgttttgagtccagcctttgtgaaacctgttttttacgagaaatgataatactcttatcaactatggggtggaaataaataatttatattttgtctaaaagtattaaatattgcatttaatttttatccaagtacacacattgttcgatcctttttatttt

SEQ ID NO: 100572 - DNA, 410 bp, Glycine max
  unsure (1)..(410): unsure at all n locations
tattatatatttcatatatccactaggcaacacaactatttgaagatgactcggtggcatataaccgccataaacgggtgtgcatattgatggtgttgaagtgcactccatggcccaaataggaaacctcttaaattacaatgagttagttgggcacatctcaatctgaactttgtttagatgaagtgacgactttggaataattactaaaggagaatattttaatatgtattgaataaaaatagttgcagtaaaaaacagagacaatnttgtattccaatatctgcatcaataaatagaatatccaataatatatgttttgggtgctcgatctaatctaaatgaatataaatcatcactaatttctcctaatataattactctatagacgataagatatagaatcatcg

SEQ ID NO: 100573 - DNA, 460 bp, Glycine max
actcaagcttgtgatctcatggatcttgcagaagggattctgcgttgatcatcaatatttatctgtcgctgcaggaggggaccgagtagtaatgccaaaccatctatggattgcactgccaatgatttacaaggatggaaagatttctcaacaggacttatagttcttctgcttgaaggagataatagttctgctgctgagataacagaacaacctttggctctggactataagggtgatacatcttgtttttggattccctcttaaattctattttctttattcatggtatgtttcacttcctcatccacttgacattacggcttagctaatcccacttttcttaattagagggtataagttggtccccatcttgtataatggcatcttttgaagtggcacttctttatatagcccttatttggttctttgtgaaatattggcctgacgttttatttta

SEQ ID NO: 100574 - DNA, 245 bp, Glycine max
atagggttttggaagtttatcattggagttccttaccatgtgaaatggatcattatcaatgtccaaagccttaaaatgatcacctttcaagttgaaagaatcacttgattcgcgcgtttgaaagaactacgtaagactgatttcctcttagatagagggttcgtacgagcaaaaacccacgatgtggccacctcgaaaaaatgactacaaataaccagttagataactcatttccacaattctaa

SEQ ID NO: 100575 - DNA, 435 bp, Glycine max
  unsure (1)..(435): unsure at all n locations
tcggaagacagtgatgacgtacaagccctaaaggcagagcttgtaagagccttggtttttgaagagaagttcaagtccatatccatcaaagtctaataagagtatgatgaactaatggacgtcaatatggccacagttgaagccttggaacgagaaaccaataaggcccgaaaggaagaacacgaccaaagcaaagttttgaggggctttatagggcagcaatattgagctcaagctcctaacatgtgaaaggaatcatcacnggtcaaaggcatgatcttgaangacgagctaaaggtttgccttatgtctaanagaaatttgtcctcactgttaatcgagactgaatggaatattgtggccatcatcgataagtgcaaagagaagctaaatctagcggcgactcacgaagcaaagctttaggatgagtacgcc

SEQ ID NO: 100576 - DNA, 109 bp, Glycine max
atgctgaggatttcatcaagatcagaccatcaaggctagttaaactttttcctttccaactacagctctgtaattgtatgggggtccctgcagttatgtccgataccat

SEQ ID NO: 100577 - DNA, 397 bp, Glycine max
cattcaactgtgagcgtctcgatatattacgggactctatctgacattcgagtgaaaagtgattgtgcgttgaagttgcacataagttcaacattcaatttcgagcgtgtcgatatcttacgggactcaatctgacatcctagtaaaaagttaatgtcgtttgaattggcacatacgttcaacattcaatttttagcgtcttggtatgttacaggactcactcatacatccgagtgaaaagttattgtcggttgaattggctcacaggttcaacattcaatttcgatagtctcgcgatcttacgggactgaatacgacatccgagtaaaaagttattgggcgttgaattggcacacacgttcaacattcaattgctagcgttttggtatgttatggg

SEQ ID NO: 100578 - DNA, 409 bp, Glycine max
agccttaactcggatgtccgattcaggcgcataatatatctacacacttgatattgaattacatgaaactctctctaaacaggaatggtcattcttttccacagatgtcctattctggcgcataatatgtcgagacgctcgaaattgaacaacggaagctctcgagaaattctaatggtcataacttttcactcggaggaccgattcatgcgcataatatatcgagacgctcgaaattgaacaacggaagctctcgagaaattcaaatggtcataactttttactcagaggtccgattcaggcgcataatatatcgagacgctcgatattgaacatcgaaagctctctacgaaatcaaatggtcataacttttcacttggaggtccgattcaggcacataatatatcga

SEQ ID NO: 100579 - DNA, 472 bp, Glycine max
  unsure (1)..(472): unsure at all n locations
ntacagcagattctagaatgacccactaacctagaattaatataacttaatgccattaacctacggaattaagaaaacttaatggctgagtgtaactgatattgtggcaaccaanagtcacccccaacagccaacaagtcagccaccatttggtctcccaaaaggctgatgcctangttgtcaattgggcccttattacaacttgaactaaacctaactaaagcccttttagttgattaacccaaaacatatttttggtcagccaactttacaaggattgggccattatttagacaaactaaacactctaaaattgagacaaagtggtgtcatttagtcctcctccatgtgggccatgatacaactcacaaccttggacttttctccttgaaacttgngcttgtattcaaatagtatggacagcacttgttgaagagctttcttggctttccttgctctagcccttgtcata

SEQ ID NO: 100580 - DNA, 468 bp, Glycine max
  unsure (1)..(468): unsure at all n locations
ctaagctcgtagtatttgttggtattaattgcatgttccattatgctcttaatgtctttagaggttatttcctcgttgacatcttttgtcttgaatggaattgccatgacaggtttattgttactgtctttgatgtttggcagttgatattgtgttgcgggaggtaattccgattggattaactcaccatccttcacttgccaatttgttatgacatttgttgttggatcacctatgatgtcttgtttccaagggtaatctatatcctttctgatggcataagcatgaaaccaatcaaagaaaaggacattaattttgactctttcgacaaattcgtagaacttgntcttggattgttttctgtttgcacccttgtaatgttggaaaaaccatctcctctgaggttcattctccggagaatagaaatctttcctaagggtttccttatcaatgctaaagttgtcaaat

SEQ ID NO: 100581 - DNA, 220 bp, Glycine max
  unsure (1)..(220): unsure at all n locations
ctctaatattacattgatgtttgttttattggaggangttgtatgccatttttgttttaagggtagcatttcttggtaaaactaactttccaaatgtttgccttcgcaggaatggccccgatgaagcttgcctcaaagaggtccaggaaggacaaggcgaccgaaggaactagttccgctccggagtatgacagtcaccgctttatgagcgctgtacacc

SEQ ID NO: 100582 - DNA, 468 bp, Glycine max
cttcttgacgaaacttacttgagaagctagagcttagctacacacacccctctaataactaagctcagctccttgagaagcttccttgaaaagattcctaaagaagctagagcttagctgcacacacctctctaatagcaaagctcacctccttgagatgagaagctagaacttagctacacaccccctataatagctaagctcacccccatgacaaaatacatgagaatacaaaaaaaaagtccatactacaaagactactaaaaatgccccgaaatacaaggctaaaaccctatattactagaatggccaaaatacaaggcccaaacgaaggaaaaacctattctaatatttacaaagataagcgggcttatacttagcccatgggctcgaaatctaccctaaggctcatgagaaccctagggccttcccttggatctctggcccaatctacttggagtcttctat

SEQ ID NO: 100583 - DNA, 361 bp, Glycine max
  unsure (1)..(361): unsure at all n locations
agcttcttgattctcaaaaattctacttgtaattccaagcagaattatgttcttcctaagtccttcatctcgaacatttttctttaagcaatataaggcttttggaagtttctcatggagttccaatgatatttantgtcactctacatagaataacagattgcatcatatccatttgtcgatttttcatgggaatatatggacaaatgaaaaccattttttaactaattctgaaccagacaattgatctgcatgcgccgtgattgctttaacccataaaaagacctattcaatttgaatgagtatctttcattgacatggtttattggacaacctgaatccgtatgggagtgttataaaa

SEQ ID NO: 100584 - DNA, 430 bp, Glycine max
  unsure (1)..(430): unsure at all n locations
tgttgtatgagttgatgatgactcttaccctctggcacaactttgaggtctaacaagtattgcatagctcctgacaccatntggaatcgatcatgcaataacaacaattgcaattaataactattttttcactgtagtctttggctagacacaacagaattgtgatttcattgtgtcataaaaaacaaaaaaaaaaaaaagcaatggatcacagttccattgggtgctcatttttttattttttatttacaaataaaatggaatagtgattttgttgtagacataactacaacaaaatgatttcgttgaacacaaaatcacaaaaaaaaagttagtaccttagagcatagacacgcaaaagggaaggagaagagttgggaaggaaaggagaagagaagagctcgtaagggtttataagggaaggagaaag

SEQ ID NO: 100585 - DNA, 348 bp, Glycine max
  unsure (1)..(348): unsure at all n locations
agcttgatctaatgattatttggntcacagcttgtttaccgtaatacttgggattagtgaaatccataacttactaagtaaaggttatattgcgagatacctttatttaaaaccatgtgattttcagagtaatgggatttggatatattttgaaaatggtggggattgggaaaagttctcaaaattaaaggttgtgacttttcattaaaatcatgtgatgtaactactcacaaagggttgtgagatgtgactcctcacccacggtagttagatgtgactcttcactaaatcaacagatgtgtctcctttgaaggtttatatcctttaccaaacacacatgagattgtt

SEQ ID NO: 100586 - DNA, 161 bp, Glycine max
  unsure (1)..(161): unsure at all n locations
gggtcactcataaattaatgcatcttttntactaagaatcttattaaaaggggagtgtcgcaacctacccttttgtcggagggcgacgcgtgactcgcggtatgcctgtatcactaaaggaatacccgcggagttcccaccaacgtttattttaggaatac

SEQ ID NO: 100587 - DNA, 397 bp, Glycine max
  unsure (1)..(397): unsure at all n locations
acttntctaaagaaggtatttacaaacactctgcgatttattagaggngactttaagacttagagggttngggcaaaggaaaactagtcaaaatctaaagatatttctatacaactcaacttcttgatcttatcctctttgtatcctattttccttcctagcaatgaagttcaacaattgttgttccttatatacagcttgtagatgatcattgatgatttcttgagaggcttgaaaggcaaggagatctgatctgttttgtctctatcaaataattggcttttccttcttctttagctagatgacaacttgctcatttaaaaattgattttgtagctcgttggtgcttattgtgttaatggctaatgacttctccttttttcaacttactcatgag

SEQ ID NO: 100588 - DNA, 363 bp, Glycine max
tagcacttgacaattgttatcatatgggtagcaattattatttacaatgggtgtgtgtgtgtgtgtgttgcaaacaataattagtgcatcaatttaacaattgaaatccaatagcatattgcaataactgaaatacgaggttcgtgaattgcaatcccgccaatgaaattttgttgaattcctactagaagacaaattaaaatgcttacttgttgaagacaagatcaaatgtatcaaaattgttgatgttgcaagaacattattaatggggcaaaccgaaaagtaagccttcctttgcctaaccacacgcttcaaatactaaagttttcaatgggcaaacactatcaaggaattgaataacct

SEQ ID NO: 100589 - DNA, 434 bp, Glycine max
  unsure (1)..(434): unsure at all n locations
agcaaatttagtaatgacccactaacctagaattattataacttaatgccattaacctagggaattaaaaaaaacttaatggctgagtgtaactgaaattgtggcaaccaaaagtcacccccaacagccaacaagtcagccactatttggtctcccaaaaagctgatgcctaggttgccaattgtgcccttattacaacttgaactaaacctactaaagcccttttagttgattaacccaaaacatgtttttggtcagccaactttacaaggattgggccattatttatacaaaataaacactctaaaattgagacaaagcggtgccatttagtcctcctccatttgggccatgatacaactcacaaccttggacttttctccttgaaactngngcttgtattcaaatagtatggacagcacttgttgaacagc

SEQ ID NO: 100590 - DNA, 454 bp, Glycine max
  unsure (1)..(454): unsure at all n locations
tgtaagaattgcaagatcatcttccttgacaactccttgattattatngccatcaatacgcagagatgacaatttatagagtgatccaatactttcaaatggatttccactgaatttattaatagacagattgagatatcttaatgatgaaagttttccaaatgatcttggaagagcaccaccaattaagttgttggaaaaatctagcatgtcaatatttntaaaagccccaatttgatctatcagattgcctgaaagttgtgaactccgaactgcaagtgttgtgattccctatgaaatacaaggagcaagaatttctaaaagttcattaacctgttggttgagtttgagatatgataaacctatctcccttaagttgcagagattagccaaagaagttggaatggttccttcaagtagattatatgacaaatcaagttcaacaagagaagtc

SEQ ID NO: 100591 - DNA, 326 bp, Glycine max
  unsure (1)..(326): unsure at all n locations
gcaagctcccatattcctatgaacaacttccctttgcccagcggtttgtgggtgacaagngtgtttaaaataacaatttagtgcccaacttgctccacaatgtcttccgattatgttaatcatcgagcctaggtatacgatgcctttatctaatggcgatgttattaaaggctcttcccgcataacacatgtgccatgtttcatccttttaacggaccaaaaatactgggacgtcacatagactaatactatctcttacctcgccgttgctgatgaagcactacacttggcgttgaatctctagggaatcttgtgaattacttata

SEQ ID NO: 100592 - DNA, 356 bp, Glycine max
  unsure (1)..(356): unsure at all n locations
cttggcaatttgtcaaacactttacctcncggcggacagcgtatgcagtgggatcaacactttatttcgagtgtcaagcacagcggaatctgcagtgcaagtctctcaggatgcagacatctcacatgacatagcttctgttctgctcccctgtctcatgctctactccncatctttatatctactaatcttttcggatggcagacatctatgtgacatcagctttccttgctcctgctcttactgcacattttataactactatagctacatagtcatcatagcacacagttcccctcaaatatgtcatacactccctcaatatgatatgctactcgatctacttttatatagtc

SEQ ID NO: 100593 - DNA, 425 bp, Glycine max
  unsure (1)..(425): unsure at all n locations
agctatntgctgcaaaattcctttntgttggtgtttttggtttgtgctaaatgtggtgttcgtcattggaagtgcggtagacagactttgtggtagaattagggatggcctttgtggataactgggtggtgggtaaggaggtggtttgttatttgactgagtaatgacattgttgggtttggtgggaaacttggccgtatatgaatggcagtcatagcatgggtttctccctcatcctcaccctctgtatttgccccagttttctcattcgtctaagcaggatgattaaatttgcctcttttcagatccacttcgatcctttcactggcgaagaccatatccgcaaagctgtgagggtgcgtatcccaccatctttagagtatcgataatgtgtctaccatcacgattatacgcctcctttccat

SEQ ID NO: 100594 - DNA, 274 bp, Glycine max
tcctgcggtcacaaatcacctccacacaagttgagacctcacatttcaaatcttagagaaagagaattctcctcatttctcttaccaatgtttaccctttttaccctgttctctgctctatataccaagagcttactgaccctatagaagactttgatgaacctggtaaatcaagatgtgaatgtaagaaaatacaagtgggtaagatgagctaaggaggtatctgcattacaaaggacacattgaactttgaagcactgacagaatttttaaa

SEQ ID NO: 100595 - DNA, 402 bp, Glycine max
  unsure (1)..(402): unsure at all n locations
ttaagtcacctgcggcattcagctcttctgagactctagtaatgacccactttcctagaatataaataacttaatgccattaacctagggaatttttcaaactaaatgactgagtgtaactgaaattgggggcaaccaaaagtcacccccaacagccaacaagtcaggcaccatttgggcatccaaaaggctgatgcctaagttgccaattgggcccttattacaacttgaactaaagcccttttagttgataaacccaaaacatantttgggaaagtcaaatttacaaaaattgggccattatttatacaaactaaacactctaaaaatgaaataaagcggagtcttttattctccatatgggccatgatacaacttacaatctaggacattatttcttga

SEQ ID NO: 100596 - DNA, 452 bp, Glycine max
  unsure (1)..(452): unsure at all n locations
cccatcacatgtgggactaggtggcggtcgggcgatggtttatctacaagtttccacatccacaaattgtgcataaacgcgccatcccctattgcccagctccaactgagctcacgtactcccacgtaggccatatcctcgtgtctctcaacaccgggtccccatcgatgcattcaagcttccccaaacgtccgagtaaaacaacattgcaacatcacaaactatcacagccaagaaaacagagcaaaggcagagaactctgccaaaacaccaaccagaatcacagcttttctcacttacagaccccaggaacaattcctttgttccaattcgttaaccgttggatcgactccaaaatttactggaagtctctagtacataagcctacatttagaccggtgggatctactagcanacatccagaactcattctgcgctgctctttccacaac

SEQ ID NO: 100597 - DNA, 314 bp, Glycine max
ttgctagcacttactggagttagagtcttggatgttcttgtggcaccacagtgtttctggttgcttacagttctatgagataagatttagttcctactattaggacaggtcctatctccatttctacgcgaagctgattccgataaatcattaacaatctactggtaataaaaattttcacactcatatgcctttagcattgattcaacgttaataggtaaactttcgctatgttcttgcatgacgtcatctcctacataatataatggtgatcaaaaaggacagttttatcgctctttagataagctgagaag

SEQ ID NO: 100598 - DNA, 443 bp, Glycine max
actcaagcttataagaacataaatgcctcaatcatttccaaatatgcatgttatttatgattcatcaacaagaatcaagccaaggctattgtgcaagcaatcaatggggcaaaacacaccaaatgattatgatgatggatggctcaaattctcacaaaggtaaactcatcactctcaaattgagctttcaaaactatcatgacatgtagaggagaatcaaggatttcaagtcacaaaatgccaagaacttttattttcaaaacaattacccatttcttgaacatatcctataattcaaagaaaaacatgcaaagtcatacatgcacacaaaattgacccacaatattaaactaaaaattcgacgaaactaacaacattaacaaattaacacaactaacaaattaacaaaaccaacaaaactagcaaaactcaagaacactccc

SEQ ID NO: 100599 - DNA, 444 bp, Glycine max
  unsure (1)..(444): unsure at all n locations
tcaagcttgacttgtaatggaaggctatagcctctttgttgtggagttactactgaaactctngatgtgatactcttactatctatttaatgctatctttctgtgttctttgcttctatctatgcttattttacatgcttgtggcttgatcatccatctgtatgtgcaattaggttttttagtattggaaaatgctttataaccttagaacttgatatagcaagctagaaatctatatgtctatgaatggagtatagtgatctagcccattttacattttacgcttagtgcaactcttttagaacaagattgttgaggaatcaagaacaaaggctaaagagagttaggctcattcatgtgaggaatcatggtttaagtaatttctcagtataataacactatgataacgttaatagagaaaacacatttatattcaaaggaatc

SEQ ID NO: 100600 - DNA, 405 bp, Glycine max
agcttgagatatctcaatatttgttgtccaagcatatccgcgctggctttataccaatcaacagaatgggtgtttgatagcacgatgagtcattctcaatcactgtacagacgagtatgcaatctcagcccttaatctttactcttagaatgtgttaagagcttctaaagaactttacataaatatattgaaagttttttttacagaaagaaagcgaataagagcgcgttagttcctcgatcatgtcttcaaaacttctaatatttataggtcttttcagtaagtgtgtgtagcctctaagcgattagagttcttcactcgagctcgcatctaaagattgtggttgctggagcatttaatgctctcatttaaatgcaagcactcctttatgttgagacatcactc

SEQ ID NO: 100601 - DNA, 465 bp, Glycine max
  unsure (1)..(465): unsure at all n locations
tatcagaagcaatgtactgcacacatgtgcagtataatgtgtcaganaataaaccttattaataaaaagcaataaagcattcaattttcctgatttgtattgatcaaacttgagtgcaaatgcatacctgttcacctttaagattggcacaagcctcaagttgacctcgcatactaggagttagccttgaaatatctgactcagtcttcactcgtttccttttctgctcattaccttctgtaacacaagtactgtcagctacacaaggtatataaaaattgacatcccataggaaatgaaatcataataataacaaatagcataataaaattatttgcttcaaccaaaatactccataaacccttccacatatttgtatgtattntgattctcatgtgtgcatagcttcacgttatcaactgaatgtngtacaaaacattaccacattgttggggaagcaatgca

SEQ ID NO: 100602 - DNA, 316 bp, Glycine max
  unsure (1)..(316): unsure at all n locations
tgcaagcttgcttgtgtatcttctataggagctggatctttgagcttcaatgaggtccttctatggtgatttttccccatggagatgtgacggaagaccaacgatatgaggtganacgangcgccatccattaaggaataatccgtggaaaaaagagcttctccacccagattgagccttggataataaagctcggaatgatgctttccttgaggaaaagaaagagggagagaatagatagaggggggagcactatattgaaagaaggaaaagggagagaagttgaactttgagtggtgtctcacaaaactctcat

SEQ ID NO: 100603 - DNA, 435 bp, Glycine max
  unsure (1)..(435): unsure at all n locations
tctacttatgtggcagggcgggcttccttcactttcttgtctccaacgcgagctctgaccactgttcttccttcccgcgatgcttcttttcatgtccgcctgagtgggcttatagcctaaaccatacttcccacgatttccttgggttgttatcaggctagttatgccgccattgtctttgcctaaacccatcccgggttcataaccgttccccaacataactcgggccatcattaccgccgcatcggacagacaaggttgcccaaagagggagtccacggaggaaatgctgaccacctcanaagactggaaagcggtttctaacgattcttctgcggcttccacataaggcatggaggatgggcagcttaccaagatatcttcctcgcctgacacgatgaccaagtgcccctccactacgaatttcagcttttg

SEQ ID NO: 100604 - DNA, 288 bp, Glycine max
agcttgtattcttatgaatgactcggactagattctcccaccggctatgagcatttgtgtagaagatttcaacctgcaagagcacgggcaccattctctttcaccacctctaaaatgatggggttaagacagtgtcgtggtggcttactggcttagctcccatctctaaaaaaatactattcaagcaggtggaatggctaaaactatgaaaggttgctaaaggacatccaatacctctcatgggcctgtggatcactaacaacaacttctactcttgctcggcaatct

SEQ ID NO: 100605 - DNA, 343 bp, Glycine max
  unsure (1)..(343): unsure at all n locations
ggcttgtgaagcttctatggaggctggatctntgagcttattgaggtccttcaaaggagaaattccaccatggagatgcaggggaagataaaggagaagaggtgagaggaggcgctatccactatggaataagccatggaagaaggagcttcaccaccaagaatgtgccttggataaaaagcttggagaggatgcttcaatggaggaaaagaaagagataacgcggggagcacgattatgaatgaatataaaagggagagaagtggaactttgaagtgtgtctcataagactttcattcatcatagttacaacaagtgttacacatggttctatttatagact

SEQ ID NO: 100606 - DNA, 376 bp, Glycine max
  unsure (1)..(376): unsure at all n locations
acgtatgattggtgcactatctgttttacatcaacgatgcctcctcggtttcggggaccgttaacatgtggcaccaaatagtgtaaactccatgtagatcagagttcacatgactaacacgtgatctttgtttattttttgacgaagctcccctacgttatagttttcttgataaaaacgcaacacgcgttaacatacgtttgactttcctgctttcatggccatcattgtcgnatactatccagcgccatatcggaaggtaatttgaggccacaatggtttgactccctctttattattatgttttaccttcttttcttgtttctgtagcaaatctacaaatgaatctgccaaaccatctattgtaatcgaaaat

SEQ ID NO: 100607 - DNA, 469 bp, Glycine max
taagtcttatataagatctactcgatattttatctgtccagttccattttagttgtaacttatttgccttcaaattacagttttcccgtgacacaacacaagcgcttccaatggagacaacaccagaacgcaaccttcactttgtgttcatccccttgatgttgtcaggttgcatgcgtcctttggtagacatggccaaattaatggcacgacgcacagtaaaagttaccatagtcaccacagcccgctatgcagtccaattcaaagccagcatcgacagagagatccaatctgggtcatcaatccaaattcaactagttacatttcccaatgcagaggttggagtaccagaggggtttgaaaacatacaactaccttctatagatttgaacgagaaacttttcacagctttaatcatgttgcagccgcaactagaagagcttcttataaagctaaacccctttccatg

SEQ ID NO: 100608 - DNA, 326 bp, Glycine max
acctcacataaagcgctttcaataagttgttctccaagagcggcttctcatttattaacgaacacaaattaagtcttttcgtgttttccccataaattaacaccaacagttcccttaactgctttagcttttctacctctataatgaccactccattatcatctataatcactggtagtatctcttgtagggatgtcttgcctcgaatatccttccattgaattgaaaatatatatccactcataaaatgacctagctttttaatcttatttatctaataaaacacgaccgaatgggtgagcttcctatacttccactaatatcat

SEQ ID NO: 100609 - DNA, 449 bp, Glycine max
  unsure (1)..(449): unsure at all n locations
ntaagtagtagtgagaatgctctgagactcggtgtggttttttcttgcctgactctccatctatagctaatgaagtggacttgggcttgattcaaaaaatcttccttatctatctgtttgatatctcgtggatcttagtaatcttatctttcctacatctgcaggtcatagataagaaaaatatcaattcatatcttttaagccgaaaataactactaaataaatatctttaaagatatttgtaaattagctcatatttagcagttatcaatatcttttggatcttgtaatcttatcttttcatatctgcaatgatgtaagctccattggagcttgtaagcctangatcttcttcatcaatggattcctttgcttcttggaagatgaatggcagtggaatggagaacgaagagagagaagagacgccactttatgatgaagatgagtct

SEQ ID NO: 100610 - DNA, 448 bp, Glycine max
tgcctagccccaagatatatttgatggactcatcggcgctattaatgacaaataccttgggataaatgtagaggtgccatgtttgcgaagcccgtactaacgcatacaactccttattatatggtgaatacataaaggtcggacgccttaactaaacactttaacaaccaattggatggcctgtttgcatcttcacatccccattgcctacatgtgaagcagcacactcaattaccaagactgttgaatgttagtctgcacatgtatggcgcgcattattagcttgtgcttaataacgttcaaagcttcttcttatttgtctacccattccaaaccaacagtactcttgagcacttcattgagaggtgctgccaatgtgctaaaatccatcacatatcgtatattaaaacatgctaagcactaaaaacgcctcatcctggtcacagac

SEQ ID NO: 100611 - DNA, 486 bp, Glycine max
  unsure (1)..(486): unsure at all n locations
gacactatgaaactcagcttacaagatgatgccgatcaaacttttcctaatggatatcatgcaaatntctttcatttattgaatngaaaactcaatagccgacatcggtcgtgaaatagcctcgactgatatttttcagccgacattgagcaatttnttttaaaaatctctcgctggcagataatggttcttttacggtagaggaagatttcttgttttggtgttgcataaaaaatttacaatgtatgtcggcaaggtttttttgtgcgagctcaaccgacgttttgtgtcggccgaaacttgcaggttcccattcattcggccgggaaaacattagcccatctcggcaaagataatattattcacggatattgatcgaaaaaaatgacagtcgacgtctgtccggaaagatgaccgatcgatgattaaaaaagaagaatcatcggatgacgccgatcgaacatttcctaactgacatgatgcaag

SEQ ID NO: 100612 - DNA, 250 bp, Glycine max
  unsure (1)..(250): unsure at all n locations
gacctgcggcatgctatgcttgatgatgnggtcttcaccgatgaaatgttcaaagtaggtctaaaaagatgcaaatctgatcatcatgctttgatacatgccaaaaaaaactagggcaaatgaagagggtgagaatgagggagaagcccatgctgtggctgccattcctatacagccatgttttccaccaacccaacaatgtcattactcagccaataacaaacccttctccttacccaccgcctattat

SEQ ID NO: 100613 - DNA, 466 bp, Glycine max
  unsure (1)..(466): unsure at all n locations
tatgcgcatatttccttacaaacgttctcttgcacaagacatttaaccgtttaaatgcacccatatacaatcaaggcagcttcgtcatctagattatttacacgtacctccaaggtgtatttgttacttatatcacacacatctccttggctaaattcacatacatgcatactcaaagcattttggggtaccaaaaattgcacatgtgcacctcttggcatttctaatacctatacatacgcaaactttatgatgaatcttgactatccacacaataaggtgctacatttcatgctcttttttcaagtntttgctacctaaagccgcatgcaaattcaagcatattttcctttgctgactaaaattgtattcaaattaaaaggtatgatttttgtaatatgttttcttcacataacatgcaacatatttatatatatnnttttttttgtgagacnatttgactacc

SEQ ID NO: 100614 - DNA, 388 bp, Glycine max
  unsure (1)..(388): unsure at all n locations
cttgggtggggttccttagttgctgagtttctaagtattgaacaatatctagagatgttataattgtttatactacacgttttcaaaattggaactgaaaatgagaggtacatgaaatctaacctattaagccaccttaatatactctggctacaggctttatcgttaaggagaagtaatagcaaggcctaagggtaaaaaatttactaaacatgttnttctaattatttaattttaccaactgtagcaactttaaaaaaattttaagatgtagcaactttttagaaaatatatgtaacgcccgtggagtcgtggactgtatcagtgtatcttctgctacattaataaataacttcggattgcttgaacacgacacgctttttttgtc

SEQ ID NO: 100615 - DNA, 456 bp, Glycine max
ctgatgtgcatgtgctgctgatcgaactggacatgctttattgcacactctctattgtcaagctatgagacataatacccagtgttttgtggaatattttgcattggatcttgtaatgaatagtgatggtaagttgttgcagaaaacatcttgactacacttaatttgcaatcaattaaactaattaagtcttagcattcattggccttgatgaataaattttccatgtacttcacattacttgatacaaattgtaattgtgttatcttttccaatggtaattgctctattaaacaagcattcaatggtagaaaaaaatgtttgtcttggttgatggtaaaataactattttctttctatattggatatgtaagcacttgccaatgagtgattgcctcgaatatggaggatggaacactacatctgtttcaagcgcttcaacatattggccacggg

SEQ ID NO: 100616 - DNA, 471 bp, Glycine max
  unsure (1)..(471): unsure at all n locations
aaactaagctttaatactaaactcttggggcccaaacttattaatncctttcacacattataatgactaactgagttaatcattttcagatgagaaagaaggggtatctggtaggcgtaagggccgtcctctgaagaggcataacatacaatgaatgaagctttttgatgagcagagttcaagtgaagacgaggattccattattgcatatgaacaagaacacaagatgataggaaaagacatgaggatgaagatgatcgattgataaattcaatcccatcatcatccaagctaatgtcactgggagtttctagaacatcacgtatcttgcattagcaaatcaatatatggtatctgtcttgctgctggacactgaccaagctattcatacagcattttacaacaaatttgcatgtctgactttggagatgaattttgtttatccattccagttaattggagatatcattg

SEQ ID NO: 100617 - DNA, 443 bp, Glycine max
tggtatattgagtgccttgggcttactttcaaacttactatgtatgttgaactcactatgattgtttaccacagttttagtaggtcaatattcacttaggatcaacatttcagccagcaattcaatcaccaaaactcaaattcacaatagacacaatcattaggaaacctacaagttcaagaaaaggttcacaatcaaagactctctaagaattttgcatgaacatgttaaggactaattaacatgaaagatttgactcacatcaaataatatgctaaaagaatttcatacactcatgaacgaatgagttagacaaagaaacaagaaaaataaaattcagcacaacatacgaaatcttatgtgacaagtttcatgactagacatgacttctatgacaaaactacaataggtgaacaagtcactctagatatttgagggtttct

SEQ ID NO: 100618 - DNA, 410 bp, Glycine max
  unsure (1)..(410): unsure at all n locations
ttcaccgaagaaaggtattttgtatgtctaaatatatgcaaatatgatcatcatgcttngatgcgggcctataaaaactagggcaaatgatgagggtgagaatgagggagaagcccatgctgtggctgccattcctatacaaccatgttgtccaccaacccaacaatgtcattactcagccgatacaaaccttctccatacccaccgtctagttatccacaaaggtcatccctaaatcaaccacaaagtctgtcttccgctcttccaatgacgaacaccacctttagcacaaacctaaaacaccaaccatagaatgaattctgcagcaagaaagccttagaattcaccccaatttcatagttccatgctgacttgctctcatatctacttgataattcaatgggcgccat

SEQ ID NO: 100619 - DNA, 443 bp, Glycine max
actaagcttgagaatctctagcctgtgcctggcaatagatattcccatgtctctgaaaaactcaggggtgaagtagcatgcatctttcaattggagctcgtcgcgggcaaaggtgaggccatagtcgttgattaaagaatgttcaagagtggttctggatagcctagagaaccagtccatggatgatgatgatgatgatggtgttgggccaatatggcaggatatgctaacgtttgatgtggtcattgtgatttataaggtgttaagtattttagataaggaggtgtggacattgagatgtgacaattagtgcataaatgataaatgttgtctgtacgtgggctatttattttaggtgttttcagaccattttacactaacatccttattttttttaaagatacgatgatgataattggattgttgttgagattgagagtgac

SEQ ID NO: 100620 - DNA, 358 bp, Glycine max
agcttaatatcttactcatgatgtgtttacaatttcaagcctgatcatcatgactatttcctatgccgttataattctcaagccataacgatatagggctatatatgtcggagacatggtacctgtgccacactctacagagagaatacgtcggaacacaacatgataagactgttatccacttagttgtctcaagtgattgatacgttgactcatgaacacaattcaggccatcagaggagagaatctttttatgtgaaccccacctccaaaagactctccccttattatcattgctctgtcgaagtgtactatatatttcctatgtcactctccactaattctcttttccttaatt

SEQ ID NO: 100621 - DNA, 447 bp, Glycine max
  unsure (1)..(447): unsure at all n locations
tggagtccataaaatgaatacctgttctagtttatatggaaaaataggggggaaaaacacgggaaagaagtccataaaaggaagattgtgaattaatagggaatgaaaatagaatagatttgatcaaaatcaggagaatatgaactgggaagtgagaatagagaatactatggatgggggatcagaaacatgtaatctgtgattcatgaacacagatcaagctgggatgcatgaatagaccaaaggaagggcagggacctgaatgcacgtgactaggtgagcactatgtcactggaaagcaactaaagtgggtaagtttacatataaacagaagtcactgactcactgtantttgcatcataacagaaaccctagtgtttcagatgagaaaaggagaaatcatganaataatccacaatattgtgttaaaaaatctaacaaatggga

SEQ ID NO: 100622 - DNA, 424 bp, Glycine max
ctagcacccgggatccatttagtcacctgcatgctgcaagcttgtccgtataatatcactataaaggattgttaggttcgatacctcagtttttctcaccaagtaaaaatgggtcattttaaggtccaacgccttaaaaggacctccttccaactaaaaagaatcggcggatgttccctttagaaaaaactacacatgactgattttcttcttcatggagggtacgtaagaacaagagccccgcttttgtcgacctcaaaaattaaaaaataaaagtttaaatacattatttctcacaattctaatttaacgctgttatcctttgggaataacgagacatgtgctaataccttccttaaacgctaatactactctccagactagaattttcttcatgaccaggtttccttcgttctgtttgact

SEQ ID NO: 100623 - DNA, 465 bp, Glycine max
  unsure (1)..(465): unsure at all n locations
cctatgaaactaagcttctcaggaagttntctcaagaaagcttctcattgaagctacctagtctataaatagaagcatgtgtaacacttgttgtaactttgatgaatggagagtcttgtgagacatacttcgaagttccacttctctccctcttttatttcttcaatttcgtgctcccccctctctctttctctccctctttcttttcctccattgaagcatccttccaagcatccttccaagcttcttatccaaggctcatcttggtggtgaagctccttcttccatggcttattccctagtggatggcgcctcctctcacctcttctcgtttgtcttccgctgcatctccatggtggaaaatcaccattaaaggacctcattgaagctcaaagatccagcttccatagaagccccacaaccaagcttccatcaagtggtaagcagagcacaagagcttcaagt

SEQ ID NO: 100624 - DNA, 156 bp, Glycine max
agggaggtaaaacgtttctgctagagaaaatgtttataaaagcttctttctatttatactaccatgccttgagacaagcccttttttaggccatccaccaatgaaaactcccgaaccaattgctgtgggtgtcttgtcatcccgttttgttcttgc

SEQ ID NO: 100625 - DNA, 402 bp, Glycine max
aaactcaagcttatagaaatcaaacaagataataaattatcctctcattatttattaagcatatgtgcataaataacaaatgagtcatcaaaacataaatcatttgtctaaggcacttgcatctagaagtcctaattatctgctaatggtgtagaaagaatcttcggttagtggttttgtgaagatgtctgcaagttggcttttctatctgctattttaaacacaggaccgttttcctaagactaagtgctaattgactatcaacacttactgtagaagcaagcttcattgctgcatgatgatgaatcaagattgattcctgatgatgaatgaagatcgattcaatgtgttttgatgataactaatatgatgactttaagccctgtacattgattttagatt

SEQ ID NO: 100626 - DNA, 422 bp, Glycine max
agctctgcagcatctctcatacgaaaaggagacaataaagctttagaaacccaccatgaattcataatgtacaacaccatccaacccatagctgtaaaatccttggttgaaaaaaaaaaaaaaaagaagcagtatttacaaatgacaaagtctaacatgcatctaggcacatcacgtacacccattcaaaacatataaacactagttttttaaaaatattcacaaccatgcttttcgtcacgaccggcacggtattgcaattacaagtatggctacatcggccggattaatctgcaaatttctataatgtcaaaggatcacgatgaaatcgcgacccccaccataatttataatcttagaaacaatattgttgcagtgacaaataatgaattgctgccgaaaagcgaaagatacaaaaatta

SEQ ID NO: 100627 - DNA, 462 bp, Glycine max
  unsure (1)..(462): unsure at all n locations
tatagggtcatggtgatngagaaggggacatanaaatatttggaatatatactttatttcctatatgttttccagaaataatctcagctgcaatgacatggttggttagtcttgtaacaattaatctattccaattacaaaggccttcactctgatctaagtttcttaacagcataatgggtgatccaaccttaagtttgatagaatgatatggtaggccagatgtcgtcaatgaattgagaaattcagtagttagtgagctgaaatgacaactgtctatggtttctgatttctctactgaatcggaacttagatactccatatgttcacctatgacaatgttagaaattaattcattaactaaaagataaatataaagtgttaaaaaatagatagatgaaagatagatgttagtttctcataatttagaaaagtaacatcggtaatagtgcaaaatatgtt

SEQ ID NO: 100628 - DNA, 384 bp, Glycine max
tgcgtgcaagcttggtgtgtttggtagttattatcccattttttcagccagtgtggctcggaaacaaaataatcttcaggctggtccacagatttgaaagacaattctttgtcagcccagtctaaaaaaaatgcagctggctcattaaatagagatccagctcaaacgcacttatggagtcatactgttacactgcccctcctaatggaatatggaaggtactggtacaacattttacactttgagcttgcccataacttgataaggatcttctcaaaatgcttattagatatttaacacacataaagtatattgcttgataagcttccaagattcacatttttaattcttatcaccgaagagttgaatacagaatgtttttca

SEQ ID NO: 100629 - DNA, 443 bp, Glycine max
  unsure (1)..(443): unsure at all n locations
ntaaactgttctcttaccttaatcacttatcttaagcnttgtagtattacaagtttgcttcattgctatgtggtgccacttggcttatcaccggcaaccacctggttatcctgtgtaaaactccatggtaccagagggctagggagttatgggcttctctcaagatgctaatttttataggggtaagcattntagatctgatggatgagggaatcattaatctacagttcaggttgtcttaagctcctgagtcctgattgtttgcaaactcattaatttattgttgaggtggtcatcatactgcaatatgtatcgacaaattcataattcatttttaaaatatttgttggatcaaaacacgttggtatacattactggcttgcattatctttgagcactgttctatgaattatacttctgctaagtcaagtgctgattaaatt

SEQ ID NO: 100630 - DNA, 314 bp, Glycine max
  unsure (1)..(314): unsure at all n locations
agctctgntggagcttcaatggatgatgaatattaaaggagagggagagagagagctgtctgaacttgggctgactgaagaaagagataattgttgttaatggtagaaaggcctttctctctatgcttactatcctataaaagctatgccacatgtctccatttgagtggagccaagagggcccactttctcttttgatcgtgaccggttcgcaccctcagaaagtgagaaaaatctgacctctgaaacgctaaaattctgcctcggtttgcgtgtcgattctctggatccagatcctcgcgttcttctgcgtc

SEQ ID NO: 100631 - DNA, 326 bp, Glycine max
  unsure (1)..(326): unsure at all n locations
tcacaaatccacaattccttataatatgcctaactcacaattatatccccagtggagtcaccaactgtcgcaacgtgccctttgcgggcgagccgaagcgaggctcacgggtgcactttccaaaggaggaaagatgcgcggagtcaccaccaacgtttatttgtggaaaacgtcgggaaaactgaaggaaaccggtcaaaataaaaattctaagttcgggagttatatttacgcttgaggaaggtattatcacctcttacgtttgtctcgaaggacaacagcctattttttagaattgtggaaatngtattgccttcatttttatt

SEQ ID NO: 100632 - DNA, 411 bp, Glycine max
  unsure (1)..(411): unsure at all n locations
tatgcttaaatattttatggaaattaagntagtattatatacgacaagttagtattttatatatatatatatatatatatatgaccttaatagccaaaaaagaaaaagcaaataaaccacttattttttggagcaagtgtgctacaaatccaagccgaaattgcttgcatcaatgccaaattaaccacttattttttgtgttcttatcaagtaaactttacatgctttattaggctggtaatagaatcacatatcccaacaattctacagttcaacacaaattcatccactctaaataattgaaaacaaataatcttgagaactatttgaaatttggaagtatagaagtggaaggagcgtacatatggtaaaatattatattgatataagcataacctcgtattatataat

SEQ ID NO: 100633 - DNA, 425 bp, Glycine max
agcttcttagtttcagatgatgcgcatgggtttgtatctacctcatgcacttctctaatgactatggcatcatttctggcgctaaactgctgggagttggaagccatcttctcaataaaatttctggctttagcacgagtcatgtctgcaagggctccaccactggcaacatctatcatacttctctccatattactgaacccttcataaaaatattggagaagaagctgatctgacatctgatggtgggggcaactggcacatacattcttaaatctctcccagtactcatacaggctctctccactgaattgtctaatacctgagatatccttcctgatggatgtggtcctgaaagcagggaaaaaatgttctaacaatactctcttaaggtcatcccagctcgcgatggaccctggagcaag

SEQ ID NO: 100634 - DNA, 468 bp, Glycine max
  unsure (1)..(468): unsure at all n locations
actaagctgaggactgccaagggactatatgatgggaatattgttattttctaatgctcacctccccctctaaaatttaattggattgagcttctcccaattcaattaaatttattttccaacacacacatcaaatattaacttaatgcatatgaaattacaaaactacccctaatctaaaaactagtctaggtgccccaaaatacaagggctgaaaaatcatacatttgtagggtaccctacctacgttatggagccctaaataaaaggcccaaaaataatgaaaccttaatctaatatgtactaaaataagtgggctcacacttatcccatgggcctaaaatctatcctaaggttcatgagaaccctagggtcttctcttgcatctctagcccaatctacttggagtcttctatccaatgcccttgcggngtaggattgcatcattccctcccccatgaaaaggat

SEQ ID NO: 100635 - DNA, 429 bp, Glycine max
  unsure (1)..(429): unsure at all n locations
agctntttcgcgtatttctcattccatgcaaccttattatatactacaactttataactacttgtaactaactaaacaaatgtagcaaacttatttgtaactaactcaacagacttaactaaatatttattattgttattggttgtagtggtttctgttgatgcttgctcccttgaagctgttgtcaggtctcgtaatcttgcatgtacccatgtcttgtggttatccttctggacctttctggattggactcttgattaggattgttgctaacatataagttatctttattatatttgtggataatattctctatgaaaatcaaaagtatgtatacttacatcgtcaacgagaatggggatatgcttgcatgcatatgaggagtacgagaaggccatgaaaataaatagttggatgtcaattaattga

SEQ ID NO: 100636 - DNA, 421 bp, Glycine max
ggcctgtccgatacagcagtaatgatggcccgagttatgtttgggaacggttacaaacccggaataggtgtaggcaaagacaacggcagcataactagcctgataaatgccaaaggaaatcgtgggaagtatgggttaggctataagcccactcaggcagatataaagagaagcattgcgggaaggaagaatggtagtcaaagctcacggttgagacaagaaggtgaaggaagcccgccctgccacataagtagaagctttataagcgcgggtctgggagacgaaggtcaagtggtcgcaatatacgaagatgatgttccgagtacattggatttggtacgaccttgccctcctgatttccagctggggaattggcgagtggaggaacgctccgacatttacgcagcgagcataatgtaaa

SEQ ID NO: 100637 - DNA, 427 bp, Glycine max
catgctatctattatgctctcggatgaaagcctgctgcttattgaaaagagtgccacttcttttactcctaatgtaagatgatatggatgacatatatgacattgtaaaactgtccaatgagtcgggttggccgcaacaacagaattagaagagagtgatgtttttcgcatgatagcaatattaagatgctggatcatatgaatgagaatattcatgtgtgaatttaatatattcacatcttgtaataaaaaattgtatatatctccatgtgatatgttgctaattctatacctatgctcaatataatataattaggacctgtctatatccccaatctacaaaaggtctcccatagttagcctagacattattatctatcaaaaatcacctcagcggttccaaaaccactgtagacagcaaacaccc

SEQ ID NO: 100638 - DNA, 434 bp, Glycine max
  unsure (1)..(434): unsure at all n locations
tctaacttataccaaccatgtgcctctaaaatgagatatatatatagtatgtaagatgatgagttgtgggtactcaatcacaatcatgagtttgtgtcgattgaacaaagacacttgttacgttatctaagaaatgtatcaactattaaagggatagtcatagtgaatgttggtataacagttacaaaggtcttaagttatgtagaagacatagctagtggatccaataaacttggtttgagggtgagacatatgaaaaatctgtctagatttanaagttgaaattgattgaaactgaggtagcttagtcattagtgaatctcgtgaagagtaaataagcacaagatttgatgttctactatagtgtatagttaaaccaagaatcaagcttgattgatgtcttttggataaatggaaatctaaagttgattatg

SEQ ID NO: 100639 - DNA, 432 bp, Glycine max
  unsure (1)..(432): unsure at all n locations
agcttctgcagttaattcaacctccttctgttaaccattgtaatgcttctacttctaaacaggtttgctcattcaacactgctggtccttcatcaccagatacgaagggtatgaaaatatctcattttttttattcttctatttgtaataatattgctcttgatacctggatcatagattcaggtgctagtcatcacatatgtgcctcactgcactggtttcactcttatagtgaaatcaatcccatgattataaaattaccaaatggtaatcatgtcaccactaaatatgcaggcacagttgtgttttcctcttcttttagtatcaccaatgtcctatatgttcctacctttacagncaatttgatttctgtctctcaattatgtcaccatacaccttatacactcaatttcactgacactatttgttcca

SEQ ID NO: 100640 - DNA, 454 bp, Glycine max
  unsure (1)..(454): unsure at all n locations
acttaagctggcctgtccgatgcagcagtaatgatggcccgagttatgttgtggaactgttactaacccggaatgggtttaggcaaagacaacggcggcataactagcctgataaatgccaaaggaaatcgtgggaagtatgggttaggctataaacccactcaagcagatattaagagaagcatcgcgggaaggaagagtggtagtcaaagctcgcggttgagacaagaaggtgaatgaagcccaccctgccacataaataggagctntataagcgcgggtctgggggatgaaggtcaagtggtcgcgatatactaagatgatgctccgagtacattggatttggtacgaccatgccctcctgatttccacctgngaaattgccgagtggaagaacgccccggcatttacgcaacgagcataatgtaaacctttacgggtttaaaagctctat

SEQ ID NO: 100641 - DNA, 409 bp, Glycine max
agctttaaaattttaaaaggaaattaagctagtattatatacgacaagttagtattttatatatatatatatatatatatatgagcctaatagccaaaaaagaaaaagcaaattaaccacttattttttggagcaagtgtgctacaaatccaagccgaaattgcttgcatcaatgccaaattaaccacttattttttgtgtgcttatcaagtagactttacatgctttattaggctggtaatagaatcacatatcccaacaattctacagttcaacacaaattcattcacttagaataatcgaaaacaaataatctcgagaactatgtgaaatttggaagtattgaagtggaaggggcttacatatcggaaaataggatattgatataagcataacctcgtatatatat

SEQ ID NO: 100642 - DNA, 457 bp, Glycine max
  unsure (1)..(457): unsure at all n locations
tagccctagaggggatggaccttntcaggttttggagaggatcattaacaatgcctataggttggacctcccagaagagtatggagtcaacaccacttttaacatttctgatttaattccttttgcaggtggagctgatattgaagaggaggaactgaaagatttgaggtcaaatcctcttcaaggggaaggggatgatgcaatcctctctatgaagggaccagtcactagagccatgagcaagaggctccaagaggattgggctatagctgctgaagaaggccctangattctcatgaacctcagggtagatttctgagcccatgggccaagtttgggtccaattctctttgtacatattagactaggatgtcattatatttgatccttgtatatagggctccatattgtaggtagggtaccctagaaatatangattnttcagcccttgtatttt

SEQ ID NO: 100643 - DNA, 281 bp, Glycine max
agcttgagacatttacgatctaaaagctctgttcatctaatcaaatacatgtttcttcatcactgtactgatagtctctccaatccttaaaccctaatcttggtgccgtctgaagctaaccttctttgaacgttggctcgatgctcaaaatttcataattactgcataggccggaactgtgtcatgtgttgtttctttttgaatattaaggtgaaaaatgatctatttgtgggcgcaaacttaaggttaaccttatatttcacctcaatcataattctcta

SEQ ID NO: 100644 - DNA, 458 bp, Glycine max
  unsure (1)..(458): unsure at all n locations
tcntaattgtatttctagaccaanatctaattatttacatctaggtcattaatgagtngaccattatttgaccaaaaaaattctctaaactatctttattctttctagaagcttaaaaacttaagaacttaatcatgctaaggtatcctatagtaatatctcattttctaccatttcaatagtccaaaaacactacccaatcacacagcaaagcaataacacttttaccacacgcacatgagagaatggaatgttatagtattgctattagcactataagttttgttgatggaactacccacataggtgcattttactcatattccaaaactgccccctaaaaaattgcacaatggaatcgctgtttcattgtgcaattgggggggtgaaaaatagaagtacgtttccgttttacaagtgcacaatagaattgtgttccattgtgtattattttcacc

SEQ ID NO: 100645 - DNA, 405 bp, Glycine max
tagctgtcgcttctttctatgttacgacgccattattttatccaagggatgaaaatgtgtattgggtgaaattaatgattttgaaagctgaacgcatgaatctgattgattgagttatgatgtttggattgctgcttaatgttgccccttgttatgttcttgaaaatttagggatttaagtatttgaaatgtgacgattgtgtgttgaaattatcaaattatgtgcttaaaagttattataaatatgtatggaattaatcttagacatccctgtttgtgtgtagatgtttatgtcaatttggggaagtgaaaactcgaaagttgtgctaaaaaattacacgaatacattgttgcatcatattttgcttactacaaagctttttgtgaataacacaaacttttttt

SEQ ID NO: 100646 - DNA, 447 bp, Glycine max
tctcggatatactatgatataataccagcttatattatcttttgactcttttagcaatatgtacacgtcctctctcttagttacgtgaccagaaattacttactaaattccaacaccatataccttatggacgaagttaagtagtctttgggtttgggttgttcattataagtttacctgaaatgtaaacatggtcgcattactatagtcaatttattagtgtacttatggtagagcttttgagaatacgagatgaccttgagaggcacttggaaattcaaatacactgatgtaattaccaagttaaataatcaaaagtaaacttaaaatcaaatggatcatgatagatgaatgttaataattttttttattgtatatcattcttataaataaaaaaaatcaacacaattaaatatatgggttatttgtaatgaaagtgacttaata

SEQ ID NO: 100647 - DNA, 242 bp, Glycine max
  unsure (1)..(242): unsure at all n locations
ctgtttgatatttgagattctatgtatgttagtgtagagctgtcaaataaatcgggccggcctttccaactaaaatataatagagttgtgcttttagtctgatagtcctatttagatgcttaatcatatgaatgagaagatgggtgtgtgaacagaatatgtacacattttgccttaaaaactgggttatatatacaagaaatgggttgcctatatggtccttatgctcaanataatataat

SEQ ID NO: 100648 - DNA, 441 bp, Glycine max
  unsure (1)..(441): unsure at all n locations
tctaaacacaattcatcaaaatgaaatgatacttctttgttcaagagattgctcaaagggttggcaagcttagaaaaatccttaatgaaatgcttgtaaaacccaacatgtcctagaaagcttttgatgcctttgacatttgttggtagaggcaatttttcaatgacttccaccttggctttgtcaacctcaatgccatgaatagagatnttgtggcccaatacaatgccttcagtcaccataaagtggcatttctccaaattgagaacaatatttgtttcaacacaatgcttcagtacaatgtcgagatttgaaagacataaatcaaaagaaaagccaaagacaaagaagtcatccatgaacacttcaatactcttctcaatgagattagagaaaatagcaagcatacaacgctgaatgtagcaggagcattacagagac

SEQ ID NO: 100649 - DNA, 227 bp, Glycine max
  unsure (1)..(227): unsure at all n locations
gctggttgacgtcggccagganaggtggccgatcgaggtctaaaaataaaagaatcaccggatgacgccgatcgagcatttcctaattgacatcatccaaatattgttcagggattggatagagaaaacaatagctgataccagtcgttatgtagtcccgactggacattttcagccgacattgcacagtatttttttacaaacgctggccgataatatatctttac

SEQ ID NO: 100650 - DNA, 270 bp, Glycine max
gtgagctagctacttttagtggcgtgacccttgttgtccgctataaaacatgtaattctgccgcgccaggtgagttattgaatccttcaacactaaccccggggtgtgtagaagctagccttcacatgactgatggttgacgcctaataatcgatttccaccccttcggccggaactgaatactgtgtcaggcatctctgccttttgaggcaagaaactaattattggggtgccgaaactgcaggataacctgttattggacgctaatca

SEQ ID NO: 100651 - DNA, 456 bp, Glycine max
  unsure (1)..(456): unsure at all n locations
tagatggagaagaagatagagagaatgacaagacaacgcgtttgagacgaaacatacctatgtatggtggcgtatgagaagaagcagagacttgtgacgatgctcgagtgcgacaaacacgatgcttatatgcacacagggacggtttcgctagacggagattagaagaagaagatagcgcggaagcttatatggagaagaagacacagagtgccagcttcttaggactcaccatattttntaaaatataacttcaacatcagttnttaaaaaaacccgatgttaacaaaatgatgttaaggttaacatcggttttctggagaaaaccgatgttaacataacaaacgttaacatcggttgtctaaaaacccgatgttaataaacatatgttaacatcggttatttaaaaaccgatgttaatgaacttcgttaacatcgggtttttacaacactgat

SEQ ID NO: 100652 - DNA, 396 bp, Glycine max
tctgtccgcggcttcctgacgttttctgagttcaagcttaattgtgaggactggtacgtgctcgtgcgcgtagcacaatggtggacggctttggacacctcagtgaattgcgcctcatcgtgtgcctttctcacttagcggatggactgaagcggggcactgacagagatgaagcggagagcttaacagagctgcacagctcatcatctagcagaggctttcttgtgcttaaccagtgagcattcgcgcttagaggactgctcgcttatccagcggattgtcttaaagagaatgagataaccaactctttccgcacctatccggatgatcctgaggttgtcagaaaatgattatttaccacacccaatggcagtgctaagcctttatctcctatac

SEQ ID NO: 100653 - DNA, 453 bp, Glycine max
  unsure (1)..(453): unsure at all n locations
tagacgaccttgttgagtcgagaatactntattatttatttttactagtgtgaatatgaagtagaagagaatgaatgtgagcctttttccccttcgaaacacttgtttaaaaaaaatgttgtaaaaatacttttaattaatatttgaattttttattccttattagtatatatgtgaggggtagagggtgtcacaaaatgaaggaacaaacgaacaatagatggaagagaaaaacattggtatgatgaggagctaggcttgtgtgtgtggtaataacttatattcgattaagtttatggaaaggaaagcacacaaagaaagccaatcaagagaaaggatgagaaggaagatggtaatcttataagtaatctatatttttctttatatgttatttttcatatttctctatcttttataacttcttaaatatcttcttatctcgaaatgaatata

SEQ ID NO: 100654 - DNA, 351 bp, Glycine max
tcactattacccacactatacataaaaccttacaatgttaagaatatgacattgtttgaaacgccggtgcaaagggaaaggggccatagctatacttgtgacgacaacgcatcccctatccatctttgtcctaaatagacacatttagttctactgcgggaagaatacgatgatcctgcatttcaacctgatccactctacgatggtgagaccacatgggaccccagctagcgagatcatcatttgtcttataatgctttaagaggctcatcaggtctacgaataatgagattctaagatccaataatggattgggagtgcagatgctaatagatagtgggagtgcacgaa

SEQ ID NO: 100655 - DNA, 413 bp, Glycine max
ctttagcatgctgcatgtgaccattgatgagaaagccttgctcctcttatgcatgcattatctgcctacaataatcaatattcattctgaaatgacaatagaccctactactcttaagtattcactaggcattctaaaattgaaaatacactatactatattcaacctttctgctctagcaaatctgttgttcatctgatagcattcatctgagaaagaacactctatctgctaggtgaatcttaatcatgaataaaaacgagaattatcctattacagctctctttgcctatcacatgaataagtaacactcttttagcacacaagcagtttacatactttggttgagcataagcagaattactttgatgcaactgaacttggtgtggctgtgagtctactaatgccaatac

SEQ ID NO: 100656 - DNA, 444 bp, Glycine max
  unsure (1)..(444): unsure at all n locations
gttaccaagggttttctaagatgatagggtttcaactcttattttgtctcttgtagggttcaaaggagaggtacaattntatggaattgcattgcatagtatttgtactttgttttctaatagtggaaattctaagggatcttataataactggatgtagtttctcttgacgattgaaccaatataaattatgtgtgtgattctctctttctttaacctttagntttgtgaatcaatcttgataatggccataaattctgttttttttttttatgttcttgtattcactgtttgataatctttcttaacaaagtttccgagaaaaccttgattacataaataggtatgttttaaatgaatctaaacaatgattaggtaaaagttttgtaaataatctatttaacccttccttctagattgtngactattccacaaattggtatc

SEQ ID NO: 100657 - DNA, 431 bp, Glycine max
  unsure (1)..(431): unsure at all n locations
agctntagctctctgcccaaactcccttcacattatctgatttcaggcttaaatatgtggccttgttcgtgctcgtgcgcttagcacaattctggaccgcttaacacacattagtgaatttcggcttagcgtgtgcctttctcacttagcggatggactgaagcggtgcacttagtgagatgaagcggtgtgcttagcaaaactgcacaactcatcttcttccagattcttccttgtgcttagccaatgagcgttgcgcttagcggacgctcgctaagccagcggattggcttagcgagaatgagaaaaacaacactttttgaagctttccaaattaacctgaaattgagagaaaatgattattaaacacacaaaatggcagtactaagtatttattacctatacttaacagaaaatacttataacgctac

SEQ ID NO: 100658 - DNA, 469 bp, Glycine max
actcagctaggaggtaactcctctaggtcctcttcaggagtcatttcagaggatgacacctctatcacttggactgactccactagtctatatggagtaggtgtaggtagtatccactccacaagctgctgaagcgtgcgtgcgggtacctctggatgtaccaatgaagtagtagtgagtcgaatcgtgccacagaatcggcacctctcattgccttataaggtctcccaaactccctctatgcactccatcaccacgcgatcatggattaattgcgctgccatcacgatctacaagaaataaaagaaagaggatagactctttcacaggaaatctaactacaggtaacagtacaatgcgtcccataaccactacgtatagtcaaaaggtctctctcaagggatttcatctctggtaatcgatttccaatgtatgtaatagattaccagtgcccaaactcgagttatat

SEQ ID NO: 100659 - DNA, 345 bp, Glycine max
  unsure (1)..(345): unsure at all n locations
agcttccttgtattgcgtcacgtctaaaaccatgctngatggtggtgcgagcctttgatggtactcggcgggaagtgatgggggaaatccacattcccattcagataagcccccacacttgcaatgtggtgtttcaagtaatggacataaatcccgcctatagctgtctcttggggagaccttggattcatgcgctgggagtggtcccttcaacgcttcaccaaaaattgaagttcccagtgcgtggacttttggagatagtatccggtgaagaggatatgttggtgagctgcccctcctccgtcccatacgtagaagcggcggaagaatcattggaaacggctt

SEQ ID NO: 100660 - DNA, 444 bp, Glycine max
gaagagaacaatgagcccaagagtctatactcaaattgcatctatgagccgaagagcatttggagggattacatagtttttggtctaaaaaactaattatggcccattttctaattatactttaattatttgattctattttcatgtcataacatcatatggttgttgacatcttttaggttaatttttatgttcataagctctccaaatgtatataccggttattgagaatatattgctcatggctatttaatgttagtgggaatttaattctaattggaaattaattcctactgcgatgtttagatagaaacctagcctataaatagtacaaacctttgtacgtgcgagcaaatatgagtctgaatgatagattgagtattttctctactactacaacataagctcttaatatcgacatattaagactttctacatactgta

SEQ ID NO: 100661 - DNA, 387 bp, Glycine max
  unsure (1)..(387): unsure at all n locations
agcnttgcttctacaaattggtaaaacccaaactcacacagtcaaagcatactnctccatcaaaatcatggcattggatatgagtngccatggtttaaatatttaatagccatccctagataaaacactttgattgtaaacttgtggtgactcaaaaagagtatcactaattcctatggatagcgagtgttggtaactttctggtaccgtcttcaattcctatggatggaataacaatgcatatgctggtgattttcttcttagagaagaatttattttggcacattaacattaagtatgcagcttgttgctcataccgttattcacaatatccagttttattgcataaaaaagttggaattctcatacagtttgctgctcatagaa

SEQ ID NO: 100662 - DNA, 412 bp, Glycine max
  unsure (1)..(412): unsure at all n locations
tggtgggtggaaactntaacttatattgtggatgccaactgtgcacaatgtgaggaacataagctgctattcaaaggttactacttagtggttggaggtactcctagttttaaagagcataccttgccgccaaatgaagctagatatgaaaggctggatgttctgccacttatgactactatttgtgactntattatgttctcactacatgactgacttactatacatttaaacaatagaaatttcttctagtatagctctttaagttgctctacatagaacttgctttggattgaaagcttcaaaaatcactataaaattaaagatgatatgaagttcaataagtttctaatcccaccttcccctttttgtttgctcatgtctattacgttaatgttttgagactggtgat

SEQ ID NO: 100663 - DNA, 211 bp, Glycine max
catgcgagcttgctaactatttgttgagaaatgctcactgccctgttcgcacatcggaaacgtgttgagccaccctcctcaatgattgagtcaacgcgaacttctcgcttataacccaacatgggagcaatagtgagctttgacactttatggtcgaatttgtgcaatccagacgattattgtgctttattatcgctgttcacccattatt

SEQ ID NO: 100664 - DNA, 466 bp, Glycine max
  unsure (1)..(466): unsure at all n locations
ngcagtacactggcaaatggtaaaatattggggacaacaacatatgattgcctcattcgacaaaacaactccaaagcctctttacttttatcactctgagcataccgtgatatcatgagactccaaggaataagatcatcttttggcatttcttcaaaaaactgctgtgcctcggcaatctctcctgacttagtgtacaattcaagcagtgcaatgccaacataaagatccctatcataacacactttcaaagcacatccatgaacacttttcccaaccttaaatgcttctagaccattacaggacttaagtgcggcagaaatggtaaaattgtttggcctataccccataatcctcatctggcagagaagtagcaacgaatcctcatggcagtaattctcagcatagcaagccaccatcccagtccaagataccatgtccttaaaataaattccatcaaaaactt

SEQ ID NO: 100665 - DNA, 341 bp, Glycine max
  unsure (1)..(341): unsure at all n locations
cgcatgcacttactaccaagctgaactcgcactttttagaatatctcacgttgaaaatcagggtggccaacaacactgataagacacgccatttctctaatggaattcgaaatatattcgataaaagaaacatctttatacaaatctatctactcgtgtctctcctaacaattaccgagtagcgatgaacataggttttccttgcgagacaacaactctatacctttttggagaatctaataccctaattaaaacaatgcattggttctcagtacagatactcgcttgccttgcaccttgattaatgtccactattaaatgagcgacacnctatctcactt

SEQ ID NO: 100666 - DNA, 402 bp, Glycine max
  unsure (1)..(402): unsure at all n locations
tattacgagattatttctnatacgttcattctaaatataaattattttatttataaaagggaggtttaacttgcctgtgctactggctaactcgcctgtgcgagtgcatgtctatagtaaaaataaataagggggggggtgctatatataaaaaagtgactatttgctcgtctattgaaacaaatgacccttgaattttcaatacttcttcgtctttttgtttttcaagaataataaagtttttttatatactattttatatttaattacaaaatttaaactaattttctatttttaaaatttttcttgacattcataacaccaaaaaacgttattgtcaatgtttgatatatacatatattcaagtattatacaagttaataataacgcgacagttctata

SEQ ID NO: 100667 - DNA, 280 bp, Glycine max
  unsure (1)..(280): unsure at all n locations
agcttcctcattgtgcgtcacgtttgaaactatcttgagcgggtgcgagctcttgctcgtactccactggaagagaggtggaaaacatcatcgcattcagaatgcccccaccctgcaatgntgtgcgtaaagacatggacataaatcccgcctatagctgtctcttgtggagaccttggattcacgccccaggaagtggcccattcacgcttgagcataaacagagagcctcacgcggaggacactctgggatagcctccggtgaagatgatctagaatg

SEQ ID NO: 100668 - DNA, 462 bp, Glycine max
  unsure (1)..(462): unsure at all n locations
taattaagacgcttattgtagtatcaatatcatatatagtacttacgtaaagcatgcccaaacaattattgttggccatgatatacaggatatatatctataatcattgatcatgcatgcctaaaacaacatgattttctttttcactatgttctggatgatagcatgtgggaacggaagacaaaggtcttattggcgctggaggaaagtgggaatcgatcaataatagtttctttgaaagaaaaaaaataataactgctagctaagcattcaattaagatttttaagaaattaaattctatatcccctttttgtcatggaaaactaacttacgtgttgcgttatcctaaaaagtaaaaagatctttgttcatgcatgttaagtggcccaatgcgaaaatgacacatgcctttagctgcatgacccanaagccattttacactgttattctcagattcactc

SEQ ID NO: 100669 - DNA, 404 bp, Glycine max
atcttgaagaactacaaagttcactcgaagcatatgatcaaagattaagagaaatgaatgctgagaagcacaatgatcaatccttacaagcccaaacaagctgaaaatttgacaagccaggagaccaatccaaaaataaaaaaggaaagtggcatgatgagaagtggagaaagactgaagattcaaaatgtggtgattctggatcatcttcacagaaagctgtgtccaatccaagaagccaattctcagggaaaaagaaatgggtcgacaaaaaagaatgtgcagtgttacaactgcacgaactttggccattttgcaactgattgtatattcagattacgatctcaagtgaaaggtgaagaaccatgggtggcacaagatgaaaatctacaagatgatcatta

SEQ ID NO: 100670 - DNA, 433 bp, Glycine max
  unsure (1)..(433): unsure at all n locations
ngaagtagtggatgacttcttgataaatcgcgagataatgtgtgcaagtctgaagaagaaaatgattaaggccaaagaaacaatgaaaagattctcagacaatcatcgccgcgacatcagcttcaaggtaggagactgggtccttgtcaaattacgaccccatcgccaaacttctgtgaaaggggaatcctattctaaaaaggctaagggcctctatgggccataccagatattttaattaatttgaaacgtggcatataaaatcaaatttccagacaattctcatatccaccctgtgttccacngctctcttttgaaaccgtgtccctattctttggcaactgcttttaagggggttgaacnaccccctactactgttaatgagtatcctatcatttctctcaggcattcttgactcgaagtgggaacattc

SEQ ID NO: 100671 - DNA, 363 bp, Glycine max
ggattgttccttcctgccgctgctgcttgggagctcacgtgtgatccgtgccttatctgttgtacatcacccattgctcgccgttcatgtggacatcttgtatgggacaccaaatagtgtaatctccatctagcgaatacctaacaggagtaatggcccgatactcgatttctttttagcgaagctcccctacgatataggcgccttgtgcagatctcattacgtataaatacttttaactttcctgcttacatgaccatcattgtcttatactatcgtgcgccatatcggaacgttattcggggccacggtgttttgccttcctctttatgtgagactggtacctttcttttttgtttgttg

SEQ ID NO: 100672 - DNA, 458 bp, Glycine max
  unsure (1)..(458): unsure at all n locations
taagtgattagttaaagattaatgcctagttgatattagcaagctggttattggaccaatactagaattagtgctgcttagtttcttttcttttaattagtgctgcttaaaaatcaaattaattagcgctgcttagttccttttgttttaattagtgctactggacaatttgccattgtgtgctattggataattactaacattatacactatntaacgataacaacttttcctaacatctattttcagttgtaccatcgataatccacctaagctagattattaccaagaagtactgatgtagagttgtttcaccttgattagtagtttcaaattgtagtctttgatatgttgcaagaagaaaatgacaacttggtcgataaggtgataaaatacattagtttgagtaatatgntttccttagacatccaagttttgagattctagcagggtgtttg

SEQ ID NO: 100673 - DNA, 386 bp, Glycine max
agcttggaactagaccccaccacaggtgctggttccattgtatcatgtgtcacagctggccgtggacaatccacataatgtttagatgattccatgggtcttcataacccatcatttgacttcatatattgatgacctgtttggcctccaccaatcttatgacgaacttggtcatggtggtgaaactgcatctgacggaaacctctaaaccatctagcattccagtcatttctatttcgaaaccttctaatctgtgaataaacatttggacatgaatcagatcataaattgacttggctacatcattcatgtgatatgaaaggagggattggaatatatatacacaaacattcttacgccttcattggtttagaaaccatacggaa

SEQ ID NO: 100674 - DNA, 454 bp, Glycine max
  unsure (1)..(454): unsure at all n locations
ctgtatattagctnatcttcgactcacaggcacacttgtcgttatgctacgaatatcataagatgcatagtcctactgtttaaacaaatgatcatccacatgctcctgcagattctaatatatacacccgaccagaagatgtgagttctgattctgcagtcggagaactaataccaccanaaatgggatacttgtaaaatatgcgaaggtgtcatctaccctgattgccaaacattggaactgcataaccaagataatagtcatcatagaatgttgagactatatgaggaaatacagagactaaaaacttcatgttacagtactaacacctcaactacagatggatgttctaaagctgaacacacgatagatattcttacccatcagtcagggacaactcagctgtgttatgtgtttctcatttgttaattatctgtgagactaacagacaata

SEQ ID NO: 100675 - DNA, 334 bp, Glycine max
agcttattttcttatcgtgagacacttatgcttcatttgttgtagctcgcaatacctcatttacaaattgcccacttttaattatgtgataaacaatcaaagaaatctatctaccatttattggtggaatattctaattagaatataattttcattctttgagatcattattttaaaaattaagaaactttaattccctggggaatgaacattcaaaaaaatcaaaataacatcatttcaaaaaatcttcttaaaatgtatgcgtttttagacaattttcccaaaaattggtataaaacatgtttattctaaaatgattttcagcacaatcatc

SEQ ID NO: 100676 - DNA, 447 bp, Glycine max
  unsure (1)..(447): unsure at all n locations
ttacggacactataaaactcagcttgtagtaggtttaagggtgggtgtagaccattcattggtctatatggttgtttcttaaagggttattatggtggacaactactaatngctgttggacaacatgcaaacaaccataactactgtattgcttatgcaattgtggatgctgagaataaaaacaacnggagaagggggntnacactactgatgcnaganttgggagattgtaggcagcatgggtggaattttatgagtgacatgcacaaggtacgtgttttaatttattgtactattatgaagttttatatgttctgtgaaggaccaaactgacagtgagtgaaatctttcaaggactaattgctgctgttcatgaagtattcccaaatgcacctcatagggactatgctatgncattgtggaggaatttcattaagcaatacaaag

SEQ ID NO: 100677 - DNA, 435 bp, Glycine max
gccatattcataccaaataaaaatggtccaaaagccttcacaataatacaatgtttaagtcttcttgaaagtactttcagaaaattttctttatcatttcagagcaaagcagcacaagtagcaagaattgtcgatgcaagataaaaatcattacaattaattttcatagtaccttatagaagtttcttccaccttccaaaaatttcatattaccattatatcattcttaatatcatgagtaaacttaattctacttatattatgtacatcacttcaaatactcggaactagatttaaagtgtttgttcacttattactgaagatgaattcatttatttttgaccaaatacaattaacaataattctaaacatagtgcttcacttcatttctatgaaattgtttatataaaacatagctatacataatatatactt

SEQ ID NO: 100678 - DNA, 400 bp, Glycine max
  unsure (1)..(400): unsure at all n locations
agcttctagaggaagcctcttaatgaagcttcttgagcatgttacataaagctgtctcggtaaaaatgctgtccagccttcgataaccgttggagcttctcaaaatttggtctgcagattcacaagacaattgtctaccatctgaccgttgggatctttgaggagatgtctggagtgtgctcgaagcttccgttcccgagagcatttcttatataagcacttcagcctttgctttcgtgtagcttagaaaaaacgtcaattcttcttctttgtttcttccaaagccatttctaaagttccaagcactttctccatcaccacagccaccattagccaccacanatcatcgttgttctccattgaaaccccacaccgagagaacccttcaccgagcggaatc

SEQ ID NO: 100679 - DNA, 457 bp, Glycine max
  unsure (1)..(457): unsure at all n locations
actaagctcgaggtgtgagccaccatcttttatagtagaatactagttatgtttctactatcacgactatgatgtgcctttgcatcattgggggtgccacttgggcccaccatccttttttcacatgttctatagttgtatcttatccagagccatatcataattgtactgatactgcccaacagaggaaaccattatgtcctttcaagaatgggctcgggaaggtttcaagttagtataccatgtgacagctgccccagtaagactatcttggaagaaatgtatcancagcttctcatcttttgtgtattcccccatcttgcgacaatacatctattatatggttcctgnggcaagtagtctccttgtacttgtcaaagttcgacaccttgaacttgggaggggtgacgacattgggtaccacgaacaactcttctaggttagcatacgcataacc

SEQ ID NO: 100680 - DNA, 205 bp, Glycine max
  unsure (1)..(205): unsure at all n locations
ctctagacatctagtcccttattccatccataacaacccatgangtgtaaaaccattcatggttatgagaggttaaactttctttgtatggagcgtgaccatactctcataatatactctttttcattatctattcaatccagttattgtgctcgttattctttcttgcgtttctccgttcatcatgacacgatcacccatataa

SEQ ID NO: 100681 - DNA, 472 bp, Glycine max
  unsure (1)..(472): unsure at all n locations
caaacttttcattttgtttaattatnnattctttatatatatattataaaaacacgtctataacctcattaacctgctagggaaagatcaacgattaaccaaagtacaccttaacagaaagaaaaagtttctttcatcagtttactattaaatgaaacttatatttacatattgaagatatataatttatgtatataaactgaaatattatcatttaaatcgatttgaacttgaagttaacaagaaaataatttaattataggtattaaaaattagaaatatcataatatatattctaatattttcagttatattaaaatggcatgtgtacaaaaaaatggtatttctttaactacttcagaagtatcacaaagtctgccgcaacaacaaccaaaaataatcatgaatgcaaacaataaatttaaacctgaatagatttgactcatatgtcacagtccgagaaatgctaatg

SEQ ID NO: 100682 - DNA, 399 bp, Glycine max
  unsure (1)..(399): unsure at all n locations
atccttgagtcacctgccgcatgcaagcttgtatactgaatttgtagggaaggggtgtgttatgctatgtttgattgtgcattcttgtatatagtaactcttcaccacaatttacaagtttccattcaactgtaccccattccaccatattcttgtggctatgattgtggattagatgatagtattctgagaaattaccgtactnttgaaataatacaccttaacaaaacaagaaaatgaaagaataaagcattttgtgccaaaagaaaatacagattttgcatgggccacacaatttatttacgtgattttttacaagaatgacatatggagctgctgttcagcatatggcctattctatctatgcttatggntntgcacttcagtcaatacaataat

SEQ ID NO: 100683 - DNA, 421 bp, Glycine max
  unsure (1)..(421): unsure at all n locations
aaccttgacttggtagaacctcttgccggtttgatttgttcccatgcttgctaaagtgagacaaaagctggtgcacatcaaaactccgatatctcatggatggatgcatgaaggaatgcatataacacagatgcaatctaagaatgcgggggtccggggaattcgtccccttcttatacacaacgtctacgggtagcaaagtgccccaacgtactgttttaacaaggcgacacggaccctccgttggtttgttacacaagggatcaagacagaacccatatgcgatgcctatgctaaagacacaatgcnggaatgtacacagtaagacaatattcactgaacataagcaaaagggtatatgatacttatgcatggcagtgtgaaaaatggcacgcaccgtgtttgctcgtgcccctattta

SEQ ID NO: 100684 - DNA, 348 bp, Glycine max
  unsure (1)..(348): unsure at all n locations
gagatttatgatcattaagagttacctcatcctcttgatttgatttagattcttcagagactatctgccatcagacataggttggcttcttcttcattagatgaggggtcatctagatctttacaagggctcatgagacctttcttttcccttggcttatagtatttcttctttgcttgagacattgcttgttctgggcattcaaatntgaagtgtccaagattctcgcattcatagcatactatagagcttttgctatatcttcttttattgagcggctttttangagtcttcatctggatccctttgtttcccatctgngatcttctggagagaagcactcatttc

SEQ ID NO: 100685 - DNA, 435 bp, Glycine max
  unsure (1)..(435): unsure at all n locations
gaccttcttctagtaattctgacttaccgcaacctcctatccctcttccattcccacctagagaaattctaaacaaaaagatggaagaagcggaaaaggagatcttggagaccttcaggaaagtataggtgagcatacctctgctagatgccatcaagcagattccatgatatgccaagtttctaaaggagctgtgcacccacaaaaggaagctcaagggaaatgaaaggattagtatgggcagaaatgtgtcaccattgataggtaaatntgttcctcacattcctgagaaatgtaaggacccaggtactttttgtataccttgcattattgggaacagtaaatttgagaatgccatgctagatntaggagcatcagttagtgtcatgcctctatccatattcaattctttatctcttggatctntgaatctac

SEQ ID NO: 100686 - DNA, 453 bp, Glycine max
  unsure (1)..(453): unsure at all n locations
gcttacccagcatcaatccaccctatcctaaaactctcagtccctaacccaagccaatgcgaacctcaacctcaagctcgattcggtcctcgatcgactcgcagccctcaccgaatctccaccctcaccgaaaccaccctcttcaccaccgcccaacaccatttccagaccacacatgaaacttgaagtcccacacttcgatggccaagatcctctcgggaggatcttcaaaatcacgcaattattcgattatcaagggattcctgatgcagagcgtatcactgtggcgtccttctatatggagggacttgcactctgttggttccaatggatgtccaggaatggcttcctgacatcatggccgaccatgcttcaagccttgggagtcgcgcttgcccccgtcgactacgacgacccacatgggtgcgctttcaaactncaacagcgaggcac

SEQ ID NO: 100687 - DNA, 480 bp, Glycine max
  unsure (1)..(480): unsure at all n locations
tctatggaggctggatctttgaggttcaatgaggtccttcaatggtgattttccaccatggaggtgcaatggaagacaaaggagaagaggtgagaggaggcgccaaccactatggaataagccttggaagaaggagcttcaccaccaagaatgtgccttggataagaagcttggagaggatgcttcaatggaggaaaagaaatacaaagagaaagagaaaggcgggagcacacaattgaaggggtaaaagagggagagaagttgaacattgagttgtgtctcacaagactttcattcatcanagttacaacaagtgttacacatgctactatntataacctaggtagcttccttgagaaacatccttgagaagtttccttgagaattnttcttgagagacttccttgagaagcttccttgagaagctagagcttagctacacacacccctctaataactaagctcacctncttgagaagc

SEQ ID NO: 100688 - DNA, 464 bp, Glycine max
  unsure (1)..(464): unsure at all n locations
agctttcatttttatctcaagaaaagcaacatattttatcacaacaggtacgttttctttgtagttatttcaaagcttaatttttttggttaattgtttgggtgttccttatcgttcttctacattgatggngctttctatncattccttttttttgcttctacgtttcctgtgtattatatttggttggaccttntgtgtttcaaatgttaaattgcaccttttgtatccattgttgttgggtagattgcttatttgtgttctacctcagccctaatatttgggtgttcctgatcgttctcctactttgttgagcatacaagcccgaagaaactaaagctttatttttttctacacaacaaaaggatagattctatgacaacaagtgcgatnntgagggtgtcctgatcgttctttaccttgatgggctttctatcatccttttttttttgctctacgtctct

SEQ ID NO: 100689 - DNA, 420 bp, Glycine max
tctacttatgtggcagggcgggcttccttcactttcttgtctcttacgcgagctctgaccactgttcttccttcccgcgatgcttcttttcatatccgcctgagtgggcttatagcctaaaccatacttcccacgatttccttgggtttttatcaggctagttatgccgccattttctttgcctaaacccatcccgggttcataaccgttccccaacataactcgggccatcattaccgccgcatcggacagacaaggttgcccaaagagggagtccacggaggaaatgctgaccacctcaaaagactggaaagcggtttctaacgattcttctgcggcttccacataaggcatggaggatgggcagcttaccaagatatcttcctcgcctgacacgatgaccaagtgcccctccactac

SEQ ID NO: 100690 - DNA, 475 bp, Glycine max
  unsure (1)..(475): unsure at all n locations
agctntagctaggccgagtctctgcctcatatactctttatgtgaatagccagagtccctatttgttgactgggccaagaatggttgaaattcacttttacacccctctgtattttttattgggcccggaatggggcttggcccgataagttttttagtctgcaacgaaggatttgcttcttgaagacctttatccattgcacaagccgagaataccccaacagtgttatctgccttttctggatcctgaacaggattcaaaaaattaccaatttggtctgcgtcagactgtcgaggcgcaggcctatcagagtccgaggttatcacctctaaggaagcaataccctgagccttctcttcacaccgatacccagggtcaacctttgccgaacaaacccctgactggcgttccctgcctctgctgacttctcngtgtaattatggacctgtgggttatacccaccacatgtgggtg

SEQ ID NO: 100691 - DNA, 440 bp, Glycine max
  unsure (1)..(440): unsure at all n locations
gaaactcaagctgtcagcagatttagtaatgacccactaacctagaattaagatttcttaatgccattaacctacggaattanaaaaaaaaacttaatggctgagtgtcactgaaattgtggcaaccaaaagtcacccccaacaactaacaagtcagccaccatttggtctcctaaaaggctgatgcctatgttgccaattgggcccttattacaattgaactaaacctaactaaagcctttttagatgattaacccagaacatatttttggtcacccaactttacaaggattgggccattatttacacaaactaaacactctaaaattgagacaaagtggagtcatttagtcctccttcattagggccatgatacaactcacaaccttggactattctccttgaatcttgggctctgattcgaatagtatggacaacac

SEQ ID NO: 100692 - DNA, 259 bp, Glycine max
tgtgtgtagctaaactctagcttctcaaggaagtcttctcacagaagcttctcaaggaagatttctcaagaaagcttctcaaggaagttttctcaagaaagcttctcaaggaagctacctagtctataagcctcgctaagtgcaccttcggggtcaagtcagggaaattactgggtttcatcgtaagccagaaagggatagaggtggatccttgaaaggtgaaagccatccttgatatgccagaaccgcgtaccgagag

SEQ ID NO: 100693 - DNA, 462 bp, Glycine max
cgcttctacaatctccccctttttgataatgacatacctgaaatcaagaaacacatacaagttctatcttctaatcgatcactcacttaattctccccctttgtttttgagtttaagcttcacttgaaattaagttatttaattatatgagttcttgatttaatctcaactttctctccccctttggcatcaacaaaaagccaaacataatcacccaagcattttaatccatacaacaaacaaggaggacaataattcatacataaactaagcaaggaagataataatttatccataaactataaaaaaatgtcagataaagtagagagtcatccaagataactaaattagaaagtaatatactaataagtgtatcaaaaacatagtcataagacatcaaaacataaaacaaatcatttgtctaagtcactagcatctagaagtcctaattctcttctaatg

SEQ ID NO: 100694 - DNA, 284 bp, Glycine max
caatggccgatgggaatatgcatatgtctctcgaccctggctgattgcgaatgtatatctaccggaagtacaacattctgcccataagtcattcgaaatggcgtagtattagttgattccttaggagaaatgttacctgcccatcaaacttgatctatcgttttattcgcatatctcggctcctgtgcaatgtgtcttttaatcaagctaattacaatcttattgactgcttccacctgaccatctgcttgcgcgtaatatggcgatgaggtgaataatagaaa

SEQ ID NO: 100695 - DNA, 411 bp, Glycine max
taggaatagatgataatggcgcatgctcaagttcatatttggtgttgcgaagccaccactctgtcatattcaatctctgtgtatactgcatcagataattgagtactatcttaccatttattgtgtttcccatattcaaccaagaaagctctctcgggtccatctcaggcataccttgtgatatctgaattgtcctttgagtagatattcttaatcctgcaattgcctacaatacaaaatacatactaatattcaacgaatctatggtttttattggagttaatgatatgtatggtgtcagcgtaaaacaaaaactacattagctcttaaatgtggattaattttcattcatattcaaatctgttctaaatatgacgtgcactccttatatatttatttggcatattttag

SEQ ID NO: 100696 - DNA, 334 bp, Glycine max
atgacttacatggagaaatctgtcacactcactaatgaagcataaaaattgccgttgaaaatggagagaagagtgaaataagatgagtaacttaaaatacttgataaatgtgtacagtactttgaaacttaagtctgcttttccttcacgtgggttgagtgagttgatgccatgataactctcattcgactttccatgatagcatcgtgcgcgaaacgcacacggagaatctatgataattgaatttccatcattactccccggcaacacagtcaaaaatgaaaaagagtaatttacaatagaataataaggttgaataatatgaagtccgatt

SEQ ID NO: 100697 - DNA, 510 bp, Glycine max
  unsure (1)..(510): unsure at all n locations
agctntagtcaattcctacaaatagctntagtcaattcatttatctaataaccactgcacctatgcatntgatggtgagaagtcacgtacgcggaagaagaaaaataaagcttgtgaaataaaagtgtcaataagtgtacgtgtatacagtgcggcatcaaaaattttagacagaacaaaaagaaatcaataagagtgaaagaccaatatatcaagtataaaaaaaatcaccgccacacattttgtatgctaattataaagaataccaatttctggggttcacactcaacacaagaacacatcaatttcacaacaaattcgcatcgggacaccaattggtctgtcaaacatagtcaatcggcgataaaaacataaaacaaaattgaatttataaaacaacccacaataacccanaaattgatcttctagggatctctacacatggtcattctaattcccaagcgtgagtaactcatcccttaccacgagatagtcactcaagcgttctcc

SEQ ID NO: 100698 - DNA, 411 bp, Glycine max
  unsure (1)..(411): unsure at all n locations
tacaatagacctcctcaacctcagcagttatatttatctcatcagagcaagtatgacctttctagcaacagatactaccctggatggaggaatcaccctaacctcagatggtccagccctcagcaacaacaacagcagcctgctccttccttccaaaatgctactggcccaagcagaccatacattcctccaccaatccaacaacagccacaaccncagaaacaaccaacgagtgaggcccctccacaaccttccctcgaagaacttgtgaggcaaatgactatgcagaacatgcagtttcagcaagagaccacagcctccattcagagcttaaccaatcagatgggacaattagctacccaattgaatcaacaacagtcccagaattctgacgagctaccttctcaagct

SEQ ID NO: 100699 - DNA, 416 bp, Glycine max
  unsure (1)..(416): unsure at all n locations
acctgcgggcatgcaagcttggaagtacgtgattntgtgaagtagaaatgtgatatattacttgaaatgtaagttaattagaaaaccattaatcttaccttagaggtgaaaattgtaaaccataccaaaagtcactcagactatatgggtttcattatactaaatggcagagaaatagagggagaagtaaaccataggattcaagtgtgttggactaaatggagtgtttcacgttatttgtaaccaaaaggtactcaagcttattggaaaattatactgcataagatctatgatgtagggaactaaatattgggtagtaaaagctaacaagagaataaactcaatgtagtagaaatgagaatgttgcgtcggatgaacacgcatactatacataatatagatggtagaagctcacc

SEQ ID NO: 100700 - DNA, 383 bp, Glycine max
  unsure (1)..(383): unsure at all n locations
tctgcggaaccttattatgacctatgttgggtatccacaagagtgtgagacacaagggcctggtctaaaaggctgtctgtgacagtatgctttgccattaacatgatacccagcatatactcgttctgcttcttcatatacaagctgacccatttcgggaaagttggccgntggaagatgacaacgccacctctgcccctataccgttcataatttgaactttggccttctgaaatggtttcacagcatcaatggagaaagaccgggccctgcagctatgagccaaggtctgtacctagtggtctctgcgcggattacgcggaatgatatcgcaagggaaatcggtgtcataatgtgctcccctgacggcgaaatctccacct

SEQ ID NO: 100701 - DNA, 228 bp, Glycine max
gctcatcctctatattggacatagagtctacttagactggctgcgcgaaaaccttagatgtctgcttccttcttagacggaagcgtcaaggaacttatacaatgattcacacgacacttcatatgctcgagtaaagagtaggatccctcagtcatgagacttgaatgatgctcagctttgctatgagaagtgggctcctcatttgcattgataccatactgtctatct

SEQ ID NO: 100702 - DNA, 291 bp, Glycine max
ctctcttgggtcatacgcacaccttaatatcttatatccaacgtttctaggttgtgcaacgcgcctatatgatttggaaggttttctatctttgtattcttcaagcgtaagtacgtcacaagggataaattcccaaaattgtctgtgagcggaacataattatacagagaatcgccttcaaaatgaagtacccttaataacctgtagattgaggcattctctcgaccgaagattctgataattcttcatcactaaacacatgaagtgatcgaatgtctgagtttacaacac

SEQ ID NO: 100703 - DNA, 478 bp, Glycine max
  unsure (1)..(478): unsure at all n locations
ctaagctagaagacnacacaattcatctgatatggaacacatgagatacttantttattctaatngataaagaacacaaggcaaaaagaaagtgtagctacacttcacatataatgcaatttaaaattaaaacatacttattttctttcacctaccgacaaattntcttacaatttaaattcacccatagtaagtattcagtaaaatgcttataactcaaatcagaaaatctacctaaagttaaattgccatacccttcttccttaccttagaatgaaaatcttcattccaacaaattttctttccattgtcaacagagttgtacaagagggagtctgacttgtccccttgaagaatgcctggtaagacactntgcagtacaatataaaatttgaaatcaaaacaacaatttaaacttagaataagggttcataaggtttcaaattacanaacaacacattaagcatatttttaagta

SEQ ID NO: 100704 - DNA, 281 bp, Glycine max
  unsure (1)..(281): unsure at all n locations
agttgctgattgaagatgatgaagatgcttcaccaatcagatntgttaaagctcgacttggtcatctnttcaaacgtaaatttgaaacaaaagactgagttcaccaatctggattgttatgccatgaagatgttttatagactgaaggaatgctgctttagtttaaaacctgatgagaagccacttgcagatgccggtcaaccatgaagttgggacatactatcagaccctgaccatacttgtttcacccaagaaacatcattcaacatggtatgtacatg

SEQ ID NO: 100705 - DNA, 405 bp, Glycine max
  unsure (1)..(405): unsure at all n locations
agcttgatggcaggctaagcctctcatctatgcttttctgatattatagaaaattttgtgttgcagaaaccgcgaagcgcagcctgctgcgctaagccccagatgctcactggactntacaacttcaagttgggcttagcggaaggttaggctaagcgcttggattttaaactcaaacgtcatgtgggcacgctaagcgtagttatgcgctaagggtgctatacgtatttcagttttgaaaaaccaaaggctaaggtactntgggtgataccccaagttacctctacctctgttactgtgttttcttgcttccaaatcatacatttcatctgcgtgcctcatttccttgcatatacacaatccaagtaagttctcttgcattgttcctttgcattcntatttctc

SEQ ID NO: 100706 - DNA, 433 bp, Glycine max
  unsure (1)..(433): unsure at all n locations
caaaaactcagcttagctntaatttaagcgtgtcgatatattacgggactctttttacattggaataaaaatcaattgtcgtttgaatatgctcagagcttctattttcaatttcgagcgtctcgatatattacgggacataatcggacatcggaataaaaagttattgtaatttgaatttgctcagagcttctgttttcaatttcgagcgtctcgatatattatgggactcaaccagacatccaagggaaaagttattatcatttgaattggcttagggcttgcgttttcaatttcgagcgtgtcgatatattatgggacttaaccggacatccaagtaaaaatttattatcgtttgaatttgctctgagcttctttnttcaatntcgagcgtctcgaaatattaaaggactcaatcaaacatccgagttaa

SEQ ID NO: 100707 - DNA, 354 bp, Glycine max
tgcaacttccagggtagtgtctaaactcgaattggaaactaagcctcatcctagaccatacaaactttagtggcttagtgaagataaaaaggttaaaatgactcagcaggttgaggtgtgtctcaccattagaaggtataatgatagggtgctgtgtgatgtggttccaatggaggtgactcatatactgtctggaagaccatggcagtgtgacacacaagtagtacatgatggtttcaccaacaagatttctttccagtaccatgaccagaaaattattcttaaacctgtatcccctaaagaagtgtgtgatgaccaactccgaatgagagataagagagaacacgagaaaga

SEQ ID NO: 100708 - DNA, 289 bp, Glycine max
  unsure (1)..(289): unsure at all n locations
ccgaccgagacaagngntcttccctggcaactatagtgctattgaaccaaatattctcctccgctatgatatgttggggtaaactctagatttttaatatgtcttgaccctgtttcttattatttgaaaanacanngngnncaactggaatatatgtcccggtgtgctatagccagtgatcaaatacattcattttcttttttgatataggtttgtgcaagttaaattgttttaaaagaaaatgtggactttcatatccttttatagatcttttcttatacttgagaac

SEQ ID NO: 100709 - DNA, 455 bp, Glycine max
  unsure (1)..(455): unsure at all n locations
agcttcaagaatcaagatcaagattcaagtatcaattataagacttaatcaacataagtatgaaaaggagttttcataaactgagtagcacatnggattttctcaaaacatgtttaccaaagagtttttactctctggtaatcgattaccagtagcaaaattgttttgaaaaagttgtcaaattgaatatacaacgttccaattaatttcaaaaagttgtaatcgattgcaatgtgttggtaatcgattaccagtgcctttgaacgttgaaattcaaattcaaatgtgaagagtcacatcctttcacataaaagacttgtgtaatcgattacactatattggtaatcgattaccagtgattgtttctgaataaaatcaaaagatgtaactcttcanataggttgtgactttctcaaattggntattaagtttttctaaaagtcataactcttcta

SEQ ID NO: 100710 - DNA, 502 bp, Glycine max
  unsure (1)..(502): unsure at all n locations
tcttggatgcaatttgagtcanaatcaagacccanaatatcattgttttatagacaaaacacatgtatgatttaggtcttaatttagatccagatattgatccaaaaaaagttaaggtaatagactatttgacatgactttctagctattctttcacacaaaatttgtatagactgtatttcatgcatgccatttgtcttctcttctctacaaaattctgtcaaacggaatctcaacccaaagatcaaaccagaagatattgaaataatagacatgctaaagaggtgataattgtcactaactntggttttcctcatgtcgtctcgctaagaatgagcatgaagaccaagttttgaggttttgtatatggaaaaagaggaatattcttgaagaaaaaaggaggggaggtcagagagatgtaaaaatgtggtccacctttgatcttatttcttttatttcacattagacaaataatatatttattattcacattctaagaaca

SEQ ID NO: 100711 - DNA, 387 bp, Glycine max
  unsure (1)..(387): unsure at all n locations
agaacaagtacgagtcagttataacaaatgaacatacaaaaagagcatgctntcacattctcctaaagaaagaaacaaaaagtgagtgacttacaaggaacaaatccttccagaactgaagatcagtcttaggaggctcaactatctngcggggccaacagaacaacattatgagagagccgcatgctagggagagagttgaggtaagccaacggtatgggaatgcattcacaaccttcttgtgttgaatatggagcaccacattcagaacccaccatgttgcaaagtatatcccaatcttcaccctcttagcagtcttngatggagccccttcaacctctgatctatcagcctcataagcatcacatgtcacgacatcaccacgct

SEQ ID NO: 100712 - DNA, 293 bp, Glycine max
aaccctatcctcgtgaaatactacttctatttagaataaaatgctcttaaaaatgctcttcttattcggttaatcattgtaaaaaaataatatataaaaaaaatatttcggtatgtgaaaaacacacaatgacatctttattacaaatcgctgtattatgggtgtcattgcgatgcaatatgttatgattctacacactataaatcttattttcatttggatgacaaatatcacattaaactttgtaaagcttatcttatcatattctactatccaatcaaataatacataca

SEQ ID NO: 100713 - DNA, 317 bp, Glycine max
tggagcacgcgggtttagattactcgtgttctaaatgcctactcacgctccaaatagggcaagtggtttccatttgatcaatagaaaacatcattcatctctgatgaaaccaacttttaggacgagttaatggcgtgcgacctttaaaatacatgtgtcacataccggatgctcatggattaagttttaatgaatagattggaaaaacatagaactgctcgtcatgaatggatggaagtcactcctgatcacaacctgtgagtggtgaaaactttcaaactccaaggtcaacggatgttaaccctgaaatgcccttt

SEQ ID NO: 100714 - DNA, 174 bp, Glycine max
actcgaacggacaacaatgtgctcaaattagggatcatatgaaggtaacatgttctccataattctaacatcttctaacttttcaccatatgattttagttgaatagaaaagaaagagttcttgaaaaataatctgagatggactacaactgtttcatatgtaacgattcgaac

SEQ ID NO: 100715 - DNA, 518 bp, Glycine max
  unsure (1)..(518): unsure at all n locations
ggttcgcacatcgttcacgtgtatgacatccactccacaaggtttgaagtatatgagaccttcaatcctattacgcaacgtggcggacaaaagtgggcagttaacttgaacggtcattattgttaatgcggaaggtattttgcgcttcactatccatgttcacatattattgcagcttgtggttacgtgagcctgaactactaccaatatatagatgttgtttatacaaatgggcacatcttataagcttactctgcacaatggtggcctcttgggaatgaagcggctattcctccttctaatgatgcatggacacttatccctgacccaaccacaattcgtgcaaaaggtcggcaaaaatcaacaaggataaggaatgagatggattgngtcgaaccgtctgagcaccgaataaaatgcagtagatgtggagccgaatggcataacaggcgtcgttgtccaatgcaatctgagcgtgtgagttgtttaaatcaatgatttatgtatgttagccgagt

SEQ ID NO: 100716 - DNA, 470 bp, Glycine max
  unsure (1)..(470): unsure at all n locations
agcttgactaaaagatgtcaattgtggaaaacacttttgacaaaaaattaatgaaaatagaagccaatcttttaatttgccagttaattatatctacacgtgtgaaatatttgcagcttacatagcgaaaggcctaaagctcaccataatcatatttattgaatattactctcattaattattgtcattaaagcaagttacaatagcttaattaaactntgcccatggttttacattntttttaactctctagcatcaaacaagaaacaattccataaacaatcagcgcccatgtgtatagtggaaactgaattccatatagttttgcactgaagcgtacaagatgtggttttctatcaaaatgtgagaaactttttaaaccgcatttataatttattttaatacaagataaaacattttatacagttgagaattatgcagttaagaagataacaattaaacacacaaac

SEQ ID NO: 100717 - DNA, 445 bp, Glycine max
  unsure (1)..(445): unsure at all n locations
ccttgatactaagctctggtatcgatacactgattnggtaatcgattaccagcgattgtttctgaataaatcaaaagatgtaacttttcaaatggtttttgactttttcaaattggttttaagtttttctaaaagttataactcttcaaaatggtcctcttgaccaaacatgaagagtctataaaagcaaggctcntgtttgcattttcaatcaatcttcctatcaatccaatcaattcattacaagccttgaatctctttgaacttcttcttcttacttgtgccaaaagctttccaaagttttctgggtttctgaaccttgaaaacttgtgctattcattctttntatctcttctccctccgccaaaaagaattcgccaaggactaaccgcctgaattctttttgtgtctctcttcntccctttccaaaagaacacaagactaa

SEQ ID NO: 100718 - DNA, 520 bp, Glycine max
  unsure (1)..(520): unsure at all n locations
actaagctcttatggaggctggatctttgaggttcaatgagggccttcaattgtgattttccaccatggaggggcaatggaagacaaaggagaagaggtgagaggaggcgccaaccactatggaataagccttggaagaaggagctttaccaccaagaatgtgccttggataagaagctcggagaggatgcttcaatggaggaaaagaaatacactgagaaagagaaaggcgggagcacaaaattgaaggggtaaaagagggagagaagttgaacattgagttgtgtctcacaagactttcattcatcacagttacaacaagtgttacacatgctactatgtataacctacgtagcttcctcgagaaacatccttgagaagtttccttgagaattnttcttgagaaacttcctcgagaagcttccttgagaagctagagcttatctacacacacccctctaataactaagctcacctccttgagaagcttccttaagaatgcttctagagaagctagagc

SEQ ID NO: 100719 - DNA, 385 bp, Glycine max
  unsure (1)..(385): unsure at all n locations
tgagtcacctgcgggctgcaagcttgatgataaagtgagaagtacgcgcttgtgtgttacttctcaagatccaangngtacaagctctatcatccacatagtagatagatcgtcataagtctcgacgcgaagttcgaccataaagattggtgggattggagtgttcacaaatataagtatgattctcttccttattttgcagaagatgatgaaattgaacaccatcatgaggacatatacccactgctcccgacccaggctgatgaacagttcaggagaggacccggactcagagcattgaaagattatgggaaccaccacctaacgactttacctcttttgtctttggtgatctgagcctctagctatcataagcacggaaaca

SEQ ID NO: 100720 - DNA, 467 bp, Glycine max
  unsure (1)..(467): unsure at all n locations
cttggatctttacatgaattacattgtggctgaaacagtgaatctatagttgtagacagaattttgaaacgttgntctggtgacttttttcattntaatttaattcattntactaagcctggtattattaaaatttaaaactaaaactcttacaagttaattataaactttctctagtttactttgaagtggtaatgctctatcatacaacccctttactttcaattttgtccttttgtgtcatcattntgcttagcgaaattcttgcttagttgatattagtcactggattaagattgcatgccttcaaagatcatatttattactcccgtggctagaagaagcaaacttgtgtgacatggaatgtttgggttatgaattngattaccttntattatgttgaagatatacttttgtaactggcataatatttaaattttcagttctataataggaattagtaaata

SEQ ID NO: 100721 - DNA, 332 bp, Glycine max
tatgattccatctccacccatgcgtcgacggcattgcctaaatgggaagatcacagagtttcttgacatagccgaggcatatgaacatgaaagcttgtatttcaagattgatgctgtctgcgactaaaagaactttctctccgacccttgtataaattgaaatccatcattatcgacacaagagcactttgttcttcgaaaacacaccgagtgctggcaatacatagactctagacagtccacctggcattgcacgcttgacaaaacttgaagttctccacatgtctcatgtgtcaaagaatatcgatcgtacattctgctgtgagcattta

SEQ ID NO: 100722 - DNA, 196 bp, Glycine max
catcgcaccttatctacacaatagaacgatgctactccaaggctgaaaagcaccacagaaagaccttattgaaactcaaagatacagactccatacaaacttctgaagccagcttccatcaacacatttgcatgtacgaggactagtgaatagggaagatgacattgtaagacctcgcatacgtgctctctatctc

SEQ ID NO: 100723 - DNA, 234 bp, Glycine max
agggtagaatgcaagtgtaccgccaaatgtctatggacaacctaacacttcagctggtctggctgatagattcgtgtctaccactgatactgcctccaactgcaattctagaacgctttacgatgtggcaagctacaattattggttaaacctgaaaagagactatttagatctatgccttccaagaatcgccgacaacgcgattttttggctttgtccttcaaaacaagatac

SEQ ID NO: 100724 - DNA, 461 bp, Glycine max
  unsure (1)..(461): unsure at all n locations
agcttcctatcttgattcttaaccttgttttctcattttgtatctggggatagatgctgtgcgttttcttttccccatttaagttgtttagagtattttaacctttagtgggttttctccataacttgtgtggacctcggatacattaggtttctgtactaacccttcttcccatattctgctcatagtttgtttcgatntaagtacttaatggcttctgatatggatacagactacttcatggcttgtggctgctctggtgatagtgattaacggctatcttttgacggaattcttttcctctgaagtgaatggaccaatgattggcgctgtagtgggtgcaataactgctgcatatagtgcattcataatataccttatttggcgagccatcacatatttaccttggcagagtgtacacaaccaaagaaattgccactcagcggttgagtgtcaatctt

SEQ ID NO: 100725 - DNA, 460 bp, Glycine max
ctagagctatcaaatatgcctgtataggatattcatcttgtgtatcaggagcacaagctttggaggatggaaccgggtgaaccaaagtgtatcctctacacgagatgttatctctgttgaaaccagaatatctctgaagcacgctagcaattaatgcaacaacttatacaattatgaagttgacgtggagctaccaacttcaagtggtcaagtcgaggaaaccaataatgatcaacatctttatactgtagtttatgattacaacttggctaaagacaaagttagaataaacatagtgcctcctatgagatatgaacaagctcatctattctaccttgctttgacgattgctgaagagataaagctactgacctataactttaagaaccttgacaacaagaagtaaaatggatctaccatgaaaacaatattctcttaaaacaaaccttatttgttattc

SEQ ID NO: 100726 - DNA, 279 bp, Glycine max
  unsure (1)..(279): unsure at all n locations
cttactcgcacatattntgattgtagaatgttaagtctttttaatagaattaacttgtctgggttataggtgtggatcttgcagggagaagagagaaagcggtgtaaaacaaaagaggcagagggaagtgaagaagactttggagtttgctgagaaatggaaataaaagtggcgctgggtggtcatggtcatactttagtgtcacgttagatagtctacatggcactataattaccaacaatgcacctcactaatggtgtactnntaaaattaacagaa

SEQ ID NO: 100727 - DNA, 456 bp, Glycine max
  unsure (1)..(456): unsure at all n locations
agtatgcttatgtctaagaattctctttttattatacgaagcacacaaatcaagaacaagggttacaacacatttttctgtattataaaagaatttatttaagacgggaataacaaaaacagatagatcaggaatccaccaaagagcatccaaaataaccataattatcaatctcagatgacacacatagtgactgaccctaaaagtgatatatcggtataaagcatagcaggatggccactatttagaatttttatatacagatacagattaaataatgtatactatatacatattaatgctcaggcatcaaataaataatcaaaattcatggcatattcattattaacaacaaaaggccatatgttttaagtnaaacatacaaataaataacaataaaaatcaaggaaacaaacaaatttctaaagattcanatacaagacattanaaattcaa

SEQ ID NO: 100728 - DNA, 450 bp, Glycine max
  unsure (1)..(450): unsure at all n locations
agcttgtctcagcgtttatgcgagacggagaccattatgctagctatcatcgccaagtaccaagaagagatatgtctagccacggcccacgagcatataatcgcggatgagtatgcccaagtatacgcggaaaaagaggctagaggaagggtgatcgactctttacaccaagaggcaaccatgtggatggatcggttngcccttaccttgaacgggagtcaagaacttccccgattgtagccaaggccatgcgatggcagacactactccgccacaagagatcatggctctctgctttgcagcattgaagactaatggccacatattgaaatagtaggaactggttgggcttcaaccttgacagaatgactcttttgaaaaaatgattggccctgttctactcaaagcttggcaaacaatcactctactccattctacatgatttcttct

SEQ ID NO: 100729 - DNA, 350 bp, Glycine max
cgctttccaaaggaggaaagatgcgcggagtctccactaacgtttacttgtggaaaacgtcggaaaaaccgaaggaaaccggtcaaaatgaaaattctaagcttgggagttgtatttacgctcgaggaaggtattagcacctctcacgtgtgtcttataggacaacaacctattttttagaattgcggaaatagtgctaccttaacttttatttcttcttatttattgaggacgacaaaagcggggcttttgctcctacgtaccctcctcttgagaggaaatcaaacctattgagttctttcttaagagtgaatcaagcgattctttttactcgaattgtgatcaatttt

SEQ ID NO: 100730 - DNA, 405 bp, Glycine max
  unsure (1)..(405): unsure at all n locations
ngctcttagcannattcaaacgacaataactntttatttctgatgtctgattgagtcccgtaatatatcgagacgctcgatattgaataccgaagctctgagctaattcaaacgacatataactcttactcgaatgtccgattgagtcccgcaatatatcgaaacgctcgaaattgaatgttgaagctctgagcaaattccaacgacaataacttttactcggatgtctgattgagtctcgtaatatatcgagacgctctaaatggaataccgaagctctcagaaatatcaaacgaacacttgttttactcggatgtccgaatgagtcacctaatatatcggaacgcttgaaattgaatgtcgatgctctgagcaattctaacgacataaattttacttggatgt

SEQ ID NO: 100731 - DNA, 399 bp, Glycine max
tcaacattcaatatcgagcgtttcgatatattactggactgatttatacatccgagtaaaaagttattgtcgttttaatttgctcagagcttcggtattgcatttcgagcgtctcgatatattacgggactcaatcagacatccgagtaaaaagttattagtcgttgaatttgctcagagctttgatattcaatttcgagcgtctcgatatattacgggactcactcagacatccgagtaaaaaggtatttgtcgtttgaatttgctcagagcttctgtattcaatttcaagcgcttcgatttatttcgggactcattcgaacatccgactaaaaagttattgtcggttgaatttctcaaagctttagaattcaacttccagcgtctcgatttattacg

SEQ ID NO: 100732 - DNA, 410 bp, Glycine max
  unsure (1)..(410): unsure at all n locations
gcttagaaggtcaatgtcaagatgttgtanaacttcatgttgaatttgactctctaagatccatattgaccaaatttgttagagtaacaaaaggtcttgacacattgataatgtatagtagatgtcctaaagacaaatctagaaataggtaagagggagaaatatatagccatgataaaaaaaaacattgattgcaacttatgtgacaagggtggacacatgacgtccaaatgcatggacttacctagaaagggagtgttcaatgcattctccactaatataaaaagacctataaagatttgggcacctaagaacaatataattcatgttacatatgtccttgatagtagtagaaatacactcatcatggttcattggtatcttgatagtagatgttcacgacacatgat

SEQ ID NO: 100733 - DNA, 471 bp, Glycine max
  unsure (1)..(471): unsure at all n locations
gcattttccttggtgtgttcatggatgntgcaatgagagcagaacggtttatccttgcgagtaggttttcccttggcattggattgggttacaacacaagccatttcagcaggaggagcagaattgggttgaacaccaacaagcctatgagtttcatcttgaagaaataatgagaaggtatcatcaatattcggagtcggtttcatcaacaatatttgacctcaagcatgggcaaaactctctttgacccccatcagaaatgacatgacaaattcccctttgatggaagcaagaagtggagcaaccctgccacaattacaactatgattggccttgagttcacccagcttagcccaaagccctttgaatcgcgtgaagtagatgttgtatgagttcgttccttgaacacaatcgagtaattctttccacaattggaagattctgggtccgtcttcgatgtgaaacattctc

SEQ ID NO: 100734 - DNA, 444 bp, Glycine max
tactaagcctttgaaagacacatctgttaaaccattatggagaggcacatatggtctatatatatgtgcgtctgacttcgaaaagtaagagagacatattctaagagaacttaattgccaaatgctctctcaataactcttgggcaaacacttgcaaatctattgagaattcattcaggaactttaaattatattaccatctctaaaagagagaaattcctctaggaatttcaatttgtatcattcactctaaaggagagaaatctttctgttcatatcagaaagtcagttgtaatcaagagactagttttctcttggattgtgagaatagtaatcaagagacgggttgtctcttggagaatctttgaacacaatggtgagggatcccaaagtgtgttcacagtctgtaaaggaattacatatatagtggaaaatctcacgtga

SEQ ID NO: 100735 - DNA, 450 bp, Glycine max
gcagctgcagctgggtagactgtttcatgggggatcttaaactattgtatatattcgaggcggcgtggattatatcgcgtaatgtgtaactacaattaaataatatctaaggaattgttaaaaataaataatttcaataaaaataataatttatcatcaatattatattataccatatattttcacgcgaatcggtgtttacttcaacaaaaatgaacttctaacatattctcaacaactaaagcatattttaaacagagaaataattccccatgttccaatattttatataaaatcttattccgctactcttctaccttcacaagaaccacaagctttgttctaccacacaataatgaagatctactggctccttctcaggttgacattttttttgaattggctttgtgagtttggcccactagattaattgcatcaatttatatttat

SEQ ID NO: 100736 - DNA, 455 bp, Glycine max
  unsure (1)..(455): unsure at all n locations
taagccagtgcatgtgaagactgtttggatggatgtgccacacgcnaatgtcaagatatctatctgcttatatagcccagatatgattagcctcaatattctcatatgaacctaaattagccaaaatcttagatgcattatcctccccaacacaatatttgtgagacacaagctatcatgcattactacttatggtaggagaataaaattcgaccaaatagagatgataataaccaaataatataaaataacttttagtgcataaacttaaaatggcatgctcctacccttccttcaaagtcaatattgatgtgtggactgcatcatcaagctccatatcatctgtgtacctgtgagtggacaatcaagtcaaccatagaaatgatagggagaatgaaatgaagtaaaactaatgcaactcanatcactcanagaaatattatattatcataata

SEQ ID NO: 100737 - DNA, 345 bp, Glycine max
  unsure (1)..(345): unsure at all n locations
tccttatgntatcaaacataaaaagggaaaaggtaatattgtagccgatgctctttctcggtgtcatgcattactttctatgctagaaacaaaattgagtggtcttgaatgtttgaaaagcatgtatgaaaatgatgaaacttttggagaaatatttaaaaactgtgaacatttttcagaanatgtgttctttatacatgaaggctttcttttcaatgaaaacaaattgtgtgtgcctaaatgttctactagaaatttgcttgtttgtgaaacacatgaatgatgtttaatggggcattttggggtccaaaagactctataaacattacaagaaacattttattg

SEQ ID NO: 100738 - DNA, 359 bp, Glycine max
  unsure (1)..(359): unsure at all n locations
ctttttgncttacagacagcaaaaaagaatgtttatacggataaccactcgggtatctccgcccgtcagcgtgtctcaaatgtcagtatgacagatcttgtgagcgcgaaagatgacgtaaatctccgcgtgtcaacgggcttgtcggccgcgattgacgaaaggcgcagaagacgatgtcagtcttcgcatgctatcaggcatttcgtcttacagacagcataaaagaatgtgtatacggataaccactcgggtatctccgcccgtcagcgtgtctcatatgtcagtatgacagatcttgtgagcgcggaagatgacgttaatcttcacgtgtgaacgggcttgtcggccgcgattga

SEQ ID NO: 100739 - DNA, 304 bp, Glycine max
  unsure (1)..(304): unsure at all n locations
agctntagctggaggcatattattaatcttcatgtctactaatataaataaagtcgcatcacttattataatcattgggaatagtctccactgagtctattaagagtcaatatatattgatgatatgcaaaacctatgtacttgttgaaaatcagaatataatattctgattccactaataattgcggtttataggaacataatctttgatttagaggaaatagaatatcctctatttatgtataattaatgtaattaacctatatatacacgcatccgatgtgcactctgtgacacnagtttc

SEQ ID NO: 100740 - DNA, 505 bp, Glycine max
  unsure (1)..(505): unsure at all n locations
ctgccagctgtcacttgacaactgngtgactatctcccacatgcttatctcacttaaccaagtacaatactcacataatgcattgcaaaaatttgtcatttatattttgattgttaacatgtaactttagctaatcctgcctaggttagctttgctattcttagccggtcccaagcccggataaaaggagagggttgtgttaggctttcgacagtcaacgtaaaactttgtcgaatctctatgacatggatcaattacgtaataatgtgaatgctatgtcgttgcccggaagtaacgcgctgtatggctcgagtacagtgtcaaaagagcaagggccgctgcatcgccgcccggatgtagtgaaaagtaagcaaggattcccacattttcgtgaacgggtgtgggtaaagaagctagttcatgacaggagggattcgcttggacatggaatatatgcacacttactcggaaatctatggaaatagtggatgttatggtgaggagg

SEQ ID NO: 100741 - DNA, 477 bp, Glycine max
  unsure (1)..(477): unsure at all n locations
gcttcttctatatatagtcgtcatcttctagtatttattgtcttacaaccggtggattcttcacggttcttcgtctgaggtcttgagactgttagagcatttaatgcttgcattaaatgtacatcccttttttcatgcaaattccatgcttgataggttggcatgtcttgtacttcagtaagaaagtcacttcttccatcataatangtctgcactagcaaatcatgcctcttgatgaagatcataactttcagactgtagacttcatctattcttcatagaactttgacaaattccaggagaatgttttatgcaagagagaatcttagacacagattattaaatgacgatcttacatgcactccttaatgttatgctagattgtcttatatggacgtatgtntgaaaactcatacgcangactacataccatgatctgataacacattgtcataccctaatttcttctagtgacaa

SEQ ID NO: 100742 - DNA, 312 bp, Glycine max
gcctataacagctatctaaatttgaattctaacatttaaaagctgtaatcgattacacaattgtggttatcgattaccagcagttattgaacgttctaattcaaattctaaaagctgtaatcgattacacaattgctgagatcgattaccatacaggaatttcagataaatacatttaagagtcacaactttgtacaagctttactcatgaccaccaatggtgtatatatatgtgacttaatcactaggttgctcagagattttcagaacagccaagtgtctattctgttagaaagcaatttcattgtatcc

SEQ ID NO: 100743 - DNA, 382 bp, Glycine max
gcctcggacaccaagaataattgggccaactgtgatcgcatgtgggcactcttgaacatatatacatgtcaagatcttgatgcatttgtatagatttaacatccacgttcttccttcgtatcaattattacaacaccgtcgaagaatttgaagtatcacaatcagatcgtcaagaatcattataggagttaagagacaaatgaaaatggtgaggatgtgtgattttacccatatagttaaactcattggtaacacttaaatagctttataagatgtcattgtagaccaaataaaaggtgtcttttcttaaaatttctaaacatttattctctcttatatagaaaacttgacgttccgttatcactgcggactaacaacgtat

SEQ ID NO: 100744 - DNA, 419 bp, Glycine max
  unsure (1)..(419): unsure at all n locations
ccaaaaactcagctaatcttatgtgctctgctattataaaccattttattggccccatacccagatagtcatacaccagaattatcccataaaatgagaataacaccagcttctagataggatttatttattatatcccacaatttattactctcacaaacatggctacgggtttgactctcttagtcattctatgatcacttagatttcagctctcatcatttttcattttcattataacattgttacattcactagattctctcttttgttcacctttgcatctaaaaaatgaaacatacattaaacattttcctaatcggagcaacaaacctttaccaatgnttctacatggatattattggcttagacaaacgagagaacacatacattaacaatggtgaagtgagaaaagaaaa

SEQ ID NO: 100745 - DNA, 366 bp, Glycine max
  unsure (1)..(366): unsure at all n locations
ttagagtcacctgccgcatgcagctntcaaaagttttggtctccaaaccttgttttctangtgngctattcatctntttcattcccttctccctctgcgcaaaagaattcgccaaggactaacctgaattctttttgtgtctctcttctcccttctccaaaagaacaaaggactaaccgcctgaattattttgtgtctcccttcnttccttgncaaagaatcaaaatgaccaagtctgagaattctnttgattcttccctcttccataaacaaaagaattcaaaggactaaccacctgagaatcttttgttccctcttcacaaagtatcgaggactaaccgcctgagaactttgtcttaacacatt

SEQ ID NO: 100746 - DNA, 459 bp, Glycine max
  unsure (1)..(459): unsure at all n locations
tctncttccttttcctataaataggggaaggagggaagaacatttatgttcaaccctcctggtatctgagattcacttaaaattagtgagaaaaattgtttccgtgaagaaaatccatgccgaggcgcttccgtaacacttccgtggcgtttccgtgagtgatttcgcgaagattttcaaccgttcttcgtcgttcttcgttcgttctttggtcttcaaccggtaagttcctgaaatcaaactcttcaattcattctatgtacccttagtggtcctcatttgtttcgcgtacctttattttcatttcatttactgtccgcaccccctttagacgtactttagtaatttatttaagtcattctctcgcctaatcaaaaataaaataaatttccaccgatcatttgaattgaacatcctttaatttctgtaaaatgaattccgaccgttcggtcatgccgt

SEQ ID NO: 100747 - DNA, 447 bp, Glycine max
  unsure (1)..(447): unsure at all n locations
gcttctagagtagtgtaccagatgactgcttgtcttctccagctatcttggaagaagtgcatcaataactctctatctctggaatacgccctcatcttgagacaatacattntgagatggttcttaagacaagtcgtccctttgtacctatcgaaatcaggtaccttgatatttggggggatgacgacgtccggcactaagcaaagatcaatcatgttcacaaacggatagtcgccaaagccttcaacaaccctcaatgtctcctcgatgagatcgagttttctcttttctttgttgccgggttggccctcctgcggacaaaaatattggctgtgttgggtggttacgaggctcacccatgacgttgggttgaggtattgcgttgggtgccggaccctcggcgggaactgtgagtatgaatcgatgtttccttgagcatgctctcta

SEQ ID NO: 100748 - DNA, 430 bp, Glycine max
  unsure (1)..(430): unsure at all n locations
tttcaccttctccttaagccaatccgatggcttagngagcatccgctaagcgcaacactcattggctaagcgcaagtaagaatctggaagaagatgagctgtgcaggttcactaagcacatcgcttcatctcactaagcgcactgcttcagtccatccgctaagcgagaaaggcacgcgctaagctgaaattcattaatgtgcgctaagcggtccaaaattgcgctaagcgcatgagcaagaacaaggccacctatttaagcttgaaatcagattntgtgaagagagtttgggctaggattcagagctttgcatgtctagagattctagagagagaaagggccaagttccaaagagttttgggagaatntgctgtgtgatagattgcaagactagagctcgaagtatggagccgtctgagatcttgagat

SEQ ID NO: 100749 - DNA, 400 bp, Glycine max
  unsure (1)..(400): unsure at all n locations
agcttntcggagccccgtgaattactgtttcttttatgtgtcctccatctacgagtctgttgccatgcgtagtgaatgcttaaggcaattctccattctcaaccctanttcggagccccatgaattgcgttctcgttcatgtgtcttccaccttcgagttcggagccatgcgcagagattgcttagtgcaattctccactctcaacccttttttcggagccacaagaatggcgttttcgtccatgtgtgctccatcttcgagtttggagacatgccgtagtgattgcttggtgcatttctacattctcaaccccttnttcggaaccccatgatatgagttctgttcatgcgtccccatcttaagatggagccatgcgagagttgccttgcgaaatctcca

SEQ ID NO: 100750 - DNA, 424 bp, Glycine max
  unsure (1)..(424): unsure at all n locations
actcagcttattaagaggcttcctccagaagcttcatttataggcttctagttcactccagacatcttcttaaagatcccaacggtcagataatggaaaagtgtcttgtggagttgcagaccaaattttgagaagatccaacggttaacaaacgctgggcatcgtttttaccgaggcagctccatgtagctttctctagaagcttcatcaagaggcttcctccataagcttcattaagaggcttcttccagaagcttcctcgtggcttctttgagaagctntctcaagagactntattgagaaactaaattctcataggctacacacattatgagtatttgactcataggctacattntctcttcgttgtagcaaacacaaaacatattggtactatgagtgattgactcatagactacattat

SEQ ID NO: 100751 - DNA, 368 bp, Glycine max
gtgtagaagggtgaaactttctgcttttattctttgaccacagagtggtacctggagatatatcgcgtgggtcaggagaccttgcggacgtcaggtggggtgctattgcccaaaaccaagcttgaccaatcccgacccaacccatgcatagtcggtcaatgagaacctgtgatgtacctaaacaggcgagctcctggcagtcaacagataaaaggaacaaagaccacatagcaagggggcttgtggtggctggccaactgtgaattatgtgtgatatatgggttgtggcctctggaatcgataccaacggtgggaatcgatacaaggttaaaatgagacataggctatatggctctggtatcgatacc

SEQ ID NO: 100752 - DNA, 465 bp, Glycine max
  unsure (1)..(465): unsure at all n locations
gtctcacgattgtcacgtgctcatgcaacaattgttattcgttctatacgagacatcttgccaaacaaagtcaggttaacgataactcgcctatgctttttattccattctatatgtagcaaagtcattgatccattcatgtttgatgagttggaaaatgaggccgcaattatactgtgccagatggagatgtattttccccctgctttctttgacatcatgattcacttgattgtgcatctggtcagagaaatcaaatgttgtggtcctgtttatctacagtggatgtacccggttgagcgatacatgaagatcttaaaagggtatacaaagaatctatatcgtccagaagcatctactgtngagaggtacattgcagaagaagccattgaatattgttcagaatacttaataaaggctaaagctgttgggcttcctgaatctncgcatgatgacaaagtgggt

SEQ ID NO: 100753 - DNA, 497 bp, Glycine max
agcttgtgactcttggcaatttctataaaattagtcacttattatgttgtgacttttgaaaaaatcttcagaaaaaagtcacttgaagaaatgtgactcttggaaaattatctttcgaaatcagtcactggtaatcgattaccattaaggtgtaatcgattacacatcaatagatgtgactcttcattttaaactttgaaaattaaaacatttagaagccttggtaatcaattacaagtattgtgtaattgattataccaagttaaaatgatttgaaaatgttaaacacaagttgtaactcttgaaattcgaaatcttaatgttttaacacactggtaatcgaatactaccttctggtaatcgactaccagagagtaaaactctttggaatgattttcgaaaacttttgtctactcaatgtttgaaaacttttagtactatcttgatgagcttctctgattcttgatcttgacttgttattcttgaatctgatctcg

SEQ ID NO: 100754 - DNA, 457 bp, Glycine max
  unsure (1)..(457): unsure at all n locations
ctaagctggcattgatccaatanactccttgtcatctctcatattacatccagaaccttcccttccatatacagttgccacacccagttcatgagaggcacgtgaaactccccatcctgataagtccttcttccagaagcaatttcaagagccacaaccccaaaactataaatgtctgattccttgctagcccgaccttcgttgatgtattctggggcaaggtacccatatgtccccaccacccctattctctgagtcctcaaccttggatccaccaactntgccatcccaaaatcaccaagcttggtgctaaaatctgtgtccaatagcacattagccgatttaatatccctatgaagaacactntgctctgcatcctcatgaagataacgaagtgccaaagccacgcctaacgctaccttgtacctggtagaaaaattgagaagagaagagatca

SEQ ID NO: 100755 - DNA, 367 bp, Glycine max
gcttctatgagtggaagtagacatcgcgatgagtctaattctctattggttccagcgatgatacgtaatataaatagtggtttgtgagctattattaaacttgatttgttatctaacatagtaccactcttatttatttgctatgtatacactgtctctattttattctcattttcgtgatatatcaatgatttgatgctcccagactagcacaatcaacttagccttcctacttgtattttattttattttttaactctcacacattttgaatacatggatgtgatcgacttgtggcctgtcctgacattaatgattgcgaccactactcaaattgtaatagattccaattatatgaattcgcatg

SEQ ID NO: 100756 - DNA, 507 bp, Glycine max
  unsure (1)..(507): unsure at all n locations
tgatgctgcttgcttatacttgatctgcatgagctttatttcacagttaatgtcgaacaacaaactaaagctttgattnttatctaaaaaacaacaacgacttttatcacaagttttctttgtagttctttcaaagcttaattgttttggttaattgtttgggtgttcctgaaccttctcctactttgnttcgcatagaagcccgaagaacacactanagctntgatttttatctcaaaaaaagaagagatttctatcacaacaggtgcaatnttttctgttaattaatagggtgttcctgaaccttcttctaccttgatggcgctntctttgttttccctccccgtggcttgcgttttcttccattttgatttgctggggcttctttagagtattgcttaatcttttatctcacgctccttgttctatgttgtcttccatatctcctttgcactgtgattgttatgtccccttatcccactatttgatgtatacacgttcagattt

SEQ ID NO: 100757 - DNA, 195 bp, Glycine max
cacattgagtgcacatgcatagttcatgtggcttaagaggccatgcattaagccttcacatgcacgcttagcacacatgcacgatacaactggcttctagtttggcgtctcacactaagcatgcactgacatgctgagcgtgtaactccaattatacaacattctccacacgctatgtgttgtgtctaattctac

SEQ ID NO: 100758 - DNA, 451 bp, Glycine max
atacaagaatgaagctcagataccacttgggagtattgttttctcagatatcagaagaagggggggtagaattaagatattccaaactactctcccaattaaaaatatatttcactctcttttcaagttatagattcccttagcaatgaacctattaaatattaattcaaatacaacaatttgaatatgaatgtaaagcagtagcaaacaaaggagatcaagggaagagaaagtgtgaactcagaattatactggttcggccacactcttgtgcctacgtgcagtccccaagcaaccacgtagagagttccactatcttgtgaattccttgtacaagttataaacacacaatgacaatcctttctttgtgtttagaataccttgacgacaagacacccatggtctcttaatgccttagagaatgagtagaagaagaacaatgaatctctct

SEQ ID NO: 100759 - DNA, 177 bp, Glycine max
gaatgatggcagtcccctctttttaagctcactaacaatagtctcttaaggatggttcaatcaataacatatctctatgatgctcacgatgatgtggacatccataaatgcccgtttttgtatgctcaaggaatgaaatatgcttcctggccaggtgatagtaaatatgaagattct

SEQ ID NO: 100760 - DNA, 260 bp, Glycine max
  unsure (1)..(260): unsure at all n locations
aagcttnaacactgttctanatgatccacatgaaccaactgagccttgctatttattagaacgtcatcaaagaatacctaagcatatagcctaatgaatggcctcaatatgtcattcattaaggcttgataagttgatggagcattggtaagaccaaaaggcctgaacacaaactcatattgctcttcatgtgttctaaaggctgtattttcaatattagaatctctcattctgatttggtgatatccaaccgtgaaatc

SEQ ID NO: 100761 - DNA, 489 bp, Glycine max
agcttcttatccaaggcacattctttgtggtgaattcttcttcttccatggcatattccctagtggatggcgcctcccctcacctcttctcctttgtcttccgctgcatctccatggtggaaaatcaccattgaaagacctcattgaagctcacagatccagcctccatagaagcttcacaagcaagctttcgtcaagtggtaatcagagcataagagcttcaagtaagtgctccttacacctccattcatgttgttgctttaccatctcttccattggtggttcttcatttttctccatgtatcctctcacatgtcttatgctaaatggttttaacatgattctttagaagtttcaccgattaaacttgctataggagctagatttgaatttctatggatcaaatttcttgttcttgttcttaaagagatgaagcggtgtgcatagcgaacctgtacagctcatcttcttctgaattcttcctcgggc

SEQ ID NO: 100762 - DNA, 428 bp, Glycine max
acctctacgacccataagacaagtcacctaagcaggtgaaggtcacaggtcatctgatgaaatttgatgaagataccttgaacactttcctgaagaccccgatgattctggaagagggggaaaatctttgtgcttattctcagtttgcattcctgaggcctgatcctcaggagttggctgccaagctctgtatcccaatgaggggattcgagctaaacactgatggtcagcctttgaagattttaaggaagaacatgaccactttatcttagacatggagcgtgctttccttctctaacatggttcctacctcccacacatctgatgtcgcacatgataaggccaagttgagttacgggatcatattgaagatggatgtgaatcttggttacctcatctctcacctgatctctatcatagcacaacat

SEQ ID NO: 100763 - DNA, 455 bp, Glycine max
agaactaagtttctcataccaagctcgatgagcttgctttaatccatataaagatttgctaagtttgaaaacatgatgaggaaaagtatcactcctaaaccaagggggttgttcaatataaactttctctcggatgagtccactataaaatgtgcttcttacatctatttgatataacttcatgttactatgagcaatagatgaaagtaacatgtgtatttcttaacataagagtgtcatcctcattaagttcaatcatcaatttctcgatacccaacacatagatcaaatatctcatattagccctttctgcttggccacacatacaacgtgtcaaccttatcaagaggatcatagacataacttctgttgtgtagaagggacaaatcatatcttgcttactcacaatcctcaacttgattattacacgcccaatatatctttatgatcatctg

SEQ ID NO: 100764 - DNA, 326 bp, Glycine max
ttctaagcaacttgcatatcctatttgagctcataactattttcattgtgaaccatcattacaaatctttatgttctaaaagaaaactaaaggattgcaaaaacttcaattcaacaccccctgtttgatttcttttgtcactctaaaacatgctatcatatctgcatcatggaatgactctattatgacaggaagtttctagtcagacttgaaccatgagcatgctactttctacctcttccttgaaatgacggtggccactatagtggtggcgactatacagtatcatgcttaagattcctattatgatcttaacttgaactcat

SEQ ID NO: 100765 - DNA, 245 bp, Glycine max
  unsure (1)..(245): unsure at all n locations
atgaggatgttccatatgttcttaagactggactaatacatttcgtgcccaaggttgatggacttgcatgcgaagatcctcataagcatcttaaggacgtccatatngttttgtccaccatgaacgcccctgatgtccaggaagatcatactcttttaaaggctattcctcattctctagagggagtggcanaagataggttgtctaccttgctcccaagccattaccagctgggatgaccttaa

SEQ ID NO: 100766 - DNA, 426 bp, Glycine max
  unsure (1)..(426): unsure at all n locations
ctcaagagtcttctttgagaagctagatacttatctacccacacccctctattaactaaattaacctccttgaaaataattatggaaaaataacgcaacaaataatcgaacatcaaacataattactaataatatatagatatatatcacggtgctacatgttatcttgaagaagaaattntttcaattgaacaagcaattcagtaaagcttttgtcactccaaccaaatcgtgtcttcaagttgaccaaaggtaataccactgacgaccttctgaaatcagtgcacccaggatacaaaggcatcttcgaatcattttctattttctcatacaaaggtgcatgtgcttgttgaaatccgtcttgggcccagttgtgaatcatgtcttctatacgatatcccatgtctacatcaaccgacttagtat

SEQ ID NO: 100767 - DNA, 366 bp, Glycine max
  unsure (1)..(366): unsure at all n locations
gagctgggtctcatgcatatatagattgagattattttttggatctanaggtatcatgcacgatggaattgttggaactatataaacaattatgcgaatagatcactagaatagtctctgtatattaggatatattcctatgcatatttctacatggaacactaaatccaactaaaatcgcaagtttngtgtggctatgtgatctaaatgatgcatctggtcttggctatttggaactctatgtcagtggatggcatcgtgaatatttagctagtgagataagactaacgtgaggattctggctctccttgaatcacatactacaatcttggttattcgatttaagcatgtctcgattgattcaat

SEQ ID NO: 100768 - DNA, 481 bp, Glycine max
  unsure (1)..(481): unsure at all n locations
ttcacatggagctacatcaggatgatgggatatatggtttcatataccccaattgcaaatcaaactacttcaacatagcctttggtgcagcttctgtctactcttatccaagttatccatggaatacttttgaaacttttctattcttggtcttatattgatggcatttggtgcgctgatgatgagttnttgaagagagaagtgctatctttctttaaaaatctttttcaatcctcaaatcaatgcaaacctggtagtctacaattgatttccattcctcaagtagaccaaaatctgtatgagttataactatctcatatntccatggatgattgtcaaaatgtcactttntctatggattcctacaaagcccttaatgtagatgagttccaacctatctttgttatgacttactgggatgttgntgtgaatgacatctataataatggtggcttttactttgcttctggctccttgaccc

SEQ ID NO: 100769 - DNA, 195 bp, Glycine max
gctgcactaccttgtcatggctctcttttgttgggaacctaaatgataggacaaaagtctaaaatttcttccacactaggtgccagatgaaatgttttggaaagacaagacagtctggtgccatctttgttctttccaagtgcttctgatctaaagaaaaaatctccaccgagtgacgtcgctagatcatgcgtg

SEQ ID NO: 100770 - DNA, 371 bp, Glycine max
tatatgctgctactgtcagtttgcatgcatgtgcgccacgtaagcacctttctcgccagcaacaatggcgagatactttcaaaacacactcgccagccatgttagtgaaaccatcctgaaccactgcacccctactcagcaacaccagacctagctgccctagcctcacctgttttgccagagctgctggctagacccacctccacgtcacgtgtttcgccattgccaatggcgaaacacctccatgtcaacactatcttgccagtgccaatggcgactcatctgtatcgctagctgtaatggcgacatccattaaataacagacccggctcatcaatagttctaaacagaccctatttgatacaatattt

SEQ ID NO: 100771 - DNA, 437 bp, Glycine max
  unsure (1)..(437): unsure at all n locations
agctttctttctcaatcattctatctactgactataaattctaaatgcaagttcacattcttattctttctttgtctaacatacaaacttgctcaaactcatgaaaagaaacacaaattccatcacaatcatgcattcaatccacaatcaaaccatacatcgtatttcacaaaaagataaaagtgttctactaccatatcatcaaaatcaagtcaaactgttccatatgcttcaaaatgagcaaactaattacccataaataaaactagcagtgtatataaatataaaataaatattggtctacaaccataattatcataataataaaccaaagagcanaaacatcatcatgaatcaacaagcgcaatagtgtctatactatggaatcggtgagagcaacagcttcttcagatgacgaatcagaaagatcgataatt

SEQ ID NO: 100772 - DNA, 393 bp, Glycine max
  unsure (1)..(393): unsure at all n locations
ngtcacgatgattcaaggtggatatgcatattctattttgtttccactntccattgatgatcatatatcataagaaattagttctttgtttacattcaagttttgatttgtttacaactatcaattataaattgttgtactggtccttgtgataatacttcaactgctagctatgattttaactaattcttctgtatgccttgtgattattattctcctttgcagtctctgctgaaactaatttccgattgtgcggtatcagcgctaaatccaagtagaaatgattcatgaaatgaatctcctctaaagatagctctcttttccctagcaaagatgtgtgcacatccattgtgcagacagctcatccgttcatcaccattgntccctgtgatt

SEQ ID NO: 100773 - DNA, 383 bp, Glycine max
  unsure (1)..(383): unsure at all n locations
agcttngactngagtcatcaagagattataatatgtgaccatggcatgagtttcaaaaatcatcaatcatctatctctcaatctttnttcaacatcatctctcaaacatctttcaatatctttctacagagatttctgatttatttctcttcatctttctaaaagatgttgatcaacactttctcttccaagaaaagttctttgttcaaaaacttgtgctattcanntattttattctcttctccctttgcccaagaacagaaggactaactgcctgaattcttttgtatctctcttctcccttacaaagattaaatgactaaccgcttgangaattttttgattcttcccttcccttaagcaaagatttanaggactaaccg

SEQ ID NO: 100774 - DNA, 444 bp, Glycine max
ctcagcttaagaagttagcttgactcatttatacccgactaatgtgcgtgactcatattctcaagggtgagattatcacgtgtaaaagactcatgcttgaacgaaagattggtggagtacaagtctgagatgatcaatgagtctcacatctgacaaaaataaaaaaaattaagtatcatataaactaaaagaagactcacaatcttaaaaccttattaacttcactagttgctcatgactcattaggataatatgtattggttttcttttttggttttggcttttagcaagcacccttccacgtagacaacttgcttgcagaaatcttgtgctttctggtctttaagcagcatccttctccacgcttctcattgcaaaactacaatgagcccacaataaacgtggcccatctagaaagaagaaatgcatcaacagacatgcatg

SEQ ID NO: 100775 - DNA, 282 bp, Glycine max
cttcacataactgagatcgtttgacatccaataatgtttaatctgatctattacaaagcattgggagagagaccatacatctcccttgagagagaacatttgatgagttagagaaagagaaaaaaagaggattatggactatatgggagataaagtgtggaaagaaagaatatactttaaattgatcaaagttattcttccctaatttatatcacacgagaagataattctacttttcaccaacattctaatggattaatcttatgctatgtacctctatgc

SEQ ID NO: 100776 - DNA, 388 bp, Glycine max
  unsure (1)..(388): unsure at all n locations
gctggtatccaaccaggcctaaatagttcgattgaacacctgtacgacaagacaggatctgtggattcaagtaaaaggaccatatttcgttcacttcttcttcattgtccggatcgacagcagggaaatagtcagtgaaccaggctgggccaacctctcgactaatgaatggagcatgttggggaagaaacttgtcaaagctcagaanaatcctcatatactntaggaaacagctttgtgagctttgatttaaggacttgggtgttagtcgaagtgctctcttgccttcgatcgaaggattggcaacttcttcagcataatcttgtgggattattaatcccatttcttgttcgaaagtggcattaagccacaactggagaagccacat

SEQ ID NO: 100777 - DNA, 454 bp, Glycine max
  unsure (1)..(454): unsure at all n locations
cttgttctgaacttaacgttaaacgaacttttgtttatcagactgaganaactcaacgtgtgatatgaagagggaatacagcataccttagaaactttcatagntgcatcataataataccttgctgaaatatcgctgaagcaaacactctgtcatcatgccacacataccatagaaatataacaaatttgacatcacctgaaattttacaagtggttgactatgttatcatatcagagaattcataagaggaaaatatgcaagaaattagaacgaaccttgttataaaaccattccgcccaagaaggtgctcttgataacggagatacaagtattaaaccaagaacacgctctctatatttcatctgtaaaaacataccagagatatgaatcaagatagaactgacttcataagtggatcataagactgcacagcatcaattatatagcacag

SEQ ID NO: 100778 - DNA, 413 bp, Glycine max
  unsure (1)..(413): unsure at all n locations
aaatattcttgtgaattacgacgcaccaacaagaatcaagccaaggctatggtgcaagctatcaatggggaaaaacacaccaaaagagtatgatgatggatggctcaaattctcacacagctgaactcatcactttcaaaatgagctttcataactatcatgacatgtagagaagaatcaaggagtttaagtcacaaaatgtcaagaacttttattatcaaaacaatcacccacttgttgaacatatcntataattcaaagaaaacatgcgaattcgtacgcgcacacacaattgacccaacacattaaactgaaatccgacaaactaacacattaacaaattacccactactaatatcaaacccactaccagctaaccaagaacctcccccccccaactaacacacattgcc

SEQ ID NO: 100779 - DNA, 523 bp, Glycine max
ctaagcttaagacacagatggcctcagcaaattccttatttctagaagggaattctttctatagacctccaatctttaatggagagtgttaccactactggaaaacccgaatgcaaatttttatcgaggcaatagatctaaatatctgggaagccatagaaatagggccttatatacccaccacagtagaaagagtttcaatagatggtagttcatcaagtgaaagcataaccatagaaaaacctatagatagatggtctgaagaggatagaacacgagtacaatacaacttataagccaaaaacataataacatctgccctaggaatggatgaatatttcacggtttcaaattgtaagagtgctaaggaaatgtgggacactcttcgattaacacatgaaggaactacagatgttaaaagatctaggataaatgcactaactcatgagtatgaactatttagaatgaatgcacatgaaaatattcagagtatgcaacagagaattacacatatagtaaatca

SEQ ID NO: 100780 - DNA, 341 bp, Glycine max
  unsure (1)..(341): unsure at all n locations
agcatgcaacttcaaagatggccccctgcatacatatcataacccctaccagtgatgcagagacgggaagcaaactcttgaggatcaatcctcatcctcgtaaatctggaataggtaggcagtgtctcaccctcctctaaaactattgtggtttcaaagaaggtatntaggctgtcagcatcaatcttgattaagagtcctgatgcaatcctaccccgcacgggcattggatagaaaactccaagtagattgtgccaaagatgcaagagaaggctctaggtgtcttatgagccttacggtagatctcgggcccatgggctaagtatgagcccacttatctt

SEQ ID NO: 100781 - DNA, 495 bp, Glycine max
  unsure (1)..(495): unsure at all n locations
gactcaagtcaagaatcatgtattctgcaagtctcaagaatcaaagagtgattcaatcaagaatcaagattcatgtgaagaatcaagagaagactcaagatatgcaagaacctcaagagaagcatcaagataagtataaaaagaattttcaaagataagatcgaatagcacaatttgtccgaaataatttttcaaagaaaaatctgttaccagagttnttatggtaatcgattaccagatgcctaaaaacgttttataactatgttacacagtagtaatcaattaccatgggcatgtaatcgattaccaatgtttttgaacttcgaatgtaaaatctcaagagtcacaacttgtgataaaatattatcaaactcgtgtaatcgattacacaacatttatgatcgantaccagnggttctaaacgttggttcttanatctaaacatgaagagtcacaactattgatgtttaatccgctacactatattgggtatcg

SEQ ID NO: 100782 - DNA, 381 bp, Glycine max
  unsure (1)..(381): unsure at all n locations
atctcttcaagatgatcaactcattattgcttttgctgctncaattttgggctgcacattccataagcaatgcatttagtatgtttacttggtaggcttaaattttcaataaaagtaattaactttcttagaatttaattatttatgcaaggtcaatgtgagttcttgttacacaaatgtaatccattttattaccatattacccaattcattaatatgatgcagtgaatttgtattaaaaacatatactcttaattatatataatatagaagttgtagcatttaccacctcactctttaacacatgtttatataagagcatttattatacgttaaaatttattaaacatattaaagaaatagactcccaagatatgattt

SEQ ID NO: 100783 - DNA, 476 bp, Glycine max
  unsure (1)..(476): unsure at all n locations
tctatccatggcttcctatggtggtgagcttattcttgacttattcttcttttgaagnggcgtctccaatcacctttccactatctccattccgctgccattgatcttcaagaagtaaaggactccattgatgaagaagatccaaggcctaaaagctcaacatggagctacatcactagtagtacttgttctttcctccttcctaagcctaactctcaaaaggagtagttctatttgttgcctatactcttcaacactcatactcccttttctaagcctttggagcttgtccataagctccctttcatagtaggaggggatgcacctcttcctaagggtacttttcaagtcattccaatactctactagaggatcccatgaatccttctttcctaacagtgaagtcaccaatagaaggatacctttggaagctagggtagccaaggaacacttctttcctacttgtatgatggaag

SEQ ID NO: 100784 - DNA, 352 bp, Glycine max
tattactagctcatttgaattctttgattcctgaatatacaaccttcaaattgttgctcgttcccctctttcttttctgccaaaaataatatcaatatctcagagaacatggatgagatcctaagaaaatcaatatctaagaaaacatggatgaaatgacaattaacaagcacaactaccaatctttcagagtcctctggttaattcgtcttgactccttatgtggcggggctttgtctaataatattatactattgccttccaaaaaaaacttatgactgatcctcttttcattaatcctattatgcatgtaattgcatataagatcatgggttcttcagctgactccact

SEQ ID NO: 100785 - DNA, 385 bp, Glycine max
gcaagcttaaatactcttggtattcttcatcatagaacttatactcagatttttctgacttggatacctgtgccactttgttatggaagccatgcaaagagtaacaattctcttgagtgtggcccatcctcttacaatatgtgcattgcggacgtccacttcttacattgtggccctctctactgatacgggctctccctctcccacgaggtgccaccatggctgattgtttcacagcatcagtgagattttcattcttcaacgcatgaggtacacggagaatcctattaatgagagaatctctcaatgtgacttgatctccagctatgacctgattacgtacatgatctaaatctgagtgtcgactctctaagataaggatcat

SEQ ID NO: 100786 - DNA, 420 bp, Glycine max
atggaagctggatctttgagcttcaatgaagtcctcttatggtgatctttcaccatggagatgccgcggaaggcgaaagataagaagattggggaggcaccatccactacggaataagccaaggaagaaggagcttcaccaccaataattgccttggataataagctcgaacaggatgctttaatggacgaaatgatagatagaatgggggagcacgatattgaatgaatataagatggatagaagtggaactttgaagtgtatctcataagactttgattcatcacagtttccacaagtgtgacacatgcttctatttatagactaggtagcgttctcgagaagctttcttgataaaacattcatgagaaacttctttgagagaactttctcgagaaactagagcttagctacacacac

SEQ ID NO: 100787 - DNA, 362 bp, Glycine max
  unsure (1)..(362): unsure at all n locations
agcttgtagccgcttaccagaaatttacagtggattgtcaatgaatcaattgggcattngattctgtaactgagagatcaactttcgctcggttccacaagatgagaattctgcccgcatgatgggatgagaaattgtggataaaattccagccaccaaattntctttgcataatttcagtaactgaagcataattcaatttctgttccaagatagccattacagtcacttccttactacgaagaaagatttgcatcgcttgatgcttcagaggcaggttaaagcccctgatattcctgaagcaataatcatagttgtggatgggaggaagccttccctttctactgccagattttgtagct

SEQ ID NO: 100788 - DNA, 510 bp, Glycine max
  unsure (1)..(510): unsure at all n locations
actcaagctaacanagctctnntatggcttaaataagtcccaaggcagtgtttttacatgttaaaatctactttactttagtttgtctttgtgggaagcaaatgtgattcttctctactcatctacacacatcataaacatattgtctatcttttagtttatgtggatgatatcatcatcataggcaattctgtctctcttattcagcagctaacttctaaactaaacattgccttctctcttaagcaattcggtcatatggattactttntgggactagagatcaaataccttcctaataattctatactaataactcacagcanatatatttgtgattttcttcacaaaactcacatgattgaagcacattctatttctnttccatggtttctaactgtaaactgtccaaacatgtgttgatttgtttcatgacccaactctctacagatcagtagtgggtgctctgcagtatgctactcgcactagaccctaactaantttgttgta

SEQ ID NO: 100789 - DNA, 301 bp, Glycine max
  unsure (1)..(301): unsure at all n locations
tggctcggaaacgacataatcctcatgctggtccagaattttgaaagactatcatttgtcagcccagactaacaaaaatgcagctggctcattatatatagatccagctcaaacgcacttatggagttatactgcntcactgcccctcctaatggaatatggaagttactgattcaacatttagcactttgagcttgcagataacttgctaaggatgttctcctaaagctaattataatatattacacaatgaaagacatctgcctgataagctacaatgatcagatttttaattctaatc

SEQ ID NO: 100790 - DNA, 339 bp, Glycine max
ttacaagttcgcttcattgctatgtggtgccacttggcttatcaccggcaaccacctggttatcctgtgtaaaacttcatggaaccagagggctagggaattatgggcttctctcacgatgctaatatttataagggtaagcactttagatttgatggatgagggaatcacttaatttacagttcaggtgtttttaagctcctgagtcctgattgtttgcaaactcattaatttattgttgatgtggtcatcatacttgcatatgtatcgacaaattcatcattcatttttaaaatatgtgttggatcacaacacgttggtatacattactggcttgca

SEQ ID NO: 100791 - DNA, 337 bp, Glycine max
accctaatataatttattgcaccacattatgtgacataatatatattatttgtgtaacacgtgaatgccaaaaacaacatcactaaggttatgctattgctagagattaagataatatgtataggggcataggcttgatcctcaatttattcattggtaaaaaaaagatcaacacaagagtcatgacccatataatttatattaagcacgtgttaataacggatttgtttaaagaaatatttcttataaaatttatttaacgagcttaattgaaacattggtgctcaaattaaaataactaaacattagagctgaccctttacttgtatgcaaattc

SEQ ID NO: 100792 - DNA, 324 bp, Glycine max
  unsure (1)..(324): unsure at all n locations
tttatgggaggaggtttcatgccattttttctttaagagtaatgtcccactaaaactaactntccaaatgtttgccttcgcaggaatggcaccgaggaagcttgccttaaagaggtccaggaaagacaaggcggtcgaaggaactatttccgccccggagtacgacagtcaccgctttatgagcgttgtacaccagcagcgtttcgaagccatcaagggatggtcgtttcttcgagagcgacgcgtccagctcatggaggacgagtatactgatttccaggaggaaatatggcgccggcggtgggcaccactggttactcccat

SEQ ID NO: 100793 - DNA, 486 bp, Glycine max
agctttacttttatagaaattatatagtcaactattttgtcctcacctgaaatatttccactgtgaagccttctggaggctcgaagccattgatatccaagctttgcagtctaaaaagtctatattcacctccttggtacttctgttctttataatgatttttaatataacattcttaattactgattcacatccttccagatatgataaggggatcatcaaaattgttccacaatgtcgagactgcaactcctgaatatatggaactggaagccttcacaaagctatcttactgtaacaatgtaaagaatctagctgcttatacccatcaactgcgatggataaagtcaccatcagagctcacgctgatgaaggaatctgcatcaattgcttgtcaggtacttccatttttattgcatggccaactatactggtactaaatatttcaattctcaatgaggctgtagatcacatttggaactgtac

SEQ ID NO: 100794 - DNA, 497 bp, Glycine max
  unsure (1)..(497): unsure at all n locations
ctcagcttacttacaantanacattaaagatcataattaatgaatctataacctgtttacaacttacctaatgccacctaaatgattatatttgactntcctacttctcttaccattgctttctaaggtagtttgcttcttcgcccttcatttttcttgaggtctataactctatgctctatcctttaaattattagatatccatgattttgatcaaccattctgttgaccttttacagagatttatgcaactaggtttcgactgggataccaatgaaatgagcattttgttgcttgcaaagccattgattggaactgcttgaatagtgattaacagtcttcatatcaagggtgatgtatgtaaagcaatgtccttcgcattcttgcttctctaatgtanacaacagctacgtaaagtaaagtaaaggacatataaacaacttgagttgatttctaagcatgtattaacacttgtgctttagaatatcaacctgata

SEQ ID NO: 100795 - DNA, 332 bp, Glycine max
attgcccattccatatgatatgacttgacccaagtatctagtgaagagtacccttggaacgacactgatgtgatgattggtaattggatcacttggcgcgagatgcacgccagctgatatttaccatctaaccggctatgaccggaaggtttaatgccgggacaatgtctctcgaaagccggattgtgaactatgttattgggcgaatatgacttgcaatagcttcatggatcgcacaagcatctgcttacgaatttattgtcatatgcgctttcattgttggcatcatatagatcggactctcttggatctgttgtgcatgcataatgcac

SEQ ID NO: 100796 - DNA, 377 bp, Glycine max
  unsure (1)..(377): unsure at all n locations
acctgcggcatgccagcttctaaggaagctacctagtctataaatagattcatgtgntacatctattgnaactctgacgaatgagagtcttgtgatacatacttccaatatccacttctatcccgtctttattccttcaatttcgtgctcccccctctctctttctctccctcttacttgtctgtcattgaagcatactctccaagcttgtatttcaaagctcatcttggtggcgaagctcgttctttcatggctcattccctagaggatggcgcctgctctcacactttctactttgcttctgctgctctccatggggcaaatacctttaggacctattgaacctaaaatccagcctcctatataccccatgcaac

SEQ ID NO: 100797 - DNA, 388 bp, Glycine max
agcgctcgcacctcatcactttcttgcgaagctattacctcattgtctctcacagtctttagatgtgggagccaatccaatccttgtgtcctgactctcagccacttatgatagccaccgatgatcccatcactgcttcccctaagctctctgtcctttcttcatgccgcaatccatgccttgcgaactccttggagtacctgtgcattggggtcactgaaacctcgtgttatgaaaggcgtgatgctttcgtctaatggcgctcctctcatggagtagccaagctagcatatggcgaggacgggattatataaatacggcccggtggtgccatccacggatcacttggacatgcttcttatgaagatacaagactgatatattcttc

SEQ ID NO: 100798 - DNA, 124 bp, Glycine max
tttcatgtgacatgaacaaattcaaattgtagaagcaatttaccttgaagccttctgagttaaatctccaacaaatgagcgtgagaaacagaatcatcaattagacattgcttccctgtctatc

SEQ ID NO: 100799 - DNA, 377 bp, Glycine max
ttaagtcacctgcagcatgcagctgctccaatcaaatgttgcttattgtattgaagtggtaaggaggttctataagtacaaaccataacgtgatcacacattgaggtaaaagtgtcaagctagtgacgttaaagaagcgcttcctgtgaggcaacccacttctaatttctgcttttcttttctattatgtacggcataatgtggaactctgctcataatcattacattgaggtatatctccctcattttgaaggatatataatagggtttcaatttcttgaggaagggactgaataataacccataaatctctttctgaaaaatagtcctttcgctaagcgcaagccttgcactaaacgcatctttggtcatgcgct

SEQ ID NO: 100800 - DNA, 437 bp, Glycine max
  unsure (1)..(437): unsure at all n locations
tgacgaggcgcgagattcttctctgctgggcggngactatcgattgcaatggcgtaaggaagtgtcgcggttgtccaactttgtcactttcaagacactgaagtttgttgacgcttctgatgcattctcttttatttctgaatgacaggttccgctggtggggaaattagtgtcttatctttacttcgcttttatttccaataaaagataagcaaagaggggcaactgtcataccctnaattcgtccggtgaccattgtttggtggcatgcaaccttcgcttgaccgctttgaggtacttaacacccatcgttaggcaatctgtaaagttccgcgacatgccgaaagtcgaaaggaagcattgttgcgcaatccgtaaagttccacaacattcctgaagtaaaaagggcattgttgctaatccgtaaagttagcgac

SEQ ID NO: 100801 - DNA, 253 bp, Glycine max
  unsure (1)..(253): unsure at all n locations
acactatgatactaagctgctgccgaacatccgatgacgtattccgggagttctttgtgagtactaccgaagacataaactattctttcggaagaagctaccgggagaatcncgccacattgctctttacaatgaatgactaatgtatggtctgactattngtcaatgtcaaaggctatacgacatcggctactatttagaattccatacaaaaagatgggcacccccccttctgcgggcgatagccaacctc

SEQ ID NO: 100802 - DNA, 197 bp, Glycine max
atatatcagaagtactcttggtcactacgaatgacaaattccttggtgataatgtagttgttgccatgttctcataacctcgtctaaggcttacaactccttattattagttgaacagcctacggtaggaccacttaactctccactaaaataagcaattggatggtcttcttgataaacacatccccgatcccaac

SEQ ID NO: 100803 - DNA, 477 bp, Glycine max
ctcagcttaggctgttcaattgcttcagatgggtgcacagaatgtgcattgtctgtgtggtggtcggcaaaggagcataaaccacagagtttggcgacaggtgtagattatttattcatggccagttgggttaccaggttaaccaaggcatctagtttaccttcaagcttcttagtctcacctgatgaagatgaattcatggctacttcatgcattcctctaatgacaatagcatcatttctggcactgaattggtaggagtttgaagccatctactcaattaaattcctagcctcagcaggggtcatatcaccaagagctccaccactggcagtgtcaatcatactcctctccatgttactaagtccctcatagaaatattgaagaagaagttgctcataaatctggtggtgagggcagcttgcacgcaacttcttgaatctatccagtattatacaagctttctcactaagttgc

SEQ ID NO: 100804 - DNA, 295 bp, Glycine max
cataagtatgataaggagttttcaacaactgagtagcacatggatctttctcaaaacatgtttaccaaagagtttctactctctggtaatcgactaccactatcataatctgtttgaaaaagttttccaattgaatatacaacgttccaattaatatcaaacaagtgtaatcgattgcaatgtttcggtaatcgattaccagtgcctttgaacgttgaaattcaaatttaaatgtgaagagtcacatactttcacataaaagctctgtgtaatcgattacactaatttgggaatc

SEQ ID NO: 100805 - DNA, 422 bp, Glycine max
  unsure (1)..(422): unsure at all n locations
ttaatttagatccagatattgatccacaaaagttaaggtaatacactatttgacatgactctatagctattcttatacacaaaatttgtatagactgtatatcatgcatgccatttgtcttctcttctctacaaaaatttgtcaaacggaatctcaacctcaagatcaaaccagaagaaattgaattaatagacatgctaaagaggtgataattgtcactaactatggttatcctcatgtcgnctcgctaagaatgagcatgaagaccaagttttgaggttctttatacggaagaagaggaatattctcgaagataaaatgacgggaggccagagagatgtaaaatgtggccaccttcgatttatatttttatttcatccaacaaaaatatattcatattcaattctaaaacataaaaaata

SEQ ID NO: 100806 - DNA, 255 bp, Glycine max
agcttattggaattatcatcacaagatgctttgttgtttcacaataagttgctctcttaacaactcgtaatcttaacagaaacacttattaagttgccaactaaattgtctactggttaaccttcacattcttctagttttcaagataccggttgtaccatttgtggtgaggctcatgaatcacgtcatttcattccccttgaagaacacactcaagaagttcactacatgggaaatcaattgaggcaacgttac

SEQ ID NO: 100807 - DNA, 339 bp, Glycine max
accacagaattcagacttagccttgcaaccctcagagcctgactctatttccgctcgcaacaccacattctcactctccaaccctaggttaactctacatttcatctctaacagttatccatgggcaatgtcagcatacaaacatcacaaacatcatcacaaaaccctaaaacagaatgggtatgtctaactcattaaacatggaagtttcacaagctttaacatgtttcttcacaaataactatcatgaagcagagactagcaagactactcatcatatcttccaaaaccccatacccacgaaatctaagagagaaagaagtccacccaaacctgaaa

SEQ ID NO: 100808 - DNA, 294 bp, Glycine max
  unsure (1)..(294): unsure at all n locations
atcacctgcttcctctatgtccactaaccctcacttattggcgtcgccttcttcatattcccaccgtatgaaacttgatgctccacgctctgatgggaagacccatctggttggatcctctaaataacgtagttctttatataccatgccacaccataccatatatgactcaccattgcctccttctacatagatggacctactntacttatctgcaagtatactagacattatgcttaatgtatgcatgtgtgccagacattaatcatatcccaagtcttcacatttaatggc

SEQ ID NO: 100809 - DNA, 462 bp, Glycine max
  unsure (1)..(462): unsure at all n locations
cctatagaagctagagcttatctacacacaccnnnnnaatagctaagctcaccttcttgagatgagaagctagagcttagctacacaccccntataatagctaagctcacccccatgacaaaataaatgaaaaaacaaaaaaagtccctactacaaagactactcaaaatgcctcaaaatacaaggctaaacccctatactactagaatggccaaaatacaacgcccaaacaaaggataaacatgttctaatatgtacaaagaagagtggatcaaaccttgacccatgggctcataaatctaccctaacgttcatgagaaccgtanggccttctttagtagctctagcccaagcctcttggaatcttctatccaataccctcggcgggtaggattgcatcactaaatgtcatgtacgcccttgttgtatattatttcgggatattgcatactgtgacattct

SEQ ID NO: 100810 - DNA, 419 bp, Glycine max
cctggaagatgcttaatggaggaaagaaataggagagatatatagaggggggagcacgacattgaaggaattaaagacggagagaagcggtacttcgaaagatgtctcacaagactctcattcatcaaagtgtctacaagtgttacacatgcttctatttatagactaggtagcttccttgagaagctttcttgagaaaacttccttgagaagcttctttgagaaaacttccttaagaagctagagcttagctactcacacccctctcataactaagctcacctacttgagaagcctccttaagaagattcgtaaagaagctagagcttagctacacatacctctctaatagctaagctcacctccttgagatgagaagctagagcttaactacacacgccctataatagctaagctca

SEQ ID NO: 100811 - DNA, 461 bp, Glycine max
  unsure (1)..(461): unsure at all n locations
atcttgagtcacctgcggcatgcaagctngcttaagaagattactatagaagctagagcttagctacacatactctcctaatagctaagctcacctccttgagatgagaagctaaaactcagctacacaccccctataatagctaagctcacacccatgacaaaatacatgacaatacaaagaaaaggtcttactacaaagactactcaagatgcccgaaatacaagggtaaaaccctatactactagaatggccaaaatacatggcccagacgaatgataaacctattctaatatttacagagatgaaggggctcatacttagcccatgggctcgaaatctaccctaaggctcatgagaaccctaaggccttccacttggatctgtagcccaatctacttggagtcttatacccaatgcccttgcgggataggatggcatcattccctccaccttggaaa

SEQ ID NO: 100812 - DNA, 341 bp, Glycine max
ctgcagattttacagaagtataaatggaagcatctttattaactacaattgatgtatataagttgcgtctaacatataggagataacgcttaattacaacagggagtggttattcataataacatgacgtggaacgtgggggatggatagaaaattatattcttgaaagacaaatggattaatcatcaggaatgacttgtacaaaggcaccccaagctgtttatattatcctgacagctgaatcacaccattaggcggatgggaattcacaacgacgagggctgggaatggaaaatttgatggagaacactgctttctgactatgaaagtgataccaccat

SEQ ID NO: 100813 - DNA, 370 bp, Glycine max
  unsure (1)..(370): unsure at all n locations
cttcttatcttcagcaaatgaagatgaatgtgtggtcacctcatgtactcctctaaggacattagcatcatttcttgcactgaattgttgggagttggaagccatcttctcaatcaaattcctagcctcaataggagttatatcaccaagagcttcaccactggaagcatcaatcatacccctctccatgttgctaagncccctcgagaaatatagcagaaggagcttgtcatgttagacaagtggccctatatatttaagatagcggagttgaataagataactcaacttttctaattaaatatttatttgattctacccaaacccaagttccttcaaatgaactctataaatatgcaaataatttact

SEQ ID NO: 100814 - DNA, 500 bp, Glycine max
  unsure (1)..(500): unsure at all n locations
agcttcaacctgatcgctaagcgacaacttatccatggctaagcgtgatctattgacgccaagcaaaattccttacggtcataactgaagtccagaagctaagcgccaatcatggtagctaagcgagattcattgcgacaatgtgagcgctaagcgagtgctcatcagctatacacatgctcctctgtacttaagatgcatcattttagctaagcggtctggtcctcacactaagccaagcctatgtataaaaaacaaaagaaaacatatatttcaaaatttggctaagcgcacagtaccgctaagcgaccatcttcgaaaaaccaaacgtcactttgagaaagcataacaacttatgtgagtgtaatggaaattacactcacattngttggatactgctgaacggcctgtgttagacaagtggcctcatatatcttatgaagggcggttgaatataatattcaaactacttccccattaaagactctacgtctaggtac

SEQ ID NO: 100815 - DNA, 432 bp, Glycine max
  unsure (1)..(432): unsure at all n locations
atccttgagtcacctgcggcatgcaagctntgaacaatatacttggccttcatttaactgtctttgggcttggcggtcacgctcaacaaagtactttcgacacctactgtacgttgatttcaccaatgctgttatgggaatgttgcgacaatcctctacaaccttattgatacattctgagaggttcgttgtcatgtggccatattgacgtccttctctatctgaagccatcgntcatctttcttttgagatgcgaacaattcatgttgctatggctggactcagttcacgaaacttttctaaattttgatcaaaaatgtgcttgcaaagagtgtacgctgcatacaattagttatgaataacaatttaacgttaaatgaagttnataaacgcggccatcaatatgagatttacccacttcttcaacatttc

SEQ ID NO: 100816 - DNA, 519 bp, Glycine max
  unsure (1)..(519): unsure at all n locations
tagatggagaagaagacagcgagaaggagaagacagcgcgaatgatgactaaacatacctaggtatggtggcgaaggagaagaagcagagacttgtgatgatgctcgagtgcgacgaacacgatgctcgaccttagacaaaacgatgctcagatggagaacagacagcttcgaggtagatgaagaacaaagagagcaagatagcttagatgaagaagaagacagcgagaaggagaagatagcgcgaaggagacgaaacatacctatgtatggtggcgaatgagaagaagcagagacttgtgacgatgctcgagtgcgacgaacacgatgctcagatgcagacagggaccttcaaggtaaacggagattagaagaagaagagagcgcgaaagcttatatggagaagaagatagtgcgagcttcatagggctcaccatantttttaacatataagttcaacattatgtttttataataaaatcgatggtaagggtaacatcggttctctggaaagaaccga

SEQ ID NO: 100817 - DNA, 200 bp, Glycine max
cgtgtatattgaccgactgtcctaagatgttgaacatggttagtatatatacatttccatttgatacgaccctacctatctcaattaaagggattaccatccgatcttctcactgcctattataccctatcttgtaaagtaacattgagacaaatgagaataataactgctacacaagtggctttgttcatacctaacta

SEQ ID NO: 100818 - DNA, 388 bp, Glycine max
  unsure (1)..(388): unsure at all n locations
actaagctttttacttattatgctaccacaatttcattttattatttatcagcctactttcattgagtcaagctataacaattaattaaggaattataaaatgatagcttatggagttgttttgagtatcttacttttataaactaacaatgctgtataaattcaggagtaaaataatagttngccggccactattaattcttgaatgaaaacaaacaacgcaattgtaaagtctatataaagaagctctatcataagcgaaatatacaagtacaagtgagaagtgtcctttagtttgtgaaagaaacaactacatacaatggccacttcactaaccctattcanaacaacctttgtattctcatcatcttcactctgctcacacacc

SEQ ID NO: 100819 - DNA, 457 bp, Glycine max
  unsure (1)..(457): unsure at all n locations
tcctggtctacgctgtggaacctctgtaaacatgtcatcaaggcggccactctctgtagaattcaacatgttgcgagaccatcattgtctacttcaaagtataaacaagctttgctcacccttctccataatcctcctgatgatcctttagttctggacctcacaattctacatgtgacccattcgcaacaagacattaatgccttgtaagacttttccaacaatggattgctccagcctatagctcctgatttaagttctcaaacctgaaaattctctgctttttcagcgcatccagtgactggtccattatataaacagattgactgtgtatgggttaaaacctaattattgaggctaatggtgtgatccttgatcaatcaatttgcaagaatataaaaggataacctcgctttaagatngtcacaactatttgcttatgaaaccacacactctt

SEQ ID NO: 100820 - DNA, 505 bp, Glycine max
  unsure (1)..(505): unsure at all n locations
cttagagtcacctgccgcatgcaagcttctnttggaccttgaacaagcaatcaattcctctctcagaaccatgctatgtgctcgcgactggtccctttcttcccttcgcaacttgagttcattattgctaccccatagagctccgcgaaatttgctccggccatactcttccttgcgagccctcttggtctctatgtcaagggctctcgcgagaattgcattcttttcccgtaacccggcgcactcctatcgaacgtgtgtagcagtcaactagaacttctccttggcgagttgtgcctttcctaactcgctnttgagagcttggacttcctcgtcctctaccggtgcttcaaaattctcttcgctgacgactttttaactggcgagccaatctaaacctcgtatgcgaacttcagccattcgtggtacccccaatgatgccttacgactgccttagctctgatctttttaacggggttccatgcttatggattttgataacttg

SEQ ID NO: 100821 - DNA, 424 bp, Glycine max
  unsure (1)..(424): unsure at all n locations
tataaaactaagcttattaaaggcttcttcaagaagcttacctgtgccttctntgataagctctctcaagaggcttctttgagaagctagatccttatctacccacacccttctattaactaaattaacctcctagaaaataattatggataaaaataacacaacaaataatcaaacatcaaacataattactaataatatatatatatatatatatatatatatcagggtgttacaaaactccccgtccatactaagattatccgaagtgttgggaattccaatgattgaacttaaggagaaggagatgaataggaatggagttaggagtttcccgaagaaattcatggatgataaggcacgagaatgagcaagcaaaggagagtggatgcatttcatgagtatcttagctctcttagtgtcg

SEQ ID NO: 100822 - DNA, 451 bp, Glycine max
  unsure (1)..(451): unsure at all n locations
ctaagcttcatagaaaggtcgttcctaatatctctacaattgtatcacctctcaatgagctngtgaagaagaatgtgacatttacctatggtgaaaaacaagagcaagcctttgctttgctcaaagaaaagcttactaaagcacctgttctagctcttcctgacttttctaaaactttagagctagaatgtgatgcctctagagtaggagttggagctgtatttgtacaaggtgggcaccctattgcttattttagtgaaaaacttcatagtgccaccctgaactacaccacctatgataaagaactttatgccttaataagagccctccaaacttgggaacattacctcgtttccaaggaatttgtcattcatagtgatcatcaatcacttaagtacattagagggcacagcaagttatacaagacgcatgctacatgggtagagtacct

SEQ ID NO: 100823 - DNA, 227 bp, Glycine max
  unsure (1)..(227): unsure at all n locations
agcttgccacccagctcgaccaggcgagcaagtgtgttttcttcanaagcaacagcctgctggaggaagcttctggagggcccaagtgggcctggttgctatttgcacccacatatttactaagcacacgcgctgcctatttttggtaaagtgacggaaacttacagaatgctacggaacctcactaattgtgcaacgatgcttccatttaatttacggtgtgttac

SEQ ID NO: 100824 - DNA, 437 bp, Glycine max
  unsure (1)..(437): unsure at all n locations
atgcccgagtcattcatccctatgagatgctgttgtattattgtctgatcanaagtgccattccttggattatagggttgaaccaagctcatgcttttataaaaaggttcctcaagtcaagttgaaatatggaagtaaccatcttgcaaaattggggcataagatgaatcgagtcacatcactgcttcgtctactgtcaaacataattaagattggcgatgtccttgttacttccagtttcaccttgacaaagatgtcatggaccatgttgaatatctaaattgattcaaccccatatcctgcgtaataatttgcaatacttcgactgtacatcattcgcatgcagccatgctcttcattgggtgcattgctcgttgcattctttccttgaaaaattaaatacaatgaacttaatcattgtataagatagaaaggga

SEQ ID NO: 100825 - DNA, 344 bp, Glycine max
  unsure (1)..(344): unsure at all n locations
tcgtaactggcacctttgacaactggatgtaaacaatgcttttcttcttggtgatcttaacgaagcggtttatatgaagctccctccaggactgattgtggataatcccaaccttgtgttcgccttcagcgttccttatatgggctcaaacaggcaagtcgccaatggatcacacggctctcgtcatttcttctcttccaaggattccgtcaatcttcagctgatcactcgcttgtcttatactctaataatgataatgaatcacagctattcttggtatgttgcgacatcatcttgacggaatancctccagacttatcacatttaccagcttttgatcaact

SEQ ID NO: 100826 - DNA, 374 bp, Glycine max
attggaccaatactagaattagagctgcttattttcttttcttttaattagtgctgcttataaatcaaattaattagcgctgcttagttccttttgttttaattagtgctactggacaatttgccattgtgtgctattggataattactaacattatacactatgtaacgataacaacttttgctaacatctatgttcagatgtaccatcgattatccacctaagctagattattaccaagaagtactgatgtagagttgtatcaccttgattacgagtttcacatagtagtctctgatatgttgcaagaagaaaatgacaatatggtcgataccgtgataaaatacattactctgagtaatatgttttcttat

SEQ ID NO: 100827 - DNA, 155 bp, Glycine max
agtcacctgcggcttgcagcttgccagaaagagccattttgattgcttccaccataaaagactggaaagcggtttctaatgatctccttgcggcttccacataaggcatagaggatgggcagctcaccaagatgtcttcctcggctgatacgatg

SEQ ID NO: 100828 - DNA, 447 bp, Glycine max
  unsure (1)..(447): unsure at all n locations
agcctctccctactngatggcaatacaagattgtcttctttctttcattttaaccaaccactgctacatctaccatttataaaatcataattaaggtcatgtttccatgctctgaaaagcatttttacctatntattctcctcctcaaagttcttcaacctcaatgcccggttattttctttacctttctgcttttnggccatttaaactaacttctagaagaactttttcacagcaagaccaagattttagagcacatatgagatgagcttttattaattaataatattgtaatagaatacacatttcttgacatgttcttttgtatcgactaaaagtcattagaacttatcaaatatattttctacctaattaattacaaactatatttacaatcttatgatttttgataagcatgattacaagaaagatcgcttgaaatgatat

SEQ ID NO: 100829 - DNA, 463 bp, Glycine max
  unsure (1)..(463): unsure at all n locations
tatattatggggggacttatgagcttagaaattatgtttatctataacaaatgggactcggacttgattggttattgttaggctatgatgtaaggttaatttaccactcgtgatgatagaccttttttttgtgatttcgtgatgatactcacgcttctattgatgctctgatggcattttacaccatctagagtttttaattgaagagtggacgctagattcagtacatcttgttcgcatgcacttgtgtgcttgaaaatcaagatcgatttataaaaatgctcaagagagtatgtctcctggaatgacatatgacttggatgtctatatatagttgatgaaatgtggttattactcttggaatangacatcttgttagaatcgcaatcacatactgcttgattatgctgtaaactatattttaggtaggatgtgttactgtaatataaacccgcctgtacat

SEQ ID NO: 100830 - DNA, 154 bp, Glycine max
  unsure (1)..(154): unsure at all n locations
ctactctaactaacaactatgacagctaacacagttataactactctaactgaaatgagagagaaggctaatatccccccttaagatggggaatgaatgtcattcatacccagctttggaatagataanatgaaacgcaccaggagctaaaact

SEQ ID NO: 100831 - DNA, 371 bp, Glycine max
  unsure (1)..(371): unsure at all n locations
gatgtgagatgtttggtttttaccattgaacaactcatatggagatgtttttaaaatgggtcttattaagccctacttaaaatgtagcatgcagcgttaaccgcttcagcccataagtgttttggaagaggagtatcatntaataaagttctagcaatctcttccaaagatctattttttctttcaacaacaccattttgttgaggagttcttggtgcagaacaattatgctcaataccatgcttatcacaaaataattcagattctttattttcaaactcacccccatgatcactcctaatagatataatcctgagattgttcttattttgaatgatttttgcaagttgtcttaatgctcgaaatgcatc

SEQ ID NO: 100832 - DNA, 378 bp, Glycine max
gtttatcctcctgggaaaatccatgccttggctttataatatcgacattttattctcatatagggtttttcagacataaacaagccaaatggagagtatgttttgccaaatgaccgcatggctgttatgacctttgtatcctccttcctatcagaaggtgtgcctgtgtttattgtatactgatttcatcaattattgaggttttctgattccaaattattggttttctcctagatgtgggttgccggactgttttatatgcatttttcattataaaggtgcttttgtgattaataatgatgaatgatattgacagaattggggcatttggtaggtcactgaaaatattttgaagcgagttttcggattaacacatgt

SEQ ID NO: 100833 - DNA, 477 bp, Glycine max
  unsure (1)..(477): unsure at all n locations
agctgaagtattatcaccctgcagtacatcattgatttccttgtctacacctangaccatcttcttcagataattccacatccttttttccccaatccaaattaacctttgcaatgtgcataatggagccacaatttgattccacaccaaaaacactttctttcaagcattcttgatattcatcagccaagtggagatttaactctccaagttcactgtgtactgtagtccccatatttgaaatgttgttagcaaacagatgtgatgattgtgagcaaccctaaatntgtaaagcattaaaacaaatgtcaacttatttatacaactaatttaaatcaacttacgaaaaaaaagcaaaacaaggataactacatctgaaacaacagaactcgagagttatcaacattggaggtataatgacatggtagacaggaatttaaatttcataaaatgcaaaacacaccactaatatagtaa

SEQ ID NO: 100834 - DNA, 348 bp, Glycine max
gccattcctatatggtcaagatttccaccaacccaacaatggcattactcaaccaataacaacccatctcctttcccaccacccaattatccattaaggccatccctatatcaaaccacaatacccacctaccaatgctaaacaccacctttatcacacaccaaaacacccgccaagatatgagttttgtagtgaaaaaaaacctgtaggattcacccatattacggtgtcctatactgacttgctcccatatccactcgataatgcaatggtagccataaccctagccgaggtttatcaacctccatttttcaagaataaactcaaacgcacgtgtgcttgcatgga

SEQ ID NO: 100835 - DNA, 383 bp, Glycine max
  unsure (1)..(383): unsure at all n locations
ataagacagcatcttcatgagcattctggttgctgaactcttgatgggtataattacccatttttttctttaagtctcgactcaaatcaatagatagttcatcactatctaaagcatngctacaagagggagaagttctgcttctcatatgactttctcttcttgacatcaccatttctctaacctcatattcatgaaccttttttctatatatttcaacctccttttctagctcaagtttctctttctccctctttaccataaggtcattcaaaagctgcaaagcttcctggtcatactcagaatgttcttccatcattctctcatactgcaaagcttccatctgcattgctgctntctcttcctgaagccctattatcact

SEQ ID NO: 100836 - DNA, 479 bp, Glycine max
  unsure (1)..(479): unsure at all n locations
tactcgctaagcgcgacacgccggcttagtgagttcatacgaactataatattaaaactngaaatttaaatgctcgctaagtcgtagtgcaatggcttagcgagttcatacaaatatgcataaatntaaataagaatgatgaactcgcttagcgggatagggcccgcttaacgtgttcatcagaaaacccagaaattcatccaaaacggatgaactcacttcgcgagtgcatcagatttctagaaaattggggcttcgaagcctcaactccctagccacttttcaagcataggaagcctgaggttcaaccctacaattaacctaaattacatactaaacaaaaaccctaacatgctaactaaacaactaatttcaaagccaaaacaacatcaacaaaaccaaatcacagagaaactagcatggcttctaccctagggttaaaaaaaatattcaaaaatgacaagagattaaagaactta

SEQ ID NO: 100837 - DNA, 402 bp, Glycine max
  unsure (1)..(402): unsure at all n locations
tccaattttaagatagagtaccttattagaaacaaatcccacgtaacaaaagactttntatggtttcgttgcattgttctactctttttagaccaaacaaagacttgaaattcaaaaaatgcaggagtaccttatccagcaatnttttggaggatcatggatgttggaaaagaaaccacctacagggtttaaatacaacanaaattgtatttgtatgtactatacatttgtataattatatgacaaaaggagtgttgtcttttttaaagaagaaaatgactgatgttatcaagaacgatagaaaaaataataatagagtaagatgtattatatcaataatataactctttatataaattagataaatatagaatttcatatgcttttatgtcacccttcatc

SEQ ID NO: 100838 - DNA, 340 bp, Glycine max
  unsure (1)..(340): unsure at all n locations
ctaagcttggttatggcggaataagtcccaactgaccccattgtatacttttctgcgcngagtcatcaccagattcattagattcccatcaaactgttaggtgtgacctccaccacatgactcccttctacaacatctttcaaaatccaccttgtttacgcacaacccatactaggacacatacattagaatgttctatcaacctatatcattcaacatgtcagtctcatcacagcataaacacagctgaataaaaaatttactctctacggctcctacagcacacaatcaatgctttgctctctaaataatactcaacacttcaattaataataacaca

SEQ ID NO: 100839 - DNA, 372 bp, Glycine max
ggagtatgacagtcaccgctttatgagcgctgtacaccagcagcgcttcgaggccatcaagggatggtcgtttctccgggagcgacgcgtccagctcagggacgacgagtatactgatttccaggaggaaatagggcgccggcggtgggcatcactggttactcccatggccaagttcgatccagaaatagtccttgagttttatgccaatgcttggccaacagaggagggcgtacgtgacatgagatcctgtgtaaggggtcagtgaatcccgtttgatgccgacgctatcagccaactcttaagatatccattggtgttggaagagggccaggaatgtgagtatggccagaggaggaaccggtctgatgg

SEQ ID NO: 100840 - DNA, 388 bp, Glycine max
  unsure (1)..(388): unsure at all n locations
actgttcctagcctttctctacaagagatttctatttaactctattcgngngcccactgagggtatcactacttcccctcgagtgaggtagacctgtttgtcttatgatctgtagaaattcacaaggatttacttgctaaatgtaggttggggatatcaatggagtaaaagtattgcagcatgatctcttcaccaatgatgtcctttacactgaaatagtattcaacatgaaatcattgaagcaagagcttcttccattggtgccactgttttgggcactatacatcttctggaacatgttctacactatgtttccattcatctctaattcctaatatttacttgcgaagttaatttatttcttggaaaccaaattcaattagtagac

SEQ ID NO: 100841 - DNA, 365 bp, Glycine max
ctagcatcaagacaagacaatgtgcaacacatggagtacaaaatacttttcggtatcgtgacttggaagatgtactctataagaccaaatcaataaactagtgtgaatactgaacagttgatagttatgactacaaagaacaactgtcttgagtatgattgaattctcacgcgccaacacataattacttccattgtccgtcaccacttgaatgacattcttttctccaatctcctcaacaacactatccaaaagctcatagatcttctgaccagtcttcatgtatacagaagcatccacgctcctcacaaattgtgtttccaacgaacaatataccatagagaaatcaaagtctattcttctat

SEQ ID NO: 100842 - DNA, 479 bp, Glycine max
  unsure (1)..(479): unsure at all n locations
gaccatananactcagctttacacttgagccacaatctttcctaagtgtgagtccatccatataatagtctaccccttgagcaaaagtcattatcatccatgagtattccacgatggccattagagctcacatgctctagatattgcatcgccgctccacccatgggacatgctgcctggaccttcctctaagaagactntcaatacaagggatctccaccatcatcatcttactcgtcggagccggacaccaagttgaaccatcggctttgataccaattgatggaacctaaattgcaaatctaatttttagcatcaacaaactatgggacctatntgagactctctgaaattggagaaaataataacgaaaaaacaaaatttgaaaaggatatgtgaataacaatgccacaatcttagaagattgataagtcgaggatgattcgccacaaagaatagaactatttgataagaaccta

SEQ ID NO: 100843 - DNA, 384 bp, Glycine max
  unsure (1)..(384): unsure at all n locations
ctatgctaagggtcatgggggtnntgtgatagtaaataaatgttaaaatatgtttttcgtcctaaaaaatatgtaaatgttcagaatttgtccctgtaaaattttcagtacgtttttcctcctcacaaaattgaaatgtgttgctttttggtttggagcaaggtttgaacatttgaacctgcatgcatgactttttttacatcggttatatgcataattgatgtaaaaagcatcatattttacatcagttatatgtataaccgatgtaaaaaagtgatcattataggtttagatttactagaacctatgtttggaccaaaaaatgatacattntaattntatgaagataaaaaacatattaaaaattttggaggaaatgaattc

SEQ ID NO: 100844 - DNA, 452 bp, Glycine max
  unsure (1)..(452): unsure at all n locations
ctcagctatgggttcattgatcttgtctcgagagaacatacttttatgcgcctgcaactctntggagagatcttcaaggaatataaaatgtggcatggagaggacgaagtaagcagcattgggtaactctgagcatcgcgacaacacgtctgccaccacattcaccttacctgtccgatattggatagagtagtcgaatcctaacaatcgtgccagataacagtgccgctccggcgtttgcacggcttgattcatcagctccttcaagcttctatgatcagtcaaaattataaaatggtgccctaaaagatactgtctccattttttaatagtagtggtgattgcagcgagttcacgaacataagtagaagaaaagagtaacctgggacaccattgcttgccacanaaggctatcgngtgtcctccttggngatatactgcacccatacccg

SEQ ID NO: 100845 - DNA, 226 bp, Glycine max
ccaagggtacaaaagtgcgcttgggaaaaaccgttttctatcttgttaaagaagcagcttatagaagagtccttttttatttaaactacttttaataattttccttacataagtttttatatgtctgtttaatgatatgggactatattccgccaaaaatgtattgaaatcatttatactattgatcgaatttaatcaaactaaaatgcttttttataattctatg

SEQ ID NO: 100846 - DNA, 474 bp, Glycine max
  unsure (1)..(474): unsure at all n locations
tagctaaataaattctgatcatgtaacctttgtatcatctataatccactgaagaaagttaagattctctgtgtnttgactgatgaataacagaaaagggtgcactagaaaaagaacaaaaacttatgctggggcatataacaacatcttgatcagtcacagaatctttaattgacactgaaatttaattcccttaatcccttttgttaatctcaatcaatgggtgtaataggagctacagtgcaaatcaaaccattctatgaacaatctcaggctgtgtgatacatcaacgccaaagcggtgcagatgtgctccaaatttatatcctgcagcaacgtgtgttggttgaaatctttgtccctaaacctgtcaaaacaaatagggcttgtttatgaaanaattctatactactcacttaatctctcatncaaagtatacttatgtnttanaaattatnttcanaacaagtgtatt

SEQ ID NO: 100847 - DNA, 368 bp, Glycine max
  unsure (1)..(368): unsure at all n locations
ctaactcttttcttcctctattggctttagttgaatacaaccttgtttggttctctatttgggtcttaaccctctcatgcaacttctttacaaattctgacctagattccccttctttatgtataaaagaagtgtccagtgggaggggaatgaggtctaatggtgttaggggattgaacccatagacaacctcaaaaaggggactgcttggtggttctatgaacccnccctgttgtaggcaaattctatatgaggaagatactcatcctaagacttatggntgcctttcagaagagccctntaaagggtggataaagacctatntcactacctttgtttgcccatcagttatggatgacaagtggaag

SEQ ID NO: 100848 - DNA, 470 bp, Glycine max
  unsure (1)..(470): unsure at all n locations
tgtataactgcagtaaaacatctggcagtgtatatatattttaatctcatcgtccagtcggtgttgtaggttgcagtgagcaatctttgattcaagctgggctagttgttcttcctcccaagaaaacaatgctctcctgcagtcccagttccaattccaaactctgttntgatttcatccagaccataaagtatctgtatctgttgagatactgaacaatctagcaaacatattcttcaatatcactatatctatccatttctggttgcagaattttgttgacaaaactacctagtcttgggcaccacagccttaaattcgcagctccttaccttaagtaaaatccacacttaccactcgtgtcctgggaagttcaaaagatcatacacatgaagacattctaaattagtgttacctttgagctgccatattcaatatcatcccaactctcgaagctatttgtgcatgtc

SEQ ID NO: 100849 - DNA, 165 bp, Glycine max
gactaatatgatgtcatgatgaaaaatgcgtttgagagaaaaagagaacacaacaataatggtgaaaatatattagaagacatatgatacaaatgataaaatcttataggaagtgtgaacttaataagaggaacatgctatgttcacataaatggaaaataacaa

SEQ ID NO: 100850 - DNA, 298 bp, Glycine max
  unsure (1)..(298): unsure at all n locations
ttttcaatgaatatattcaattgaacaggctcgctgacccatgggtgggagtctttcagagtaaaccatggaaacggtctaaagtttcacttaatgattcatcatggaattggtggaatgaagagatctccacctttccctcagcggttntggactctgcaaaatatttcttcanaaacttctccaccacctcttcctatgtcccataagttattcctttgaacgagtgcagtcatctttttgcttcaccggccaaggagaaagaaaaacaggtgaggcttgaggcggatgacatctt

SEQ ID NO: 100851 - DNA, 230 bp, Glycine max
aagaatggaggagcaatggaggcctttgggggagaagagggaaggaacaaagtcaaatgaagagggggcaaatatggattatcatataattaaattaaattttattttacctttctaaagaaactaacataagacgaacactcgtatgaacaaaagggctcaaagtaatgtgataatatcgagggataacaagtgtaatatgtataaacttcacggggatcaatgtaatt

SEQ ID NO: 100852 - DNA, 450 bp, Glycine max
  unsure (1)..(450): unsure at all n locations
tcaagagattactttttttgatatgtattaanaagtggtgtcaaaaactgagtagcacatgaatctttctcaaaaccttttaccaaagaaggtttactctctggtaatcgatttccagtagcaaaattggtttgaaaaagctttcaactgaatttacaacgctccaattgatttcaaaatgttgtaattgattacaatattttggtaatcgattactagtgtgtttgaacgttgaaattcacattcaaatgtgaagagtcacatcctttcacaaaagatctttgtgtaatcaattacactgatttggcaatcgattaccagtgatagtttctgaccaaatcataagatgtaacctcttcaagtagttttggctntctcanaatggttataaggttttctaaaggtcataactcttctaatggttctcttgaccagacatggagaggctat

SEQ ID NO: 100853 - DNA, 404 bp, Glycine max
  unsure (1)..(404): unsure at all n locations
atgcacccatgcacaatcaaagcactttcgttacctacattatttggatggacttccaaggtgtactacctacaccacatgcatttccttggctaaatatacatacatgcatgctcaaaacctcttggctaccaaaagttgcacacatgcaaaccttatgatgaatcttggctatctacacaataaggtgctacatttcatgctttattcaagtgtttttactacctaaagccgcatgcaaattcaagtatattttcttttgccgactaaaattgtattcaaattaaaaggtgtttttgtaagggtatttctttacataacatgcaacatatttatatatttttgggagacattttgactaccanaaattatatgtacatacatccaagtatttaactaccaca

SEQ ID NO: 100854 - DNA, 273 bp, Glycine max
  unsure (1)..(273): unsure at all n locations
tgtgtaacacttatttgtaactttgatgaatgaaagtcttatgagatacacttcanagntccacttctttccttcttttattccttcaatttcgtgctccccccttctatctttcttttcctccattgaagcatcctcttcaagcttcttatccaaggctcatcttggtggtgaagctccttcttccatggcttattccttaatggatggcgccttctctcacctctnttcctttgtcttctgctgcatctccatggtgaaaaatcaccattg

SEQ ID NO: 100855 - DNA, 421 bp, Glycine max
  unsure (1)..(421): unsure at all n locations
atgatccttccagccacagaatccataccagttggagggaacaatccaatcttagatgggccaagtgatgtgtcaatattttcctctatttcttaaccctttttggcacccttttaattactgaataagcctacttgtcaaattaattatgcagttttatcatttgggcctacttgactaattntgtgtttttaatttaattntaggagaattataagcaattgggcttgaattcggaattgggcttggacttgaagagaatagataattntattttatcaaatcttatcttatccagattntatttcatctagaatttatttcgtccagaatttatttcatccaatcttatcttatcttggccagatnttattntattntgtttatgggctcggactagaaacagatttgtaagctttgg

SEQ ID NO: 100856 - DNA, 377 bp, Glycine max
  unsure (1)..(377): unsure at all n locations
tgcaatgctcgagagtttaccactagatattagnttttttttctttctatttttaagttcaacactaaaaaaagatcaattntaaaatttgtaaaatgttatactagatatgtgtacaatntgaattatttatagcagatttaataatctattaatttctatgctgaacttctgagcgggtaattcttttttttttaatctttgcctcgcagatgcctttcagcctgtttggcttatntatcccaatgtcaacatgtgtttgggagattgaatntacttatgtgtttctcttcaatcatacaaccttttagtttcactctatttcttatattctttacctttttctacccgtntcttctcactgaaatttcttcctc

SEQ ID NO: 100857 - DNA, 390 bp, Glycine max
ctcgagactatgatcattgaggagctgttagttactaataggggacaatgagattaacaatatgccctattgcacgtctaatatagatttgagaaacatttaaaccaaggtaacgactgctttcatgggcggatttgctagaataaatataatgagaatattgttgtagtaaatgatgcggataaggatattgacattgatccacaagacgcacagcaaactcttgaaatagcaaaagctaatttgaataacgcggaaggcgagagacaaacaattgaggcaaatctagctcttagacgagctatgacacgagtagaggctatcaatgttatttcataacaagttgatgtgtccgaatatctgaataattaataaatgggaaatgaaaca

SEQ ID NO: 100858 - DNA, 238 bp, Glycine max
  unsure (1)..(238): unsure at all n locations
gtcagtgagaacctgtgatgtacctaaacaggcgagctccttgcngtcaacagataanaggaacaaagaccacacagcaaggaggcttgtggtggctggccaactgtgaactttgattgatatgtgggttatggcctctgngtaatcgataccaagggtgggtaatcgattacaaggcttaaaaatgaagacaggaggctaagatggtctctagtaatcgattaccacgggatgtaat

SEQ ID NO: 100859 - DNA, 353 bp, Glycine max
tcaactcttattctattaattcttctaaagcaacacatttttccccttatcttctaaagctggatcaattttctcacatgcatccatcatttcggctggagatagttggctgaatcaactgaacaaatgattttttttgttgtgactagcagatgcttgttgaaagtatgatccaatgcaaaaactactagacttattggattctctccttgcctcctagctttcagatctgaaatatcacaaatcacactagaatgagggttgaacagtgttaataaaatacaataacttttttgtaaatgaataatttatgacaagttcaaaaagatatatgcatcggagttgtccactga

SEQ ID NO: 100860 - DNA, 392 bp, Glycine max
  unsure (1)..(392): unsure at all n locations
actctttataccccctggtgacgtgcttaagccattttacttaagtcgtttctcgcttaacttaaaaataaaataaatttccaccgaacgtttgaattgtattatccattagcttcggttaaaataaattccgaccgttcggtcatgccgtaaccacgttggaaatcaaaaagagggtaaaaataatataataatcaaaaagacatcttttagtaaaataaagcggaaaatcaatcggacgttttctctttgggatttctcattcttaaccgaattgattaataactaaagtgaaactaaggctaacatcaactcgcctagtcaagctcgtccacaaaaataagctnttgaagtttgtcatttcaatttctcactaagtaaaatggatcatt

SEQ ID NO: 100861 - DNA, 460 bp, Glycine max
  unsure (1)..(460): unsure at all n locations
cctaatttctctacantgcatcttctcttttgagctggngaagaagaatgtggcatttacctgnggtgaaaaacaagagcaagcctttgcttttgtcaaagaaaagcttactaagacacctgttctagctcttcctgacttttctaaaacttttgagctagaatgcgatgcctttggagtgggagttggagctgtattgttacaaggtgggcaccctatttcttattttagtgaaaaacttcatagtgtcaccctcaactaccccacctatgataaagagctttatgccttaataagagccctccaaacttggaaacattaccttgtttccaagggaattgtcattcatagtgatcatcaatcactttagtacattagaggacaaagcangttaaacaaaaggcatgcaaaatgggtagagtaccaagagccaatttcatatngtatcanatacaaaaag

SEQ ID NO: 100862 - DNA, 337 bp, Glycine max
  unsure (1)..(337): unsure at all n locations
aaactcataccaaaactaaatttggcacacttaccaattatgccttaatcaaatattcacaacccaatggttaaaaggtgaaaacattaagaccaccaacgcattccttcataccangcttctttttcttctgaaacgccgtcgcataacaagtcctcgtatgagagccaaaaggtaaggctgccgacgccacaaaagaatttggagtattcacaagcggtgtttcatgagtcgaagaaaacctatatcgtggcgtcgagcgccggaagatccaacaccaaaaaggtagaggtgtgtggcacatggaagctcgcgaaaatctccccatagtcctcaa

SEQ ID NO: 100863 - DNA, 425 bp, Glycine max
  unsure (1)..(425): unsure at all n locations
tgatgagtctaatgttatttctccaagaaaggatgttttagatgatattgcagaatctttagaacaaatgcacattcatggacaagattctaaaggaaaaggagaaggaagcaataaagatcctccagtagaagtcaaagcaaataatgatcttccaaaagagtggaaagcttcaagagatcatccccttgacaacattcttggtgacatctcaaaaggggtaacaactagacattatctcanagatttatgcaataaacatnggctttgtatctatgattgaacctaaaaatntaaatgacaccataatagatgaaaattggataatagctatgcaggaagaactaaaccaatttgaaagaaataatgtttgggagttagttgagaaacctgaaaactacccaatcatcgtgacaaaatgggtg

SEQ ID NO: 100864 - DNA, 398 bp, Glycine max
  unsure (1)..(398): unsure at all n locations
taagaatgagaaatcccaaagagaaaatgtccggttgattttcagctttattttactaaaaggtatatttttggtattatattattattttatcntcttttgatttccaacgtggttacggcacgaccgaacggtcggaatttattttaaccaaagtttacggatcatacaattcatacgttcggtggaaatntattttatttttaagttaagcgagaaatgacttaagtaaaatggcttaagcacgtcaacagggggtataaaaagtaaatgaaatgagaataaaaatacacgaaacacaatgtggaccaccacgggtacatagaatgaatcgaaaagcttggttcaaggtacttacccgttgaagatcgaagaacgatgaagaacgaatgaagaac

SEQ ID NO: 100865 - DNA, 443 bp, Glycine max
  unsure (1)..(443): unsure at all n locations
acacttaaaactaagcttcaatagtcatcgttattctcgggcgaagattttttatctttgggtcgaagcggcttcttataccaatgtcacgaggagtgtgatggtcagattcataaagaaggaactgatttgtcgatacgaactccctaggaagatcattactgataatggcaccaatctgaataacaaaatgatgcacgaaatgtgcggngatttcaagatccagtatcataactccaccccctatcggccaaagattaacggggctgtggaggctgcaaataaaaatattaagaagattattcagaagatgacggtgtcatataaagattggcatgagatgttgccttttgccctgcatggatatcgaacctcgatacgaacttctattggngcaacgccgtattccttggtttatgggatggaatcgatacttccatttg

SEQ ID NO: 100866 - DNA, 370 bp, Glycine max
  unsure (1)..(370): unsure at all n locations
tctttgagaagctgtctcaagaggcttctatgagaagctagatccttatctatccacacccctcttttaactaaattaacctccttaaaaataattacggatgaaaataacgcaacaaataatcaaacatcaaagaaaattactaataatatatatatatatattagggtgttacaggttgtttgtttatcactattcctgagatagaatttcatagccgaaataaatgataataaggaaacttgaaagaattttgtttgactaataaacatgtggattataccaagatcacctaatnttaccatgaagttaatttatatcgacaaggaggtcaagttcactatatttttttaatattgtatatccattg

SEQ ID NO: 100867 - DNA, 391 bp, Glycine max
  unsure (1)..(391): unsure at all n locations
tgtagatgggttngtagctacctcattgctctcctctaatgactatggcatcatttctggcactaaactgctgggaagtggaggccatcttctcaattaaatttctggcttcaacaagagtcatgtctccaagggctccaccactggcagcatctatcatacttctctctatattactgagtccttcataaaaatattggagaagaagctgttctgaaatctgatggtgggggcaactggcacatagtttcttaaatctctcccagtactcatacaggctctctccactgagttgtctaatacctgagatatccttcctgatggttgtggtcctggaagcagggaaaaaattttctaagaatactctcttaaggtcatcccagctcgtgat

SEQ ID NO: 100868 - DNA, 453 bp, Glycine max
  unsure (1)..(453): unsure at all n locations
tatctcttacatgcccaactncctttgagtttattggtattggcnganatatngaatggtgcatcttagtccttatcatatcttttgtgcatcatgcatcataatgagtaaataagaagaaaaatttctaagtgagaaaagtttcttcagaaggcaaaactctctgttttaatcgattacaaccttatcgtaatcgattacacaagttgtccgaagcttgcagagttatgtctcgtatcggtttaatctattacaattttatcttaatcaattgcatagttgtttttgagatagtgactgatttattcacgagtctttgttttaattgattaccatgtgacataattgattacttctctctctataggtgtttagaagtgaataagacactctaatcaatactttgagatctaatcgttacatgttcttgagaaaacactctaatgattaaaa

SEQ ID NO: 100869 - DNA, 375 bp, Glycine max
  unsure (1)..(375): unsure at all n locations
aacatttttctcttcatctcatctaatttaataaaaaaacatccccttatttctctcctaaatagacagaanacaggtgagaggtagtgtacataaattatataaaatggcacagatatacaatacaatcgttggcacaagagacctctagatcttcactttacaaagtgcaagaaaaacattcaaacaacttcatgggctgcctccaccactgcacaagctaaccaagtcgatcagtgttgcgtataacaaatcaagagacaagtgacctaggaatttcctatattcggatgcaccatccgtgatgctcatatgaaggctttgctcctctgcanaactggcctccatgaccaaccaccaagatatacacccttc

SEQ ID NO: 100870 - DNA, 459 bp, Glycine max
  unsure (1)..(459): unsure at all n locations
tcatatggaactacatcatntcctctctaagaattttaatttagatganagaaaggccgaaagaaatttcattccttgactttgagacagtaattataatttatagtctagactctagactctagactttgatttaccatttccatctaaatatgcttaaatcttctaagtaccacataatgaacttgatacttaaccttggtcagccaaaagcaggactagaactntgagtgaccaaaaaacagaatgaacatacaaaactttaaggaaacaaacataaattcaatgaatataggtaaaatgtgcggngaatattntaaacttcacaatctctagggaagccaactttctttgcccttcccttttccacttcctcccaaccaccgaaaaataagaaaacaaaaacgagccgcaagttaagtcactcttgatcattgtattatgacttacgactatata

SEQ ID NO: 100871 - DNA, 222 bp, Glycine max
taacaaaaaccatgaactcgcatgcaaccacgctagtgtataggactcaaaatcaagaaaaacgaggcagcaagcattcgaaagtctcccgcacactcacgcttgtgaatcataccgacataaatagatcatatgtaacatgcaatccaagcataatcataaacatgcaattctagactatgtaatttaccaaacaatagtgcttaacgagaggattgagag

SEQ ID NO: 100872 - DNA, 434 bp, Glycine max
  unsure (1)..(434): unsure at all n locations
cccatcacatgtggtactatgtggcggtcgggcgttgttgcacaacaagtnttccatatccagcagagcgcgcataaacccaccatcctctgttgcccaccttcaactgagctcacgtactcccacgtagcccatatcctcgtttctctcaccaccgggtccccatcaatcctcccaagctttcccaacatccaagtaatacaacattcagacaacacaaattatcatagccaagcaaaacagggcaaaggcagaaaactctgcccaaaacaccaaccaaaatcacagctnttctcacttaaagaccccagtaataattccttcgttccaattcgttaaccgctggatcgactcgaaaattttactggaagtctctagtacttaagcctacattgtgaccgttgggatctactagtaacatccagaactcattc

SEQ ID NO: 100873 - DNA, 379 bp, Glycine max
gcacagaccttgcgctgagcgctcagtcttcatgtgctaagccaagcttgctcgtgctaagcgcacagacccctaattagttgactaaatagttcagctaagcgcacatcactatgctaagccccacatcttcacggtgattgaaccttaaccagtgggcttagcatggatgatgcgctaagcgccacttcttctttggaaaatattattatagcagcgctaagcgcgctatcctacgctaagccctagatccattttgtaaatgagtgtttaagctgggcttatcgggacaagaagcgctaagtgccaatcttctacaagtattgaattcatggaagtgcgcttagcgcgcctgttgcgtgtagcctgaactactctc

SEQ ID NO: 100874 - DNA, 275 bp, Glycine max
ataatagcaaaataaaacaaaaccaaagaagtaacaaccaaaatagcttcttattcctgcgggacaccagaaggcgagaatggcttcagcaatgctgatcatcatcagaacattcctaggtgagttacgcatagatgacaaattctgatcctcaggaggagaggatgcatcactgttcgcaattccagaggtggaagaaacagtattgttggtgatggagtatgctgctgacatatatgcaaggtctttctttccttgcaggagcatctttcgcg

SEQ ID NO: 100875 - DNA, 379 bp, Glycine max
  unsure (1)..(379): unsure at all n locations
tttttgttttataagaaaaaaaaaggcggtccctgagatagttggngcaatggccaacgaaatggcactagtactttcaaggttaatatacaccacttgatccttaaatgacataactaattgctctgccattatcttcaaatgatcaatgacactgttcatggcgtagtatatatgagaatctcgcattaaaaaattctatttgagattcttggaggatgggaaatttctgccacacaattagtaacattgcttctttttttgttctgtcggtactaacaatgctcttgtgggttgtgcatgtgaggagactctcttaccaagaattagatatccttagataacgctgggaaaatgcagttgatgaggataaatgttg

SEQ ID NO: 100876 - DNA, 337 bp, Glycine max
  unsure (1)..(337): unsure at all n locations
tacttctcttcctcttttaactcttcaatttcgtgcttccccctctctctttctctctctctttcttttcctccattgaagcatcctctccaagcttcttatccaaggcacattcttggtggcgaagctctttcttccatggcttattccctagtggatggcgcctcctctcaccttttctcctttgtcttccgctacatctccatggtggaaaatcaccattgaaggacctcattgaagctcanagatccagcctccatagaagctccacaagcaagcttccatcatatgtcatctaaattnttctaaattccacgttnttaatctggagaaaata

SEQ ID NO: 100877 - DNA, 442 bp, Glycine max
  unsure (1)..(442): unsure at all n locations
gcttctcctctttcctataatagggagttgtttgaaaacanaaacgtttgacccttctggtatctgaggatcacttgaaattagtgaaaaaaaaaatcatntttgtgaagaaaatccacgccgaggtgcttccgtaacgagtccgaaacgtttccgtgggtgattctgtgaagatttttcgccgtctttcgttcgttcttcgtagctcttcaatcttcaaccggtaagttcccaaaatcgaactttttaattcattctatgtacccttggtggtccccacttgtttcgcgtacttttattttcatttcatttactttacgtacccccttttgacgtgctttagtcatttatttaagtcattttcttgcctaatcaaaaaataaaataaatttccaccgatcatttgaatggaatatctgtaatttctgtaaaatgaaatctg

SEQ ID NO: 100878 - DNA, 377 bp, Glycine max
  unsure (1)..(377): unsure at all n locations
agtatgacagtcaccgctttaggagtgctgtacaccancagcgcttcgaggccatcaagggatggtcgtttctccgggagcgacgcgtccagctcatggacgatgagtatactgatttccaggaggaaatatggcgccggcggtgggcaccactggttactcctatggccaagtttgatccagaaatagtccttgagttttatgccaatgcttggccaacagaggagggcgtgcgtgacatgagatcctgggtaaggggtcagtggatcccgtttgatgccgatgctatcggccaactcctaagatatnccgtggtgttggaagaaggccacgaatgtgagtatggccacaggaggaaccggtctgatgggttcgat

SEQ ID NO: 100879 - DNA, 128 bp, Glycine max
atataatatattttttttctcacccgtataacctatataattgtaattccgaaatatgtcatcttatttatttttacaacgaattttggtcatttctctctacatacttcaggtgcagaaattgcaat

SEQ ID NO: 100880 - DNA, 422 bp, Glycine max
  unsure (1)..(422): unsure at all n locations
atgacgagagtcaaagtataggattagtccaaatggacaccaaaatgagcttaggatcacacatgctcccccatgcaagctagtatagtaatcctttcaataccaaaagactctaaaatagccaagccgaaaagaagtgtacgaacagcacaaatgtaaactatattattgaagcacanttttaaagcataaagacaccgccagcacttcctaggtacgtagctatatattgtgataacacaagtcacacaagatatataatatcttaccaactattttctatttgagtcaaaacaaggaaacatagagtaaagtctgagcattatatagttttataaaaagtctaatggtcaacctattatcaaagctgtaatcttgtccctttatgttgtcctccaaggttccaacaacaacaccacagt

SEQ ID NO: 100881 - DNA, 357 bp, Glycine max
  unsure (1)..(357): unsure at all n locations
tgttagttgaagtaatcctgaaagccacccttgttgaatattctttggtatcatcaaaagcatgtattcatacattctcaactatttttgaagttacggaaaaaggcttgaaataaaactttaccacgaatggtagaaaacgagtnttggctcaatttctaccttgccgcgtaaagtagcactcaaatagattttttggaaaggaagaatttcaaatcttttttaactatgtaaaaattggaaacctctctgtcttgttgccttgtggaattgtaaggattttttctcatcaattgcgtttccatgctagaaagctacgaaaattaactttaatctgtgtaaagagttctttgagct

SEQ ID NO: 100882 - DNA, 386 bp, Glycine max
  unsure (1)..(386): unsure at all n locations
tctttgagtgacatttgtattgggtggtatcttgattgatgcatcttaatacaatttgtatctgctttgcatcctgcatcatcatggttagtatcaagaaaagtttcttatgtaaaaaaatttcttcaaaagtaaaactctctattttaatcgattacagaagtgtcgtaatcgattacaacacgctgtttgaagcttaaaaagttaagtctcatatcggtttaatcgattaccatagtattttaattgatttcactgttgttagaccatgactgatctttttcaggagtctcaactttaatcaattaccangtggattaaatcgatacttctctctcgttcagtgttcaaggtgaactagaacacttatcgatatattgtctgag

SEQ ID NO: 100883 - DNA, 442 bp, Glycine max
  unsure (1)..(442): unsure at all n locations
tctgagctntggtgcttctttttctggcttctaggaatcccatctagctggacatcatatggaatataatctctgttttccaccacatccaatagttctatatgaatcgatttgaaatgggctatcatattttccttccaatagtcatagtttatccctttgaatagaggtgatttgttggtggcaaatccttcttccatatctntgatatataggatcttttccttagtattgtcaaatactcaacccttaaggtcaagctctaataccaattgaaactacaagaaacacactaagggggtgggggggttgaatagtgtgtatatcaaagatataaactttttagtgatataaaagataatattgtgttaaaaattggtcatctactaaggataaaaaaatatatagtgaagaacagtatgatcgtctagtgacagataaa

SEQ ID NO: 100884 - DNA, 444 bp, Glycine max
  unsure (1)..(444): unsure at all n locations
agcttttactagaagagttccaccaatctccnattggtggtcttatgggagngcttatatactctacatcgcctgcaagacaacttcacatggccttcgatcaacactattagaaaatacactttcaacatcggttatttagggcattctacatcgattntaaaaccgatgttgaaagcaccgatgttgaatgtattgttgttaacatcggtttttaaaaaccgatgttaacataaaaacgataacaacggttttgcaaataaccgatgttataaacaaagaagtacaacaaaataagtgtatgcatgagggacgttgacatcgattntctgtaaaaaccgatgttaatataatataataacatcggctgtcaagaaaactgatgtaatatacgcaaagttatcggggttgcgtgcatgtagtcaccaatacgatatcgcaact

SEQ ID NO: 100885 - DNA, 469 bp, Glycine max
agaaactaagctaagcaggataaacttgccttggaatggctttgtttaatattttctgataggcagaggctgacttatgaactctgattctctttctgccaaatgaagtgaatctaacatctatatgctaggttctatcatgatgaacttgatccttggccaatcatatagcactaaggctatcacagtagatgtgagcatattctggattaattctgagatcatttatcagacatctcagccaaattcctccctttgcagcttcagttagagccatatattcagcctcagtatgtgagagagcaatagaaagttgaaatgtttccttccaacttaccaagaagccaccaagggtgttagcataccctgttagagaccttctctgactagatcaacaacacaatctgcaccaaaatagctagtgaggcagcattctgagtgagatccatagatcagaccttcatctgca

SEQ ID NO: 100886 - DNA, 335 bp, Glycine max
  unsure (1)..(335): unsure at all n locations
cacacagagttcgcggagtttaaagtggaattaatgagaacgcactgggacgaagagctcataagcattgatgaatgcagcatcaatgttgtcattgtgaaagaattctatgcaaacttgtatgaaccanaaaataaatcacccaagctggtgctggtcaggggtcatctggataaacttgatgaagatactttgtatacatttctgaaaaccccagtgattgtagaagagggggagaatatatgtgctnatttgtaattagcactcctgaggcctgatcctcaagagttagctactaagctctatatcccgggaggggatctgagctacatgtg

SEQ ID NO: 100887 - DNA, 409 bp, Glycine max
cacgagccaattgagaatatttgaagtaccagttgggtcaggctctggacagctacatagattccaatctccaagggggctgcctcctatgacaccatcacgagtggcaagtggattaacccaatcatcatcaaattctggaattttctatcaaggagacgggcagtcacagaatgtagttgactctcacttaagctcatcttttgttaactcgtctagtacggttccaggagctggtcgttcaaacctcggtccggtttctggggatattaataatgcagttttgaacactgtggcaaactcagcaccaagtgttggagccagttctttagtcacggatgcaaattcttctctctctggtggcccccatttgcagagaagtaccagtgttaacacagactcttactta

SEQ ID NO: 100888 - DNA, 474 bp, Glycine max
  unsure (1)..(474): unsure at all n locations
ctaagctgtcgncactcacagttaagatacactctaccggtttggttaagctttctttctcaatcaacctgtctactgactaacaattctaatgcaagttacattcttgttgttctttgctaacacacacacttgctcaaacttatgaaaaaacacaatcttcaacacaatcatgcattcaatccaaaatcagtttataacacccatttcactaaaagataaaagtgtttcattgcatattcatcatgatcaagttaaactgttccatatgcttcaaaacatgcatactaactatccacaaaaaaacacaagtatatataaacatcaaccaaaatcactaaaccaatgtactgaaatataatagttataataatttccaaaaagaaaaatcatcaggaatttaaaatccctgagacagatcctgngtatcctgaatctgagcatcctcatcatctattagatggaaaacagggg

SEQ ID NO: 100889 - DNA, 323 bp, Glycine max
cttttcatttcctgagggaaatattatcaataagctttatgttcaatggtgagggtcatcattattggaaaacccgaatgcatatctttatagaagccatagatttaaagatatgggaagcccgttaaattgatccctttattcctacaatggtagagagaaatgcaactataaaaaaaatattttgatgatgtaaatcatgaaaaagggggagaatgtaaatcatgaagaatttgatgatgtcaaaaaagatcaagccttggataatgagcgttatcatcaaaaagggggagaatgtggatcatgcatttgtttgatgatgt

SEQ ID NO: 100890 - DNA, 394 bp, Glycine max
  unsure (1)..(394): unsure at all n locations
actcagcttcttctcctttcctcctatcgctaaggctacaagacttgttgtcctcctcactcaagctgccattgaggtttgtgnttgagttcacacangctccacgagttcccgtttgtgactatcgcgatttatgtacgtgggcaaaccttcatgttgctttaacctttatccctatagaatgttaacttcgggttggtgagttcgttgttttgtaggttttagacatagtcttggctcctggttggtgggttcttgagttcgtgagttggtgggttcgcgagttcctgagttggtgggtttgcgggctggtgagttcgttgtttcgtaggttgctctctttggcactattgattctgtaatttttgtcttcaacttttgatagctgtaatga

SEQ ID NO: 100891 - DNA, 335 bp, Glycine max
  unsure (1)..(335): unsure at all n locations
taaaatgatnttcatgaacccacaaaagaatatggaattttttattgcccaataatatatggtcataaaacaaaaaattaaggatggatgatcctgcttgtggtgtgcaggtttttgtgcaagctatgtgaagctactgcctgcaatgaagacatatgaatatggctttcgtgtgtttttgtgacaatttgattggattggtatctgggagaactagcanggaatttttctccacagccttttacagattaattcttattgcaatnggtgctggcatatgcnttgttgtaaatattttatataccccatctggtctggggaggatctgcataaat

SEQ ID NO: 100892 - DNA, 390 bp, Glycine max
  unsure (1)..(390): unsure at all n locations
actattcactctctctctttgntggttcacttgggaaaatttacgggtcccttaatgaatgtatgctttgaaaattcttcccttgtattctgttgctgggtttacagtactggttcacagattgttntatgaattttatttgatcatgttaatgttcttactttaatctgcagttgctggtttatggctntatgctctntgttggttttctgtcttgcacatgtcttgatttctgtttctttttttctttctatttttagtggcgtcatctgtagtccttgaggatttcttatcctgtctctgtatcttccttttatgtcttaataaattcttttcgtgataatcataataatgacattgacatgtaaatcgtaatctatanttatatgt

SEQ ID NO: 100893 - DNA, 230 bp, Glycine max
  unsure (1)..(230): unsure at all n locations
gctcgagtgcacttatgggggttctttnttatcttcttcctgctcttaaattgtagtggtgttacttgtttgaatactgattggtatctgacaaggtgtgtggcttatttgctatttcctttcaatgagttacatttgtggtctcaatataatcccaaatattatggaacgctcatttaacaccagttatcctacgtatataattttcatacattcttttctcattataa

SEQ ID NO: 100894 - DNA, 406 bp, Glycine max
ataatctctctttttgatacactaagagctattaattgacaactaactgttcaaccttaaaatagtttcttttactttattctgacctggatgaggctaaacttatgcaaggcacatgtccttcaatgtaatgcaactggatgttccaaagtatgatatatccttcaatttaaattgttcaaatagcaaattttttaaaatggaaaacatgtgaaaactagatgatacttttgtaattattaatgaaaacaggtaatctatgaagaacaaacacatctcttatttgaagtgtcacaatgttggacatgtttctgacacatatcatacacttctcgttaggagtcctattaaaaaaaatatttgttgtcttggacacttaagtcgacacttctacactatttggaca

SEQ ID NO: 100895 - DNA, 279 bp, Glycine max
  unsure (1)..(279): unsure at all n locations
ttcaaaaacttctttctanggttcttaacccaagcagcatactcagcagaccctttctcangcatgaatctcctgctaatggttggcctgttcaagattaaacctccatatggatactgtccaaagttaacagctgcatgaagggctgaagcgatccatatgagggtggccgaggcttcaatcaactcttcacaagtttgcatcttttgccaccatggcttatctttcanatcaccatgacccacttggacaagttctttccaccaagcttggagttcg

SEQ ID NO: 100896 - DNA, 473 bp, Glycine max
ctgcagctccattttcattacgagcgtctcgatatattactggacccaattggacatgcgagcacaaagttattgtcgtttgtactttctcagagcttttattctgaatttcgagcgtctcgatatactacgggacacaatcggacatccgaagtaaaagttattgtcgtgtgattttgctcagagcttctggtctgaatttcagggtgtcgaaataccacttgccaccatcggacatccgataaaaagttattgtcgtttgaatttgctcagagcttttgttttcacatttgagcgtctcgatatataacgagactcaatcggacatccgagtaaaaagttattattcgtagaatttgctcagagcttccattttcaattacgagtgtctcgatatattacgggagtaattcggacattcgagataaaagtattggcggctgaatatgtcacagcctttgtttgaatttgag

SEQ ID NO: 100897 - DNA, 486 bp, Glycine max
  unsure (1)..(486): unsure at all n locations
ntacagcagaatttagtaatgacccactaacctagaattattattacttaatgccattaacctagggaattaaaacaaactaaatggctgagtgtaactgaaattgttggcaaccaaaagtcacccccaacagccaacaagtcagccaccatttggtctcccaaaaggctgatgcctaggttgccaattgggcccttattacaacttgaactaaagcccttttagttgattaacccaaaacatatttttggtcagccaactttacaaggattgggccattatttagacaaactaaacactctaaaattgaaataaagtggtgtcatttagtcctccatttgggccatgatacaactcacaaccttggacttttctccttgaaacttgngcttgtattcaaatagtatggacagcacttgttgaagagcgtccttggctttccttgctctagcccttgtcataagtcctccaagtccttcaagtgga

SEQ ID NO: 100898 - DNA, 415 bp, Glycine max
  unsure (1)..(415): unsure at all n locations
ttaatggggattttccaccatggagatgcagcggaagacaaacgagaagatgtgagaggaggcgccattcactagggaataagccatggaagaaggagcttcaccaccaagaggagccttggataagaagcttggagaggatgcttcaatggaggaaaagaaagagggtgagaaagagagaggggggagcacgaaattgaagaaagaaaaagggagagaagttgaactttgagttgtgtctcacaagactctcattcatcaaagttacaacaagtgttacacatacttctatttatagactaggtagcttcctcgagaagctttcttgagaaaacttccttgagaagcttctttgagaaaacttccttgagaagctagagcttagctacacacacncctctcataactaagctca

SEQ ID NO: 100899 - DNA, 354 bp, Glycine max
  unsure (1)..(354): unsure at all n locations
aaatactgatagaatatcttatcatatattntaataatatattctatcaaatacaaactgattaagtaggctaaaaatacttatagaatatcttatcatattttctatcacatatgtatttttatgganggtattnttacaatttgcgctgtagatggctttttttcttctttttaactttatatttagtcatttatagtatcaatgtttatattttggaaaagntaatttgaaatgcacacttattacaggttattattaaataaaacagtgaaaaattaaacatcacttttttttttcttttgtcttatggtttgatcatttggcctgtaagctatgcagcactactcttat

SEQ ID NO: 100900 - DNA, 461 bp, Glycine max
  unsure (1)..(461): unsure at all n locations
accttgatactcagcttacgttaaagtcatttcattatgtatcagggtagctcatctccatttatttcttagattttgaacctcttnctctcattatttcatatntcggnngttctttgagcaatcacctttngcattntcatctacttcctcttctgctattgcttttattntttttgttttgttctattgaacagttactcttaagcttgagaagttaccacaagtcatttgtgtttgaataaacctttaatcactttgctatttgattaacaaaaattccttgcanaagagaagttaanttgagnngatggaagcagggtgccttcatttttgtgtgcttgtggacttgcaggtatggaaaaatcaaatgatgtttcttctaagttaattgctttcaattattatagcataaaatcaggtagtctagtggtaaaacctcagggtgattgtttttttta

SEQ ID NO: 100901 - DNA, 433 bp, Glycine max
  unsure (1)..(433): unsure at all n locations
ccaatcatacaagttgacggcacacatttgnacggtttataccgggggaccctcttaatggccacatcacaagatggaaatggtggcgtccttcctctagcattcgcggtggttgaaggtgagacgttgacagcgtggtcatggtttttggcacacttgcgtgaacacgtcactgataagaatggtatttgtctcatatctgatcgacacgcgagtatcaagtccgttgtcgctaatgaagcacttggttggcaacctccccacggttatcatgtctactgcgtgcgacacatagcaagcaacttcaatcgaaaattcaataacgccaaacaaaaagaaatgtngaagaagttgggtaagatttcatatttgatggtcacgtttatttaacttccctatatacttaaaattggtattgataactaattctatg

SEQ ID NO: 100902 - DNA, 428 bp, Glycine max
  unsure (1)..(428): unsure at all n locations
ntgtgggagtaatcggcaccccatagaactggcagtatctcttgattcttgtcggaaatcctagtgctctgttggacttctctaagtccactgggtgtctgggaggcgtgatccctgcaaattgatagatggcatctgagatcaactggaccacatgaacactcacctgggttaagatggcatagaccagctggcacttcgacaggggaaggtcggaattatgatcgctggggaggatgttgctgagcagcaatgtcatcctgatctatgtcagggtggtcatgctggtgtgcatgatccgcacctgtctccccgtcacactccgtgcgaagtcctgacctagaacacacagcagctggcctatggtctcctcatcaaatctcgaggcctagctcctcctctgattaaactcacagcgttgccccttt

SEQ ID NO: 100903 - DNA, 402 bp, Glycine max
  unsure (1)..(402): unsure at all n locations
tgacattgtaacattaactatatgaaagcatctattttgtgccgcattccgttttcttgtgatgacctatcgaaatcaatggaacagatagatatcgcagatatagaagccccgcctctaattcgtgaaaactctggctttagctttttggtgccacgttcagatngacagcttttggtgtagaattgatccaccggtattcttacccacatccatggtgttaccaactcacatcacttaaatgttatcatggagtgcttgaattgttgactttggttgtgtcagaataagtcagtattaaacataccaaaatttacatctcagtgatggatgacaaaaggtagatcatcacgccgtgcaagtagaattttgggctgagagtaaaaggaataatactattat

SEQ ID NO: 100904 - DNA, 459 bp, Glycine max
  unsure (1)..(459): unsure at all n locations
tagctccgcacaatatgactctaggatgtaatacaacagtaccacttgtactgatntatttactatcatatataatacatacatatttttgccgagcaaaaaaaaaaaaaagaaatccttcttaaaataacccaagaaaacaaaaaacctttacttagaaaatatcttccagtcccatgacatatctggaaaggaaacccctctaaaaagacaatgagctaagatactgctcattggaagaattctccataaaggtgacagtcacattaaattctaaacttttccattattcccatttcccaaaaaattattcctactctgattgctcaagtgatggtaccaaagtacactntatattntataattaatgttttaatcataagaaaactcatcttgactgagggaaaaattaacaggatcttacctncatgatcgatagatgggctggagatcatacgt

SEQ ID NO: 100905 - DNA, 473 bp, Glycine max
  unsure (1)..(473): unsure at all n locations
tctagccaaatggacttaccttgaattaatttcttttatattctttttgaaccttgtttccctttccttgttttgaagctcactacaagccttaagtgaaaaaccatgatattaccatatccttaaggaattttggagctttggaattgttttgggaataagtgtggggggtttttgtttcattggacaacttgttttgttggctatgcttcatgatgtattttgggtcatacttgatgtacattgtatattggttaaatgttggacatgctgaatgaaatgttgtttctcaaaggctaaagagtaaaaaaaaaaaaaacaaaaaaaaagagaaaaagaaaagcaataaagttgagtgaataagatcttaaatggcacaagaatgatgaaactcttggttctactcttcatgtntaaattttatctttacttcttnttattttcttaattttttttcctattatgcacttatt

SEQ ID NO: 100906 - DNA, 386 bp, Glycine max
  unsure (1)..(386): unsure at all n locations
actacccatctaggccatttttctatacacaatccttcctacacgtgccaacaagatcaagcccaataatcataaaagatcacccaaatacacacaacaatgaaagttcatttaaataacataaatttaaagtttatttcctgctggattttaaataaacacctggtcacacaaataagacnaactantatgggtacaatgggaccaccataatcaccatcattatcattgtcatcatgggtactatgatcattgcatattatntatgtggtgtgcaccaaacatttgaaatgatcattaaaacttatatatatatatatatcatactntntaatgctcttatcatattcttatactctctcgtttatcaaatagggtcttaacat

SEQ ID NO: 100907 - DNA, 323 bp, Glycine max
  unsure (1)..(323): unsure at all n locations
gtgctcattatcactagagaagaatccttcttgnngtttcatgaaaacctcttcccctagaagaacattaaggaatgtcgttttcgcacccatctgatgtaactcaaagtcaaaatgagctactaatgccataattactcgaaaagaatctttcttagatgtaggagaaaatgtctttgtatagtcgattccttctctttgagtgaaccctttgacaacaagtcttgccttatgcctctcaatgttgcctagtgagtctttctttattttaaagactcatctacattcaatggcttttacaccattaggcgactcgacgagat

SEQ ID NO: 100908 - DNA, 297 bp, Glycine max
  unsure (1)..(297): unsure at all n locations
gttatttgactatgtggaagttaatattaatctatgcatggttgtttgcttcatggntacatggttcttgcttcctgcttcatgatctgtttgactatttttatgaacatttatggatgttaaatanaattgttgataccactttggtttttgtgatgccaagggggagagaaatgtgattaattcaagaattcacatgagtaatcnacnnttttttaatataagcatacattcaaaaacaaagggggagaatttatgagagtgatcgactangaaaaagtgtgtgttgtgttcttg

SEQ ID NO: 100909 - DNA, 312 bp, Glycine max
aatcaccatcggagtaccccagctgagctcaacgatccaccctcataaaaccccacaagcaagcttccatcaagtgatatcagagcacataagcttcttgtgtcgagggaaggagcccagagtatgaagaacctcgggatttgaggtcaaatcctttgcaagatggagaggatgatgcaatcctaccccccaagggtattggatagaagactccaagaggcttaggctagagctactaaagaaggccctagggttctcatgaaccttatggtagctatttgagcccatgggtcaaggttggatcaactattc

SEQ ID NO: 100910 - DNA, 300 bp, Glycine max
aaaagcaagacattgagacacttttacttgtgaaccgagatgagctgcacttctgccatgcatgccttggttaaagatgtggagaacttaattgttggcaaaggaaagcacaaagatctatattgataatagatctgcacaagagcttgcccagaatccggtgttccatgaacgaagtaagtatatagatacaaggtagcatttcattagagagtgcattaccaaaaaagaagtataattgactcatgtgaaaactcaagatcaaggtgcggatattttcaccaagccctctcaatttga

SEQ ID NO: 100911 - DNA, 363 bp, Glycine max
  unsure (1)..(363): unsure at all n locations
cctctcttgtcttcctcaatctcttttaagttggggtccatttcgccaattgttttatagccacagaaaaaggaaacanaggaaaagagggtctccatacatggaatgagtgagggagagaagacgaaataaaaggaaatgactcaatgcagtgactctgaatacaatcatcataacatcatagtggagggacgaaaagatagcttaattagaacttgtcctacgtgtggtcatcatatcaaatgccaagatcaggttcttaattattaacctctttgctaatgatatatatcatatagataatattacccttttgagtactttttttttcttttgatgtacttgtctactttgattcatttt

SEQ ID NO: 100912 - DNA, 292 bp, Glycine max
  unsure (1)..(292): unsure at all n locations
tctaacgcacggattattgattctattcccacacagatgtgggaagcacttnctcacgttttgtatgtaaacctctctcataatcacatccatggtgagagtgggactacattaaagaatcccatatctatccccgttattgatctaagctcanatcacttgtgtggtaaattaccctatctttcaagtgatgtgtctcagtaagatctttcaagcaattcaatctctgaatccatgaatgactttttatgcaatgatcaggacgagccaatgcaattaccatttctgaatc

SEQ ID NO: 100913 - DNA, 372 bp, Glycine max
  unsure (1)..(372): unsure at all n locations
agtgatccaagacttttcaatggatttccactgaatttattaatagacagattgagaaatcttaatgatgaaagtgttcccaatgatctaggtagacaccccgattgagttgtggaaaaatctagcagcacaatattttcaaatgccccaatatgatctgtcagattgcctgaaagtngtgaactctgaactgctagtcttgtgagtccatgggaaatacaacgagcaagaatttctaanagttcattaacctgttggttgagtttgagatatgatacacgtatcacccttaagttgctgacattacccaaagaagttggaatggttccttcaagttgactatatgataaatcaagttcaacaagagaagtc

SEQ ID NO: 100914 - DNA, 385 bp, Glycine max
  unsure (1)..(385): unsure at all n locations
atactcttcaaatattaaagagccttgcgcagttgaaagagctttaactggtaagggtaatgtttcaagattgtcacgcgttaatgcaacaattgttaggttgtggccatacgagacatttttcctaacaaagtcaagttagccataactcgcctgcgttatttcttcaatgccatatgtagcaaagtccttgatcctgtcaagtttgatgacctcgaaaacgaggctgcaaatatattgngccagttagagatatattttccttctgctttctttgacatcatggttcacttaattgttcatctggtcagagaaatcaaatgttgtggtcctggtcaaagaatctacatcatcttgaagcatctatatgtgaaaggtacattgt

SEQ ID NO: 100915 - DNA, 365 bp, Glycine max
  unsure (1)..(365): unsure at all n locations
ccttaaaaatggtttttaggtgatgacaaaaccttggtttattaattgattttagccttagtttcactttggttattagtcaattcgattaaaaaagaaaatcccaaagaaaaacgtcagattgattctttttattactttattaaaagaatattttttgatatntatattattattttgcctcttttaagntttaaacgtggttatggcctgaaagaatcggccgaatttatctctaacaaaatttaaagatgttacaactcacatgatcggtggaaatttatnnttattttgattaggcgagaaaatgactatataaattactaaagcaccgtcaaatggagttcagaaaaccaatgaattaa

SEQ ID NO: 100916 - DNA, 366 bp, Glycine max
  unsure (1)..(366): unsure at all n locations
cgctgagcctggctgaagacaactgctacgcttagtgcactgatatcatgcttatcgcgcggccttgatattgatgccctaccacattaatctgtcgcactaagcgcgctgaagctgcgcttagcggtgtatgtccgcttagcccattgatgagctaagctcaactgtcacttttggcacttcatgacttagcctctttttcacttgaaattgcacatatttcatcattaaatccaatggacatattctagagacaactttatccatataaagagaatttatntacaaaaaatcacaaaaaaataaccatacaatggggaactatacaagttttggaaaatgaattctataccaaaagtaatcgta

SEQ ID NO: 100917 - DNA, 329 bp, Glycine max
  unsure (1)..(329): unsure at all n locations
tgagattttatagcttagctacacacacgcatctaaaaactaagctcacctccttgagaagcttccttgagaagctagagcttagctacacacacccatctaagaactaagctcacctccttggctatatacatgagagatacaaaaaagtccctactacaaagactactcaaaatgccccgaaatacaaggctataaccatattctactagaacgaccaaaatacacggcccaaaagaagaagaaaaaacctattctgatatttacaaagaagagtgggctcatacttagcccataggctcanaatctaccctaatgctcatgagaac

SEQ ID NO: 100918 - DNA, 280 bp, Glycine max
  unsure (1)..(280): unsure at all n locations
gatggtatataccgcgccacattcatgacagatatcaaccgcaggcaattggttcgcatgacacgcttgctacacaatgtcatntactggtttcacgagctctacgacaggtacaattagactctaggctcgtgatcaacatgatcgacgttctgagtacacctcacgacgttaaaaaagcactagtaagacgcaagctagtaccttttaacaatctgcttgttatttgatcacctgttgttctcaagacatagtaagacacaccgagctgctcatgatc

SEQ ID NO: 100919 - DNA, 350 bp, Glycine max
gctagagctcagctacacaccccctctataactaagctcacctccttaagaagagaagctagagcttagctgcacacccctataatagctaagctcacccccatgacaaaatacatgaaattacaaaaaaaaatcttactacaaagactactcaaaatgccctgaaatacaaggctaaaaccctatactgctagaatggccaaaatacaaggcccaaaagaagaaaaaaaacctattctaatatttacaaagaagagtggacccaaccttgacccatgggctcaaaaatctaccctaaggctcattagaaccctaagggcttctttatcagctctagcccaatcctcttg

SEQ ID NO: 100920 - DNA, 484 bp, Glycine max
  unsure (1)..(484): unsure at all n locations
ctacctacaagtcctaattgacattctaaactanaatcaacttactttagactccaatttacactaaccctcaaaatctcacacttttctacctacaacattgtcattctcacatttaaccctaaattaactttccccctcatctctactaagtttctatcaacaatttcagcacacaaacatcacaaagcatcatcataaaaccctaaaacagaatgggtaaatttggctcacatcaaacatgtcaagtttagcatgctttcaacaaattccttcacaaataactaccataaggcataaacctagtagaacttcccatcatatctcccaaaaacccaatacccacgaaattcatgtgagaagaagtctacccaaacctgagattcgaagtcccacaacgtagaggtgcgcttcacgaactccaaaatgggcttccttttgcaattggagtagaaatggtgagcannagttggagctttaatgg

SEQ ID NO: 100921 - DNA, 454 bp, Glycine max
  unsure (1)..(454): unsure at all n locations
agcttcttatccaatgctcgatcttggggngattctccttcttccatggcttatctcttctcacctcctctcacctcttccctagtggatggcgcctcctctcacctcttctcctttatcttccgctgcatctccatggtggaaaatcacaattaaaggacctcattgaagctcaaagattcagcctccatagaagccccataagcaagcttccatcaaaaaccctantttttgtggacgagcttgactaggcgagttgattttagccttaatttcactttagttattagtcaattcaattaagaatgagaaatcccanagagaaaacgtccgattagttnttcgctttattttactaaaagggatgttttttattattatattattattttacctctnnttttgaatttcaaccgtggtacggcacgaacgaatggtcggaattcattttaac

SEQ ID NO: 100922 - DNA, 483 bp, Glycine max
  unsure (1)..(483): unsure at all n locations
actcagcttctacaccccattttctccctctttggaaacatatatntgttcatgtacttgggaatcaaaatagatatataataatgaagtggatacagagcaattacaaagtataagtcataaccaacaaaaatcagaaataagacataaccaaaccagaatccaaacaattcaaaattcaaaaagacatagtatcaaagcataaaagtctaaaattcaaatactaaaagataaagtactgaaaataataatctatgtagcatagccaaaatacacggcttataagagacatagaatgataaactaaattctaagaaggtggaggtggtggtggaagatcgaaactctgacgaatataacccacatcctcttcaagctgtgtgaggcagatatccattccagcataacgagtatccagtgagtcgaaacgttcaccaatataagaatgaagaccctgtanatcagagagaacttcagtatgag

SEQ ID NO: 100923 - DNA, 314 bp, Glycine max
  unsure (1)..(314): unsure at all n locations
taatgatgatgatgatgaatactatgtacctgaatatgaagggggactttgatcaaattcttcaagcgaaaattatgagcacgacaaacatgatgagtttgctactattaaatgaatctctgaggtcacacaaaaaagaaagggtaactctttgaaatnttttcaatataatgctaatatactttattggtggatcaagtggcctcataataattaagaagggagagttgaattaattattaatgtgttttgactaattaaaaaatttgtccttcttaatgtatctagattcaactatgcttttactattaagt

SEQ ID NO: 100924 - DNA, 440 bp, Glycine max
  unsure (1)..(440): unsure at all n locations
ctggacatataaatttcatgatgagaagtcacctacgcggaagaaaatataaaggttatgaaataaaagtgccaatatgtgtagtgtatacactatggcgtcgaanatntaaaaagagaanaaaaaaagaatcaacaagattgaaagaccaatatatcctgtataacaaaatcactaccacacaatttttatgctccttataacgaaatcctaacgcctaaggtacacactcaatacaagagcgcatcaattntacaacaaattcgcattgaaacacccattggtccatcaaacacactcaatccgtgattaaaacanaacaaaacataattgaacttcataaaacatcccanaataacccaaaaatggattctctaggaattcctacacatgttcattctaatctncaagtgtgagtaactcatctcttacctcgatgg

SEQ ID NO: 100925 - DNA, 302 bp, Glycine max
  unsure (1)..(302): unsure at all n locations
aaggatcaaggttttttgatacaagagatgacaaggatgacaaagctatagataatcaagaacactcagtgaatccagataatcaagaacactcagtaatcagaaaatcagactcagaagaagttagagtcagaatcagattcaggttcaagatctcaaaaatcaagatcaagattcaagactcaagattcaagaatcaagagaaggcttaatcaagataagtatgaaaaggtttttctcanaaattgaatagcacatggtttttctcaaaaacatgtttaccaaagagttnttactctctg

SEQ ID NO: 100926 - DNA, 473 bp, Glycine max
  unsure (1)..(473): unsure at all n locations
ctgggaactatatatggtggaaacataanaagctgttaaagtctcaaaatntgcttcatatgctggagagaaaaatcccctaatgagctaaaagtccactagaaactgtacaagctaaccncgtggacaaaactgtcattggagaaaatcaaacccacatttgtaagcaaaaaaacaaagaaaacccagatgattgattaacagctcctcccatcaacacacaccccattggtagttgtacttgtatatacaccatttaaggaactattggaagatttgaacccattatttccattatgtgctgctgctgctttcaacattggtgggtgtatcccatttgttaacttgccataacctttgcttgcaggcacaactgtcctctcacatgctgctgatattaatcctgtcacaatgaggcattcattattgaatatatcttgctcagacaaaatgcaccatagataaactaacaa

SEQ ID NO: 100927 - DNA, 318 bp, Glycine max
  unsure (1)..(318): unsure at all n locations
aacatttgaaagatttcatattgtctgcttcaccatgaaaccaccagatgtccaggaggatcacatnattttgaaggcccttcctcattctttatagggagtggcaaaggactgggcttattaccttgctccacggtccatcacgagctgggatgacctcaagagagtgttcttagaaaaaaaatttcctgcttccaggaccacgaccatcagaaaggatatttcaggcattagacaactcagtggagagagcttatatgaatactgggagagattcaagaaactatgtgccagttgtcctcaccactagatttctga

SEQ ID NO: 100928 - DNA, 444 bp, Glycine max
  unsure (1)..(444): unsure at all n locations
tctcccncaattntctatanataaggggagaagtgaagtttattagggttcagccccttaggcacttctctctctttcanatttgcttacgaaaattggttccgtgcagaacatccaagccgagggcgcttcgtaacgttttcgtgagtgatttcgcgaaggttttcgaccgttcttcgacattcttcattcgttcttcatcgctcttcaatcttcaacgggtaagtacctcacaccaaacttttcaattcattctatgtactcgtggtggtccacattcggtttcatgtatctttattctcgttttcatttactttttatacccncttttgacgtgcttaagccatttatttaagtcatttctcgcttaatctacaaataaaataccatttcaccgatcgttcgaattgtaatacccgttagtttcgattataatgaactccg

SEQ ID NO: 100929 - DNA, 406 bp, Glycine max
ctaagttgtccttctatcacgaggaatcggggtgggataatttagtagtagtatgtttgtcttaatgcggtcctggttgagtttattccaaaaagaggaatctgaggacgatgcttgatcaggattaggctaaactatcatgaggaatcggggtttagcatgtcaggagacaccataggaacacatgagcattgttagatagagaatttccttttagcaccaggcacctattaggaagaccaacgtgttttctacttgtttttacaagtcatttctctcgcgtgattttcctttttgcgtagatagtttacatagctgttcatattcacacttatgatttcacaccagacacctattcactgaaatagcttaccaagtaacacaatttccttgagagttcgatact

SEQ ID NO: 100930 - DNA, 424 bp, Glycine max
  unsure (1)..(424): unsure at all n locations
ctggctggtcattagaattgatgaacctaatgattatctccctggaccataatttcctctcgaattaaatgacaatcgatctcgatgtgtttaagcctctcatggaagactggatttgaggcaatgtgaagatcagcctgattatcagtataacttcatttgcaccacttcacaaaatctcaactcttggagaaattgtttaatccacataagttcacatgtaaccatagccatagatcgatattcaacttttgcactggatcgagcaacaacagtttgtttcttgcttttccaggaaataatattccctccaatgaagacacaatatcctgatgtagatctcctatgcatgggacaaccagcccaatctgcatcacaatatccagatatttgtccaggagctctctntacatatctaagaata

SEQ ID NO: 100931 - DNA, 356 bp, Glycine max
  unsure (1)..(356): unsure at all n locations
tctattttacatcaaccacattaatgaatttctatagtttcttctaccattttttttggtatttaaattgacagcctgactaaatgatttcgtggtgtacatgtcacctcaccgtttacacaaaatagacacttataatatggacaaaanatatatttaggaatcttgacccgtcaataaaaaaaatttaaatataaaaaataagaatcttaagaaatttaaagattaaaaagataacaaatcttaaattaatggctgatatacatgtaaacttcatgtcaccaatttttacatggtcatgtcagcatttaacaatanatataaatgataaggacttanattatgaagaaaaaaat

SEQ ID NO: 100932 - DNA, 412 bp, Glycine max
  unsure (1)..(412): unsure at all n locations
tgatgctttacaacttaaagacgcgttgttttaccactcaaattttgcccactataagagtggagacattattcacttgtcaggattgctaaatcaaactagctgccaatttcttagaatgatgcaaaggtgacttctatatagcaatagattggccttcgtagttggggaataatctccttattggtaaggaggtgcatggggtgagttagaatctcttatttgaaactatgctcaatactatttagtggaagaagaatatgattacattctaaggtgagaagtggactactgaagtgatgataaaaaaaaaaggcttgtaatatgactcattcctataaagatagcttgacgaggttngaaactttagccaaatttgaacatatcagttcatatgggtcaaatatcatat

SEQ ID NO: 100933 - DNA, 436 bp, Glycine max
  unsure (1)..(436): unsure at all n locations
ctagaaccaaatccaattattaatatctagatcattaattgagtgaccattanttggcctgaggatttctctgaattatttttattctttctagactttagcttaaaaacatatgagtntaatcattcttaggtatcatatagtaacatctcatttttttttatcattttaatagtctaaaagcactacccagtcgcacaacaaagcaataacattgtctaccacacacatataaaaaattggaatattacaggttgagctaaaaattctttggccaaaaattctttggccgactttgatttgaagatgttgtcaccatggccaaggtaaaactactctagccaagactaatgtggtggagaaactctatttatgaattggagttggtttacaggttgaaactgattttaaannatgaattgatttgtactagtag

SEQ ID NO: 100934 - DNA, 297 bp, Glycine max
tgagaagctagagcttagctatatatctctctgtataactaagctgacctgcatgagaaacttccttaagaagattcctcaagaagctagagcttagctacacatacctctctaatagctaagctcaccttcttgagatgagaagctagagcttagctatatacaccctataatagctaagctcaccccatgacaaaaaacatgaaaatacataataaaagtccttactacacagactactcagaatgcccagaagtataaggcgtataccctatactactagaatggccaaaatac

SEQ ID NO: 100935 - DNA, 388 bp, Glycine max
gatacaatctttgcatatgagaatgcttcagaaacattaagaaagctaacagatgggcctaaaagaaatgttataacctggcaaggatacgacatatacaggtattcattttacacgaaagcacaagatgacaaaagtataatgcagaacagcggggtcaacctaagggctgaatctcaacactttgcaagtgtcaatgacgccaatccctgtgtagctttcatcccttactttaggttcattgatgaaatttgggagcttaactatgtgaaatttacggtatgtgttttcaaatgtaaatgggttgacagcaacatcgatgtgcgcaccgatgatataggatttacgctggtagacctaaagaaacttggttaccacaatgaccttt

SEQ ID NO: 100936 - DNA, 300 bp, Glycine max
  unsure (1)..(300): unsure at all n locations
gtgcaaaagctctgacttctaagctcaaattgaccctcgaaatggcagaattgtccaaagctaatntctaacctaattgaatatccttttcttagatttccagggactacttacatgctccatttggagttctatagtgtcctttaagccctgcataaggcagataagtcaaataagcacaaaatctgaactttagctacaactctcaattaagctcaatcattntcctaagaccaaaactaagttaatgtgagaaaataaatntcaaagagatgtcaattaagctaacattatcttttg

SEQ ID NO: 100937 - DNA, 422 bp, Glycine max
agactatatatttatatcttttactcattaacaaattatttgcatcaacaataaagactacactcacatatctttgataatacgaatctattcattctataatctggataaacctttttgtgcgggagctctattagtttgatgctagataattgtcttattacgctattagccgtgtagccgttagaacgtaaataattaaataaaattaaaatgtgctgagtcactggtatatattccgaagttggcaatcatgtctatacacttaatttatatatatgtgataatacagtttatcttttatattatttgcggttataattatcaatatcatttttttaccaatctatcaatagattgcccagctacagcaaccaaaaacggtgtgtcgcccacttttcatttttcccaatcacaatctc

SEQ ID NO: 100938 - DNA, 366 bp, Glycine max
aaacttcacatggcggaatagtatgacatgaattgaggctgcatgtcctctcttctaggtacatttattggggtgtccttagtgataatatttctagagcatgagttaatgggcttcacaaaacgattttttcttatcatcaaaatcccttcgtcttataataatgagattaatacaagcggctctgttctatagacactgctgccatactatgtgtatacctatggagacctattacaagctgtattccaagaattaatcatccatacgcttggatttatctatacacctctccagataaagcaactctatagagcactcccccgatacataacccgacccttgtatagctacccactattgaaa

SEQ ID NO: 100939 - DNA, 404 bp, Glycine max
  unsure (1)..(404): unsure at all n locations
cctaatatcanntttaatcaaatagcatggtcaactgcaataataacctcacacggcctcttgtttgtttgtgttcacaagtttacatagtgttgtttatgagctntttactctattttcttggctcattgttctaatgaaacactgcaggcccaaacgcctcacttgaagaaatggtagaatttataggtgttgctcaaatggcaaaggctgaagatgctcttctgcctcctgaagaanaggtagcaatgtaaccatattagtaatctttggatgaacaaaatagaaatttattgcatttaaatttctgtaaattttccttcaaatatctagtataaccatttgttgttcccctccccctttccttatctatacatgttaaagtatttaatgtttttcttatg

SEQ ID NO: 100940 - DNA, 468 bp, Glycine max
  unsure (1)..(468): unsure at all n locations
tataagaanaatgatgaccatgattttaccccatcttattatgtgttannagctatnngaagaagtgtaatcattttgatgtgaaacatgnttttgctccttatgactcattcattaagttaaagaaaattttgagtaaactaaatttttcatttaaatattctcaaattaatggtttttgtagcatttgacaaacttctcaaggcctgcctgatattgcatatacaattggtagatngggaagtaattgaggggtttaatgatacaaattgaagttctgattttgatgaaacaaaattgacaagtgattatgtctttactttagctggttgtgcagtatcatgaaaatctactagacaaactattatttcacatganagcaaaaattattgctntagatactgctactagtgaggctgaatttcttaaaaatntatttatgcgattgtcattgttgaatagcctata

SEQ ID NO: 100941 - DNA, 99 bp, Glycine max
tgattttttgtccctgattttccatttgtgactttcagctaggaaactattacttaccttaagaattgacttggatgttgaatacgaatatgggggggg

SEQ ID NO: 100942 - DNA, 469 bp, Glycine max
tctaagcctgtatggtggctaaggagtaaggctacatttctgttttctgggtttgcgatgaactcgctaagcgagcctgtatcactaagtgagttcatacgtttctttgaatttatgggtttaaggatgaacttgctaagtgatccttgttcactaagcgagctcatatagttagtcttcgtttctgcattttggggatgaactcgctaagcagggttcttaggcttagcgagtctatgctgctggttaatttttttatggaatttgatgaattcgctatgccgaccatccgcacttagcgagtctacttaacttaatctgattgtttgagcctttctacattccaacagtagcttagcgcgactctcgcgctaagcccaatttcccctctataataaaaattgtgcttagcgagacctccttgttaagcccaaagtcatttgaatttctgaatttttgtcatgcacta

SEQ ID NO: 100943 - DNA, 263 bp, Glycine max
ggacttagcacgcgctcactgtttttttttttgcatttgctgatacagcctgttttcttaacgagtggtcagctgtttgaggaatggcttggtaaactgattgtgtatctccaccttggtcttactgggtgtattacaggtgcaaagtcagaagttgttatagtcccctaaatttattggaaagacccatatcaatattcactttaaatagggtcaacacttcatgtctggtatccatccttactcaggctgtggggctaaat

SEQ ID NO: 100944 - DNA, 460 bp, Glycine max
  unsure (1)..(460): unsure at all n locations
cataagatgcatcttaatgaatcttnttattcttgatggncttcttcctctccgtagttcatatggagtctttttttatcaatgataatcttatgaatattttgttttgaacatagcaatntatgttcactgcttctgtccataagtgtttaggaagtgaattttcacaaagcatggtcctagccatttcttgcaaagttntatgtttcctttcaactatctcattttgttgaggttctctcgatgaagagaagttgtgagaaaaaacattcctttcatataatgatgtgaactcagcattctcaaactcagttccattgttacttctncatagaagagatacaaaacccctttttatttaaaccctcttacaaatatctcaaagaccttgaaanggctcatgttatgtacaanggagtaaacctatgcatatttgagtagtcatcaactatgacaaaag

SEQ ID NO: 100945 - DNA, 443 bp, Glycine max
  unsure (1)..(443): unsure at all n locations
tgcaagcttcttattctagcacatnntctggggtgtatcttcttcttccaaggctnattccttagtggttggcgcctcctctcacctcttctcctttatctttcgctgcttctccatggtgaaaaatcaccattgaaggacctcattgaaacttaaagatccagcctctatagaagcttcacaagcaagcttccatcagttgcagctgcatatgcatctgtacctgcacctcaaacacttgaacctttaccacaactcattgccccaacacctccacctgctccatcttcatctctacctacttaacctccaccaccaccaccagttcaggacttactatgatctccatcactatttctctctcaagggggagaagaaagaatttgattgtaacaactatccattgtgaataaaatggtttaagggtatatctgagttgtttc

SEQ ID NO: 100946 - DNA, 429 bp, Glycine max
  unsure (1)..(429): unsure at all n locations
tagctccatactcgaaggtggatgacacatgaacatgtgcttttgttttacattcaanngagcttcgaaaaagtggagaatggaggattgcacttgagggtccacacttaggcaatcatgaagtatagctccaaactcgaagatggaggacacatgaacaacgctaggcaatgacattcatggagcttcgaagaaagtggagaatggaggattgcacttgagggtccacagttaggcaatcatgaagtatagctccaaactcgaatgtggaggacacatgaacaacgctaggcaacgacattcaaggngctccgaaaaaagtggagaatggaggattccacttcagtgtccacactaaagcaatcatgaagcatagctccaaactcgaagatggaggacacatgaacagcgctatgcaatgacattcat

SEQ ID NO: 100947 - DNA, 367 bp, Glycine max
  unsure (1)..(367): unsure at all n locations
gagaatgagccatgttctcagtatgaaaattagcagtcgaatgctcaaaatcagaatgttcagaatcactagcaacaaaatgctcagaatgcacagaatgctcaaaatgatcaggatgcacactatgcctaaataatctatgaaaggttctatctattntaggatcaaagggttgtaaatcaccaggatttcccctagtcatgcactatatgtagcaattcaagtatttctcanacaaacaccaaagggggtaaaactacaactatactcaaacgatatccaaatgagctgaaaattgtgagcaacaccttaaaatcatgaaaagatagaataaaaaatttcagacanatattcanagtctaactat

SEQ ID NO: 100948 - DNA, 433 bp, Glycine max
  unsure (1)..(433): unsure at all n locations
agctttgcttctacactacgtaggtctgagtttctcatcgcactngaggatacatangagcaanggaaacgctctngtcgnaccccaaaagtcaaaaaacattaaaaagggaaagtaaataaatattgaagtcatgattttgcacacttgattaaaggttgtcgtcccttgtgacggatgtgtggggtgctaataccttccctacacgntaaaacaactcctgaacccatattcttaaaattgcagacccctttttggtttttctaatgtcctttntggtntttctaatgtttttcttgaataaatgttggtggcgactcccgtgcatttntccttttggaagatgcacccattgagtctcaccttgccctcccaccgaagggtaggatgcgacaaatgtaaaacatgatttgttgcatttttagactccttt

SEQ ID NO: 100949 - DNA, 362 bp, Glycine max
  unsure (1)..(362): unsure at all n locations
nntctaagcccctaagttggtcaatcctctcagttatgtgtattttngctctntaagatgggatgttagactaagaaatatacatgttatttaagatgtttctaataacaaagttacaaatgctaatataatatatatatatcataaaaatagcccatactttggtaatgaattcggtggacaccaaaatcacagaaatgtaactntttctatgataatcactatcatagcaaccccagttattcttgaagtaaatgacaaattatagggggttgctaaagaaatctaaatacaaaaaagaatgcaaaacatataacactccaagtggaagacaaacccaaatcatatccacacatggtatg

SEQ ID NO: 100950 - DNA, 329 bp, Glycine max
taaactattcatgaaaaatccaacctaccatttatatatttaaatacatttattaatttgaatatttacaaaagagaaacaagaaggaagaaattatagctattagcatggtatagatgggacaaggacacaaaccttataagacaaaataaggccttcaaaacaagtgctcaataattaatctccctatttcattatttatatgatgtttagaaatattggagatctcacaatttatactcacctttctgcatctgcatctgatcattatgctctgtccctttgcctttgttatgctctggccaatgatagcagattaaaaacacata

SEQ ID NO: 100951 - DNA, 291 bp, Glycine max
  unsure (1)..(291): unsure at all n locations
tctatttcactttcangtgtggcgaaagggtttgttctctttagagaagcaaatttcaggtgacaggttatgtagatgtgatactatgaaaaaaaaactggctatggattgaagacaagctaggaagaaatatgttttggacaattacagtataaatatctcactaacaattattatttttcttcttttttctaattacattatattattacatttatacttctctattgtatttctcaatatctttgtctctttaagtgtctactatactanagggatgtcgtgcctaat

SEQ ID NO: 100952 - DNA, 248 bp, Glycine max
attaagacctggaggggacatccctgcccataggaatgaatcatagggaggctctattgacttaggggtagtatcaacttgatgcccctatcaatgtgtagaagaattggaaacctgaagatagatcctaccaagatgacgctccagctcgcagatcgattaatcaccagaccatacggggtagtggaagatgtcctcgtcaaagtctgccactttacttttccggtagaatttgtcatcatggacat

SEQ ID NO: 100953 - DNA, 448 bp, Glycine max
  unsure (1)..(448): unsure at all n locations
tagacagtgctctcttgtanactntacaagagttatgtgatattgttgttgccctaagcacaaattccaggacttttgatactaatttttcaaacaaaagaacttatttgagtgaaactttaattcttatccgagatcagtacaaaaaacacctaataaactatatctaagttttgtcgaaatcaaaatcagaaaacaataaaagaaaaaatgagttataactaaccactagtataatcatccacctgctggtgtgtcatttggtataggcaacttggaattggaagtatactgtcagaaaagataaatntgtttattacattattttatccattttctgtttgatcaatgatcattcgggtaggttgcanattgaaccacagagcatatcttcccctttatgtacaacagtttcaaatgagataggaacacagatagtagacatatg

SEQ ID NO: 100954 - DNA, 375 bp, Glycine max
  unsure (1)..(375): unsure at all n locations
agtcttacttgcttagtgcatacactgaaatgttgaaattgtcacttttctcactgctaatcaatcctcgtgattaagaatatgatttagaacatgtaccttaaacatatcgatacataaaattaacaatatactatatgctntaattggctgaaaatgcttaaaggagacaattgaattgaccattctaaattcaaatggaaaaatagaacactaatgaccttatacctctcaatcaaagntattggtttagctaagaggaatgaaaaaaaaagtatttaatataaagtacaancggtaatatattatacttttttatttttaaatcctaacatacacttaaatgacaatatatttacattgaatttttgtttt

SEQ ID NO: 100955 - DNA, 381 bp, Glycine max
  unsure (1)..(381): unsure at all n locations
acacccccctttttactaaatgcaccccccttttctatttttttgtaattctttttccgtaacgttacgtaactttacgaatttcgaaatgatacttattttccttccgcaaggttacgaatccttacggattatgtatntactcttttttggctttcaaagaagttacggaaactcacggattgctcaaaaacacgtcttttcgattttcgccacattacggaatttcacggattacgcaagcctgcttccttttggatttctgagacgtctcgggacttcatttattgcatgtcatcaagtaataatccccggacgaaatanggtatgacaatcgctagcggtatagtagatatggggaaaagcanattagaactgagt

SEQ ID NO: 100956 - DNA, 350 bp, Glycine max
atcatcggcttcctttgcatcattgggggttccacctgagccgtcagatccctccccctttgggcgtgttctttgaaagatccgtccccctttttgcaaatgttctgttgttgcatactatccggaaccatatcaaaattgtactgatactgcctaacaaaagcaaccattaagtccttctaagaatggactccggaagattccaagttagtgtaccatgtaacagctaccccagtaagactttcttggaaagaatgtattaacaatatcctcatcttttgcgtatttccccatcttttgacaatacatctatagattgtgcttgggacaagtacatcccttgtcttgta

SEQ ID NO: 100957 - DNA, 433 bp, Glycine max
tgatctcgctctgtatgtcagtgatcagtgttgtgtgttttagccaagaaggttcagatgatcaccagtcagaacagaatatttcagatcttagagaataagagatcagatcagagaaatgattcaagatcaagagaagtttgatttcaagattcaagagaagagatcaagaagacttcccaagggaagtattgaaaagggattttcaaaaatcaaacatagcacagtttttgttttacaaaagagttttttcaaaattttctaagttaccagagtatttactctctggtaatcgattaccagtttcctgtaatcgattaccagtgataaaatttgatttcaaaaacttttaactgaatttgcaacgttccaaatggattttaaaatggtgtaatcgattacaatacattggtaagtcgataccagtatatct

SEQ ID NO: 100958 - DNA, 454 bp, Glycine max
  unsure (1)..(454): unsure at all n locations
atactgatataattgtacctatgcggctgntaccgaaacattatgtggttatctaccacacatatttctatgagtttaaagtggaattaatgagaaggcactgggacgaagagctcacaagcattgatgaacgcagcatcaatgttgccattgtgaaagaattctatgctcacttgtatgaaccagaagataaatcacccaagcatgtgcgggtcaggggtcctctgattaaacttgatgaagatactctgaatacttttctgaagaccccactgattgtagaagagggggagaatntatgtgcttattcgagatttgcactcctgaggcctgatcctcaggagttagctactaagctctatatccctgggaggggatttgagctaaatgttgatggtctccccttgaagatcttagagaagaacatgactgctctctctcaaacatggagcat

SEQ ID NO: 100959 - DNA, 347 bp, Glycine max
ttgactggtcatacatatccctgcatctcttttttttctaactgcctctcattcttggcccttacgggaatttctctctgatcacctaactctctcatgcttagaggtaggtcacactgttctatgcaatgagagccttctctttggtcttctgacatgcaatctgcttcttgaccatctttcaatctcatatccaagtcaccgatgaccatagtattgtgtcttaccatggacttgtcttgcaaacagaacatccattacatcatgtcatgtgactcaactagcaacctctggacagaagatccacaagtcactcttcacatttgtgctgcactttccctcacttg

SEQ ID NO: 100960 - DNA, 331 bp, Glycine max
atacagtatgtatcatacaggcttaaactttaagatttgaaactgtaccattaccaatttgtatgatagaaggacttgatgctggaattcaatttaaattaagagtcacaattgctcaagagaaataactgtgtaatcgattatgccaagattgtaatcgattaccagtgagtagtttcaaaaaatattcccaacaatcacatcttttcatttgaattttgaatggccatcaaagacctatatatatgtgtgacttgggaacgaaattggtagagagttttgttggtcaaatgtttatctctcacagatatgaagtttgctgtcaaaatgt

SEQ ID NO: 100961 - DNA, 236 bp, Glycine max
  unsure (1)..(236): unsure at all n locations
ggatgagaggaagtgtgattttcgaaatctgcactttatgcagaatattgctgtgacattgtgcacagaattttgcataagtgcagaaaaatgctatgttttgctggttgtggaaagagtagtgcacaattagttctggatgtttgctagtagatcccaacggtcaaaatgtatatttatgtactagagacttccagtaaaanttttaagttgatcccacggttaacgaactggaa

SEQ ID NO: 100962 - DNA, 396 bp, Glycine max
  unsure (1)..(396): unsure at all n locations
cgcgagctctgaccactgttcttcctttccgcgatgcttcttttcatgtccgcctgagtgggcttatagcctaaaccatacttcccacgattcccttgggtttttatcagactagttatgccgccattgtctttgcctaaacccatcccgggttcataaccgntcctcaacataactcgggccatcattaccgccgcatcggacagacaaggttgcccaaagagggagtccacggaggaaatgctgaccacctcaaaagactggaaagcggtttctaacgattcttctgcggcttccacataaggcatggaggatgggcagctcaccaagatatcttcctcgcctgacacgatgaccaagtgcccctccactacgaatttcagcttttggtggagt

SEQ ID NO: 100963 - DNA, 404 bp, Glycine max
  unsure (1)..(404): unsure at all n locations
ctcagcttgtagagcccggtagtcaaagagaagttcaagtttctatgnatcaagtctgaagagagtatgatgaactaagggacgtcaatatggccaccgatgaagccttggaatgagaaaccaagaaggcccgaaaggaagaacacgaccaaaacaagttttgaggggctttatagggcagcaatagtgagctcanactccgaagaggtgaaaggaatcatcacgggtcaaaggcatgatctggaaggacgagctaaaggcttgccttangtcgaaaagaaatttgtcccaatagttaaaatgagactgaagggaatatgtgggccatcatcgatgagtgcaaagagaagctaaatctagcggcgactcacgagcaaaggctagaggatgagtacgccaagata

SEQ ID NO: 100964 - DNA, 343 bp, Glycine max
tcatctagtctcgtaagagccgcattgaaccaagaaaatgctaataaacgcatgtcagataagcaaacatattactgatgaaatggaaagaaccaacaagatataacaacatgtgctagtacatcattattaccaggaggtacattcccagaaagggtatgggtgtgaacatccaaaaccttcagtgaaagagcatcagctatgctagtgggaatggaaccaaagagattattagaactcatatctagcctcaccagcatacccaaatcacttatactagcagggatggcaccggtttaattgtttgactgctaagcaacaactcttatcttttctaagcacc

SEQ ID NO: 100965 - DNA, 353 bp, Glycine max
atgaatgaaatagaagaaaacgaaatggagaggatctaaactcgtttctacatgtggtagctaatgttggatactgaagtggctgtaccaattaaaaaatgcaagaaacatgatgagatgatgtttcacgtaaaaaacatgttaagatgagcgtttgataatcgtgtgttcttgaaagaagaatactgttgaaggtgtctatgaaacaaaaaagattaagtacaaaaatttttctaaagataatagatacaaaattaacttatccattcgaaaatttaatctcagaaatgtcattaattttattagttctgtcgatgtattttgaaaaggtaacatctatttatgagaattat

SEQ ID NO: 100966 - DNA, 433 bp, Glycine max
  unsure (1)..(433): unsure at all n locations
tgcaagctntattattgtttgtgcgctcgttgaattgtggaaaactgtatactaataaggctgatgtagcgacgttatggtcatagacaccccaaaaatctctatgttgtagttgaaattgcggtcaatgaccattctttaaaacctttttggctgaaagtataatgatcttttactttgaagtagatgtaacttgtgtggaatgctttgaaataatagccttttacttcactttttatgttaattctttaaaaattatctttgcttttcactccttgaccttttaaaaaatgttagtactctatactcgtggtggtgcttcttcttctggaagcttctctggtgggattcattgcactagatagtgattgggaaaagggttctactttctttgtgccctacgtatgtgtataacatagttgcacacttcata

SEQ ID NO: 100967 - DNA, 370 bp, Glycine max
  unsure (1)..(370): unsure at all n locations
ttgttgacctttgaagaactgtttattttttatttnattttgcgtaatggggcagcaaaataatgtgattttggttatgttatatgcaggaaggtgaatttttctccaaaaatggattcccaaaatctccattccctaatggttggaaaagaaatggtggactctatgctgttgggttcacaaggagagggctctctggtgcctcatctgatgctatgaaaattgctcangatattggccaagtttggaaacaagagactaggcaaaagaaacaacgcaccaatgcttgtcatagacgttgcatttctcagttctaaatcactctaactctaaatcacatacaacaatatacaagcagtggctgttcttt

SEQ ID NO: 100968 - DNA, 352 bp, Glycine max
tttgctcaaagcttcaacattcaatttcgagcgtgtcgctatattacgggactatatcagacatccgagtaaaaagttattgtcgtttgaatttgctcagagcttcaacattcaatttcgagcgtgtcgatatattacgggactcaatcagacattcgaagaaaatgttattgtcgtttgaatttgctcagagcttcaacattcaagttcgagcgtctcgttatattatacgactcaattagacatccgagtaaaaagttattgtcatttgaatttgctctgagcttcaacattcaatttcgagcgtgtcgatatattacgggactcaatcagacatccgagtaaaaagtta

SEQ ID NO: 100969 - DNA, 437 bp, Glycine max
  unsure (1)..(437): unsure at all n locations
tactaagcttgagcaatcaacgacatatnttttactctttgtttgtttgagcccggaatacatcgagacgctcganaatgaatggtgaacctctgagccaattcaaacgacaacatggtntgactcggatgtctgattgaagtccgcaatatatcgagacgctcggaattgaatgttgaagctttgagcaaattcaaacgacaataactttntactcggatgtctgattgagtcccgtaatatatcgcgacgctcaaaattgaatgttgaagctctgagccaattcaaacgacaataactttttacccggatgattgattgagtcctgtaatataacgagacgctcgaaattgaatgttgaagctctgagccaattcaaacgaacaataacttttactcggatgtctgattgagttccttcatatatcgagacgctc

SEQ ID NO: 100970 - DNA, 429 bp, Glycine max
  unsure (1)..(429): unsure at all n locations
gcttggaagtagaatctctgcattngaattattgggttgggcttttggtttgtgtaattagtttaattaggtagattagatgggcctaatcaaggctcattgttagtcatcttatacgactaacttttgtatagaaaacttttacaaaatgtatataaatccccaatttatagttcttttgtaggattgtaaataaattttgctttgttttgatctcttctcattagaagcctctttatatggaattaatgttaaagtctcttcaatttcagtcaaaaaaggagcaaatttgaagaagtgccaaagtggatgtcgcgataagcgagctccgtgcgcttagcgcgtatcagcaactaagcccagcacaagagcgcttagcgagtcaagggaatttggaaggtgttggatcgagtggcctcaaaataatta

SEQ ID NO: 100971 - DNA, 391 bp, Glycine max
  unsure (1)..(391): unsure at all n locations
tactcaagcttgaaatagagctcannaaatgagagtggtcatgagaattaatgacgacagtcactanggtcangaaagagtgtgatgagctgagggatgtcaacatgactatgatcgaagcattagagcaagaaaccaaaagggcccgaaaggaagaatggagcangaacaagttccgaggggctctatggngcagcagtaatgagctcaagcttataaaggccgagagggatgagtcaaggatggaaaacatggtgttagaagataagttgaaggcttgtcaaagggcaaagagaagtttgacagagcaactgaacggaacggaagagaatatgttgacaattatttatcaatataaggagaaggtgaacttagctgctagtcatgggta

SEQ ID NO: 100972 - DNA, 370 bp, Glycine max
gaagctagagtctatctacacatacctctcttatatttaagctcacctccttgttatgagaagctagagcttagctacacaccccctataatagctaagctcacccccatgacaaataacatgaaaataccaaaaaaaagtccttactacaaagactactcaaaatgcctcgaaatacaatgctagaaccccatactactagaatggccaaaatacaaggcccaaacgatgaaaaaacctattctaatatttacaaagataagcgggctcatgcttagcccatgggctcgaaatctaccctaaggttcatgagaaccctagggccttcccttggatctctagccaatctagctggagtcttctacccaat

SEQ ID NO: 100973 - DNA, 452 bp, Glycine max
  unsure (1)..(452): unsure at all n locations
gtgtggaagggtgagacttcctactnttattcttttaccttagagnggnacctacagatatgtcgcgggggtcaagagaccttggggacgtcatgtggggtgctattgcccaaaaccaagcttgaccaatctcgaccaaacccgggcatagtcagtcagtgagaacctgtgatatacctaaacaggcgagctcctgacagtcaaccgataaaagaacaaagaccataaagcanggaggcttgtgtggtggttggccagcaatgagtcttgagtgagatttgggatatggcctttggtaatcaattaccaagggtaggtaatcgattccaaggcttaaaagtgaagacaggaagctaagatggccactggtaatcgtttaccaagggagtgtaatcgattaccacgcttgaaaacgagatcangaagctaggagggcttctggtaattgatta

SEQ ID NO: 100974 - DNA, 480 bp, Glycine max
  unsure (1)..(480): unsure at all n locations
tagaagctcgacgtttntgggcaccatatacacaattgttttgttttcttcttcaatttcatcatttgatgcatatatatgcatcagaatatgacttcaattagaggcaaattcctcattccaagggtcaagttcttcccacttaattntgtttaagcttggcccctaatgatggtcattgccttcttaaaatcctcatacctcagccctcttggtaaaactgaaaatagttaacttttactataaaaggaaggctttcatttacaagattatactaatcctatcgaaagacagtaatttcaaacagcatgcctgattagtcttaacagtaagaatgtcatcaccctgctctctaatgggcatcaatgtagcttcttcacttgtggcttgcagatcactaccagaatgtcatgcaaaccaagaataacaagcattatggttaaaaatgaanaaagaanacaatatctattangagtctca

SEQ ID NO: 100975 - DNA, 309 bp, Glycine max
gatcttatgacatttctctaaataatatgtaatgagatccatcttgatcaactgatttggctgaataaaatagcctgatctctttaagttcaagcctcattctggattcccgcccaattgcctataattctcctgaaattacattcaaaacactacacttacttcagtaggccccactaatcaaacatgcattatgtaatatggacaattactcgctcctcagcactttacatggcgacagctagagctaataaataggagaaaatgatgactcgtcgaatctactcacacttagcctgttgcactcct

SEQ ID NO: 100976 - DNA, 312 bp, Glycine max
catgacgtggagggtgagccatgttctcagtatggaaattagtagttgaatgcttccaatcagaatattcagaatcaccagcaacagaatacttaaaatgcacagaatgaccaggatgcacactatgcctgactaatctatgagaggttctatctatttcaggatcaaagggttgtatatcacctggattgcccctagtcatgcactatatgcagcaaataatgtgttctcaaacaagcattaggggagggtttaaactacaacaatagtcggacgatatcagaatgagctgaaattttgtgagcaacaccc

SEQ ID NO: 100977 - DNA, 463 bp, Glycine max
  unsure (1)..(463): unsure at all n locations
tgaatctgaagctgaacaatcgggtctgaacatatattngttattagtagattccgagctttcaggatttctgatcaatggaagcatgatgcagcaaagtacttgaactacagctgcttaactcttccttttgtgtatcttggcatacctataggggctattaatgcaacaaaatggtgagttgtggaccaaagttttgaattccaaatatggtggatggaggaaccttgaagaaacaggagattcagcacaacaatctgtttggtggagggatcaaaaacaagctttcaatcaatctcaacagggactgtgtattcaaaataacatgaggtggaaggtgggggatggagagaaagttacattctggacatataagtggagtaatcaagaggagtcgctagcagaaaggtaccccaggctgattattatatgctcacaacagaatcacaccattatgcagatg

SEQ ID NO: 100978 - DNA, 396 bp, Glycine max
  unsure (1)..(396): unsure at all n locations
tggggttcattggtccaacccagcctatgggtgaggcataggtgataatggaaataaaattctggcacacaaatgaacatagaggcagtgatgaagtaaatatattgaaacagaatggatcagaataagaagtgaatgaaaataacagaaagaactactaaatccactgatcagacgcaaagacagccaattcaatgaaaagtttcctagtactggtttttccctcaacttcctgcccctaaaatgggggggcagaaagccatgcaaatggaaatgtnttaaattaaactctatacaaaccataaaaaagggaaacattgttacaaaacagcaagattggtaaaaattccacatattctcaacccgtagggttgcattgtgttccaggacgaagta

SEQ ID NO: 100979 - DNA, 400 bp, Glycine max
  unsure (1)..(400): unsure at all n locations
cctcatcactagacttctccgcgtgcctcatgtatcgaaggatgaaaatcctgctgatagtatggagacgtcagccatggttgcatcttcgggtaaaggaggcggctgcaacagtaaaagaggtcgcagtggaaggggtggatgtcctcattgcacctactacaacaggatgggtcacacccaagagaattgctatttgttgcatgggtttcccgacaaggtcacacatgtttctagatcagagaaagcagagtttagattctttgatgaggagtatcangagtatttgaagcttatattcgagaaacccagcaaccaagctcaatcctcatctgtaccatgttnttcaacagcatgtatctctcaatccattgaaggtcctagtccttggatattcgac

SEQ ID NO: 100980 - DNA, 452 bp, Glycine max
  unsure (1)..(452): unsure at all n locations
agcttccattacaccaaagagaagacaaagatgatttattgcataaatacaagtagtagggatgtctcctccacctctaggacctcacaatcactcagaaactcatctcaagctctcaggatggcttcctctttaagctctggtctctgcagatcttcacacaacaaaatctctcaaactctctggaacttggacctttctctctctagaactctctagacatgcagaagcttcaagaaaaggccatactcccttctctctctaaaaaaaccctcacatgcagaagctccttcagaaaaatggccaaactccccttccaaaatctgatttcaggcttaaataggtggctttgttcgtgctcgtgcacttagcgcaattctgaaccccttagtgcgcattagtgaatttcggcttagcatangcttntctcgctcagcgaatggactggagcg

SEQ ID NO: 100981 - DNA, 472 bp, Glycine max
  unsure (1)..(472): unsure at all n locations
ctcagctttatgtcctaatggattngctttacagttaanacttttatcttctatagttatttgacatatataattntattatacagttgcttttatgtccttatggattttctttatgtgtattataaaatctacctttctatcccttcatgtgtaatggcttgnggtacctatccgaatttttcaacacctcattcattnttctttgatgcaaagaanaataattaccccataaacatgtcacctttagtgagcttaaactttgaaaaaatgaaaattattctataaacaaaaaagtagtaacatatagaatccgaanaaataaaattaaaaaaacaaaaaaaggaagagaacaatatattatgaactacttgaaaaatctgaacaaaaacagaaatcccctgaagaggaagaagaagatacatctncagtaaagaatgaatggaatgaatgcagaaacatttctatacag

SEQ ID NO: 100982 - DNA, 397 bp, Glycine max
  unsure (1)..(397): unsure at all n locations
acaacacttagccatgacagaactgaagggggatttgtctctcattctgttgaagtttcacttctctctctcattaagttactgccattcacctgccttccgtttggttatagaacctggccagggagttgttcttaagatgacaagaatttaagcaacaatgtaacagatgaatgatgaaaacatgcangtaatgggatggttgatatagtcataagacatcatttctctagctgatgaatgctaataagtttttttttttatccaaattagataataatattttttttntatgaaaggaagatattctcatacttcgaagttatgagacgaagatgatcaacaattatcnattgattgaattttttaaagaataatttaaattaaaaaaaactta

SEQ ID NO: 100983 - DNA, 375 bp, Glycine max
  unsure (1)..(375): unsure at all n locations
cgagaaaagagagcgcagcaaataatgctcgtgttctaatatttntaaatgtaagcctaacatcgattttcaacacaaaactgatgttaataaaatgatgttaatgttaacatcggctttctggaagaaatcgatgttaatttatcatacgttcacatcgatcttctgaaaacccgatgttaactaactaacattaacatcgattttctgaaaagtcggtgttaatgaactaaagttaacatcgggtcttgaanaaccgangttaatgaantaatgttaacattggtttatcaagaaccgatgttaatggcagntagtcaacatcgagtttttagaaaaccaatgttaatgaactcacaatttttgcaattatgc

SEQ ID NO: 100984 - DNA, 373 bp, Glycine max
  unsure (1)..(373): unsure at all n locations
agctntattaagaaacttctagcacactccttacattttctcatagatcccaacggacagatcatggaaaggtgttttgtgatatcgcacaccaaatttcgagaagatccaacggttaatgaaggctgggcagcgtttttaccgaggcagcttcatgtagcttcctctagaagcttcattaagaggcttcctgtagaagctccctcgcggcttctttgagaagctatctcaagaggcttctttgagaagctacatccttatgtatccacccctctattaactaaatcaacttccttaaanataattacggatgaagataacgcaacaaataatcgaacatcaaacataattactaataatatatagatatata

SEQ ID NO: 100985 - DNA, 442 bp, Glycine max
cacatcaatagcctcgcttcattttccatcatttctcaccataatcgctaccataaccaaaacatggaccttcattcttctccatttgcacgagacactcaaggagggagaggcctccattttcatattcttccaagctccatctttgtgttgtgagacttctctcaaaaccttggtaagaagaccttaaacctctcttttgttcttatttctttctcatttctgtgcaaaattcttacttgaggttgcaaaattcgcttttcatcacttgaagcttgagactctaagatctgagcttttcttccaggaagcttcactcaaggaaaggggagtgtttctacttcttaaaccctaacctttgtgtctatggaagctatgcttcattacatgttgtgaatgttaaaatatcctatttgctgccatgactagaacttgatgatat

SEQ ID NO: 100986 - DNA, 259 bp, Glycine max
ctgctctgtgcagtgatcccttgatcacctcctatcgaatcgtccgacgtagacgccgattcgcgagtggttttatccctatcataaactatgcatcgatgcttcactagctagcagatagctatcacgaactgactgtgtgtctaactaactgacagtcactaaggctcttagctctgctaactaactgacatttactatggctcttagctcttccaaggatatttcctaacacgcctatttcatcatctatcagaat

SEQ ID NO: 100987 - DNA, 319 bp, Glycine max
ttggacaaatgaatttcaagacatctcagcgatggtgaactcctacatggaccatttaaattacaaagtggcaggtgcttacctgaacctttccaagttggttccagcactattttggaatgatttttcacctttcataatgatcattccggaagccaaataagagagtgaattttggaatgtaattatacattcccaaagacaaaaagaagtgcagatagcaactgacctaagatgtgtacaaagcccacatggtattatacatagctatcattttgttatatattttaggtcaaactagttattttagatcactaat

SEQ ID NO: 100988 - DNA, 440 bp, Glycine max
  unsure (1)..(440): unsure at all n locations
gcaagctacaaggtgtctctacatataacactattgaattctcttttntacaaaccaagcgatgtgagacaaaggaactaagaccacagaactctaacaattctcccacttggggtctaagttccaaactctagcagctccttgtaagcattgagttcatcgactctttacctagtgtagcgccttcatctttaattatcctcgaaggctgactgacgcaatgcaaagccttagctggttagttgtaacaactntagtcaacatatctgctggattctctgatcctaagatcttcagcaagataagtctccatcatttatcaactccttgataaaatggtatcttaattgaatatgcttgcatttagaatggaagactagattcttagcaagccttatagcactttgactgtcactgaacattgaagcattatcttggtc

SEQ ID NO: 100989 - DNA, 318 bp, Glycine max
tttagcacttgcacaactcaaatgaagcctcaaaagaggtcaattatatggccaaccagaaccaccaatggtataatcaaggagacaatgtgagttaccatctgagaggcaattcaggttatcatcaacaaggaggaaatttctctcacaaccaaagttagccttggaggttccacccaggtaataacttcaatatagaccacagggatccatttaattgcccccttaatcagggtctaaatctgtatgaaagaaccaccaagcacgaggacactctggctcagtttatgcaaacttttatttctaataacaagagta

SEQ ID NO: 100990 - DNA, 431 bp, Glycine max
  unsure (1)..(431): unsure at all n locations
taacccactggaccaagtgtgcaccccctggtagagttgggtctaatgggtgccttcctgggagaacctcaagtagagccatgccaaaactgtacacatcactcttttcaattataggctatagtgatgcatgctctgtgcataaaccacaagcaacaaaaattagtactattcaaattantacaaacaaaggataaaatgtgttntaagttttagtgaaatttggttttacttcctacaatttaaaatagtggtttaggtccttatatcttttgaaatgtgatacatctgatccttcatcacatcaaaacanaatatacggtcaaagacaaaattcaccacattgcaaaaatatgataaccaaccactgtttctaaaaacatatggactaaaatcaattttttagcaagtcttgattcttgagtgaccta

SEQ ID NO: 100991 - DNA, 402 bp, Glycine max
  unsure (1)..(402): unsure at all n locations
tactaccatcttgttcgatgacgnnacaagtaccacgatatttcccaattaataataccccatctacttgcacaagtgacttgcaacatttgaagccttcaatgcatggattaaatgcctaaaatacacgattaagaatcaccctaggagggtcatcgtcaccttcctccattgaagatgaagttttgtattttatcatggtacctggtacaaagtgttgaggagctatcaaccatataggcaggtaactatatgattgttcccaacttccaaatgtcatttcaagggctttttgtttagttgtccatgcttttttctatgaaacaatgtaaccaaatcgttgatgcatgtctgcaatcaanggtttgattttgatacctggattcgttttcactaaatgga

SEQ ID NO: 100992 - DNA, 434 bp, Glycine max
  unsure (1)..(434): unsure at all n locations
agcttgtccctcgagttaaatcagttaaaaaagcaaatccaggcggagagaattgtgtgcattaaagtaagattgatatcgggtttcttttcgctcccgtagcttcattcttcttggaaagggtcctgatttttgtagttttttagctgacctgataacttctttcttcctattaattgagaaaaatggcattaacctcttactggtaacatttctacggagaggtaattttttctaattttgtttggctaaactggtggcaaacctttgtttgagtttccagcagtttttctttgcatgtttctgggtacaactttatgttatgattngctaattgaacttgagttcatttaattgaaaatttcaatgttaagatggcttctttttgtactcctttgcagtcagcttgcaatcaaccttagttatatttctgc

SEQ ID NO: 100993 - DNA, 314 bp, Glycine max
atataaattggcttaagaaagggtatacaaacacagaacataagatgcaactaactagcacataacaattggaacattatacaactaagtaaactctgctactaataggagcatctcattctcactagtcacggataattataaatcttccaacaacatttttctgctggtcatgctaataactaaatggcaaaacttaattgaagtaacttacgtgttttcttatgtttgttttccattagagttgttaacttaacaaagattaatctttattgtgtaagttaaagtggcgaatctcagatcttaattaaaaa

SEQ ID NO: 100994 - DNA, 387 bp, Glycine max
atgaagctaagctcttaactgcacattgctttttattataaagatccttgtggaccttacccgacaagacactgacaaaaacttatcttctcttttggacaaatatggaggctggggcaagaaattttttcccatcagaccttggatgcaactgtgatcgatacccatatagctagatcttgatgggtattcaagccatccttcgtcttgccttgaatgttaaggagcgtcccaatcacactatcacaaacatttttctccacatgcataacatcaatacaatgtctaacgtcaagatcacaccagtacggaagatcaaagaaaatggacctcttcttccatatgcaactctgacttttatccttctttttggtcttcccaaataca

SEQ ID NO: 100995 - DNA, 437 bp, Glycine max
  unsure (1)..(437): unsure at all n locations
agcttctcatgacaaaatgccatgatactatttctattctgacctatttgtactgacttattaactatggagtgactgcatcatctacaagtgacaagaaatcagtcaccactcaagaattgtaccatcgtagatagagctatctttgatagcgattcttgcccaatctccttcagaatacatatcgtaacgtttcttgttggaagcgtatgtattatcactttattacttatgaattatgagttgatatatctatgatactcaacgagtgcatcagtgcatgcgatatcattgctctagcacattataagtgagatcatatacaatgatgagagaagntatgaatcatgtagtttgtggctgtcattgtctcgaatcaaaattcaagatgccaaatatncgcacataaaagagatatgtttattctgattttatat

SEQ ID NO: 100996 - DNA, 418 bp, Glycine max
  unsure (1)..(418): unsure at all n locations
agcttaccaaaaaaatgggtcatccgcttttgcaagatgctgataggcacataattagcaccaaccaaatagcctttgaatagattctcctcctcagccctcctcatcaacccattcaaaccttctgcgacaatattaaagagaaagggagctaaaggatccccttggcgaaggcccttttgaggaagaaattcagaagtcggacttccattcaccaaaacagaaatagaggcggatttgacacatccttcaatccacttaacccagtgcggactaaaacctgttctccccagcatataaaacaaaaaactccaagataccgaatcatatgccttttcaaagtcaaccttgaacactangcatgatcgattgcttctcttagcgtcatcaataacccttattgctatgactacactat

SEQ ID NO: 100997 - DNA, 415 bp, Glycine max
  unsure (1)..(415): unsure at all n locations
ccatgaaactccctactggagcatatatgtgtataagagcttncatttttggtcnncttccctccccctatcactttagttggacaattcactttaattccttggtcttcatcttctttacattgatctctcaattttcttgtaatattggtgttgtttaactgtagatcaacaaaaataaaccgattaaatcttagatctacacttgctcttgcatttctatggttcaaattttataaataaactcttgaatcatgtttttgtgttgattttaagttctatcattttttagtcataatattcttggtttgaacctttagatctcaatattcttgccaaatattgattagaaaagaagacaaaaaaatcccaagggaaatcacttcattcatgtagtcctacagtcatgtttagt

SEQ ID NO: 100998 - DNA, 448 bp, Glycine max
  unsure (1)..(448): unsure at all n locations
agcttgacaagtggcctcaacaacttatgtggggggggggggtgaatcaagtttcanaattttcccactaacaaattttaatcgcctctttaaatgatgtatgatagatttaaagtatagaagaagtagtagtaatcaatttaattgatgttctttaaatgtgcaagacaaaatcaattgcaataaagtaaatgagataagggaagagagaattacagactcgatttatactggtttggccacttcccacgcctacatccagtgctcaagcaacccacttgagatttccactatctttgtaaaactctcttacaacttctgaacccacttgagatttccactatccttgtgttcaagattatcacaattcaagagacacacagtctctttgtcacaactatattttttcagaaaggacaatagttttctctctttagagaagataatc

SEQ ID NO: 100999 - DNA, 392 bp, Glycine max
  unsure (1)..(392): unsure at all n locations
attcggacctttaatactaactcgcaatccgtgaaattccgtaatgtggcggatatcgaatagaggtgtnnncgcaatctgtaagtttccgtaacttcttctaaagttaaaaaagagtaaatacataatccgtaaggattcctaaccttgcggaagaaaaataagtatcgntacgaaattcgtgaaatttcgtaacgttacggaaaaagaattaccaagggggtgcatttagtaaaaaggggggtacaaatagcaatctggcccacttgggccttccagatccttcctccagaaggctgttgcttctaaaggaagcaaccttgctcgcctgggcgagttgagctcgcctgngcgagctgtgtggcaagctcctcccctattttgctataaat

SEQ ID NO: 101000 - DNA, 415 bp, Glycine max
agcttgtcctgcatcctactcttaattgttaacagcttaataattctttaagctctaaacccagatgaagtaacttaatgatattcaaatttatttatagagattgtagatatcttttatggaaaacaatcttacggataagttcattatagatgaaaaatctcttctaagtatttaatgcccatatccaacaattatgctcacaaccactagttgaattgaaacaatcacacacctattgatgcacacacactaaatgatattcaaatttaattaagattggctctaaatggaatatatacttgaaagagtttatttataatttacttgaatgtatcctacgattatgtaagtgtttaaacgaacatatgataataacttataatacgttcatgcactatgttcaacttatttc

SEQ ID NO: 101001 - DNA, 353 bp, Glycine max
  unsure (1)..(353): unsure at all n locations
agctggcttntacactggaggactgccacggtgtacaaaaacgaagtcattggaggctacgtcactagaagagtacttatcatactatataattcgtctatagaggcaattgctctagccattagttgtgagcattgtggcacaaagttcatgaatagttggggagatgaattggaagaccactttgggcactccttgtggggaaccaactgtgctaagacctcaagacattatggaaccttattgagcaaggccaaaatatttgagtagatagtcaaaaaggcaatcattcacaaacagggctcanaggatttcttgccaatgcctactagtttattctgtaccatcttatg

SEQ ID NO: 101002 - DNA, 325 bp, Glycine max
  unsure (1)..(325): unsure at all n locations
agctntctatggccttaagcaggccccanactttggtttgaaagactgcaatctactcttcttcaatttggttttgtggcaaacaagtgtgatccctctcttttcatttacaagacttgctctcacactacttatctcttagtctatgtagatgataacatcattaatggcagttcttcatagttgattcaacacctaaccactcaactcaactcaaaattttctcttaaacaacttggtcaactggattactattttggcattgagactaaatctctttctgacaggtctttacttctcactcaaagcaagtataaatgggatt

SEQ ID NO: 101003 - DNA, 399 bp, Glycine max
gcagaagaagaaaaactttttttttaaatatattaactcttattttttaaatgaaggatattattggtacttcattgaattgctgggtgcaccaacaattttgctgggtgcacctagcaacacccttggtagtttccttgaaagagcttactctagccttgcgtagttatcttgtgatgcacatacaatcactacaaaaaattatggcttttttaccatacgattgagggaaccaaagttcattcattgtttcttttaaaatattgaatgtgaacaaatagaaaggaaggacaatgaggatgtggagaacaagacaatgtcatctcacagtggtgatttcagtgctacacgaagtagcctattctagggaatatgtcaaaaggatatttcagtatattc

SEQ ID NO: 101004 - DNA, 350 bp, Glycine max
  unsure (1)..(350): unsure at all n locations
gaatgccaccaaccatattaggggtttccacaaagttacctatccatatgcatgattggcgttgaattacaaacttttctacaaaatttactctcataaataatcctcaaatgttatggttaatacttagttcagtttatttgtattaaacactgtcttggttaatagaaatatctttaatgtcttgactangtcatctttaatctttaatattacgtactctcataaataatcctcaaatgttatgattgatacttgattcaatttattatttttattaaacgccttttttttataatagaaatatgattaatatgttaactatggcaattttttttgggcagatatta

SEQ ID NO: 101005 - DNA, 463 bp, Glycine max
  unsure (1)..(463): unsure at all n locations
gacatctaaattcgatgtacgactaatccccatgcggngtcaattggaacatggacgccagagtggcgagtgcatcgataatctgattcttctctcaaggaatgtggtgaaaggatatgtcatcgaagaactctatcagtttcctgacgtangcctggtagggtatgaacttatgatccctggtctcccattctcctctcaactggtggattaccaaggttgagtccccatataccttgagcaacttgaccttgaagtcaattgcctcttggatcccaagggcgcacgcctcatactcagccatgttgtttatgcagtcaaaacccaacctagccgtgaagagtatatattgatcgtcaggggtaaccaaaacctccccaactccatggcctagtgcattagatgcaccgtcaaaccacataattcatttgccctatcttcatctctcatcctcttcatcaag

SEQ ID NO: 101006 - DNA, 312 bp, Glycine max
  unsure (1)..(312): unsure at all n locations
tccaccaatttccttgggttttattnggctattatgcccccattggctatggcttaacccaatcccgggtcataaccgttccccaacataaactcggccatcattaccgccgcatcggacagacaaagttgcccaaagagggagtccaccgaggaaatgctgaccacctcaaaagactggaaagcggtgtctaacgattcttctgcggcttccacataaggcatggaggatgggcagcttaccaagatatctttctcgcctgacacaatgaccaagtgcccttccactacgaatttcagcttttggtggagt

SEQ ID NO: 101007 - DNA, 371 bp, Glycine max
ttaagtcacctgcggcatgcagccttatctatgatataagaacacaccttatatttatgattgcttatgactcaagcgacaggatagtgatgacataaatatgggacaaaaatgaccaaagaatcgggctaacattgaagaaagagactgtgttcctattgcgatttgagaaaacacacgcagtgcacacacaattcttgcatactgaccatgtaactataaaaaataaggctcatgggctcagtgctcttatatgttgttgtttgtggaagcaaataattccttaaggatagtgtttcctcctttcaaacactattattcttccttaatgaacctccgaacattactcacacgtacctatcggtaacaaa

SEQ ID NO: 101008 - DNA, 310 bp, Glycine max
atcaccttgttaagtcttaaaaatacttgagtcataatgcttctggaagagcattccgcatgcgggtacttgctatgaatgttcctatgaaacatctacgataacacttaacagagtggttagaatgcaaggaattcagacgttatatgcagggtgaatttggtttacacccaagattatttttttagccggtgcgtatttcgatataaaacctatgataaaacgccatttgagtatataactcagttgagatgaccagtgtaaaatcatactacttgactttaaatcagaactcgcacggcatatatac

SEQ ID NO: 101009 - DNA, 450 bp, Glycine max
  unsure (1)..(450): unsure at all n locations
agcnttgatacattaataccaaattttacattatttaaactgtnnttaacaatatcagctcaggtttatgtcaacaaaattttaatattctacattgtagggatactaattttctgaccagataaaaataaaacaaaatgctaatatgcattaaattaaaaaaccttggtatttaaaatgtgttccgtatgttgacggcttaataatattttcttgaaactaactaaaggagtgctgagaaatatagttattcgaagtggcgattttgctggtttgggcatgagatgttctacattttgtcttcgtcttcaatttgcttggagagcaagagaagtgggcctttgcagacaatatatgtgtttgagttctgatggttaacggggggatatttatatgtatacagtaacattttaaaatggatacttgatataatatntttagataattaaa

SEQ ID NO: 101010 - DNA, 417 bp, Glycine max
  unsure (1)..(417): unsure at all n locations
gcttcccgtatccgtacttggaaagatctgtttactgtcttcctaaggcagtatcagtacaattctgatatggctcccgaccgcactcaactgcagaatatgttcaagaaagagggtgaaacctttaatgaatatgcgcanccggggagggaattggcggcacaagtagctcctcccatggttgagagagagatgatcaccatgatggtagacactctgccagtgttctactatgagaagctagtaggttacatgccgtccagctntgcggatctagtatttgccggggaaagaatcgaggtatgattgaaaagaggaaagtttgattacgtttcctccataaatgcgaatgccaaaagaatcggtgcaacaagggcanaaaggaaggaaggagatgcccatgccgtctcttcacac

SEQ ID NO: 101011 - DNA, 412 bp, Glycine max
  unsure (1)..(412): unsure at all n locations
atccttaaccacctgcggctgcagcttctcagcaccaccctntttttctataataggccgaggggggctgtgccaaagggtccctggcccctatgttatgcatttaagctgttttgggcgaaaaaacgtgtttccgtgaagaaaatccaagtcgatgtgcttccataacgcttctgagacatttccatgagcaatttcgtgaagatttttcatcgttcttcgccattcttcatccgttcctcggtctgcaatcggtaagttttcgaatccgagactttcaattcatttcttgttttgtttgctttcatcttcatttcgttcattttcggttttcttttcttccgtttttaacgagctttaaccgatcatttaagtcgttatctcgcctaataattgataaaatgaatttcaa

SEQ ID NO: 101012 - DNA, 258 bp, Glycine max
  unsure (1)..(258): unsure at all n locations
gcctgataggccggcctatatatatatatatatacttatattattttttggatacaattaatttttttctgaaactatcagactntgattacacattactgctctataacttctattcctataatcaaggactttaattacaatttaggtgtgagtcatgttcctttttatattcctcattattttgattgactntcctttntctttaactttcctattatgttcctactccataaaatattaaatatttattgagaa

SEQ ID NO: 101013 - DNA, 329 bp, Glycine max
  unsure (1)..(329): unsure at all n locations
tatattcctcttatttccaaacgtatttcgattgtgcaaaccgcctcaaaatatagagggagttgccacttatctagttancccttacaaagttaagagttcacaccatgtggttatgtgtggtggtgatgtctttgaattgtggcccgtggagtgaaattataaatcaaaattcggggcacgaaagagacanccgccacgtgcacnaagtaacaatgcccattgccacgaaacacatgtctatagtttaaactagtggtctatttgtgggggaaccattannaactttgtgttcgatcaattttaagtgtagntaaactaaaacccac

SEQ ID NO: 101014 - DNA, 368 bp, Glycine max
  unsure (1)..(368): unsure at all n locations
gtcagcaagagaaccttcaagttttctgttttgaaccagtatatcatcaagctgacttgctttaatctctagctcataccgaacttgggttagagaaaatattaacttctcagtctgatccttaatgtccttgctgttagaagcctgttcctgcaatagcctaaagtcaaaaagtaagccctctaatagctcttgcttcctctctaactcctttctaagagccatattttcatataatacattgacattgggcaagtctggctgctcttgcaccttttggattagcacacattgatctctnttctctgcaccttctttacctgtactaattgctggcgctgcaacactagagcaaatttgtggcaact

SEQ ID NO: 101015 - DNA, 451 bp, Glycine max
  unsure (1)..(451): unsure at all n locations
agcttcattaagaagcttcctccagaagctttctcgtggcttctttgagaagctntctcaagaggcttctttgagaagctagatccttatctatccacacccctcttttaactaaattaacctccttaaaaataattacggatgaaaataacgcaacaaataatcaaacatcaaaaaaaattactaataatatatatatatatattagggtgttacaggttgtttgtttagcactattccgtagattgaatttcatagccgaaataaatgataataaggaaacttgaaagatttttgtttgactaataaacatgtggattataccaagatcacctaattttaccatgaagttaatttttattgacaaggaggtcaggttaactatttttttttagtatgttatatccaattggtgtagtaagtgttatgcagaatcaatatgatatgaagt

SEQ ID NO: 101016 - DNA, 402 bp, Glycine max
  unsure (1)..(402): unsure at all n locations
cttagtttcagatgatgtagatgggttngtagctaccttatgcactccnnntgactatggcatcatttctggcactaaactgctgggagttggaggccatcttctcaattaaatttctggcttcagcaggagtcatgtctccaagggctccaccactggcagcatctatcatacttctctctatattactgagtccttcataaaaatattggagaagaagctgttctgaaatctgatggtgggggcaactggcacatagtttcttaaatctctcccagtactcatacaggctctctccactgagttgtctaatacctgagatatccttcctgatggttgtggtcctggaagcanggaaaaaaatttctaagaatactctcttatggtcatccacctcgtgat

SEQ ID NO: 101017 - DNA, 411 bp, Glycine max
  unsure (1)..(411): unsure at all n locations
tattggtgtaactgattttgttgaatgttgagtatattctagcctatataaaatcctttntgcaaagcccaatcagtaaagttcatgtttttaattttaattccggtaaatttacgtttttttttaattttagatcatgtaagatattttttttatttttaatttatgtaagtttatatttttttaaaaaaaattggtacatgtaagtgcaaactcatgggactataaatgaaaaaattaaaaaaaatacaaacttacaagactaaaaatataaaaatattttataaggaccacaattaaaaaaataataatttacaaaacttagaagaatgaatttataaaaataaaaaataaaaaacattaagttagagaaacaaaaacatatctaatattatattcttcactctcttc

SEQ ID NO: 101018 - DNA, 276 bp, Glycine max
gtaatcataacaatatggatcatatttaggagggattgtctacagattgcaaacctcctgccttatagaaactggcttcaatgatactattcacatggcttttgggaaaaggaggtgtcacccttagatggaaaaaaattcttatagtttatcaagcgatccgaacccaaaataggtccttggatcttatactaaggggttaactgttaaacctaaccccttaggttaatactcccaatttaaggtgaacaaattttgggtgatagataactcttt

SEQ ID NO: 101019 - DNA, 356 bp, Glycine max
  unsure (1)..(356): unsure at all n locations
acctcagagtcacctgcggcatgcaagcttctcacagcagactgaattttttttttttttaaaaactcaattnttttatttaanaaacttaacatttttctcttcatctcatctaatttaataaaaaaacatccccttatttctctcctaaatagacagaaaacagttgagaggtagtgtacataaattatataaaatggcacagatatacaatacaatcgttgcacaagagacctcctagatcttcactttacaaagtgcaagaaaaacattcaaacaacttcattggctgcctccaccactgcacaagctaaccaagtcgatcagtgttgcgtataacaaatcaagagacaagt

SEQ ID NO: 101020 - DNA, 358 bp, Glycine max
  unsure (1)..(358): unsure at all n locations
aagaaattcattccttgactttgagacagaaattataatttataggctaaactctagactctagactttgatttaccatttccatctaaatttgcttaaatcttctaagtaccacataatgaacttgatacttaaccttggtcagccaaaagcaggactagaactttgagtgaccaaaaaacagaatgaacatacaaaactttaaggaaacaaacataaattcaatgaatataggtaaaatgtgcggggaatattttaaacttcacaatctctaaggaagccaactttctttgccctcccctnttccactcctcccaaccaccgaaaaaataagaaacaaaaaacgagccgcaagtta

SEQ ID NO: 101021 - DNA, 421 bp, Glycine max
  unsure (1)..(421): unsure at all n locations
gctttacactatgaatggatatattatgttttaatataaaaacatatntaaaggagtgaaatataaataaaaatagttaactagctagtantttttcacgcttcattaactaactagtattaaatatttgtatatttcttaaacttaataactagtccataaatttatttttacatctccagctggccaaatctttatactaaaaagtaaaaactagggcgaaggttacagtgtgtcaaatgattcaccgggggtgaatgtgaaaataccgagaataatagggaaactattttttggtccagttaattggaaaataatctttttttactgcagaaaatagtcttattaagtaaatggcatttatacccncacttaaagtaaaagcaccagctggcatcatctttgattcccacatctaaat

SEQ ID NO: 101022 - DNA, 435 bp, Glycine max
  unsure (1)..(435): unsure at all n locations
ttcgattgcctgcacaaagaatgtgagaaagatgtacatacatgaaagtgcatcaagtgagaacatgagaggagataatcttgattcttgaccaatgaccatacaaccaaaatggatggtttttaagattagatttaacttaaataaaacaatctcaaccatccatgtatggctgtatggccaagattaactcctttcacttctcacactctcacttaatatccttccccaaccacacatatatattgaaaatagagcattntgagtcagagaatagaacaatgaaatgttcaaataataaaataataaacacacctgcctcaatgtcagatttttggcaatagtatcctcgtcagaattgaatttatggctacataatgctgtcattaattcctgggaactgcaacccatcagctgggcagtactggttacagc

SEQ ID NO: 101023 - DNA, 455 bp, Glycine max
gctataataaggtcatgtgaaaagagattgatctatttaatctctaagaaaagaggtcattattctaagtgagagcgatcatcaatttaactgtatgagaatgaccacgtaacgaagttaaagaatttctatgattaccctcagttgcctcctcttcgtcttcagcattttcaagttttcattctcttccaaacttatgtcctagcaaatttatcaataattactcaataaaaatattatttgacaaatacaaaaataataattttacttggaaaagacattaaattattgttttacaacaactacaaattttttaattggttcataaatcacaatcatattagatatattacaagaaatttgtagtggggctgtgagagaagagataaaaagtatgagagtgtgaatcctttattttagaagaggagatagatgagggggaggaagaagacgag

SEQ ID NO: 101024 - DNA, 371 bp, Glycine max
atatttacctcatcttattacatttcaccctacttacaatgcctgatatcagaccggggtcttcaagaaaaaaacttaatggttgtgtatttgggtaatccatcgtgaagtttccggaactaagtttcaatttctgaaaaaagaaagtaaaagtgaaattatatgcttaattttcacatatttttctgtgtattttctctataagggtatgaaaaatatgaaaaccagtatatgctgatatgatcatgccacattaacatgttttaaatatcaggactaatataaattaaatgcattcccgagtattaatccgagacataaacttggatatagcataattcatgacatgtgtctggaaacaataatcactg

SEQ ID NO: 101025 - DNA, 382 bp, Glycine max
  unsure (1)..(382): unsure at all n locations
atccaaaatgagaaggaggagttgattcctactcgggtgcagaacaggtggagagtctgcatcgactataggaggctgaaccaggttaccaaaaaggaccattttccactgtcattcattgaccagatgctngaacgcctggcaggtaaatctcactattggttccttgatgggttttctgtttatatgcaaatcactattgctcctgaggatcaggaaaaaaccacattcacctacccctttggcacttttgcctataggaggatgcctttcggtctgtgcaatgccactggtaccttccagcggtgcatgattagtatntttaatgaatttttagaaaatggcatagaggtgtttatggatgatntcactgtatatggat

SEQ ID NO: 101026 - DNA, 304 bp, Glycine max
ctttgcccaaagaatagaaggactaatcgcctgaattcttttggggctcccttctctctttccaagaaaaatcaaaagactaaccgcctgagaattcttttgattcttcccttcccccttaacaaaagatttaaaaggactaaccgcctgagatatcttttgtttccccttacaaagattcaaaggactaaccgcctgagaattctttgtcctaacgcattggagggtacatcctttgtggtacaagtagagagtacatctacttgggttgttatactgagaacaagagaaggtacatctcttg

SEQ ID NO: 101027 - DNA, 434 bp, Glycine max
  unsure (1)..(434): unsure at all n locations
agctntaagagcaattccctacatatgcttatcatattattcgtgttgatnnagaactcaacggttccatttcatgttcctatgactctccaaatagtgtagcaagagacatgttagataaatctcatgattcagtaatggctgttaccttangttgtcattctctgcttaaacatctcaatactttatttatgagatcttcatttggaaaaattttccctactgatgcaagatgatttactatgtgtgtgaacctcttttgcatgtcttgtatactttcatttgcattcatcctaaatagttcatattcatgagttaatgtgtttatcctagatcttttaacatttgttgtgccttcatgtgttacttgtaaggtatcccacatatccttttcacttttacagtatgataccctacacgattcatccattcct

SEQ ID NO: 101028 - DNA, 421 bp, Glycine max
  unsure (1)..(421): unsure at all n locations
agcttancacactgcatgcttagcgtctatatagcccatagcgaagcccaaatgtgcgcttagcacataagctcgcgctaagcgcgaattcagcgtgaaaattaagctacatggagcctatataaggaggaagaaacaaaagggaaagacataccgagtctcagaactctctagtgaagtaatccaaagtttgagcctctcccttaggggaaaccctctttccttagtcattctccattctcttactattagtcatccatccccttcttctattagcctttgaagtgtaaagtctctcatgcctatgagaggataaaccccctctgttggagcctagtagccaaagcccttgtatgtaactgctcttcttatntataatgcaattcaatttctattgttcctttctgaattttgttgtaat

SEQ ID NO: 101029 - DNA, 405 bp, Glycine max
  unsure (1)..(405): unsure at all n locations
agcttcacgtatacgatctttgtccactagatcacaggaagaaattaaaaacatatttggggattgtggcacgtgataaggtggacatcacctacgagaactgaaaggaggtccctattgcttagaaggacctgatttgggaggatattcaggtatttctcttttcttatttgattntatgtaattaatagccaaaaaatactttattgtaacaaataaactttgtttcatgttgtcaggcagaatttgatatcccagaggcttctgacagtaggacgaaaaggaagttactacagaccgtgggggagagatggaggcaatttaaatcagacctcacgaggaaatgggcccttgcagccgatcaggatggtgttgaggacactgtctgtgacaaatacgacatta

SEQ ID NO: 101030 - DNA, 197 bp, Glycine max
agaagagggaggggttaataaagttctcttgaaagatagtctttttttcattgattggtggaccaaaggctagccagccagcttgctctatgtttgattttaactttgaaaaaaaaatgaaccttgccaaccttggacggatagggatttttattttgtgttttagaggatcaaatctgacattctcccgacttata

SEQ ID NO: 101031 - DNA, 468 bp, Glycine max
  unsure (1)..(468): unsure at all n locations
ttaaccacctgggctgcagctgaagctaaggaaaagcttgttgaatttttggctnttacttgcccaactcctttgagtgacatttgtattggttgctatcttgattgatgcatcttagtacatttgttatctgctttgcatcctgcatcatcatggttagtatcaagaaaagtttctaagttaaaaaaatttcttcagaggtaaaaactctctattttaatcgattacagagttgtcgtaatcgattacaacaagctgtttgaagcttaaagagttaagtctcatatcggcttaatcgattacaatagtattttaattgatttcactgttgttagaccatgactgatctttntcaggagtctcaactttaatcaattaccaagtggattaatcgattacttctctctcgttcaagtgttcaaaggtgaactagaacaccttaatcgattatattggtctttgagtatt

SEQ ID NO: 101032 - DNA, 272 bp, Glycine max
atatatgatatactctgtttcaccattcatagtcttatgaatcattgaagggcttctatttccttcaatatcatattatccctttgataagtgattgttggggcaaaccttctcatattttgataatagatctttcttatattgcaaaactcacccttaagtcagcttatacaatgaactacagaacacactaggggggggggtgatatgtgtatatcaaaataacttttatgattaaaaaatattggtaaattgtctcactacgtaaaaaa

SEQ ID NO: 101033 - DNA, 448 bp, Glycine max
  unsure (1)..(448): unsure at all n locations
agcttaagctctttcaactgcacaatgctcttattatttgaagagtatccttgtggaaccttcacccgacgaagacactgacaaaaacttatcttctcctttttggacaaagtatggcaggctgggggcaagtaaattttcttcccattagaccttggatgcaactgtgatcatatgcccatatcagctagatcttgacgggtattgaagccgtgcttcgtcttgccttaaatgttaaggagcgtcccaatcacactgtcacaaacatttttccccacatgcataacatcaatacaatgtctaacgtcaagatcagaccagtacagaagatcaaagaanatgaacctcttcttccatatgcaactcttacttttatccttcttttgggtcttcccaaattcagtattcaggtattgaacccgctcatatacctgctcaccagtcaacg

SEQ ID NO: 101034 - DNA, 360 bp, Glycine max
ctctgcaaccaaatcctttatagagaacatggaaaaacaatatgttataagcaaaggggaggcacttgtgaaaggagttgggatagggatgtagcaaacagagagtttctattcgtgggctctcattgtatgggttggagctattgcggttagagctggaagagcaactccataagacataatgactgcagtgatgagtattctctttggttccatgtaaggaagaaaccaccttcaggattgtttagaatggagaaaatggttaataattaatgactaagtaacgaaagtatccttgtgaattgcagatctctcacttatgtagcaccaggcatgcaaaaatttaatcaggcaaaagct

SEQ ID NO: 101035 - DNA, 416 bp, Glycine max
  unsure (1)..(416): unsure at all n locations
cttgcattaaatgcatgtcctctccatgttgagaaatcactctctttagttttattgaagcatactttaatagaaaatcatgtgtggttggttagaagagatctatcaaagcaagcacaattaggtatagcagagcgcgtcttttgagaatggttaaactaatgagcgttggaggatctcatgcttcttatgacttcaacaatccctaggaagaatgtttttaagacattgctgcaaaatgaatctcagacatagagtattaaataaagtcttaaatgaaatcttaaatgctttatcaaattataacattngtctgccttcgtctaaaacttcagacgtgggtacaatggtttttgtctgattgcacacaagacataacttttaacttttctatttatttgcatctaatcaaaata

SEQ ID NO: 101036 - DNA, 232 bp, Glycine max
ttagtaaaaagttccttagatcttttgacaacatttaaaagatgtcgcccaatatgaataaatggtactactatgtttttgcaacagtctagtcgaggttcgatatcactgacctctctttacgtcttggggtcttggacttttctcaccatctgactcctagttgccacatatatctgtgcatacgccgtcttcgggatttgtgtctgtgttgctctgctgttagacgctc

SEQ ID NO: 101037 - DNA, 309 bp, Glycine max
ctgcaagctgttgtttgtctcctccacctacattcttatttaacccaacatgtcaaagcagatttgagtgcaattgctgaagatccgatcttatggcaaccgctgaagagataagctgtatttcttccccatcttttctgtgtcttgatccgttccccgtgattttttcaacaaccatgatttccttgattaatcctatcatcacaatgagaattctccctttttatttgcagaagaaaccaaagtaggagtggagttgggtgttacttgccaccatgagaaaggttaaaatgaccatccttggcttag

SEQ ID NO: 101038 - DNA, 384 bp, Glycine max
  unsure (1)..(384): unsure at all n locations
gcagcttggagtttcaagtgccattcgtcttcttctttgtccagtcttcttctggctggaattcatcagtgggctntccttctgtgtccagcatcttgggatgttcccagcctttgatgacagctttccaggttctgctatccagcgatttgaggaaggccaccatccttgctttccagtattcatagttggttccatccagaattggtggtctgttcactggtcctccttctttctccatgttcatcagaatttatctccctagatctcactcagtgatttcgagtgcctgctctgataccaattgaaattctgatacagaggtcagatgtcgtaccagatgtcacgacatcacgcttcagaacatggagattattattgact

SEQ ID NO: 101039 - DNA, 265 bp, Glycine max
tgacacagatgatacctttagaacttcactggaatttgaaaacatgttttacattgataaaatctcattggtgttttgagaacataaagaacatgtcatacatatgtttcattcagataacgggcaatgtggattgatgttctcctttgggggatacacccacgctcaacatactatcatgatgacgctaatataaattcctaacctttttgcaaataaatatgcacccataggtgtgtctatttctttgggatataagtaaact

SEQ ID NO: 101040 - DNA, 445 bp, Glycine max
  unsure (1)..(445): unsure at all n locations
gctaacaaacttagaaatcaagtgatcattaattcctaaatatagggggagtaaacgaatgcacattttatctatatacaattgtttgttgcttgcttgaatcttgatttcaggtattgtattgtcatcatcaaaaagggggagattgtagatgcaattggctttgatgttttgatgatgatcatgatgatgtgttgcaattgatgcaaatgggctttttaagattaaaattcaagacaatacttcaagattacaagtcacaacatcaagatgatcactagaatattaggaagggaattcctaattgaattagcaaaggtttggccaagtgatttaaaataaanagtgtttctcaaaggttntactctctggtaatcgattaccagaggatgtaatcgattaccagtggccaaatacgttntataacagctataaaaatttgaat

SEQ ID NO: 101041 - DNA, 365 bp, Glycine max
  unsure (1)..(365): unsure at all n locations
ttctgctgaatgaagaaagagagaattgctttttggtttttaaaaggccttttcctcttttcttattattttattcaaactctgccccatgttcctatttgattggagcaaaaaaggcccactttctcttnttgactgtgacccatactcagtcacaaaagtgagaaaaatctgacctttgaaacgctaaaatcctgcctcggtttgcgtgccgtttctctgattccagtttctcgcgtttctctgcgtccgccggggccaagttttgaaagtactcaatatatatatcaaaacgctcagaatgaaaccccgagcgggttcagaggttggtttcgttaaattctaagtcgcatgcaccacgatga

SEQ ID NO: 101042 - DNA, 462 bp, Glycine max
  unsure (1)..(462): unsure at all n locations
ctgcagcttctaagctcagggagttacttgggtcttatgtnggatctcaaagacctacaggtttagctaaatatctaatcctttctcttacaggagaattaatttttgaggaaaaaaatattcctttttaggatttgcgtgctcccatgctcctttagttatgttgataaaactatgaatagtttgtgaattccttcttcggattcatatatacaacaatcacatatgcatctagcacgctgcaccggcctatattcaccgccaaaagtggtattatttcatatatatcaacctagctacaaattatatatatatgacaaaaattatagtgtattctagtcaacaaattaatgtatgaaaacttanagatcataagacgaaattattggtctactagtgtttcattttccaattaaagagtataattctaattattatctattggtactctagtgttcattt

SEQ ID NO: 101043 - DNA, 367 bp, Glycine max
tttcaattgattcacgttttcacatgtaactgtttcgccttttgaaccttctttctacgccttttgcaatgttctcttggaaagttgtaataataaagaagcatggctgatgtgagccttgttgctgaaagaggatttttatttttcttttctttttgtgataatgaaagatactgctagggatttaccaaaattcacgtaactgctcgatcccttgatgcgtaagaggatattatgaatgatacactaattttgaactaaaaataaactacaaaattaaaatgtggtgattgttcaatatttttaactatatcttttcatgtcaattatttgcctcatttattttgttgtgtgcatggacacattg

SEQ ID NO: 101044 - DNA, 346 bp, Glycine max
gcaagcttgtatagttccccaatttatggttattttgtagtgattttcgtcaacaaagcttatattatggttaacgtcgtcactagaacatttccattggattaaatgatgaaatctatgcatttttaggtgaaaaacacgtttagttttgaattgcagaatgtatcagttgggctaagcgcatagtcaccactaatcgcagcttcagcgcgcttagcgcaaaggagaatctggcagagcatcagcatcaaagccacgtgcttagtgcgaaatcagtgtgctaagtgcagcatgtgccttcacccaggctaagctcgagactagcgctaagcccaatttcacttac

SEQ ID NO: 101045 - DNA, 260 bp, Glycine max
gcagcttctctttgcagatccattattttctcgccaaaatggcaccggtgggaccacggctagctcattcttacgtcccagcgatcttacaaaggttggacatgtgaaggaggataaacggtttctgggatatgtacaatatacccacgtcatcatggcctccactcctgatttatagttgaatgcatacactattggcgcatattacaccggcccggacgtgctattcttccacaggagagacgatgagctaagacctc

SEQ ID NO: 101046 - DNA, 294 bp, Glycine max
aaaaaacaggtctttgttggtgatcatggttcatgggtggaggtgtgtaccaaattccttttttggtatctgattggaaggttgtcctccggtgattattttgaaggggcaattttatttttgagttgagggaagagatattctattaaaaatgacaatcctcgacagagtgaatcgataagagtgtttcacaccaatgcattttatttgtttgattctagtctccaatttgctctgggaataggggactatgtagtgagagtaggtcaatttccttacatggatcacatttca

SEQ ID NO: 101047 - DNA, 354 bp, Glycine max
agcttctaatcgattacacacatactgttatctattaccagaggagtttttcagaaaacattctcaacagtcacatttttttatctgtttcttaaatggtcatcaaaggcttatatatatgtgacttgagacacgaatttaacaagagttttcaagagccaaaaggtcttatcctcttaaaaagcaaaatagttttatcctcttacaaattccttggccaatacacttgtgattcaataaggaattatttgagtgcctcaaatgttcaatctatctctttcaagagagatttcttcctctcttgaaaagggattaagagaccgagggtctcttgttgtgaaagaattctaaaca

SEQ ID NO: 101048 - DNA, 383 bp, Glycine max
  unsure (1)..(383): unsure at all n locations
ggactgtgctagggagataaacatatgaccaagtgaacatttagccatnntaggcaaaattgggtgtngaagagtcaaattttgatttggtggaattntaggtgtaaatccaatttgggcaaatttagattgatgttatggattggtgtgaggtgagagtttgcttcaaatttacctcattctaaacttcacctttcaaacctagaaaagccattgaattgaggggttgtggacacctagattntgtgttgctgtggtttgaagcttggctttggtttagacatgtttgatacatgatttgggacttgtaggatttgatttgagcaagattggatgaggggaagtgtgattttcgaaatctgcacttatgcagaattttgctg

SEQ ID NO: 101049 - DNA, 427 bp, Glycine max
  unsure (1)..(427): unsure at all n locations
agcttctatggaggttggatcttgagcttctatggggtccttcaatggtgatttttagccatggagttgtagtggaagataaaaggagaagaagtgagaagaggcaccatccactatggaataagccatggaagaagaaacttcaccaccaagagagtgtctcggataagaagcttaaagaggaagcttcaatggaggaagagaatgagagagaaagagaaagagaaaaagtggcatgggaatgaaagaaaaacagggagagaagttgaactttgaagttcgtctctcaagattctcattcatcanagttgccacaagtgttacacgtgcttctatatatagcctatgtagacttcttgagaagctatcttgagaagctagtgttacacccctccaatagttaagctcacccccatgccataataca

SEQ ID NO: 101050 - DNA, 427 bp, Glycine max
  unsure (1)..(427): unsure at all n locations
cctgtgatatcaatggaatccaagattctggttgacacaagtttttaattnnntttataaatgtgacctaagcgcttatgtcatttccaacaatattttaattaaaagacaacctaaacacattgtttccagatgaacacaaataacccaatttgtccaaataagaaaccaaaaccaaatttcgtctaaatgacggtacaacaaaagtgtctttcaaatccaaataaaaactagtacataataatctaaaatgccatatagcttccacctccacctatttaccatctccaacatatatccatctttcagaattaattggcttccggtagcttaggcaacactgcattgaaacactgatgttagtagtggcaccagactctaaccaccaagtgtttctaagtactgaaagctaaataacctcagaaca

SEQ ID NO: 101051 - DNA, 439 bp, Glycine max
agcttgcattcagaccttgatcatgtgcgtgatcaagtacttgctggagaccagattccatcgatggattccctcatcactatgcttctccgcgtgcctcatttattgaaggatgagaatcctactgatggagtggagacgtcagccatggttgcgtctcgaggaagaggaagtagccgcaacaacagaggaggtcgcagtggaaggggtggacgtcctcattgcacttattgcaagaggatgggtcacaccctagagaattgttattcgttgcatgggttccccaacaaggtcgcacaggtctctcgttcagagaaagcaaagtctagattttctgatgaggagtatcaggagtatttgaagcttaaatccgagaaacccagcaaccaagctcaatcctcatctgtaccatgtgtttcaacagcctgtatctctcaat

SEQ ID NO: 101052 - DNA, 418 bp, Glycine max
  unsure (1)..(418): unsure at all n locations
tggatgccaaaagttcattttaaatggtttattgtataaaattttntaagaaacctcttgtttttgaggatcaaactcttccagactatgttttcaaacttaaaaggcattgtatggtctaaaacatgcaccccgtgctttgtatgatagaatgggctcttttcttttataaaacggttttatgagaggtaaggtagacacaactctntttagaagagaaattggcaaggatttcattatagttctaatatatgttgatgatattatctttggagctactaatgaacctcagtgcaaggatttctttgatttgatgaagaatgagtttgaagtgagcatgatgggangaaataagtctttatanggctttagatcaaacatgatagcaaaggtatattcattcatcaacaaaaataca

SEQ ID NO: 101053 - DNA, 207 bp, Glycine max
agcttaaggactagattgtttctaagcattctgttctgctaaagttaagtaattacaactaatgcttcttctcaatcttacaagagaattgatgctcttatttatatttgcacacaactcttacaatatctcttgccacccttatggcatatactcatcatatttttctttgtttcttgaaagcaattacaatataccataccagta

SEQ ID NO: 101054 - DNA, 415 bp, Glycine max
agcttatgctgcaaacatttacaacagaccttctcaacctcagcagcaaaatcaaccacagcagaacaattatgacctctccagcaacagatacaatcccggatggaggaatcaccctaatctcagatggtctagccctcaacaacaacaacagcagcctgctccttcctttcaaaatgatgctggcctaagcaagccatacattcctccaccaatccaacaacagcaacagccccagaaacaacaaacagttgaggctcctccgcaaccttccctcgaagaacttgtgaggcaaatgactatgcagaacatgtagtttcaacaagagaacagagcctccattcagagcttaactcgccagatgggacaattggctacacaattaaatcaacaacagtcccagaattctgacaag

SEQ ID NO: 101055 - DNA, 361 bp, Glycine max
  unsure (1)..(361): unsure at all n locations
ctctagcttctcaaggaagttttctcaaagaagcttctcaaggaagttttctcaagaaagcttctcaaggaagctacctagtctataaatagaagcatgtgtaacacttgttgtaactttgatgaatgagagtcttgtgagacacaactcanagttcaacttctctccctttttcttccttcaatttcgtgctccccctccctctttctctccctctttcttttcctccattgaagcatcctctccaagcttcttatccaaggctcatcttggtggtgaagctccttcttccatggcttattccttaatggatggcgcctcctctcacctcctttcctttgtcttccgctgcatctccatg

SEQ ID NO: 101056 - DNA, 391 bp, Glycine max
  unsure (1)..(391): unsure at all n locations
taatattnatagtaccttgattttcagccttggtatttggctatattatntatggtattgaacaatttactatttccctanttgcatggtatgtttgaaaaaatattaagtatgttatttgactatgtggagtttataattaatctatgcatggttgtttgcttcatggtttcatggttcttgcttcttgcttcatgatttgtttgatattttttatgaacattgtatggatgtttaaattaaatttgtttgatacgcactttggctttttgttgatgccaaagggggagagaaatgtgattaattcaagaattcacatgaataatcaacttattnttaatataagcataaattcnaaaacanaggggggagaattatgagagtgatcgac

SEQ ID NO: 101057 - DNA, 465 bp, Glycine max
  unsure (1)..(465): unsure at all n locations
agcttgaaggtgcataacccaccatttccataatataacactggtaacgtgtctactatcattgtgataatctctttctctgttattgggggcgctacttgagctaccaagtctctccatctttgggcgtatcctttgaaagattcgtgccctctttttgcacatgttctgtagttgcatcctatccgaagccattatactgacactgcctaacgaaggcaaccactaggtccttccaagaatggactcgggaaggttccaagttagtgtaccaggtaacagctaccccagtaagactttcttggaaggaatgtatcagcaattcctcatcttttgcgtatgcccccatcttccgataatacatctttagatggttcttggggcaagtagtccccttgtacttgtcanagtccaacaccttgaacttgggaggggtgatgatagtgggtactangaacaactctt

SEQ ID NO: 101058 - DNA, 256 bp, Glycine max
aatagctgtctgagctggcttcctgcctctgaaaaattaataggtagggcattcccattctaacagttctttatgatataggctaagtcaatgatcgggcttaagttctcgtaggatggaagagcatcagatctaacttcattcaacctacacaaagctgcgattaaagctgggaagcctacgagagaagagatagactaaaccatcatgtgtatttgtccagagatcaaaccactaacgttcatgtccattcttg

SEQ ID NO: 101059 - DNA, 337 bp, Glycine max
  unsure (1)..(337): unsure at all n locations
tcttttataataaactcacctcttgccaatttttgaccgagtggatggtacctgggatgatcgcgaacctttgttcgggggagcacaatgacaacagtagagtacgtgaagtgagattcttttgtggagcccccgagccgacgcgataacattgggattattttgggagagagttgtgtttcgttaatcaactcctctgttgctggttccataattctttttttttataattgaggatggatatcaataatttaattatacgtttgaaaaaatattctttccattatgtgaatgatgtgtnctgaggtactatatatatatatacatatatgtatat

SEQ ID NO: 101060 - DNA, 341 bp, Glycine max
  unsure (1)..(341): unsure at all n locations
acttaatatgctacaaacttcattctaaagttcaacaagtgtaccatgctttattatatgcttgggaacttccctgagaagctttcttgaaaaacttcctcgagaaacttctttgagaatacttccttgagaagctagagcttaactacacacacccctctcataactaagctcacctccttgagaagcttccttaagaagattcataaagaagctagagcttaaccacacatacctctctaatagctaagctcacctccttgagatgagaagctagagcttatctacacaccccctataatagctaagctcacncccatgacaaaacacatgataataca

SEQ ID NO: 101061 - DNA, 463 bp, Glycine max
  unsure (1)..(463): unsure at all n locations
agcttgtangattatggngtacccatcacatgtggttctatgtggcggncgggcgatggtgcacaacaagttttccacatccacaaagcgcgcataaacccaccatcctctgttgcccacctccaactgagctcacgtactcccacgtagcccatatcctcgttcctctcaacaccgagtccccattaatcctcccaagctttcccaacatccaagtaatacaacattcagacagcacaaattatcacagccaagcaaaacagggcaaaggcagaaaactctgcccaaaacaccaaccaaaatcacagcttttctcacttaaagaccccaataataattccttcgntccaattcgttaaccggtggatcgactcgaaaattttactggaagtctctagtacataatcctacattgtgaccgttgggatctactaacanacatcccaaactcattctgtactac

SEQ ID NO: 101062 - DNA, 345 bp, Glycine max
  unsure (1)..(345): unsure at all n locations
gatgatcccattactggttcccctaaactctctgccctttttcacgctgcattccatgccttgcgaactccttggagtaccctcgcgttgtggtcactgaaaacctcgtgcgatgaaaggcgtgatgctttcgtctaatggcgctcctctcatggggtagccaagctgtcttatggtgagaacgggattataattaatacaaccccttgttcccatcaagggaacatttggacatccttcgcatgaagatagaatcttgattcttccttccttctagcgagggaaccaattaacagacgcccncncatgctagccaagagttggtcccaattcgcctttcctttt

SEQ ID NO: 101063 - DNA, 468 bp, Glycine max
  unsure (1)..(468): unsure at all n locations
agctngcctcatagagatctaggaaggacgctgcggtctttggactagtgccgctcccgagttcgatagccatcgtttcaagagcgctgagcaccagcagcatttcatagccatcaagggatggtccttccaccgagagagacacgtccagctcaggtgcgacgagtacacagattttcaggaggagatacctcgccggcgttggatgttgctggtcatgcccatggtcaagtttgatccggatatagttctcgagttatacgccaatgcttggcctacagaggagggcgtacgggccctccggtcatgggtaaagagccagtggattcctttcgatgcagacgccctcagtgtgacatccttgannattctacctgaaattttggaaaaacgtatttcgatgattattatatatatatatatatctatattttatatataagattaatcgtgttatgcatcatgtct

SEQ ID NO: 101064 - DNA, 396 bp, Glycine max
  unsure (1)..(396): unsure at all n locations
tcctctaagccacctgcggcatgcaagctgtactttgttcatattcaatttactcttactaatatatngnggaatattcgtttgtttttcataacatatgggacaaagtatttttaaattaaattgtgagagatataaaatgtaatttatcactcttaacgtgtattatcattgaaaatgaataaaagtataacatggtgaccgtataatgaagtaatacgtcaatttttgcaatgcaagaacaaagtattttggagagcacgcatggtacacagatatttcattctttagtattagacgaatattatttaagtngcattagaggtgatatagatcaagttataggtgggccaactcgactctcttatgataaaatgtaggacttgaatattagat

SEQ ID NO: 101065 - DNA, 326 bp, Glycine max
actgtaaaagcctgaattgaaccccattccaaaaactggtcccatttactccaggaatcataccccagtattctcaatgggcttcacgatcttcttcagagagaaatcataacatatatttggcggattggacaccaaatcgttgaagacgatgggacttaataactggctcaatttgttgacgccagagaagaaaagttgaatcattatgtttgtgtgaaattggattatgaaaagaggaagacatgagagacgcattctgtcatggcaccatgggaatctcccaactctgatccttttaaatatacagaatcttatgaaattaa

SEQ ID NO: 101066 - DNA, 409 bp, Glycine max
agcttatcttattaatagatagacgttgcgttaagttacatatattatatgttaagatgttaatttgtgcatcaatttcaattatgagttctcttctcaattgtattactacacattgagtgtcttttgtctcacattcccctttttgtgggcaacactaatgcatcttttttccgataaatattcaactttctgctctcaaatccacacaacagacagtacactagcatacacgttcatataaagctctctttcttaacaaaaattctattttcattaaaattacttcggagcattagtattcattggttcggggatcttttgttgcacacgcttgatccaacaagttgacgtattttgtgagaataacacatcaattttaagtaccaatggagcgagacattttctt

SEQ ID NO: 101067 - DNA, 382 bp, Glycine max
  unsure (1)..(382): unsure at all n locations
agcttgaatttctnttatgaataattttnttatacaaattanaatacaaatattgattaaatgttttattgctggagatttgtattaaagagataaaactttaaaattgttacatgtgctgacaaataaagagtgctgcgacatatcaggcacgcctccctgctagccaaaccattatagagcagacaaaaacgaacatagaaaaagctcagtgttagaatgtctacagcatctgaaggacttgtatttgtatgctttttgttgttagctagctagacaagcctttttgaaatcatctcacgtaaaaacttgataatttgtgttaaaaaaagacaagcaattatttacatatagtttttctaaaagggtaatcaacatacag

SEQ ID NO: 101068 - DNA, 277 bp, Glycine max
tctaatggtaaagattaccttgggacctatgcattgaacattagaagttgtaatgcctaaaaaagttatactggcaggaatgattcataagatcattctaccaaatctagacaaagagtcatgcaaatatgggttgtctagggtgatctaaccttgctacttacatgagacatctccatacttcatgctacttggagcttgagaacttaagttatatgaaattcagtctggtttcacttaggggacatacatatcggtcaaccgtattcgattactt

SEQ ID NO: 101069 - DNA, 425 bp, Glycine max
  unsure (1)..(425): unsure at all n locations
ggatccttaagcaccgctgctgcagcttaancattcaattttagcgtctcgattatgactggactcaatcagacatccgagtaaaaagttattgtcgtttgaattagctcagagcttcaacattcaattttgagagtctcgttatattacgggacacaatcagacatccgagtaaaaagttattgtcgtttggattggctcagagattcaacattcaatttcgatcgtctcgatatatgacgggactcaatcaaacatccgagtaaaaagttattgtcgtttgaatttgcttagagcttcaacattcaattccgagcgtctcgttatatcacgggactcactcagacatccgagtaaaaggttattgtcgttgaattgctcagagcttcaacatcaagttcagcgtctcgatatatgaccgactc

SEQ ID NO: 101070 - DNA, 358 bp, Glycine max
  unsure (1)..(358): unsure at all n locations
actttactcgatgttgtttgagnncctttatatcgagacgctcgatattcgaattgttganagcctcttgaacacacatttataccacaaattaactcttttactctggatgtactgatatgaggctctcgccatatattcctgaccgctcgataaattaatggttgaactttagggccaatatcaactaacataaatggtctcctatgattggtgaatgacatccgtcttatggtgagaaccggattataattaatacaaccccttgttcccatcaagggaacatttggacatccttcgcatgaagatagaaacttgattcttccttccttctagcgagggaaccaattaacagacg

SEQ ID NO: 101071 - DNA, 476 bp, Glycine max
agcttctacatatcaccaatcagggttatcttttgttctcttcatcaatgcaagggtacaaactggattgattgcagcagctgctacaaacttgtctggtgcctgcagcaattagatagccacaaaacaatattctatggtaaacaaaagccaccagactgcaattcataaaatcagagtcttacacttgaaaagttgcccttatccttaaagtagacattattttgtaagccataccaattggtttaacatatccatatatgctacatttgtataaataattacatccaacacttcattatatctttttttttctctcctattttggcaataatattagtcatgatatctaactataaggaacacaacacaagctttgttttatcctttatgtaattgttcctactaataagtaatttctacaaacaattaactcaaaccgctttcatattggtaacaaaagtcaactgatgtta

SEQ ID NO: 101072 - DNA, 433 bp, Glycine max
  unsure (1)..(433): unsure at all n locations
tccaatgaggtgacattgaatatacctagtgttactacctgatatacnnntttctgctcgatttattgtcaattccaactgcatcaatgcatctttaacaagcataccacgaaccanagcagcaaccaagttgacgatctctcgactctaaaataccatacaaaacaaggtagggtaaaagtgcaactagtcagatattaatcagatccttcttaaaccataaattaagacattttccacagcaaaccatggaaggcatttcaacggctaaaaaattagatgccaacttttctgcaaaataacatgatggttaaaacacagaagtttcttagcaagtagctatgcagtggcaccacataaatgtaacaaaacaatggaaattttcaatatttatgatattgctaagctgaacatacttgtgatgatacttatg

SEQ ID NO: 101073 - DNA, 426 bp, Glycine max
  unsure (1)..(426): unsure at all n locations
agctnngtggtcggnccatgtttttctttctgtatcttgtttgngttgatgagaagaaagaatgggaggttgtccattggcaaaatttatatttgattntgttagagaattaataatcctgaaatggtggctgaggaaatgagtggatntaaatctctgtcatggccactcaaactggagtcgttagacttgaagcatggacagtgaaaaagtttctttttacctcgtgatgaaatttagttttattacaaaagatttacgttatcatggatcaatccaagtactgtccactgagttgttgaagctttggtatcatgttaagaaccagtaatcttaaagcttaagtaattaggtagaggcatattgatgganttgagctcctaactagtacttattcatgtcagacatcaatatgcatattgatct

SEQ ID NO: 101074 - DNA, 299 bp, Glycine max
ctatatatatgcctgctaatggtggagagatgaagacttaagatcttgatcaagtaaacgtgttaggatgaaaagcataactattgcttgaaaagattccacgatggtggaggcgttttccacaacttatttaatgatggacatggatgtgactctatcagtctcgacacaagagtaaatgaccggatctataagtactatcgtcggattcagaaacaggaagtaaaggaagcgttgaaaagaatgaataatggtaatgcggtggggcccacaacatacctattgaagtgtggaaactc

SEQ ID NO: 101075 - DNA, 360 bp, Glycine max
  unsure (1)..(360): unsure at all n locations
agctngtgcatccaataccctaatgaggatgtcccatatgttcttaaaattggactgatccattngcttccaaagttacatggccttgcaggtgaagacccgcacaaacatttgaaagaattccatattgtctgctccaccatgaaaccaccagatgtccaggaggatcacatatttttgaaggcctttcctcattctttatagggagtggcaaaggactggctntattaccttgctccacggtccatcacgagctgggatgacctcaagagagtgttcttagaanaaaaatttcctgctccaggaccacgaccatcagaaaggatatttcaggcattagacaactcagtggagagagct

SEQ ID NO: 101076 - DNA, 238 bp, Glycine max
accctagcctcttttttcatgctagaaatgttcgtccaaaatcaaccgagcgctccgtacgtttcggagtgatttccgaagtttcaccgtcttcacattcttattcgtcttatcgtcttcatcttcacgggtaagtacctcataaccaaacatttcaattcattctatgtactcgtggtggtccacatttggtgtcatgtatctttattctccgtttcatttactttttatacccccc

SEQ ID NO: 101077 - DNA, 468 bp, Glycine max
  unsure (1)..(468): unsure at all n locations
ggatccttaagcaccgcngctgcagctggtggagaactggaaagtagtctttcttttntatttgttgaccacagagtggtacatggacatatgtcatgggggtcaggagaccttgnggacgtcaggtggggtgctattgcccaaaaccaagcttggctaatcccgacccaacccgagcatagtcagtcagtgagaacctgtgacgtacctaagcaggcgagctcctgacagtcaaccaataaaagaataaaagaacaaagtccacgaatcaaggagggttgtgtggtggctggccanctatttatcttgggtgttgtctgaaaaataccctctggtaatcgattaccattcgtgggtaatcgattacatggtttaaaaatngaaacaggatgttaagtagcctctggtaatcgattaccaattgtgtgtaatcgattacacagtgtgatagggcactggtaatcgata

SEQ ID NO: 101078 - DNA, 470 bp, Glycine max
  unsure (1)..(470): unsure at all n locations
agcttcgcttcttcttatctttcctccatgagagaatttattctctcaccaagctcttcttgaaatctcttactccatccatgtcaagcccacccaagtcaaactcttcctctgtggatagtcctctatcattctctccttcttgggaagaattcatcctctaattgatgtcaaaggtacttacatcacaaagagtcaagtccgtaatattaaaagtgttgctcacaccatagtcaaatggtaaatcaattttgtacgcgttattatttatgcgctccaatactttaaaaggaacatctcccctttcttgaagtttagatttccttttggaaggaaacctattcttcctcaagtgaatccaaaccaaatcacccggtttaaaaaccatcttctttcttgccttattggcatatctagcatattgttcaacctttntctcaatttgtgctttcaccttctcatgcaaactc

SEQ ID NO: 101079 - DNA, 327 bp, Glycine max
aaaaattaatttaagattaaatattattttaagataggaaaaataattatattatgaaaaaaaattatgctgtaacacatctaaatgtgactatactctaacggttttagataccactctcacttgattatgtaaaagagttaagctcaagtatttttaaagataaaataatttaagagaaattaataaagataattgagttatagttaagttaggaaaaattaataaaaataattaaattataattttcattatgggaccaaaataggcttagggtctatttttgggcttagaggttccttataagttaaaggaaaaaattagaaa

SEQ ID NO: 101080 - DNA, 402 bp, Glycine max
agcttataagcgcgagtctgggagacgaatgtcaagtggtcgcaatataagaagatgatgttccgagtacattggatttggtacgaccttgccctcctgatttccagctggggaattggcgagtggaggaacgccccggcatttacgcagcgagcataatgtaaacctttacggttttaaaagctctatagttgggcctaggctttatagtttttcttttggttaaggctttgtgtattctggtttttaaatttataatacaaggatctttcttcatctgttcctacgtctctacccattctcatccatttgcatgtttacttcttttctgaaacggcagatccgatgacgagtcccccgaaggtactaatacctgtgatttcccgcactgatcacaggact

SEQ ID NO: 101081 - DNA, 415 bp, Glycine max
  unsure (1)..(415): unsure at all n locations
agaagaggagagattagagagggggagcacgatttttttggnnactatttatagaagttgaaccttgagttatgtctcacaagaatctcattcatcaaagttacaacagtgttacacatgccttctatttatagactatgtagcttccttgagaagctttcttgagaagcttctttgagataacttccttgggaagctagagcttagctacacacacccctctcataactaagctcacctccttgagaagattcctaaagaagctagagcttagctacacacacctttctaatagctaagctcaccttcttaagaagagaagctagagcttagctacacaccctctataatagctaagctcactcccatgactaaatacatatgtgataccctaatttcatcccgcgaatattac

SEQ ID NO: 101082 - DNA, 468 bp, Glycine max
  unsure (1)..(468): unsure at all n locations
agcttgcatggngctttggctggtgtgagaggtctcttctctccgtcacagnggatggagcttgaacattttgttaatttagttgctgaacaattatttagttattaatattcagcttntttgttttgttaattctattattctcaccattatttagttattaatatttagttttttatgcttcaacactaaattgcattttaatggtatattgcaaattaaaaaacgacccgtgcgttacgcacgggtttatattataataacgatatagtgatagtaaaataggtcattttaaactaattaatactatntagtttttggattgtactacataaactaattattttaatcttaaaaaatatgtctttttaaaatatggataatagtgtaataatagattattttaattacataagcatcctcccattaacaagttgttggtctgagtaatattagattcaatcctct

SEQ ID NO: 101083 - DNA, 329 bp, Glycine max
cttctttttatttcttaaacgcgattggcttggctttgagatgatatgcctttatgtagtgtgaaaacctaccatttgtactttcataattaatcttcaagatttgtcataaccattctcttattactttgtttattttgcccatgtatggcacttcttgtagtgataccaacaagttaaagatagttgacgtcacgagactacttgatgttacattaatacatatgatactccttttgtatacatcacaatttttgtgcattggattatacaataagtgatgcaagtatattattatctttcattcttggggagattctaatgatatg

SEQ ID NO: 101084 - DNA, 419 bp, Glycine max
  unsure (1)..(419): unsure at all n locations
ctgaacatattaatatattccacctactatttacttatttatataaataactggcaagtaaggatatttttgtaaaaataattcatacacgagatattctaaagcgggtcttatataaaagggcaaacacaatctctattaatccatttgattgacaagagatttaaggtcatgttgcggctatttagccgtaagtgaacttgcatttaatttccttcgcgggaaaatttctttgaaccatgctctgcaagcatgaattagtgtgtctgtaatccaatagattgcgggaatattcattgtctctaacccaatacaaaaaaaataatctttatcttggttcttataaaaagcaccaaaaggaaataattgtcttggagtgacaacaaattgatgttaanaaaaatgctcatttatatatt

SEQ ID NO: 101085 - DNA, 209 bp, Glycine max
gtgggtgatatagtgaggctacctttgtgtgggacatgataatggcctatcaccttttgtagtcggctgttgctaaagtgagagcccgtatcattgattatgaaccctatgcactcccaaagcgagcaaaaatatttttcttaagaaactcactacaattttggcatcattctttggggcaaccactgcttcaacccctttgccgatga

SEQ ID NO: 101086 - DNA, 430 bp, Glycine max
agcttcatctcactcaaaccaaagtttgaatttgtttcataatcccaattgtagttttgtagcaataattgatgtgtaaaattgtgaacagatgcagctgatacggccgcagagaccacaaaaatccctgaccttggagctgcaattgcatccaggacaatttttaaaaacctcgactcacaccacttcatcactagcatttcatggagaaccttgttaacaaatgcaagtcaaaccacgtctcttttattatgcaaatccctttcgggtatatacaaaatcaaaacaaagagcaaaaaaagcaccaacatgtaaaaaataaaacaaaatacgataaggggttaacgtcaaagtaccatcccagagtgacgatgaacggagtgtattcttctattggaacccggaagcatcattttcgacgggataagct

SEQ ID NO: 101087 - DNA, 426 bp, Glycine max
agcttcaactaaggggagatggaccatttcttgtgcttgtaagaatcaatgacaatgcttacaaagttaagctgcccggtgagtataatgttagttccaccttcaatgtctctgatttatctctttttgatgcagatggagaatccgatttgaggacaaatccttctcaagagggagagaatgatgaggacatgttcaagagcaagggcaaggatccacttgaaggacttggaggacctatgacaagggctagagcaaggaaagccaaggaagctcttcaacaagtgttgtccatactatttgaatacaagcccaagtttcaaggagaaaagtccaaggttgtgagttgtatcatggcccaaatggaggaggactaaatgacaccacttttgtctcaatttagagtgtttagtttgtctaaataat

SEQ ID NO: 101088 - DNA, 282 bp, Glycine max
cctgctatttctcttccattcccacctaaagcaatttcaaaccaaaagaaggaagaagtggaataagagatcttggagacctttaggaaaagaggggtgaacatacctctgctagatgccctcaagcaaattccaagatatgccaagtttctaaaggagttgtgcacccacaaaaggaagctcaaaggcaatggaaggattaacatgggcgaaaatatgttagcattgataggtaaatttgttcctcacattccttgaaaatgtaaggacccaagtactttc

SEQ ID NO: 101089 - DNA, 441 bp, Glycine max
  unsure (1)..(441): unsure at all n locations
agcttctccttccttttcctataaatagggttaggagggaagaacaaaaatgttcaaccctcctggtatctgagattcacttaaaattagtgagaaaaattgttttcgtgaagaaaatcaaagccgaggcgcttctataatgcttccgtgacgtttccgtgggtgatttcacgaagatttcaaccgttctttgtcgttcttcatcattcttcggtcttcaaccggtaagttcctgaaatcgaatttttcaattcattctatgtatccttagtggtcctcatttgtttcgcgttcttttatttccatttcattntactttcgtagccccttntgacgtgctttagtcatttatttaagtcattttctcgcctaatcaaaaataaaatatatttccaccgatcattcatattgtaacatcctttaatttctgtaaaatgaatt

SEQ ID NO: 101090 - DNA, 281 bp, Glycine max
  unsure (1)..(281): unsure at all n locations
ttttgagccatggccaagttgggtcctctttttgtaatattaaatagttttttttctttgggccctgtattttggccattctagtagtatagagttttagccttgtatttcatggtgttttgaagtagctttgtagtagagacttttttgtattttcatgtattttgtcatgggggtgagcttagctattatagggggtgtgtagctaagctctagcttctcatctcaaggaggtgagcttanctattagagaggtgtgtgtagctaagctctagcttctc

SEQ ID NO: 101091 - DNA, 338 bp, Glycine max
  unsure (1)..(338): unsure at all n locations
atcctctaagtcacctgcggctgcaagctgctaatgtagaacggggggttgttttctcgtgttcttacagggagcagtccgtgtgctatatggacgtctcttcacggtggtgaattgttgggctgtgacctacatccatatggaagcaccatcgtgtgatctctctgtatcgtcctctgcctatatatatgcaagatgccctgtcattctcacatataatcttccatttgtatactacaaccatgataagaaaagctctctgctntccctccggtggatgtagcctcgatcaaagcgaaccacagaagattgcgagcgacctaaccttcttttcctct

SEQ ID NO: 101092 - DNA, 364 bp, Glycine max
  unsure (1)..(364): unsure at all n locations
attctccctaaagggcgataaatcataatggtgaacaattttntgaccaaagcacatttcacaattactactgctcgctacatcagtacatctatatggtgtatagctcagcctgcaaatgaagatacagtataaatgtacacaaatcaaatgttaatctgttaagcgtattctataataagtctcaagcttggacagttaggcaaggcgaaccctgtacataaaagagactaataacagtataaaagaactcagattaagcggactagagtcttaaacctcttttatttaagtttctcttttaagaaaaagttcttcttaattaaaatggctttctaaaagaatttacaatgattatatttat

SEQ ID NO: 101093 - DNA, 354 bp, Glycine max
acaccaaccaaaatcacagcttttctcacttgaagaaccccagtacaattccttcgatccaattcgttaaccggtggatcgactccaaaatattactggaagtctatagtacataagcctacattatgaccgttgggatctactatcaaacatccagaattcattctgcactagactttccacagccaatcacacacaagcatttttctgcacttgtgcaaaattctgctgacaatttcacagaaaaatctgccaaagtgcagatttcgaatacacacttaccctcaccaatcttgcccaataaatcctacaagtccaaatatgtataatcatgctaacccaaatcaagcttaa

SEQ ID NO: 101094 - DNA, 406 bp, Glycine max
  unsure (1)..(406): unsure at all n locations
atcttagcanactngacatctcatcttcttctggattctnnctcgngcttagccactgaaggttgcgcttagcgaattcttgctaagtcagcaacttggcttagcgcaagagtgaaaaacagcactttgccaaagttgcctatgtaacctgaaattgagagaaattgattattaaacgcacaaaacaaaagtataaattatctattacctatatgtaaaaaaaagtacttatagtattacaaaacaaccataaattgggaaagttttatacaatatacacaggttttatacacaaaagttagtcgtattcatcgactaacaactcccccaaatttactggtttgcttgtcctcgagcaaagagaatagctcactttgtcctcagtggtaaaacatgcagtggttat

SEQ ID NO: 101095 - DNA, 354 bp, Glycine max
aatgcaaggtgccatacccctgctatgttcctcaaaccccattttctgggatatgactcgaacgcaacatgtgcatatcgtgaagggcccttgggcattccattgaacactgtatgacccctcagccgtaatgtgcaaggtctaattgatgcgggctggctgaaatttgaggagaatcgcgtgtaaatcctgacattgacaagagatgccacacatggggcaattttgaaagttgttgttagatgtctctaatgactcatcaagattttcatgtgcgagccattggtttgtttgctcaagcaacctgcgctcctgagtgttgaacttccaagaccgttcaatcagagattactc

SEQ ID NO: 101096 - DNA, 407 bp, Glycine max
  unsure (1)..(407): unsure at all n locations
agcttgcttctacactacgtaggtctgagtttctcatcgcacttgaggatacataggagcaagggaaacgctcttgtcgaccccaaaaagtcaaaaaacattaaaaagggaaagtaaataaatattgaagtcatgattttgcacacttgattaaaggttgtcgtcccttgtgacggatgtgtggggtgctaataccttccctacacgtaaaacaactcctgaacccatattcttaaaatttgcagacccctttttggtttttctaatggtccttttggtttttctaatgtttttcttgaataaatgttggtggcgactcccgtgcattttcctttntggaagatgcacccattgagtctcaccttgcccttccaccgaagggtaggatgcgacaaatgtaaaacatg

SEQ ID NO: 101097 - DNA, 316 bp, Glycine max
  unsure (1)..(316): unsure at all n locations
tctttaagatgggattntagactaagaaatatacatgttatttaagatgtttctaataacaaagttacaaatgctaataataatattatatatatccataaaaaaataggcccatacatttggtaaatgaattcggtggacaccaaaatcacagaaatgtaactttttctatgataatcactatcatagcaaccccagttattcttgaagtaaatgacaaattatagggggttgctaaagaaatctaaatacaaaaaagaatgctaaacatataacactccaagtggaagacaaacccaaatcatatccacacatg

SEQ ID NO: 101098 - DNA, 360 bp, Glycine max
  unsure (1)..(360): unsure at all n locations
cgattacccgatcatgtatgccagtgtcgggtttttcaagatgacgcgctatacatcaaaggaggtcatagggaggaactggtacgttaccgttaactttctcatggttaaacatatttttagtttgtgtaaaaatataaaataaattaattatattattgaataaggaacgctagtaatatattctctaacgaaaaattatgtgattaagactattataatcttaactaatcaatacataatatatgaaattgagtgttattattttttttcattacacatcactttggtcataattattcacactagtaatttgaaatggtctattaagttntcttttctactacacntctcttaatc

SEQ ID NO: 101099 - DNA, 272 bp, Glycine max
cccaccggtcttaattggctcatatctttgcattaacattcctatacaattttaacttattggcctcattaggattaaatcctttctttctcttgagctattaatgtttggtcttatatgatttctttgattaagcattccaattaacaaccatgttagcaataatcacgaggaatatagcatcagatcaaacagtctgtgtgcatgtgtaatgtgttcatgactatttggcaacgtatgaaaaaagtatactagcatttaagtgtctaact

SEQ ID NO: 101100 - DNA, 392 bp, Glycine max
  unsure (1)..(392): unsure at all n locations
caaaagggaagtacatcgataatgagagcattatagtgggaggcaactgcatttgcggtgatacaaaggaaccgacccaagaaatttanagaccctgtgagtgtgacaatcccttgcaccatagggaatgaatcagtagggaaggctctcattgacttaggggtaagtatcaacttgatgcccctatcaatgtgtagaagaattggaaacctgaagatagatcctaccaagatgacgctccagctcgcagatcgattaatcaccagaccatacggngtagtggaagatgtcctcgtcaaagtctgccactttacttttccggtagattntgtcatcatggacatagaagaagataaagagattcctcttatcttaagcagacnctttatgct

SEQ ID NO: 101101 - DNA, 346 bp, Glycine max
ttcaaacaaaagacttatttgaggaactttaatctatccgagacagacaaaaaccctggtaaactatatctaatttgcggatccaaatcgaaaacagtaaaagagaaaatgagtgataactaaccactaggataatcatccacctgctggtgtgtcatttggtataggcaacttggaattggaagtatactgtcagaaaagataaatttgtgtattacattatattatccattttctgtttgatcaatgatcattcgggtaggttgcaaattgaaccacagagcatatcttcccctttatgtacaacacgttcagatgagagtggaacacatatggtagacatatg

SEQ ID NO: 101102 - DNA, 395 bp, Glycine max
  unsure (1)..(395): unsure at all n locations
cttacaggcttagtgcatacactgaaatgttgaaattgtcacttttctcactgctaatcaatcctcgtgattaagaatatgatttagaacatgtaccttagacatatcgatacataaaattaacaatatactatatgctttaattggctgaaaatgcttaaaggagacaattgaattgaccattctaaatccaaattgaaaaatagaacactaatgaccttatacctctcaatcaaagttattggtttagctaagaggaatgaaaaanaaagtatttaatataaagtacaacgtttaatatattatactcttttatttttaaatcctaacatacacttaaatgacaatatatttacattgaatttttgtttttaataaaagaggtttgctcaata

SEQ ID NO: 101103 - DNA, 340 bp, Glycine max
cccccttttactaaatgaccccccttttctaattttttggaaatctttttcccgaacggttcgtaactttacgaaattcgaaaagatactatttcctttcgcaggttacaaatacttacggattatgtatttactcttttttggctttcaaagaagatacggaaactcacggattgctcaaaaacacgtcttttcgattttcgccacattacggaatttcacggattacgcaagcctgcttccttttggatttatgagacgtctacggactccatttattgcacgtggtcaagtaataatccccggacgaaattagggtatgacaatcgctagcggtata

SEQ ID NO: 101104 - DNA, 472 bp, Glycine max
  unsure (1)..(472): unsure at all n locations
agcttgaggggtgcgtagcccaccatctttttattatagtatcgataatgggtctaccatcacgatcatcgtctccctttccatcattgggggtaccacctgngccgccagatccctccaccttttgggcgtgttctttgaaagatccgtccccctttttgcaaatgttctgtagttgcatcctatccggaaccatatcaaaattgtactgatactgcctaacaaaggcaaccattaggtccttctaagaatggactcgggaagattccaagttagtgtaccaggtaacagctaccccagtaagactttcttggaaggaatgtattagcaattcctcatcttttgcgtattcccccatcttctgacaatacatctttagatggttcttgggacaagtagtccccttgtacttgtcaaggtccagcaccttgaacttgggaggggtgatgatattgggttctangaacaactc

SEQ ID NO: 101105 - DNA, 164 bp, Glycine max
aggatttttcaaaatcaactagcacagtttgttacaaaagttttcaaatttctagtaccaagattcttcggtatcgatccagttctgaatcgttaccaggataaattgattcaaaacttttactgagttgcacgtccaatgattttaaaggtgaatcgatacat

SEQ ID NO: 101106 - DNA, 467 bp, Glycine max
  unsure (1)..(467): unsure at all n locations
aagtcacctgaggctgcaactgtccanaggggctcacctaagcgatcttatatatcatgaacatattccttataggggtatcttatgctattcctaaatggggctcgaataagccaatcttcattataatggctaccttaagcttgttcctaaatgatgggctagcttaagctagcctggtaacttccaagttcttcattagaatagctagcttaaaagtctgcccctaatgatctagcttaagctagcttggtaacttccaaattctttacacttttctttcaatgatagctttaaatatctcttcaaagagatccttaatgtaattcctacaaagagactaaacaacaaaaaccacaaaaaagcaataaaactaagttcttaaaatatttctctaaagctgagtttattcaaggatcaaccaaattgggctcaaacaaggttcataagcatgagaaacatataat

SEQ ID NO: 101107 - DNA, 393 bp, Glycine max
  unsure (1)..(393): unsure at all n locations
cttgtgtgctcacatcaancctgtattttatctctagcatgcatncnctctttcnnnccccactcctcacatgtggttttttaggaaaaacaccataactaaacgcgccacaaggcatccctatcgcaccagatccaaatctagaacgatgggtgatcaagaggagacacaggaacagatgaaagccgacatgtcggctctgaaagaacagatggcctccatgatggaggccatgttatgaatgaggcaactcatggagaaaaacgcggccaccgctgccgctgtcagttcagctggcgaagcagacccaactctcttggcaactgcgcaccatcctccccgaaacatagtangacggggaanggacacacttgggcacgatggcaaccctta

SEQ ID NO: 101108 - DNA, 273 bp, Glycine max
gctgcaaaacatcttacaacaaaatctgcctcaacctttgtcagccaaatcagccacaacagaacagttatgacctctccagcaacaggtacaatcccggggtgaggaatcatcccaacccttaaatggccgaatccttcacaacaacaacaataacaaccttattttcaaaatgttgctggcccaagcagaccatacgttcctgcaccaatgctacaacaacgactaacacagccctagaaacaacaaaacagtgaggcttctccacaacct

SEQ ID NO: 101109 - DNA, 426 bp, Glycine max
  unsure (1)..(426): unsure at all n locations
atangctggatgtaaacttaacagacttcagtattatatttattgcaaaatcatcgatattgtgcaactaagatgcacacttgaatttagaccctaaatatagcttgaactaanagaatcaagtccacaaatcatatacaatatattggaaacaaaattctgacctacacaacactcaatcaatagatcttgggcatctcttgcaacacgtacatctgggggtaacatctctttaataattcttgtcattgttgctgccaaaanatcagagactcagtaagcaatacaacagcaatgcattgccaataaagagaaaacattgaaatcgactatcaagtataataaaaattatagtaaccaaacatcactattgattatgattaggagcattttgtcaataaacctattcaaaaaaagtaactgggc

SEQ ID NO: 101110 - DNA, 216 bp, Glycine max
tcctcttctccaagagcaaaagttactggagaaataatctttccacgttcatcagactcaatctcagcagcaacctcaaggttatcctcaggtcttaattctgtcagagtgggaaatatcatacttcctgttgtgccaggaatagccagcggggaggggtgttccattcatggtggctgagcgatcttgccatacatgaaggtagaatttgtcatt

SEQ ID NO: 101111 - DNA, 388 bp, Glycine max
  unsure (1)..(388): unsure at all n locations
agctttgctaaaagattattgcattttattatgctcatgcatacgcatacacatgcatatttgttatcttgtgacaggggcagggtcgttttatgaaatagtcagacactgagccaaatccaaagacagagactaatcgaggtaagcggtaacgcggccacgatgtgctgcgcaatgtcatttcctgcttttatgtacttatggacgggcacgattggaggctatgcccatgatcaacggatcgccgtcccatgtccagctccgggtaagcgaggagcgctactggaaggcagcctantatcctttaaattcctacttattattgatgttgtttctttaaggtgatggtcggatgctaatttaccctatggggttcgagtaagcgaac

SEQ ID NO: 101112 - DNA, 436 bp, Glycine max
  unsure (1)..(436): unsure at all n locations
atactaacctgccaagttggggcttttatggatcgagttcacatagctttcttgggnnntccaacacnatgattgagctaaataatttacaaaattagagactgttgatgtccatgttttatttccaattgcactttaactctaacaagatgtaatgaacaatgttattttaatgaaaatctgaattgattcgaccctatgttctactgaatgtcttgtgtaaaatttgtaatacttcaacaatgtatcattcacatacatccatgcttatttttcttttcacactggttgcattgctcattgtattctttccttgaaatcagaaatgtaatcattgtaatcaaaaggaanaaatgcgctttacgacgcccttaccgaacgcgtggcaaagctagagtgatgagtgaaatagaggaggttgcagagcagatgatca

SEQ ID NO: 101113 - DNA, 471 bp, Glycine max
agcttactaccattaaaagaatcattggatttaattattctgttcctcatcttccatatagaccagaccacagccatccaccaactttgccacctacttcttcttaacccttccacttgagcaaaggagtgctgaaggaaatgctgagctggattggaagggaagcctgtagtgatactcagccattatatagtctcccaccaaataggccaaatctttgtgcagtgaaaaaataggtgggacacctcctcatccctaacaccacaaaaaggacataaagcatccgagatctgaacttgccttcttcgcagattacattttgttggtaatctgtcttgaagtaatctccacccgaaaatagctatcttgctgggaatcttcaagttccataattctacaaaggcttggtccttacttgccgctgctcccccttcccttaacatgagataagcagactgagatgagtagata

SEQ ID NO: 101114 - DNA, 366 bp, Glycine max
  unsure (1)..(366): unsure at all n locations
tctatctttttgtttgggcaattcactttaattccttgttcttcatcttcttctccatgtatctcctcaattttcttgtagtttggtgttggttagtgtagatcaaaaaaaataaaccgattaaatcttagatctacacttgctcttgcatttctatggttcagattttatagataaactcttgaatcatgtttttgtgttgattttaagttctatncatttttagtcataatattcttgttttgaacctttagatctcaattntcttgcaaaatattgattagaaaagaaaacaaaaaaatccaagtgtanatcacttcattcatgtngtcttagaagtcatgttagtcataataattgtcacat

SEQ ID NO: 101115 - DNA, 350 bp, Glycine max
  unsure (1)..(350): unsure at all n locations
agctttaaacagggttgttgcgctcgttgttattgtggaaaactgtagacaaataaggctgatgtagcgacgttatggtcatagacaccccaaaaatctctatgttgtagttgaaaatgcggtcaatgaccactttttaaaacctttttggctgaaagtataatgatcttttactctgaagtagtgtaaactcgtgtggaatgctctgaaatagtagctctttactctactttttattttaatcttttaaaaattatctntgcttttcactccttgaccttttaaaaaatgttagtactctatactcgtggtggtgcttcttcttctggaagctnctctggtgggattca

SEQ ID NO: 101116 - DNA, 409 bp, Glycine max
  unsure (1)..(409): unsure at all n locations
cttgtttggacccttttgaatttaactgnnnattttattttattttattttttgggtaatggggcagcaaaataatgtgaatttggttatggtatatgccggaaggtgaatttttcttcaaaaatggattcccaaaatctccattccctaatggttggaaaggaaatggtggactctatgctgttgggttcacaaagagagggctctctggtgcctcatctgatgctatgaaaattgctcangatattggccaagtttggaaacaagagactangcaaaagatacaacgcaccaatgcttgtcatagacgttgcatttctcagttctaaatcactctaactctaaatcacatacaacaatatacaagcagtgctgtttcttttagctaggaatatgttggtgtataaac

SEQ ID NO: 101117 - DNA, 395 bp, Glycine max
  unsure (1)..(395): unsure at all n locations
agcttcaacattcaaattcgagcgtctcgttatattataggactcagncagacatccgagaaaaaagttattgacgttngaatttgctcagagcttcaacattcaatttcgagcgtgtcgctatattacgggactatatcagacatccgagtaaaaagttatggtcgtttggaattgctcagagcttcaacattcaatttcgagcgtgtcgatatattacgggactcaatcagacatccgagtaaaatgttattgtcgtttgaatttgctcagagcttcaacattcaagttcgagcgtctcgttatattatacgactcaattagacatccgagtaaaaagttattgtcattngaaattgctctgagcttcacattcaatttcgagcgtgtcgata

SEQ ID NO: 101118 - DNA, 407 bp, Glycine max
  unsure (1)..(407): unsure at all n locations
atactcagctttgagcatattcaaacgacatatttttgttactgnnnctcttgatcgagtccccggtaaacattcaagacgctcgaaataggatgttgtacccttgagccaattaaaacgacaacatgttttgaatccgatgtctggtatgagtccccgcaatatattccagacagcttcggaatatgaatgttgaagcttttgaacaatttcaaacgacgataactttttactcggatgtctgaagagtcccgcatatatcgcgacgctcaaaattgaatgttgaagctcttgagccaattcaaacgacaataactntttacccggatgattgattgagtnctgtaatatatcgagacgctcgaaattgaatggtgaagctttgagccaattcaaacgacaataac

SEQ ID NO: 101119 - DNA, 427 bp, Glycine max
  unsure (1)..(427): unsure at all n locations
agcttggaagtcagaatctctgtattngaattatngggtngggcttttggnttgtgtaattagtttaattaggtagattagatgggcctaatcaaggctcattgttagtcatcttatacgactaacttttgtatagaaaacttttacaaaatgtatataaatccccaatttatagttcttttgtaggattgtaaataaattttgctttgttttgatctcttctcattagaagcctctttatatggaattaatgttaaagtctcttcaatttcagtcaaaaaaggagcaaatttgaagaagtgccaaagtggatgtcgcgataagcgagctccgtgcgcttagcgcgtatcagcaactaagcccagcacaagagcgcttancgagtcaagggaaattggagggtgtggatcgagtggcctcaaataat

SEQ ID NO: 101120 - DNA, 402 bp, Glycine max
actgctgtgttacatatctgccaacctcaacaataggtccctcccaaacagctagatttgaaaacccaagatgagattccaataagttacagacaccttagaaagttggaacttctcatactactgtgaaagtgaatttctattcgtaatgaaatattatcatatagacaacagaaacaatctcacacttagcaagactagccatgccataccaccctacattcaggaaattttatgactcgttagtccattgcaaagtaagggcactagggcagcatcagatcacggtttcaatatccaacaagtaataaagatccataggagaatcgataaacatactaacatacaacaagccaattgtattattaagcatgtgctatgctggaatggtcctaaacatta

SEQ ID NO: 101121 - DNA, 347 bp, Glycine max
  unsure (1)..(347): unsure at all n locations
ctcccattggtgggaacccccagtggaggaggttacacagtcaactttgatgcatcaatcaaaaagatttggtgactggaatggggttgtatgtgagagattgggaagggtatgtcatttaagctgccacaaccctttcaacatcaaaaggggacttaatcctgcaatccccactctatgtctagttggtgaattaaaaacataacattatgctctaaagtacaattggtaattatggcacaacttcattttcctcttatggccatacatatattatcccgtggtttatatgctaagaataaacttgaagagctttcatatatacanacacatggtgctggctttga

SEQ ID NO: 101122 - DNA, 431 bp, Glycine max
  unsure (1)..(431): unsure at all n locations
cccatcacatgtggtattatgtggcggncgggcgaaggngcacaacaatatttccacgtncacaaatcgcgcataaacctaccatcccctagtgcccacctncaactgagctcacgtactcccatgtagcccaaatcctcgtactcacagcgtttctcacttatagaccccaagaacaattccttcgttctagttcgttaaccgttggatcgactcaaaaatttcactggaagtctctagtacataaacctacattttgaccgttgggatctactagtaaacacccagaactcattctgcattactctttccacaaccagcaaatacatagcaattttttctgcacttatgcaaaattctgctgcacaatttcacagcaaaattctgcataaagtgcagaattcgaaaaccacancttccctcatacaatc

SEQ ID NO: 101123 - DNA, 470 bp, Glycine max
  unsure (1)..(470): unsure at all n locations
agtcacctgggctgcagctatattgtaacatactcactgttttctattattatcacacggagttacacatatagaaagttacacttctggttaggctattattgtaattagtaagtgtgggttaataacatgcgaaaccattgcaaagtgagaaaaacaagaaaataatttacaacaagccttattctatattatattaacaaaattaaattttaaaaaaagctaccaaactaacataaaggataacccaccaacagttgtgatggttctcttcatcctccttgtccaaccacctccttgaaatcctttaaccatcacaatgtaattntaaaagacaaaagtaacctcacattgtagcacatgaataaataatctcatttctaatttcattatcatttcgtttcacctcactggacaatcacaaactttgattaaaaccatgaacaacatgcaaaacaaaaacctgaagc

SEQ ID NO: 101124 - DNA, 359 bp, Glycine max
  unsure (1)..(359): unsure at all n locations
atattttttggtagatcattaagggtggtccattgttatatttaagaatttcataacaaatctgttcactttcgtgaaatgcgtttatgggattttctaattaattattctaatattttataaaagaaattaaaaataaacacaattaatatctaagaaacttaaaatttatttatttatttttatttaataggaagattagtaaaaaaatttataaaagatatataactattctttgtgagtaatgctactactatggtatactactaactagtgtcaatctttagtaccaagctttattatgtggttattaagtaattttacattatttntaattaaatntgatttttcatgttggg

SEQ ID NO: 101125 - DNA, 402 bp, Glycine max
  unsure (1)..(402): unsure at all n locations
agcttctatagaagcacttctaagagganaataatattatatatttttcataagtcaaaatgacttattcattaactaatatgtagaagctctcacatataatttctctaaaaaatgagagggcatcttcaacttagtttatggttagccaaaaatgactcattttaacttatagaaaangtcatttcatatttttatccttatttttttcttctagaagtgcttctagagaagcttatccaaacgtacccatgataatgctaatcctatcagactccttgataatactgatccacagataatgctgatagaagaactacagaagataaaaagtngtgttctgtgctaaaattgaagatgagaaccagacatgggcaagaaaatngggtcatcctgcaatgc

SEQ ID NO: 101126 - DNA, 344 bp, Glycine max
actcttggccatcattcaatctttccttcccttgcaacccaacactacatttggtaaaaatattttgagtgtggaaaacaaagatcatatagagaacactactactaataatatcaccggtcaagtcaacaaaacaattttttcaactttggtagaaaaggaaattaaatttatagtggtcaagtaggtaaaatgtctaaacactaggtatcattgacaagacaaaattgtttatttggaacatcaaatcgagaggtcatacaccaacttatctcacattacctcttaaaacttatctgtaatttgtcaattgcaaatgcatcgagtgactaatcagtatcaat

SEQ ID NO: 101127 - DNA, 458 bp, Glycine max
  unsure (1)..(458): unsure at all n locations
gatccttaagcaccgcggctgcagctttagaacaatatttacttatatatttatctgncnnaggaataggaaacacaaatacatagtggtcataaaagcttatcaaacattaattgtaaagtcataagcatgtgataatttcatatagaatactagcatattaaaaaatgataattgtgacaagcaatatntcaatcaaaaagtgaataaatagtgcttacaataggaaggccttcatcatcaagaataaacaactgcagcacatagctggtgtgctaanagcagctaatgactgagcctgttgtagtgatccgcatacaaattcaccccaatttctgtaccaccacattattaatgataggctgtaagagctctcccatcagcaaaggttcatcacatatatgctcaccaggagccaagcactatatatcaaatgatagtccatcaatctggaatat

SEQ ID NO: 101128 - DNA, 424 bp, Glycine max
  unsure (1)..(424): unsure at all n locations
gatactaacctttttctatgtattatatgccttcttgactnnnactacatagtcatatacattcgtattgatgctattttaggcatggaggttctttcatctttataaacatttactaatttcagatatgtaataatgttaggcattgtaactatcctttttatacgaatgcgtaatagtttttaaatgtaattttgtgctctatatttcttattattagaacgaaggcataaggcttgtgacatacatataaatattaagaataacacatctaaatacagaattaattaaaataatattattcaattaacataaaagagctcatgtgagtaaaatggtcacattcgctttactattaatgtaacatcccatttattgtaaataaattaaaaagggttttttagtaaaaaaagagtagaattta

SEQ ID NO: 101129 - DNA, 450 bp, Glycine max
  unsure (1)..(450): unsure at all n locations
gcttgtaaggattgatcaaatgaatgtgtttattatattgaaaatcaaatcaaagccttacttttatagactcttcatgtctggccaagaagaccatttagaagagttattacttttagaaaaacttaaaaccaatttgaaaaagtcaaaaaccttttgaagagttacatattttttatttattcagagacaaacactggtaatcgattaccaaattagtgtaatcgattacacaaagcttttgtgtgaaaagatgtgactcttcatatttgaatttgaaattcaacgttcaaaggcactggtaatcgattaccaaaacattgtaattgattacagctttttgaaaataattggaacgttgtaaattcaatttgaaaaccttttcaaaccattntgctactggtaatcgattacaacaatctggtaatcgattaccagagagtaaaaact

SEQ ID NO: 101130 - DNA, 136 bp, Glycine max
tttgactttacccggcaagttccagtatattccttcaccagaccacctgattgtgcatccagataagttaccacagtagaacaggttggggttttatgggtatggagactgttaacgtatctgaaaaaggaacact

SEQ ID NO: 101131 - DNA, 410 bp, Glycine max
  unsure (1)..(410): unsure at all n locations
atcctntgagctcacccgccgcatgcaagctntancaaacagtgtacaaacagaaaatgtttatgtatataaagggctacaacatcaatgcacatccaagcatcagaagaacttcaaaagcatatgtcctgaagacagagaacagtcacacagataaaagattctggaaacaaaatctccatttgaacacctggtgtgctgaattcaacttgtcatccaagtcccaagctaagaaacagaataaacaatttactttgtgggaggtggccaagataagttcaaattttacttgttaatacaaaagcaaacacacatttcctagtctttagattatacacatcagaaataaaattcagaataaagggaatttgcctttcaccataaggttcatgatgtagtaccaataacac

SEQ ID NO: 101132 - DNA, 367 bp, Glycine max
  unsure (1)..(367): unsure at all n locations
agagtaaaactatttggtaaatgttttgagaaaaattcatgtgctactcagttgttgaaagaaaaatttatacttatcttgagtgagtcttctcttgattcttgaatctttagtcttaaatcttgatcagttcttgagtcaatctttaactcattcttcgattcttgagatcatcatctttgttatcatgaagagttcttgactnttgagctttgctttatgtcatcatctttgttatcatcaaaactctttgaatcaatcttgattcatcatgaagcttgcttctacaatctccccctttttgatgatgacaacttctgtaatcaagaaacacacacacacacacactttttcctattcgatcact

SEQ ID NO: 101133 - DNA, 456 bp, Glycine max
  unsure (1)..(456): unsure at all n locations
agctntcaagctctggaatgcatagttaaatttgctccttttcaaccttttacactcttaatttatcgccactattaactaattccaagtcctttttttttcagcttccttgtttctcttgttcaattttttcacgtttcaattctccatttcttcttctataaatcttaagttacataaaaatttcaagctggccaacattcaaaacataatattgtgattttttataaggttaaattattcggtaggttctcttattattacaaaaattntaattaggtctttatattttaatttttttaattggatccatatattaattttaaatttgtaattagatttctatgttaatttgtcctgagaaatctattagacttgatagaatattccaccttatatacacacacgtaaatatgaatcttacaccgtaccagtacacctaagcttgatatagag

SEQ ID NO: 101134 - DNA, 467 bp, Glycine max
  unsure (1)..(467): unsure at all n locations
ctgcaagcttatgggtgtccccgaagactgtattctgatcgggatcctatcttcatcagcaaattttggaatgaacttttccgggcttgcggcacaaaactacgaatgagcaccgtccatcatccacagaccgatggtcagacagaggtgctcaatcgtgtgttggagcaatatttacgtagcttcgttcatcagaaaccaaaacaatagagtaagtttctcagtctcgctgaatggtgctacaacaccattagtcactcatcaactaacctctctccctttgaggtcacatatggcaagccatcatcggcaattacagactatcttcctggatcatcttcagtggaagcagtggattntctcctttcctctcaccaacatttgtttgagacccttcgccggaaactcgaacatactcaggcgaagatgaaacatttacaatactcatcgcatgaagcactttaata

SEQ ID NO: 101135 - DNA, 370 bp, Glycine max
  unsure (1)..(370): unsure at all n locations
tactaagctgaatgctctattcaatggagttgacaagaatatcttcttactgatcnnnattcacagtggccaaggatgcatgggagatcctgaaaaccactcatgaaggaacctccaaggtgaagatgtccagattgcaactattggctacaaaattcgaaaatctgaaaatgaaggaggaagaatgtattcatgacttccacatgaacattcttgaaattgccaatgcttgcactgccttgggagagagaatgacagatgaaaagctggtgagaaagatcctcagatccttgcctaagagatttgacatgaaagtcactgcaatagaggaggcccaagacatttgcaacatgagagtggatgaactcat

SEQ ID NO: 101136 - DNA, 321 bp, Glycine max
tatattgaatggtgcatcttaatccttatcatatcttttgtgcatcatgcctcatattgagttaataagaagaaaaatttctaagtgagaagagtttcttcagaaggcaaactctctgttttaatcgaatacaaccttatcgtaatcgattacacaagttgtccgaagcttgcagagttatgtctcgtatcggtctaatctattacaattttatcttattcaattgcatagctggttttgagataatgactgatttattcacgagtctttgttctaattgattaccatgtgacataatagattacttctctttctataagc

SEQ ID NO: 101137 - DNA, 447 bp, Glycine max
  unsure (1)..(447): unsure at all n locations
agcttatatgccattcggaataggggctcgtgtcttgtgtggacaacacttnaccatgacagaactgaagggtgatttgtctctcattcttgtgaagtttcacttctctctctcattaaggtactgccattcacctgccttccgtttggttatagaacctggccagggagttgttcttaagatgacaagaatttaagcaacaatgtaacagatgaatgatgaaaacatgcaggtaatgggatgggtgatatagtcataagacatcatttctctagctgatgaatgctaataagtttttttttttatccaaattagataataatattttttttttatgaaaggaagatattctcatacttcgaagttatgagacgaagatgatcaaaatttatcattggatgaatttttttaaagattaatttaaattaaaaaaaacttaaaaaaatg

SEQ ID NO: 101138 - DNA, 280 bp, Glycine max
tgtaagcctaacatcgattttcaacacaaaactgatgttaataaaatgatgttaatgttaacatccgctttctggaagaaatcgatgttaatttatcatacgttcacatcgatcttctgaaaacccgatgtaactaactaacattaacatcgattttctgaaaagtcggtgttaatgaactaaagttaacatcgggtcttgaaagaccgacgtttatgaaattattgtaacattgggtttctagaaccgatgttagtggcatctactaaacattctgttt

SEQ ID NO: 101139 - DNA, 442 bp, Glycine max
  unsure (1)..(442): unsure at all n locations
agcttattgatgcatgtttgtggtttgatctcccattgatgtgtgntaggaactttagcattgacagatgtattgtttccttggaactcgatagagcaggacaagataactgtagtgctagacatagtgtgcagggttctagtttttattatgatgctgtttaaattaggctaaagttaacaagagacatttgcgaacaaagcttagtttaaattagttcaaactcacgagacatcggtgttagtatttttgtcctcagcatagaacacaagaataatttcaaatagagaaaaatcctaattgcatcaagtatctcggtggaaggacccaacgcttttactttattgtttcacactcaatngtcacgttactgttctttgatacaatagaatataccttgttcaatcatatacttattttttataatagtgatttgatgacc

SEQ ID NO: 101140 - DNA, 422 bp, Glycine max
  unsure (1)..(422): unsure at all n locations
tacggactataaaactcagctgactgagaaggggaaggttgacttcnnnttattctttgaccacagagtggtacctggagatatgtggcggtggtcaggagaccctggggacgtcaggtggggtgctattgcccaaaaccaaacttgaccaatcccgacccaacccggacatagtcagtcagtgagaacctgtgatgtacctaaacaagcgagctcctggcatgcaaccgataaaataacaaagaccacaaatcaaggaggcttgtgtggtggctggccanctgtgaatcttgagtgatatatgggatatggcctctggaaatcgattaccaagggtgggtaatcgattacatggcttaaaaacgagatcangaagctaagagggcttctggtaatcgattacaaaggggcgtaatcgatta

SEQ ID NO: 101141 - DNA, 427 bp, Glycine max
  unsure (1)..(427): unsure at all n locations
agcttcatgatgaatcaagaatgattcaaagatgttttgatgataacaaaggtgatgacaaaaagctcaaaggtcaatcaaagaatgagttcaagaaagatagaatcaagaaagaatgagttcaagatgttcaagatagaatcaagaacacttcaagattcaaggatcaagcatccaagaatcaagatcaagattcaagactcaagattcaagattcaagaatcaagagaagacttaatcaagataagtatgaaaaggttttttcaaaaactgagtagcacatggatttttcttaaaacatgtttaccaaagagttttactctctggtaatcgattaccagattgttgtaatcgatcaccagtagcanaatggaattgtaaaaagtttcagaatgaattacaacgttccaattgatncaaaaaagct

SEQ ID NO: 101142 - DNA, 471 bp, Glycine max
  unsure (1)..(471): unsure at all n locations
tactaagcttccaagtggtcttcgattcataaaactcgaccttttcttaagtacctttgcgacaacgtggtccatacatctcaccgacacatgtagagcctcgttgtgtcctctcccctcaacgggaatctcttcttccacaaacgcgatgtatctgttggtcgttatatgattaacgatgccttcgaaacccttcaccgagatatcatgtgctacatgggcatcgtttagaaccttcttaacagcgcacgatgaggctcagagtttatgagtagttcatgcaaggagatccttgctggagttttattcagttgctcgactaccttaaactcgctatgttggatgaggcggaggaactcatgggcctcttccaaagtcactgtntttctctgaagtccctccttcttttccgccgctcttaccactggaggatctacttctttcgagggggtgtgtttatctgttgactct

SEQ ID NO: 101143 - DNA, 495 bp, Glycine max
  unsure (1)..(495): unsure at all n locations
agtcacctgcggcatgcaagcttcttttggaccttgaacaggcaactaactcctctttcantaccatgccatgtgctcgcgactggtccctttcttcccttcgcaacttgagttcactattgccaccccataaagctccgcgaaatttgttccggccatactcttccttgcgagccatcttggtctcttgttcaagggctcttgcggtaattgcactctcttcccgtaacccggcacactccttccgaacgtgtgtagcggccaacttgaacttctccttggcaagttttgcctttcctaactcgcttttgagagcttggacttctttgtcttcttccggtgcttcataattctcttcgctgacgacttttaacttggcgagccaatctaaacctcgtatatgaactttcagccattcgtggtacccaccaatgatgccattacgaatgcctctaagctcttgatctttccttaacgggggtttccatgccttat

SEQ ID NO: 101144 - DNA, 223 bp, Glycine max
  unsure (1)..(223): unsure at all n locations
tcgtgttacgccctatggttagtgtttaaccttcattttctcctttaatcngctttgatggccatagggtagaagacatgtttggtctggtttggtttttcatggttttcagtgcacgaggttgaagacaagccttcttccgcggaaggttcgtttcttccgcgcgtgtctgggtgccgttggaggtcgggcggaagatcgtttctttcgcggactccagcgg

SEQ ID NO: 101145 - DNA, 376 bp, Glycine max
  unsure (1)..(376): unsure at all n locations
agcttgtccctcgagttaaatcagttaaaaaagcatttccaggcggagagaattgtgtgcattaaagtaagattgatatcgggtttcttttcgctcccgtagcttcattcttcttggaaagggtcctgatttttgtagttttttagctgacctgataacttctttcttcctattaattgagaaaaatggcattaacctcttactggtaacatttctacggagaaggaattttttctaattttgtttggctaaactggtggcaaacctttgtttgagtttccagcagtttttctttgcatgtttctgggtacaactntatgttatgattgctaatttgaacttgagttcatttaattgaaaatttcaatgttaagat

SEQ ID NO: 101146 - DNA, 507 bp, Glycine max
  unsure (1)..(507): unsure at all n locations
actaagctatgctgcgagccccaatgaattgtatgactgcatttgtctattaacagatattcagaaagacagaatgtttaaatcagattcatgtacatcgacaaatgcatagttaatatgccatatataaataggcttaagaaagtgtatacaaacacagaacataagatgcaactaactagcacataacaattggaacattatacaactaaggaaactntgctactaanaggggcatctcattctcactagtcacggataattataaatcttccaacaacatttttctgctggtcatcctaataactaaatggcgaaacttaatggaaggaacttaggtgttttcttatgttggtgttccattagagtntttaacttaacaaggtattaatcttattgtgtaggtaaggtggcgaatctcaaatcttaattaacaaataataagtanaatatatataataatacaccggtaataaattaattcatatggataacattcaaccacta

SEQ ID NO: 101147 - DNA, 494 bp, Glycine max
  unsure (1)..(494): unsure at all n locations
agcttaagctccttcaactgcacaaggctcttaatattataagagtatccttgnggaacctctacccgacaaagacactgacaaaaacttatcttctccttcttggacaaagtatggcaggctgggggcaagtaaattttcttcccatcataccttggatgcaactgtgatcgtatacccatatcagctagatcttgatgggtattcaagccatccttcgtcttgccttgaatgttaaggagcgtcccaatcacactatcacaaacattnttctccacatgcataacatcaatacaatgtctaacgtcaagatcacaccagtacggaagatcaaagattatggacctcttcttccatatgcaactctgacatatatccttctatgtggcttcccaaataccagattcaggtgtagaacccgctgatatacctgttcatcagtcaacggtatcggcacaatatcatgctcttgacttncattaaaagctgtttca

SEQ ID NO: 101148 - DNA, 458 bp, Glycine max
gaatactaagcctctcacgaggtgagcttagttatgagaggggtgtgtgaagctaagctctatcttctcaaagaagatttctcatagaagcttctcaagagaagttctctcaagatagcttctcaaggaagctacctagtctataaatagaagcgtgtgtgacacttgttgtaactttgatgaatgagagccttgtgagacacgactcaaagttccactactctccctttgtcttccttcaatttcgtgctaccccctccctctttctctccctctttcttttcctccattgaagcatgctctccaagcttcttattcaaggctcatcttgagtggaaagctgcttcttccatggcttattccataatggatggcgccatctctcacctcttttactttgtcttccgctgcatctccttggtgaaaaatcaccattatatgacgcccattgagctcaa

SEQ ID NO: 101149 - DNA, 407 bp, Glycine max
agcctttgaagctggaatcatttatcctatctcctatagtccatgggtgagtcccgtccaggtagtcccgaagaagactggcctcacagtgatcagatatgagaaggaggagctgattcctactcgggtgcagaacagttggagagtctacattgactatatgaggctgaaccaggttaccaaaaaggaccatttttccctgccattcattgaccagatgcttgaacgcctggcaggtaaatcccaccaatggtttcctgatggtttttctgattatatgcaaattactattgctcctgaggatcaagagaagaccacatttacctgccccttcggcacttttgcttataggaggatgcacttctgcctgtgcaatgtctctggtacctttcagcggtgcatgatta

SEQ ID NO: 101150 - DNA, 291 bp, Glycine max
  unsure (1)..(291): unsure at all n locations
tgaatattaaaactatgaaaatcaagagcaagatattttcacggataaattatctaaagaagataattaattgaataaattatagatattatttgtttgtaatttcttgtgattatctccttaattaaacctagcaaccattctataaatatgaagctagacattgattgtaaaagtgtagaaatgttgagcaattcttataattatattttangcatccacttgctagatgtctccattattctattagacactctaggtttcattgtattatttttatgagtgcaattc

SEQ ID NO: 101151 - DNA, 457 bp, Glycine max
  unsure (1)..(457): unsure at all n locations
agcttgtctcctttccttgtgagagtatttggcgcgcagaatctcaaggttatacaaagagtccataaggcgtgggaaaacccattaaggaaagataaagaacttaggggcattcgtaatggcatcattggaggttatcatgaatggctgaaagttcgtacatgacatttagattggcttgccaagctaaagattatcaacgaagagaacttcgaggctccggaagaggatgaagaagtccgagctctgaataccgaactaggaaaagcgagacttgccaaagaagaattcaagatggtcgctacagacgtccgaaaagagtgtgccgggttacgagaagaaaatgcagttaccacacaagcccttgaacaagaaaccaagatggctcgcaagaaagagcatggccgtgacacactccgtggagcatngtggggcagcaacagtgagctcaagcttc

SEQ ID NO: 101152 - DNA, 428 bp, Glycine max
  unsure (1)..(428): unsure at all n locations
cttctcttgaatcttgaatacttcttgattcttatcctgaactcttgaattattcttgattcacttgagttgttctttgattgatctttgagctctttgtcatcatcttttgttatcatcattgtgatcatcaaaacacctttgaatcacctttgattcaccatgaagctttgcttctacaatctccccctttctgatgatgacaacttctgaaatcaagaaacacacacacacttnttcctagtcaatcactcacataaattctccccctctggttntgaatatgtgcatatcttaaaattaaattgattactcatgtgagttcttgattataattccatttctcttcccctctggcatcaactaaaagccaaagtgcgttacananttgatataatcaaatataactaaacatccatacaaaattc

SEQ ID NO: 101153 - DNA, 417 bp, Glycine max
  unsure (1)..(417): unsure at all n locations
agctngcacacgtggccgtaacaacttaagatggtgtggtgtgtgccctcgcgaatgctgcttcacatgatgggcttaatggggtacagactttgcgtgtacgtgcttctcaagatggactaacacccgtgccaattctatgaaacagaaggttttcgatggtgccaaagacctttcattattattcattacttctttactcgctacagtcatttttttcgtgtttgtttagatcatagaccacgtgtgtgcttttacccactaggttagatatcactttagttcgcgattgggacttacgctgattcacgagattaagcacgtatgaaatgcgaccctatcctgccaaacatacatacttctcttatgcgaaccatcanatctgactcgatgagtatcttgggtgccctttatcta

SEQ ID NO: 101154 - DNA, 304 bp, Glycine max
tgcgcaatccgagagatatcggagtgggcgggaatctattatatgtgtgtttgcgcaatctgtaagtctccgtgactgtttctaaagctaaaaaagagcacatacataattcgtagcgattcctaccctcgcggcagaaaaataactttcgttactaaattcatgaagcttcttaacgattccgccatagaattaccaccggggtgcatttattcataaagggggtgcaaatatcaatctggcccactagggcctttctgactctttctccacaaggctgttgcttctacaggaagcagccttg

SEQ ID NO: 101155 - DNA, 427 bp, Glycine max
  unsure (1)..(427): unsure at all n locations
agcttgtaactgggcacccatgagatataatcaactcgtacacaaaaaaagctcanaactttgggagacaactgtcaagcaacgacgcatcagcgtccctactattatcgaccatcgtgacaccatcattgccgctaagcccgcactctctcctcacctctgttctctgctacggccgcgatcttcaccgctacgttctgttcacacgtcgatagcgcgttgagggtgcaaatactgcttcccctatccaatctcaaaatcaaccatgcaaaacctacttgtctccgttttctcctcaaatgcggcttctagaatcacaagattcgccgccatgaaccctaccgtgaagcacaccgagttctccaagagcatctgagtcgaataagcgtgctcattccttgaaaagctcgttgatgcanggtatggc

SEQ ID NO: 101156 - DNA, 378 bp, Glycine max
agcttctatggagaatggaggagaagattatggcttcttgagggagagagagagttgtctcaaaaagtgtgggggctgagtgaagagagagaaaagcttttttgttttaaataaaagggttttctctttttctattattttatttaagcaatgccacatgtctccatttgagtggagcaaaaagggcccactttcccttttgactgtgacccatactcagccacaaaagtggggaaaatctgaccttataaacgctaaaatcctgcctcggtttgcatgccgtttctctggttccagttcctcacgtttctctgcgtccgtcggggccagctttcgaaagcaagcaatatatatatcaaaacgctcagaatataaccc

SEQ ID NO: 101157 - DNA, 477 bp, Glycine max
  unsure (1)..(477): unsure at all n locations
agcttgtgaaatngccatgttggatgagttaaactttcccattctgttntagggttnttgtgatgatgtttgtgatgtttatatgctgaaattgctcatggaaaactgttagagatgaaaggtagagttaacctatggttggaaagtgagaatgtggtgttatgagtggaaaaagagtgaggctttgagagttggaaggttaagtctgaattctgtggtaaatggaggttaaagtgagttaatactagcttgaaatgtcatttangacttgggagaaggctnggactgtgctagagagaagaacaaatgatcaaagtgaataaagagccatttctagggcaaatttgggtgttgaagagtcaaactttgattcggtgagaatttaggtgtanatccatgttgaacaagtctaaatagatgttatggacttgtgtgaggtgagaagttgcttcanattacctcattctanattcactt

SEQ ID NO: 101158 - DNA, 474 bp, Glycine max
  unsure (1)..(474): unsure at all n locations
ntaacctcatcgtctctcacagtctttagatttgggagccaatctagtccttgtgttcgaactctcagccacttatgatagccgccgatgatcccattactgcttcccctaagctctctgtcctttcttcatgccgcatcccatgccttgcgaactccttggagtaccctcgcgttgtggtcactgaaacctcgtgcgatgaaaggcgtgatgctttcgtctgatggcactcctctcatgggacatccttcgcatgaagatagaatcctgattcttccttccttctagcgagggaaccatntaacagacgcccctccatgctagccaagagttggtgcacaacaaacaattcttgcgccgctctnttcacatccccggtcgaacgtgtcatacatggccaaaatggcgacgaccgggctttccttgcatgatgaaagccaggaaagcgtaatcgctgtaggtcactacccttca

SEQ ID NO: 101159 - DNA, 462 bp, Glycine max
  unsure (1)..(462): unsure at all n locations
agctnttaagtcaatggttgaacttcaacttaatacttaaatcaaaagtggtcaatcttattgggatggtgaatatagaccttttactacttttctaaattcttatggcatctctcatagacttatttgtcctcacactcatcatcaaaatggtgtggttgaacggaaacataggcacatagttgatttgcaccttacattgttacatcatgcattattatccttgcaagtttgggattatgcttttaccactactgtctatctaatcaacagacttctgattgctttcctaaattttgccataccctcttgcactctctttaacaaggatcctgattttaattccttaaaacatttggttgtgtttgttttccttgtaagaccttatcatgcacatatacttgatttagatataagaatgttattttaggtatcttcatctcataaggtacgatccatctc

SEQ ID NO: 101160 - DNA, 303 bp, Glycine max
actcggagccaagctttttttaagccgcagaccttctcggagtagtcacccaaatatttacacacagacctgctggaattatacaacttacactccactctgtgtaaacacgccaaatattggctcaattacatggtctgatagaaacctcctttgtttaaatggtctaatagaaacatactttttacctggattaccttttaaaaacactgtgggtatgacatcagttcacccctattactaaaggatacccttttccacaatcatccagttcattatagtcatcactcatgttccttacat

SEQ ID NO: 101161 - DNA, 256 bp, Glycine max
  unsure (1)..(256): unsure at all n locations
acgcaagacaatttcctttgacactagacaatacggcttgggagttaaaatatacattgcggtattctataatagctgaaggtaataatgaccacaagaaagatgatatcaatgagaatatccctcgatatagntgtnttgtaatattaatcgctcagaagtaaatacatgtgtagttatataatcatatgacacataaagagaaccaatgggctatttcgtaagagtatgagtaaggttttgtaataaaaataaa

SEQ ID NO: 101162 - DNA, 253 bp, Glycine max
tcacagccacagctcttctgatcctctagtaatacaatattgctcttgcgctgcgcaagccctaacacaaagcgtattgaataaatgcaggtgtagtacctggccaatctgttgtgtgcaaatcggacctccgtcatatcagcctcccagatttgcttttgtatcagacattacatctttcgtcagttgactgtaatccactcatacttcatacatgacacatgacacatgagtcccgacgacactcaactgg

SEQ ID NO: 101163 - DNA, 409 bp, Glycine max
actcagcttgaagagcccgggtagtcaaagagaagttcaagtccttatctatctaagtctgaagagagtatgatgaactaatggacgtcaatatggccaccgatgaagccttggaatgagaaaccaagaaggcccgaaaggaagaacacgaccaaaacaagttttgaggggctttatagggcagcaatagtgagctcaagctccgaagaggtgaaaggaatcatcacgggtcacaggcatgatctggaaggacgagttaaagacttgccttatgtcgaatagaaatttgtcccaacagttaaagcgagactgaagggaatatgtgggccatcatcgatgagtgcaaagagaagctaaatctagcggtgactcacgagcaaaggctagaggatgagtacgccaagatatc

SEQ ID NO: 101164 - DNA, 457 bp, Glycine max
  unsure (1)..(457): unsure at all n locations
agcttatctacccacacccctctattaactaaattaacctccttgaaaataattacggataaaaataacacaacaaatataatcaaacatcaaacataattactaataatatatagatatatatcaaggtgttacaactctcccactcttttagaaatttcatcctcgaaatttacgttactcaaacaaggatggataagcttctcgcatttgactttctaattcccacatgacatcatcttctgatgcacctccccagatcaccttgaccaacagaatctctttccctcttaagtgtnnttgttgtcgtcataccctaatttcgtctagggaccattctttgatggcatacaacctttgcttgaccgcttagaggtacttggcacccatttgtgcacaatacgtgaaagtttgtaacatgccagaaatcaaaaggaagcattgttacacaatccgt

SEQ ID NO: 101165 - DNA, 491 bp, Glycine max
  unsure (1)..(491): unsure at all n locations
attacttgtatggggtggatgtagaattctggttgttcctggtgctgagatgaaggtacagcgggtgaaccaagagctgaagtttcttttggtgaggtagccatggaaaagcaaagcgtttggaatgatgtcgtaaatctcagaaggctattgggaaatgctggtgaaaacacgaacgccaagcaaatataaatttgaatgaagaatgtagaggggcgtgtgaagcaacggtcatattcgttttgtagtgaacgtgctattaatgttaagtgattcgtttgggcacgttcagattgcagtagttgctataattcctctagcagacaaatgcccagctttgccctcagttnttcaaactgattngcatccaaagcctttgtgaaaatatctgctatttgttcctcagtgtcaacatgcttcagtgtgatcactttatcatcaacaagatctctgatatagtgatgtctaatggtcaatgtgcttggtctgct

SEQ ID NO: 101166 - DNA, 416 bp, Glycine max
  unsure (1)..(416): unsure at all n locations
gctgccgcttctcacgttttctcctacctaaactttaaccttttattcttattcaattcttcaccaaatcacgccccgtaaagcccaatcttcctcttgttcactcctctttcacttccaccgatcaaaatccataaaaacttcatcaaatggcagagccatcaaagaagagaaagggatcatcctccaccgctaccgctgctgcccatcgtcgtcacggcccatccggagcacccacaacacctattcctccttctttgtcatctccaagatcatcaacactgttttcatccgatgatcaacgtctacggtacctttctcagttttcttctagaataatcttagaccctaaatacctagacgtagagntctttaatgatgaaacatttgattgctatcaagtggttcaaaattct

SEQ ID NO: 101167 - DNA, 440 bp, Glycine max
cttagtgcaagcaagagctcgcttagcgcatgaagaaaattgcgcttaacatgagtggtccacttagcgagtggacaacaaattttctttttagttatttttctggccacaacttcacaaaagctttttaacccctttttcaatactaaacatgttgaattcatacaatcacaagcactcaacttaactaaatgcaagataaacaaatttaataaaggttgggttgcctcctagtaagcgctcttttaatgtcattagctggatgcatagttctatgttatcctagaccaatcttggttctctcctttaaaacctttctcatcaaacctccttcactagtaaacaaacattcttggccagcaattttttttcttcatttaatagatcaaagctgattatgtggtcttcaatacacatttctaacttttcttcctatgaca

SEQ ID NO: 101168 - DNA, 374 bp, Glycine max
  unsure (1)..(374): unsure at all n locations
agtcgacctgagcatgcaagctgacaatgagatactgtcctatgaatgctgcatttgcagccttattattaatgaagagagctgctaaactaggcgaaacatgcaaataaattactcgaataaggttatgttgcctgtgaaaaccattcagaaataatagaaggtgactatgtgcaataagtgtaatcttaccataaggaacaggaaaacgattcaacaagtcatattgtatgacagataatgatgatgaatacatcattccaaaagtggctgtggcacttgctacctgcacattcgngaaagagatgagtataactatagttccgtccgttatntattatataatgataaaaagtagaactcacctgcggagc

SEQ ID NO: 101169 - DNA, 359 bp, Glycine max
  unsure (1)..(359): unsure at all n locations
ctataaattcttgtataaagtaaaaagctctcaaaatattttttacatcttgaaagaatagactaaagagtggagtgtgacatccatctgtaatacaataatctgttaatctttgagcaagtggtattgtntagagtcaacaatgacttggtaggacaaagaatattgggttgaaatcaagcttgtgggtagggcttggttctggaagagccaatagtggcagtgaagaatacttgaaactttctaaagttagtggaacttggtgggttgtcaagaactatacatagtcttggtggtagagacgaaccagtataaaccttgtgtttttttctcttactgctttcttntttaactgaaaa

SEQ ID NO: 101170 - DNA, 507 bp, Glycine max
taagcttagaacggccgaaagggacgagtcaagggtggtaagcatggctttaaatgattaattgaaggcttgtcatatgtcaaagagaagtttgaccgaacaatcgagtggaacggaagagaatatgttgacgatcattgatcagtataaggagaaggtaaacctagctgctagtcttatgcagagactaaaggatgatcatgcgaacgtattgactctacaaatggaaagggaagcaagagagagggtgatagaatcattacgctgggaagctgtgaaatggatggatagattcgctctcactctgaatgggagtcaagagcttccaaggttattagccagaaccaaggcaatgacggaagtatacttgactcccacatgaagtcatgggctcttcgattattgccaacacatggtcgaactgatgttccacataattaagaaccactgaggcatttgtgttgatgcatgctttggcttgacaagatatcaatgttgttcttaata

SEQ ID NO: 101171 - DNA, 431 bp, Glycine max
tatttgtaggaatcttagataggttctatatgatctataataactcaaccaactaaactagattctcttaaatgataaatctatactcctctaattagacaacctattacctaaatagactttctaactaagttatcaagaagattataaactatatcatatgagattcaacttttataaaagttgattcacatattgttatctctggctaatgctgtgagtaaacacaatattgattttacagattatagttgatttcacataagattttgtttctcataaactatgaacttattacgcttaatgtacagagaagttagattataaaacctttaacaggaaaaatgccttctaatgagctcaaagacaattctcaaatatggtaagctaggacttaaaactaaatttatcacatataacaattcctcata

SEQ ID NO: 101172 - DNA, 420 bp, Glycine max
ctcagctttattggaatggggaaagccgaattgtacatacagttatggtggcttataaagcggttggtgaggctaagagaaaatgtttattctttaaagttgactattagaaaacatacgagctattctagggctttcttactttatatgcctaaaatattggggtttgggaaagtgtgggtgcatggcatctggtagtgcatgaagtctaaacatattctcattctggtcaatggaagtccgccatatgagtctgtacctcacagggggttaagacaatgtgatcctttggctccattcctcttcacagtggcggcataaacgttcttcgggttgatgaatgaagatatgatgaataatctatctcaaatggctcacagacggatcctttatcaccatggtggatcctttactatatgc

SEQ ID NO: 101173 - DNA, 303 bp, Glycine max
acatgcaggtgctattgaaatcacttcgagcaccaaaaaatcctttatatgttaaggtcaattgatatggaataagttcaatcagtgaaaagctcaatcttcttggtatctgatatgattgaccagaagtgtgatgaataaggagccctacggtattgttcactaacgtttagtatgttgcttggtcataacaacagactttttgtattcacaccgagcaagatattctgatgtgcctgtaacaactcttggatgaagcttgaatactgcccataacttaaggccaaattttgtgacaccact

SEQ ID NO: 101174 - DNA, 336 bp, Glycine max
  unsure (1)..(336): unsure at all n locations
gatccttagagaaancttcacgcatgcaagctttttgacttcaaatgagatatgcatcctcttattatttttttcactaactatataaagatgttatgaagagctgagaaagccttgttatctctatatggcatatttcattccctgaataaatatttaagtcataattacgaaagagagcctccttctaatttgatcgtaatgaattgatggatccaattaagtaagcatacctgaccggggtccttacgaaatacagaatttctttttcgtgtacctgttgcttcataagataatacagaatagaggagactctcccctgcattatatgtctta

SEQ ID NO: 101175 - DNA, 283 bp, Glycine max
aaatattgaagaaggcgagcttgttttgttctcgagaatctcccaccaactgggaaataacattggtgagaccagcacatgatcttatgaagagctgtagatgctggcctgcatgctatctatctgcatatgacatggcgttgaatgaacatccttggttgaaacatgtcgagatagtcaaggtataatgccatcatgcatatgacattgacactgacagtgatatttatttggacctctagctgtatttactccactagtgcataaattataaatgcatact

SEQ ID NO: 101176 - DNA, 447 bp, Glycine max
  unsure (1)..(447): unsure at all n locations
ctgtagaaccaaagagacagagatatatagagaaaattcatcttgtataaaccatagatagaaataatttttttgaattgattttttttgctgctatgagttgcttactaattataacaaaatttcacttctttcacatttgtgcatttgctgtcacatgaaggcttgtctgtttggccttattgtgaaatattatggagtacactcgttgacaacacatttgtgtgtctactactctgctgtcatataaaaacactcaaaagaatttgacaaaacactatgaagagttaaaagatatgtctagctctctacatcggttcaggccaaaaccgatgtagaattctagacattctacatcgattattagaatgatcgatgttgaaatctgacattctacatcagttatttgaacgaccgatgttntttntntctnttctcttcttactt

SEQ ID NO: 101177 - DNA, 338 bp, Glycine max
  unsure (1)..(338): unsure at all n locations
agctntgtcttggttaatttaatatatatcatcancttatttgtatgtatatatctatatattctctgatntccaacgtatttgattgtgcaaacgcctcataattagaggggttgccattatctagttacctttacaagttagaattcacaccatgggttatggtgtggtgatgtcttgaattgtggccgtggaggaaattaaaatcagattccgggcacgaagagacacgccacgtgcacaataacaatgccatgccacgacacatgtctatagattaactagggtctatgtgggggaccattaaacttgtgttccatcattcntagtgtagtact

SEQ ID NO: 101178 - DNA, 411 bp, Glycine max
ttttatgccttctcagtgtcagcaagagaaccttcaagttttctgttttgaaccagtatatcatcaagctgacttgctttaatctctagctcataccgaacttgggttagagaaaatattaacttctcagtctgatccttaatgtccctgctgttagaagcctgttcctgcaatagcctaaagtcaaataagtaagccctctaatagctcttgcttcctctctaactcctttctaagagccatattttcatataatacatcgacattgggcacgtctggctgctcttgcaccttttggattagcacacattgatctcttttctctgcaccttctttacctgtactatatgctggcgctgcacactagagcaaatttgtgggacttttgcatttccctggctggctgattgt

SEQ ID NO: 101179 - DNA, 405 bp, Glycine max
  unsure (1)..(405): unsure at all n locations
catgaagctttgctgtanatattataaattaccgctcttgttcaaaaccaacaacagcagaataattatgacctttcaagcaacagatacaatccaggttggaggaatcatccaaatatgagatggacaagtcctccacaataacatcagcctgtccctcccttccagaatgttgctggtccaagcaaaccatatgttcctcctccaatacagcagtagcaacaacaaagacaacaagcaactgaggcccctcctcaacctttcttataagagttagtgaggcaaatgacaattcaaaatacgcaatttcagcaagagacaagagcctccattcagagtctgacaaatcagatgggacagatggctactcagttgaaccaagctcaattccaaaattatgacaaa

SEQ ID NO: 101180 - DNA, 330 bp, Glycine max
atggacaaaggcttcacaaattctggggctgagtgaagagagagagatagctgcttcttggttcaaaaaggcttctctcttttctattattttattttaagctatgccacatgtctccatttgagtggagcaaaagggcccactttttctctttatgtgactcatgctcagccacatgaagagaaaaatctgaccttttgaaatgccaacatactgcctcagtttgcgtgtcgttcctctggttccagcccctcacgtttctctgcgctctgtgaggccagtttttaaagtatgcaatatatttataatcgctctgataaaccccgagtg

SEQ ID NO: 101181 - DNA, 461 bp, Glycine max
  unsure (1)..(461): unsure at all n locations
agctngattgaagaatgttctgacaacaacaacttgaaactccctacataatacaattcttcaagtatcaaaatctatcttataaacaacgaacaagaaattccaggctttggtggatttgttgaggaatgggacacaaacaaagggaataaacatgatgttacaactctttttaacttatctatcaaccttgcaaataaaggtagggccattagacctgccattgtgtcacctttgcttaattgctcaagggacacaaagttggcatgattgaagaggcactctancggttgttactccttgtatgaaattcagaagcaaaacaagagacaccgtgcttatgacactgactactaatacaatatataatgggaagttgcactgactactaattcaactccaatgggaaagtgcaatgtcatgctaaccatagaatctaatgaagccaaggacaaatgtgt

SEQ ID NO: 101182 - DNA, 358 bp, Glycine max
gacactgacgaaaacttatactttcctttttggacaaagtatgacaagctgggggcaagtaacatttcttcccatcagaccttggatgcaactgtgatcatattcctatctcagctagatcttgacgggtattcaagccatcattcgtcttgccttgaatgttaaagagcgtcccaatcacactgtcacatacatttttctccacatgcataacatcaatacaatgtctaacgtctagatcagaccagttcagaagatcaaagaaaatggacctcttctccatatgcaagtctacttttattcttctttgggtattccaatacagattacgtgttgacctgtggatcctgctaccatc

SEQ ID NO: 101183 - DNA, 352 bp, Glycine max
  unsure (1)..(352): unsure at all n locations
agcttcaagaataatggcctcatcaaactatttattctctaagggaattctataaataggcctcccatttntaatggcgtgggttaccattactggaaaatccgcatgcaaatatttatagaggttgtagatctgaatatctaggaagccatagaaattgggccttacattcccactatggtggcagtaaatacaaccatagaaaaacctatggaagaatggagtgaggaggaaaagagattagttcaatataatctaaaagccaaaaatatatatacatttggtttaggaatgaataancactttagggtatcaaattgtaaaagtggtaaagatatgtgggatacccgac

SEQ ID NO: 101184 - DNA, 467 bp, Glycine max
  unsure (1)..(467): unsure at all n locations
cctcttgtaaacccttttactttgggatcttttctatatcttctagcatcaagtcaagacaatgtgcagcacatggagtccaaaatattnttggtcctgtgacttgttaaattttacctaaaagaccaaatacaataaacttgtatgagtagtgtaacaattaatagttattactataaaataaaaaaactttattaagcatgattgaattctcaccatcaacacataattactatcattgtccgtcaccacttgaataacattctcttctccaatcttctcaacaaagctatccaaaagctcaaagatcttctgaccagtcttcatgtattcaaaaccatccacactcctcacaaactgttgttccaatgaacaatatggcagaaagttaatcaaagatctatacttcctatccgtgcaaccatctaacataattgaacatccatatttgattcgttcctcctcat

SEQ ID NO: 101185 - DNA, 461 bp, Glycine max
  unsure (1)..(461): unsure at all n locations
agctngagttgtagaggcaaaactggcagttacatatacttgcaactttgtgaagntaatgaaacttggttgttagccaagaaatggacatagtcttagtgatagagacgaatcaatataaatcttcatgtcttatatgccttttgtttttattttcttttaaattgacctaggatttgaatntgatataatttgtatacacattgtgttttgcaaaatctatttctatcatttgaacttgttnttgctaaaatttcttatatgttttacaaacgtatattntagatgatagctttgttctcaatgaaaaagggtgtaaaaattctaaaattataatccaacccccttgtcatatttgactctgcacattgtntataccatgacttaagtgattcatagaaagtaacactttttacaaagtgttttacttttatgaatnnttaaatnggttggtcatttat

SEQ ID NO: 101186 - DNA, 216 bp, Glycine max
tgcttattcatacatgcacaaggtgagagagtagttgatactgtccagtcgagcagcgaaaagaggcgcatctactggccatgagagatgaggtaacccccgcttctttgacaccaaattacttgaaatgatcagggcacacaacaaacgttgggccctgttatttgcagggatgacccgttgacgatactgcgatcctaaaggttaacaaaatca

SEQ ID NO: 101187 - DNA, 425 bp, Glycine max
  unsure (1)..(425): unsure at all n locations
agcttgtccttggtttagacatgattggtacatgtattgggacttgtaggattcaatttgggcaaaattggatgagggaaagagtggttttcgaaatctgcactttatgcagaattttgttgttgaaatgtgcagcagaattttgcataagtgtagaaaaatgctatgtatctgctggttgtggaaagagtagtacagaatgagttctggatgtttgctagtagatcccaacggttaatgaattggaacgaaggaaatgttactggggtctttaagtgagaaaaagttgtgattntggttngagttttgggcagagtttcctgcctttgccctgttttgcttggtttgttagtttgtgatgatatggatgttgaattacttggatgttggggaagctggggaggattgatggggaccccggtgtg

SEQ ID NO: 101188 - DNA, 457 bp, Glycine max
  unsure (1)..(457): unsure at all n locations
gctntaacctcatcgtccctcacagtctntagatttgggagccaatccaattcttgtgtttggactctcagccacttatgatagccgccgatgatcccattactgcttcccctaagctctctgtcctttcttcacgccgcatcccatgccttgcgaactccttggagtaccctcgcgttgtggtcactaaaaccccgtgcgatgaaaggcgtgatgctttcgtctaatggcgctcctctcatggggtagccaagctgtcttatggtgagaacgggattataattaatacaaccccttgttcccatcaagggaacatctggacatccttcgcatgaagatagaatcttgattcttcctttcttctagcgagggaaccaattaacagacgcccnctcatgctagccaagagttggtcccaattcgcctttcctttttacgcacgagcggaaccttgtac

SEQ ID NO: 101189 - DNA, 446 bp, Glycine max
agcttataataaaggtcatgtgataagagaaaatctatattaaacctaagatttgaggtcattattctaagtgagagcgatcatcaatctaactgtatgagaatgaccacgtaacgaagttaaagaatttctatgattaccctcagttgcctcctcttcgtcttcagcattttcaagttttcattctcttccaaacttatgtcctagcaaatgtatcaataattactcaataaaaatattatctgacaaatacaataataataattctacttggaaaagacattaaattattgttttacaacaactacaaattgtttaattggttcataaatcacaatcatattagatatattacaagaatttggtagtggggctgtgagagaagagataaacagtatgagagtgtgaatcctctattttagaagatgagatagatgatggggagg

SEQ ID NO: 101190 - DNA, 372 bp, Glycine max
gtcacctgccgcatgctagcttcttgaagaagcctcttaatgaagcttcttgttgtaactacatgaagctgcctcggtaaaaatgctgcccagccttctgttaccgttggatcttctctaaattaggtctgcagcttcacaagacacttgtccatgatctgaccgttcggatctttgagaagatatctggcttgtgctcgaagtttccgttcccgagagcatttcttattaagcacttcagcctttgctttcgttgtgcctatgaaaaacgtcatttcttcttctttctttcttcaaagccaattttaaagtcccatgcactttctccatcacccacagccaccattagccaccacaaaccatcattgttct

SEQ ID NO: 101191 - DNA, 457 bp, Glycine max
  unsure (1)..(457): unsure at all n locations
taagtaagcacggatttattgcaggataacacgtagagtttcccataaaactctgaacaaaatcaatatacagcaatgaagcatccataaagaccacaaaaatatataagcaaaagatcatgttaaattacatgcaacgaaaaacagttatcaaaagaaaattcataaaagatgaaacctaattaggcgctaaatatccacatctttttattcaaaaactataaacggtgaatttcaaaaagaaagaaaattgaattgggaatgagaagaagaaaaagaaaggaaaaacttgaatttgacaatacacgaagctctgtggcatgtaattgaagcgtggctntttgcttgctctatcaccagctccctcaacctacgtgtcaacaaatgaagaaaggaaactacaggtgtaacaaatgaagaagaaaaatacatgtgtcaacaatgaagcagggttaaa

SEQ ID NO: 101192 - DNA, 457 bp, Glycine max
  unsure (1)..(457): unsure at all n locations
aagcttgactcccacctagtattctttgtccttcctagccattgttggctctacttatatcaacaagaattgttggaagggtgcttactaactaaagtctgatcctcttatcgatgaatatatcaccaagcacttntagtcttttatctcatgatatacaacgtgttttgagagcttagtatcttcataagaatttacatcaagctttacaagagagaatgaaagaatgattcacgtacataatttgtatcttgtttcttcgaagcttcttctatatataacattcatctccaagtatctgttgtttgtcgatcttcactatgttctctgtctgatgtcttgagttcgctgaagtatttaatgcttgcattaaatgattgttccttcttcatgcaaagtccatgcttatagcataacgcgtcttatacttcatttgagaagtcacttccttcatcat

SEQ ID NO: 101193 - DNA, 398 bp, Glycine max
  unsure (1)..(398): unsure at all n locations
actgtgcaaagagagtgtggggaccacaaacatcttctacaatgtatcttcaaagaagtacaatttatcagtgtcacctcgttcttagagctgactatcattgtacaaatcaaatacaatgttatcaacgtaaaacaaaatgaattaagaatgtctagacaagacaatttaaaactttccttttgtgggtatggcacaaatttcttactgaacctatggatgttagtttatgatgattgcttttagtacttgaggatcgaataattgatccattgcctntgtactatgagccaagtgctaaagcacattttagtttctcatttatctatgttcacctattatctaaagtgagtataactcttattcatttctataatgtattacaaatggtgcttata

SEQ ID NO: 101194 - DNA, 475 bp, Glycine max
  unsure (1)..(475): unsure at all n locations
tgntcaattatctgatattacgatatacctaaattattctatttctattatgagagctctaatcgatcacaatattagctttaactatttcgttccatagaatttattgggaggagaatatatgtcttatgtgtgtgtatgattctcgacaaagatttattattatttaagcaaatactactttgttctaacatactactttgtacttatatgggggaaaaaaaaataaacattttcatttgatttagaactattttccattcatgtaacatcgacaatgatattattgactctcttggcttatccgcgtcttgtgtctcttaggagttgaaaaccaaactcattttgttagtttctaaagcgcatgatagttaactaaataaaaataattattcaatggtttctagcagatcttaacacttggattgaaaacacctgcggataaatgatggatgagatgtgcctattattagcc

SEQ ID NO: 101195 - DNA, 405 bp, Glycine max
  unsure (1)..(405): unsure at all n locations
gcatttcgacaatattttcaaagacaccaggttatggagaagaatgaccactccctgaagcaagtactcaaaaagctgagcctcatctgacgaatggtagcatgggcggtcgagctcttctaagttggcttatgatttgaacctataggcttcatcaaagggaagtgtctggatgatttcctaatcaagctcccactctactaaggcatcantgaaagctggtggacgctgtttgtggatgaagccttcaataataagggcaacgacgtgactgtaaccgtgaaagaccaaatacgtctcatcaagcaattagtatatttgctgaacgtcccacaacaacaaagttgaacactcattgagatgatctacgtcggggcagcaaagaagtgagtcatgattctctac

SEQ ID NO: 101196 - DNA, 436 bp, Glycine max
  unsure (1)..(436): unsure at all n locations
gactcttcacatttgaattttatttctacgttcaaaggcactggtaatcgattaccaaaccattgtaatcgattacagcttttttgaaatcaattggaacgttgtaaattcatttgaaaactttttcaaatccattttgctactggtaatcgattacaataatctggtaatcgattaccagagagtaaaaactctttggtgaacatgttttgagaaaaattcatgtgctactcaaatgttgaaaaaacctcttcatacttatcttgattaagtcttctcttgattcttgaatcttgatcttgattcttggaagcttgatccttgaatcttgaagcgttcttgattctatcttgaacatcttgaactcattctttgantgaactttgagcttttttttatctcctttgttatcatcaaacatctttgataaatcttg

SEQ ID NO: 101197 - DNA, 341 bp, Glycine max
tagctataagtataatatatttctgtataaacacgtttctcgatccttgtatactaaccttatgtatacagacaacaaagtaatacaccttatattaatattgtaaaatagttgtctccgataacaaaattttatatatgcatcactagtaagggctacaattcagactccagcatagaagttaccgaaggtggtgttcgtccataatatgagcaacatacgagattatgcccttctaatgtaaataaagttatacatatttgttccaaataatgtttctgttggagtggagacaacttaatgcaaaacactatgcactggaatatatactctgttattct

SEQ ID NO: 101198 - DNA, 425 bp, Glycine max
  unsure (1)..(425): unsure at all n locations
agctttcaccaaaatggcacgaggctccaatgacctctataacatggattaatatttgactaataaagaaatggctctttggcaataaacaggaaattaagtgcatttaccagcagactataggaacacaaaaacatatgactttgagaaaatagggttctttttaatccaagtcaacactttgtctttagatgaagaggtcctgtagagactaaaccataagctgtcagtatgtacaatgcctcaacctatcttctgagaaaatcttccatattntcctgccacaaaaattatatttaaaaataaggcatcaattgtgaagttgctcctttcacatcataaatcattagacagtaactcacttcaagtaaatatcaaaatctccactgtntagcttttccttggatctagaaagtgcttccttc

SEQ ID NO: 101199 - DNA, 498 bp, Glycine max
tcttcaaccataacacaagacaagacactctagttttcttgtattcatggattgaatattacaaataaaaacaatttaaccatttccctggtatactaaagtaagtactacaagatgcaaatcagcattctggaacccaaataataccaaaagtgcaataagagaaaattaaaacagaatatatgtaaataagtacgctaaagctatcggttcccagctattggttccctttgggactgaccttagtctgatgttggaaccatgtggctggtagtctaactacttgtactgatagtaccgctggtactgattatatatataatataatttatttttgccgatcaaacaaaaaaaaagtacgctaaagctcagacagccattagctaatttatataaaatcaatattttacacaaggaaagaattataaagaaaaaagatcgccctagtccgtgctaattcagagacagatcataacctacaggcacaacatttgtggg

SEQ ID NO: 101200 - DNA, 448 bp, Glycine max
  unsure (1)..(448): unsure at all n locations
gtcacctgcggcatgcaagcttctaaggaagctacctagtctataaatagatacatgtgtaacacttgttggaaccttgatgaatgagagtcttgtgagacacaacttanagttcaacttctctcccttgttcttccttcaatttcgtgctcccccctctctctttctctccctctttcttttcctccattgaagcattctctccaaggctcatcttggtggtgaagctccttcttccatggcttattccctagtggatggcgcttcctctctcctcttctcctttgtcttccgctgcatctccatggtggaaaatcaccattaaaggacctcattgaagctcaaagattcagccttcatagaagctccacaagcaagcttncatcaaccagggtgggtcatctaaccggccacagcaacaagggcctattctctatgacagaacgac

SEQ ID NO: 101201 - DNA, 498 bp, Glycine max
  unsure (1)..(498): unsure at all n locations
actcagcttaagaaagggccaaactccctccaaaatcagatttcaagcttaaataggtggctntgttcgggattgtgcgcttagcgcaattctgaaccgctcagcacacattagtgaatttcgacttagcgcggctnttctcgctcagcggatggactgaagcggtgcccttagcgggatgacccttcgctcaacgaacatgcacagctcatccttcttccagattcttcctcgcgcttagccaaggattgttgcgcttagcanatatctcgctaagccagcagattggcttagtgagggggtgaaaatcagcacttcataaattcataacttgctacaccccattgcacatcatataggcacancttgtgcatgtccttcatactttacatgtctcatgacacctaagcacacttagtggagagtcttggacttgatcttggtttagtgcgctgaacactacttaaatcactaatcatatagtgaaatttgctctaa

SEQ ID NO: 101202 - DNA, 430 bp, Glycine max
  unsure (1)..(430): unsure at all n locations
attttgtttattggaataatatttattattaaatntatgacacaaatcctcgtaaacaagaacttattaaatataggctaaatgatattttatagtttatcttattttcttaatttaatactagttcaataccccaaaatcacacataattaaatctacagtatagttataacatcacacataattttttggcacttgattggaaacttagaaaaggaaaactaaaattaatataaaataaaatatttcagataaagatgttaaaattgatttcaaaatcaagcaaaacacaacacattntatatgacaaattgtctattgacaaaatgatataattaaaaagaatgtgtgtagcagattcaaccagcatatctcananatacatcatgaagagttataaacaaanatctacatattccacaactattat

SEQ ID NO: 101203 - DNA, 462 bp, Glycine max
  unsure (1)..(462): unsure at all n locations
gaccttagaatctaagctagactgctgtgggccctattcgaacctcttgctgttttatgtatataaaacagtcccacaatcccaatcttacaaaactatattcatatgtcattggggcatttcaccgagcacttggtgggcgcgtgtttatgcataaatngcaagagaatgggggcaatgtggcatgccccattgtttcagaataccacataggcctaaagccatccnctacaacccctcaactctaacaaattcagcataaaaaaccccaaaactgccccacagatatgagcacattctcacaatttagagcaccaaaagatgaacaaaacgctccaacggaaagctaaaaactcaaggatagaatacttacatgctggattgntangaatgccataaatgaaagcaaaatgcgaccaaaagtggcttgtgggagcaaatacacgagcctcgtgagttctc

SEQ ID NO: 101204 - DNA, 376 bp, Glycine max
ctatacgatgcaccagatgtatcttgtctcgtagatgtttttacagggcacttggaatgagaccattaccaatgccttgaatctggtgatcacttgtatatggccataatcgtcactaaatggatccatatagttgtctaaggtcttgctatagcttaaagaacaaatcatcagagtcgatgtatgctatttgaatgaaacactcgattctacaactcaactagtaacaacatttagcaggataatcagatttatggaaactcgatatgttattatgacataaaactatgggataacaaaatgcttaattggctaagagaatacttggcgagcctacactgaagactgttctttaactggttctatgtcgacaact

SEQ ID NO: 101205 - DNA, 426 bp, Glycine max
  unsure (1)..(426): unsure at all n locations
tcaagcttatcagcatatactagctcggaatatacatcgacatgtatgacactcaatctatttatatgcgnccaaatactgaaacatgcactagtaataaactgttgcgtgtaactcttaccataggaagaataaataaaataatgaaagataacttctttggagacatgaacatgacgctaactttcgggcacaaaaaataattagtataacattctaggttactaagtacttaatgttaggtagttcaaaaacaaagaaattgagccgaacacaattggagaaaaactattttataaaagataaatgagaaataagcagtgttctttataagacaataactgaattagcttttaaaaataagctacatatcctaatctctctccccctagctctcatatgaaactgttatgtgagaacatggat

SEQ ID NO: 101206 - DNA, 457 bp, Glycine max
  unsure (1)..(457): unsure at all n locations
atgagaacaatatgcctaatcatttcaatattgcatgttaattangaagcatcaacaagaatcaagccaaggctattgtgcaagcaatcaatggcgcaaaacacaccaaatgattatgatgatggatggctcaaattctcacaaaggtaaactcatcactttcaaattgagctttcaaaactatcatgacatgtagaggagaatcaaggatntcaagtcacaaaatgtcaagaacttttattttcaaaacatatacccatttcttgaacatatcctataattcaaagaataacatgcaaagtcgtacatgcacacagaattgacccataatattaaactagaaatccgacgaaacttacaacatttactaattaacacatcttacagattaacaaaaccaatataactagcataaccaaagaacatctccccctccttcccatacttaaacaacaca

SEQ ID NO: 101207 - DNA, 461 bp, Glycine max
  unsure (1)..(461): unsure at all n locations
gctttcgattcattctatgtacccgtagtggtccacattatgtttcgtgcatttntattctccgtttggttactttttataccccctggtgacgtgcttaagccattttacttaagtcatttctcgcttaacttaaaaataaaataaatttccaccgaacgtttgaattgtattatccgttaacttccgttaaaatgaatttcgaccgttcggtcgtgccgtagccacattggatatcaaaaaagagggtaaaaataatataataatcaaaaagacatcttttagtaaaataaagcggaaaatcaatcggacgttttctctttgggatttctcattcttaatcgaattgataataactaaagtgaaactaaaggctaaaatcaattcgcctagtcaagctcgtccatanaaataggcttttgaagttggcatttcatttctcactagtaaatggatcattt

SEQ ID NO: 101208 - DNA, 491 bp, Glycine max
gcttgaatggtatctggtctcagaattaacttttctaagagccaatttggtgcaatcggccaaatcgaggactgtgtgcagattttcaattgaattgactaagattttttattttttcttatattatttaaaatggggttaaatgaagtccttcaaatcaattattatatccagttccatcaagactaaaaaaaagggtatctactcatctaagtgtttggttttttggtttcacaagaattctgagtgttttgtttctggtttcacaagaacgacaattcttttatagaaaataatatcgtttaagggactactgaattttttatggatggttctattgaatttaaatatatacatttttttatcaagatctagtttgtagcacaagaatacatcatactgctccatacaagcctatgggcgtatctatatagagcctatgttaagccaacctttttttttataataaagtaacctatgcataaatttat

SEQ ID NO: 101209 - DNA, 425 bp, Glycine max
  unsure (1)..(425): unsure at all n locations
agcttcaattagatggaagcaattatgatgcatcttcaattaccttgcaagnagaaagaaaaatatttacatttatgtagtgtcattatctttaatgtcaattggtttagttttacttttgctttcaaatatttctacaacgggctacacatttgttggcatactatagagaagttaaatttagggataacaagtaataaatattagactagtttgatatttgagattagagggactttaaccaagtattcaaaacaatctttacatctcccttctattcattcaaagtttttgcactagatgtagatggctatatgttttatctttggtactaaaaaagaattttcatgttagagctngttaaatatataaagttccaggttatattagcataaactaattatattactaaacgttaattatta

SEQ ID NO: 101210 - DNA, 328 bp, Glycine max
gccccggagtacgacagtcaccgctttatgagcgttatacaccagcagcgcttcgaagccattaagggatggtcgtttctacgggagcgacgcgttcagctcatagacgacaagtatactgatttccatgaagaaatatggcgccggcggtgggcaccactggtcactctcattggccaagttgatccagaaatagtccttgagttctatgccattgcttggccaacagaagagggcgtgcgtgacatgagatcctgcgttaagggtcaatggatccgttccatgacgacgctatcaatcaactcctgggatatccgatggtattgga

SEQ ID NO: 101211 - DNA, 433 bp, Glycine max
  unsure (1)..(433): unsure at all n locations
atactcaagcccgcttgtggtgcttctatggaggctggatctttgagcttcaatgatgttctttaatggngattttacaccatggagatgctgcggaagacaaatgagaagaggtgagaggaggcgccatccactatggaataagccatggaagaaggagcttcaccactaagatgagccttggataagaagcttggagaggatgcttcaatggaggaaaagatagatggagagaaagagagaggggggagcacgaaattgaaggtagagaagtggaactttgaagtatgtctcacaagactctcattcatcaaagttacaacaagtgttacacatgcttctatttatagactacgtagcttccttgagaagctctcttgagaaaacttccttgagaagcttctttgacaaaacttccttgagaagctagagc

SEQ ID NO: 101212 - DNA, 334 bp, Glycine max
agctttaccagaaccttcactagcggaatgtccacttctcatttgaggcgaagagcgagaccctgactgcctcgaattcacaaacaccacaccaaatcgcaccatgcttgcatgatcccttatgtgtgagaacaagaatgaaggccaactcccgactattatacctgatccaaattcatgccaccagttgccatcgcttggattcttttcaataaaggaagcttagcaccaaaccttcgatgtcacttcttgttgcgcactactcacagatagacatgtttgtgcatagcatcactgtacccatgttggatgtagaagtgggcaaaagagggga

SEQ ID NO: 101213 - DNA, 413 bp, Glycine max
  unsure (1)..(413): unsure at all n locations
agctggggtttgcttatgtgacatgttataaaaactctgtgatttccgttataatntcttaaagagtgttccattcggggcactcttttttacattccctctacagaactagcccttctctcacagagaatgaataaataaaaatgcggcaccgccagaatcgcgttcgatgtgactatgatcattttcggtgagtactgctttgatctaaaggctggttttctgtgatgattgaccagcctcagagtattgatgacaccaccgttcataacagatctgcattactatgcataagtactgtctcatattctcgccaaaacactttttaatgccttngcgaattcatccagacttatattgtcaantttntgcacaacgacgactgactacgatacatcggccattgctggcca

SEQ ID NO: 101214 - DNA, 466 bp, Glycine max
atattgaggaaacagactttggtgtcattcatattcccgatcagaatggcgatgctatggccatctttcctgttattcgggcgcttgaattgcataaaattaagcatcttttaattgtaacgtcgacaattaatttagaagtctttaatgcgcttaaacttgaacagactaaattaacattagtcacaatgactatgcaagatcacgcaacattaaaagaaataaaagaattagctaagaacataacacagctatacggtacgccggatctttgcattgaggggatgcgtaaaaagaacctgaaaacgatgttatttatcagtcagttgaaagcaaaaacgaatattcagggtgttggtataaccatgaattgcttctcccctttggcaagaacgcgtcagtatggatcagaactcggctccgtactatgacatgggcattatatgcgtaggcgggtttcacagca

SEQ ID NO: 101215 - DNA, 348 bp, Glycine max
taactacatacaagtgggtatattatgattatgaattctttacatttttaatttatggtcattctttgtgtgatttattaaaagaattggctacgttctccaataaacttataattaaatttatactgggtggattcattcatttataataaatctatataagataggagtgacatggacgcctaagagttatggacttgaaaatagagcctgaatccatctcttattagggccctatagttctattaccaataattataagccggtaatgtctcgtaacaatctctagaagaattaactcatctccctcaatggggaaaccactaattgacaattgcggtgagcttg

SEQ ID NO: 101216 - DNA, 448 bp, Glycine max
  unsure (1)..(448): unsure at all n locations
agcttgtaccaattggtccattgttgacaagttactatgatacaaatgcaactgcaaaaacaatcggacaatattgagaagaagatctatcctgcatgagttagcttgatcaacaacctcatggttgtgttgtatgttacctttggtagtttcactcattttgaccaaaaccaattccatgaactagctcttggactagacctcactaatagaccttttctttgggtggtgcgtcaagacaataagaagtataccctaatgaattcttgggaagtaaaggaaagatngttgattgtgctcctcaacaaaaggcgttaagccaccaattagagatatatattagggcaaaaatatcaaatagggttccttttacaaattatttacctaaatgggtcttgttttgaaatatataccccgtgaatttgtttttttctacaggcatttccta

SEQ ID NO: 101217 - DNA, 480 bp, Glycine max
  unsure (1)..(480): unsure at all n locations
tactaagcttattgcttgcgccctatgacactgtgttggcatccttggatacatttctcttattggacaatgttcgtcctatagaagaaataataaaacaattctgggatattcttgcattgtatatccccctgctgctgtgtacagagatccatattccatttcagtgttttaatttttgcccctctataaataagatttgcatcatcagttttctaatatactaaatatggagaataaatttctctatttttgccagttattttatagaaaacattatcatctcagaggggagtgattggaaggaatggtttaccaaatttctttacagcctgatactttttttttctttattggtgcctttcttactggacaaaacttctagaattcttgggtactttgtaatttcctatcaatttntcagtaaggtcagatttttgcaagtggatgctacaaaatattgttaatttggttcttatt

SEQ ID NO: 101218 - DNA, 451 bp, Glycine max
  unsure (1)..(451): unsure at all n locations
tagcttatgacctgtacgatacacaagtaccctaatctctgagttttatatgagtgaaagaggtttatgtatgtntgaccaaattatcacacataattagatgacttgtgatgttagtatctgtcgtaagttgtattgtatagagacattgtattttctaatgatatggagatattttgaatagtttggacacgtgtcacaatgtacatgattggcttgtctttgacatatgtcgcaaacctagataacattgcaaacatcgagggtgtctctttactacagaaatgtctttagggggtagtgccttgtttggtgccccctatggatgatgactatcgaacgttctcttggagaatgaaggacaccatgtacgaagaatttttctagaatgttctttatgtgagagtttattgagagatgttctgttgttagggaaataaagtttatggga

SEQ ID NO: 101219 - DNA, 439 bp, Glycine max
gatacccctgtaccatccttcatctttaaccatgtaaatatactagggagaatgtgtttgaaaacactctgtaaccacgttgaacggagaaagtttgcgttccaatacgataacaccatactggggttgcttctccattgcatcgcctttacgctatcacaaacacacactataaccccttgcttattaatcttcttaattaaatcctatagtgaaagaaccaaagattgagaagaagagcatatgcaaggctggaattataaataaatcatcctaaacccatgacagaacaacatcctcaaaagttcttcctatctggtgaggtggaagaaatctgagacctataaccgcatgacctgatagaaccaactcgcatgaacatcaaaaccgatgtgacaatcttcttgaccttaacagcaaccttcttcagcttcagctt

SEQ ID NO: 101220 - DNA, 500 bp, Glycine max
  unsure (1)..(500): unsure at all n locations
cagctgcagcttctatccaggctcatattggtggtgaatcttcttcttccatggcttattccctagnggatggcgcctcctctcacctcttctccttagtcttccgctgcatctccatggtggaaaatcaccattaaaggacctcattgaagctcttagatccagcctccatagaagccccacaagcaagctttcatcaagaagatagagaatagctacacatacctctctaatagctaagctcacctccttgagatgaaaagctagatcttagctacacaccccctatattagctaagctcacccccatgactaataaacatgaaaatactaataaaaagttttactacaaagactacttataaagccccgaaatacaatgctaaaaccctatactactagaatggccaaaatacatggcccaaaccaaggaaaaacctattctaatatatacataaggaagcgggctcatactttagcccatggctcaaatataccct

SEQ ID NO: 101221 - DNA, 450 bp, Glycine max
  unsure (1)..(450): unsure at all n locations
ctaagcctgctcacatagggggtcatagattctagcgacgcaacttcaccctgttcttgccttntcatggtgaagcctttgtcggaatatcctagatgactcatcaataggatctctattgcttctttgtcaaaaagtaacgggacatgatcaatgggcctagtattcacaagaaagtgctgaaaacaagatacatcatctaaagtgaagatcatctctccacatgcaggtggaagaatgacgtttcctggtgtcacctcttccaaaaggcgttcaccaagcctttgtgtgtggcaagataccacgccataacaagggctcctaacgttaaccggtccaagttaagcctgaacctgcagatgagtagcgcacggtagcactcgagcatcgtggctacatgctcacctcttgctctactgtggttcatatgtgaccaaacttgatcctata

SEQ ID NO: 101222 - DNA, 341 bp, Glycine max
  unsure (1)..(341): unsure at all n locations
agcttcttagtntcagatgatgcagatgggtttgtatctacctcatgttctcctctaatgactatggcatcatttctggcgctaaactgctgggagttggaggccatcttctcaattaaatttctggcttcaacaggagtcatgtctccaagggctccaccactggcagcatctatcatacttctctccatattactgagtccttcataaaaatattggagaagaagctattctgaaatctgatggagggggcaactggcacatagtttcttaaatatctgccagtactcatacaggctctctacactgagatgtctaatacctgagatatccttcctgat

SEQ ID NO: 101223 - DNA, 446 bp, Glycine max
  unsure (1)..(446): unsure at all n locations
cgtagaattcaccccaattccagtgtcctatgctgacttgctcccatatctactcgataattcaatggtagccataaccctagccaaggttcatcaacctccatttctccgagaatacgactcgaacgcaacgtgtgcttgtcactgagaagccccggggcgttccattgagcatggtagggctctgaagcgtaaggtgcaaggtctaattgatgcgggctggctgaaatttgaggagaattgcgtgtaaatcctgacattgacaagagatgccacacatggggcaatnttgaaagctgtngttaggtgtccctaatgactcatcacggtttccaagtttatgccattattgtaaaccacagctacaatgtttaatgaaatggataaagttgatatctttgtccctcatcctctcacaaacgctntgttgcttattcaactttcat

SEQ ID NO: 101224 - DNA, 297 bp, Glycine max
  unsure (1)..(297): unsure at all n locations
cgaggggctgggtgttttttttcacaagaanacaacgttctgatggtgctattatccaggattgacaattctattccgctataaataggatccttcttgtcccaactgacaaatatgatttcctactatgaatctatgatttacaaacgtatacatggcatatatcattccaacttaaaggcattggtccatctattacaagcaggtttattgattaacacatccactatatatatattggcccgtactcttgttgggtacaatccaactgagattgataatgcggatgtcatacac

SEQ ID NO: 101225 - DNA, 331 bp, Glycine max
agcttcgaaagagagtgatgaggttcatgccttatatgcaaagcttgaaagagcccgtgtagtctaagagatattctcgtccatagccatcaaagcttgaagagagtatgatgaactaatggacgtcaatatggccaccgatgaactcttggtatgagaaaccaagaacgcccgacaggaataacaccaccacaacaagttgtgaggggctctatagggcagcaatagtgagctcaagctccgaagaggtgaaaggaatcatcactggtcaaaggcatgatcttgaaggacgagctaaatgcttgccttacgccgaaaagaaatttatccc

SEQ ID NO: 101226 - DNA, 385 bp, Glycine max
  unsure (1)..(385): unsure at all n locations
aagatcttgtgcacgcgcgatgtctatttttctatgagaatatggagtaagagaagacgcaccattacagtacttactggctaatgtggcgtgagagatcttcaagtggcagatattcagaggaagctgtatggatattccaggggattcccaccccagagatagaaagattgaacgccatatttatatgactagggtaaatactgagaatagaaaaccttatacccatcatccacgatggttttcacaaattgttgaaatatagctttaacttcgattgtgtagaataccgacattggaaatccaattctaccttggttttccaacaacctgtcttattactttgcctttatctttatanatgacactgcttattttgattacc

SEQ ID NO: 101227 - DNA, 356 bp, Glycine max
  unsure (1)..(356): unsure at all n locations
agcttgaaggtgtgtagcccaccatcttttcatactggtaatgtgtctanctataatgtcatcatttntttctccgtcattgaggtgccacttgaactgccaggtctctccacctttgggcgtattcttttgaaagatttgtgcccccttnttgcacatgttctgtagttgcatcctatccgaagacatcatactgacactgcctaacaaaggcaaccactaggtccttccaagaatgtgactcggaaggttccaagttagtgtaccangtaacagctaccccagtaagactttcttggaaagaatgtatcagcaattcctcatctttttcgtatgcccccatcttccgataatac

SEQ ID NO: 101228 - DNA, 460 bp, Glycine max
  unsure (1)..(460): unsure at all n locations
accttcgactgaacacagccgtgtntctgtctatgcccggattcaaggaggtgcagcaccggctccgctttcctaactgtactggaggcggatgcggnggctttatcctctatggatatttggaggtttaacatgacctccgagatggaagccatttgatcttttaaggccgatagatcagccttcatctgtttctgcacgcgctcttcattatccattattctggatcgagtgatataggggtgccttggtgtttcttaactatgatgaaattcctaaagaaatatacaccggtgagtatgccaccaaaacatgagtatgcggatggatgatcggagcacttggatccaccccaagattattagataacgtaatgagtccagaacttctcatttataaaaagaacaaagcttcatcttccaagatatacaaagtgtactaaaacctaacattctattat

SEQ ID NO: 101229 - DNA, 422 bp, Glycine max
  unsure (1)..(422): unsure at all n locations
gcatgcaagcttgtggatattactactataatttgcaatcttctttggaataacaatattagtataataatgaaacagttatctacattggagttgcaatgtattttgttacctatgtttttgaggagtcaaaagaagccatatgcaatttatgaatatttaatgctagaaatatttaaacatccaattatcaaatatttgtaccaatggaaattcaaattgacttttgcttctccatgtaggtaaatctataaaacaaaatcgactgtgcaagaattgatttcttcctttgctagccaagatatgatgaattgaaaagtatatcttactctgagcagaaaagagagaaaatataatattattaacttaactctaaaatcattagatatgagtttggttntatagctcataatcataataag

SEQ ID NO: 101230 - DNA, 451 bp, Glycine max
ctcagcttctccccattttcctataatatggggagaggtgaatggatttaatgttcagccctcctggttattcaagatcacttgaaattagtgaaaaaaattggttccgtgaagataatccaagccaaggcgcttccgtaacgtttctgcgggtgatttcgcgaagattttcaaccgttcttcgacgttcttcgttcgttcttcggcgatcttcggtcttcaaccggtaagttcctgaaatcgaacttttcaattcattttatgcacccttggtggacctcatttgtttcgtgtacttttattctcggttcatttactgttcgtacccccttttgacgtcgtttagtcatctgcttaagtcattttctcgcctaatcaaacaataaaatacatttccaccgatcatttgaattgtaacatccgtttatttctgtttaaatgagatctgact

SEQ ID NO: 101231 - DNA, 370 bp, Glycine max
  unsure (1)..(370): unsure at all n locations
agctngctaaccttcacctatcccggatacttccatatggagttcctgtcgatgctacccatgttactggcgatataattgggacatgtagttatatacacccagagtatttgacaaacggccggcttagcgtataaaatgatgtctatagctctggagtggtgtagtgtgagctcttctcatcaaagctggccaagaattgggttatgaatgaagaggatagtcttgctaccatgttaagcagaacaattgaataccaaactatggtggagctgttggatccaagactcggctttgaatcaaaccttaagatcaagcagatgatgactgctacagctgaacttgcacatctttgcatgatatgtccaca

SEQ ID NO: 101232 - DNA, 378 bp, Glycine max
tatctgaacttataatatgagctttatatctgataacaagtagaagctctaacaagtgtatatgtgaactctgaaggatcagttcaccccattcaaattgattacaacgtcataattattcgaaaaacaaagggtgaactcattatttttgaaataaactaataaatatgccgtaagaaggttgatgaaaaaagacaataaggctgatggggatatcagaatccaatttaattgtactaataaaaagaaacttgaactggacagcttgaaatgtggttatgctatccactgaaggcagcgatgagattggagatgccttccttttatgtcaagcctactctcttttctgactttcttgtgtgatctacatttgcccac

SEQ ID NO: 101233 - DNA, 431 bp, Glycine max
  unsure (1)..(431): unsure at all n locations
agcttcacaagacaattgtacacaatctgaccgctgtgattgttgagaagatatctggagtgtgcgcgacngttctgtgtccgagaccatttcttacttgagcgttttcaacctttgccttcgtgtagcttatgagaaacaccatttcttcttccttctttcttccaaagccatttctaatgtcccaagcactttctacttcacccaaagccaccattagccaccacaaaccgccgttgttctccgttgcaaccccacactaagaggaaccctcgactgaagcggaatcttcaacttggcttgcggtttggtagaaacaanacctaatctgacttttcgtttcttcaggcaccatggtctacgctctttctgatagaacacttggatatatctttctgcttggaccggatgcattttacgttctttgaaaa

SEQ ID NO: 101234 - DNA, 428 bp, Glycine max
  unsure (1)..(428): unsure at all n locations
agctcgcccaggcgagcaaggatgctttctccattttcatcagccttctggaggaatcttctggagggcccaagtgggcctggttgctatttacaccccctctttttaactaaatgcacccccttttctatttttttgtaattctttttccgtaacgttacgaaactttacgaatttcgtaacgatacttattttccttccgcaaggttacgaatacttacggattatgtatttactcttttttagctatcgaagaagttatggaaactcacggattgcgcaaaaacacctcttttctatttccgccacattacggaatttcacgaaccacgcaagcctgcttcctttcgatttctgagacgtctagggacttcattcattgcatgtcatcaagtaataatccccggacgagaatanggtatgacaac

SEQ ID NO: 101235 - DNA, 362 bp, Glycine max
  unsure (1)..(362): unsure at all n locations
agcnttgcggatatggtcttcgtcggtgtaaggatcaaagtgggtctgaaaggaggaaaatttgatcttcttgctatgatgaatgcgaaaactggggcaaatgaagaggatgagaatgagggataaacccttgctgtgactgccattcctacacggccaaattttccatcagcccaacaatgtcattacttagccaataacaacctgtctcattatccaccacccaatcattcacaaaggccatgctcaaatcaagcgtatgttctacctgtcgcacgaccaatgctcaacaccacctttagcacaaaccataacaccaaccatgagatggattntgcagcgaaaaagcctgtataatcacc

SEQ ID NO: 101236 - DNA, 464 bp, Glycine max
  unsure (1)..(464): unsure at all n locations
tctatagaagggttgtgcctaatttctctactattgcatcacctctcaatgagctggngaagaagaatgtggcatttacctgtggtgaaaaacaagagcaagcctttgctttgctcaaagaaaagcttactaagtcacctgttctagctcttcctgacttttctaaaacttttgagctagaatgtgatgcctctggagtgggagttggagctgtattgttacaaggtgggcaccccattgcttattttagtgaaaaacttcatagtgccaccctcaactaccccacctatgataaagagcattatgccttaataagagccctccaaacttgggaacattaccttggttccaaggaatttgtcattcatagtgatcatcaatcacttaagtacattagagggcaaagcaagttaaacaagaggcatgctaaatgggtagagtacctagagcatttccatatgtat

SEQ ID NO: 101237 - DNA, 442 bp, Glycine max
aagcttgcggagaaagcctgtggaagtatcaagcattacagtggcaatgtgaagaggggtcacttgagcatgccctcttcttgtggcaagagtaacagcttgtttaactagggttgcagcctctgatgtcagaacctgtagctgtatgctgcaaactcctgctctcatctttttccaacttggtgcagcttccacaacaacaataatacctcacaaaagagaatttggagttttggttaaacaaaaaaacctttggatatcactattccaaagattaagttttgactcttaatcagcgatatactaggtttagagaaaaataatttcaatggagaattggttcaatgatgttcaacaatttggttttgaaacaataatataattctattgctcagatattggtgtatgaggaagatgcggtattatatgtgtgtgctactta

SEQ ID NO: 101238 - DNA, 471 bp, Glycine max
  unsure (1)..(471): unsure at all n locations
cagaaacgtgcatttgtgtgcaatatacaattcccgattcaccacaacaaaatggtgtatcagaaaggcataatagaactttaatggatatggttagaagtatgttaatcaattagactttacccgtatgtttgtggatgtatgccttgaaaactaccatgtatttgttgaatagggttcctagtaagacagttccaaagacatcttttgaactgtggacaaataggtcacctactataaagcacctgcatgtttggggttgctaagcagaaataagaatttacaatccgcaagatagaaaaatggatgcatgaacaatcagtggatatttcattggttatccagancagtcaaatgggtatatgntttattgtcctaatcatagtatgagaattgtcgaaactgtgaatgcaaggttcattgaaaatggtgaaatcagtgggagtacagttctacgagaagtggaattaa

SEQ ID NO: 101239 - DNA, 440 bp, Glycine max
  unsure (1)..(440): unsure at all n locations
agcttcctcggggccattcctgcgaaggcaaacatttgtgaagttagttntagtgggacattactcttaaagcaaaaatggcatgtaacctcctcccatcaatacaaacatcaatgtaaatttagagcaagcttatgcgcatatttccctacgaacgttcacttgcacaagacatcctattaactaagaaaaatgcacccatatacaatcaaggtagcttccttacctagattatttacatgtacttccaaagtgtatttgttatttacatcatacacgccatcttgtcaaaatttacacacatgcatactcaaagcatttcgggggtaccaaaaatgcacatgcgctcatcttggtatttctaatatctatacatatacaaacttcatgatgaatcttgactatctacacaatanagtgctacatttcatggcgctttt

SEQ ID NO: 101240 - DNA, 514 bp, Glycine max
  unsure (1)..(514): unsure at all n locations
cactcaagctctcattctacacctgaaaagaggatgagatagttacacaaattgtgaagcttcttgatcatgagggagctaacaaaaattttcatgcaagtggaccttcttctagtaattctaacttacagcagcctcctatacctcttccattcccacctagagaaattccaaacaaaaaatggaagaagtggaaaaggagatcttggagaccttcatgagagtagaggcgaacatacctctgctagatgccatcaagcagattccaagatatgccaagtttctaaaggagttgtgcacccacaaaaggaagctcanaggctatgaaaggattagcattggcagaaatgtgtcagcattgataggtaaacttgttcctcacattcctgagaaatgtaaggacccacgtacattctgtatacctcgcattattgggaacaataagattgagaatgccatgctagatctatgagcatcagctagtgtcatgcctctgtccatttcaattcttatc

SEQ ID NO: 101241 - DNA, 348 bp, Glycine max
ctgagctgccgctctcaggagtttctaagaagcttctttggaagctactctagtctataaatagaaacatgtgtaacacttgttggaactttgatgaatgagagtcttgtgagacacaactcaaagttcaacttctctccctttttcttgcttcaatgtcgtgctcccccctctgtctttctctccctgtgtggcttactccattggagcatcctctccaagcttcttatccaaggctcatctgggtggtgaagctccttcttccatggcttaatccctaggggatggcgcctcctctcacctattatctcttggcttcccgtgcatctccatgggggaaaatcacca

SEQ ID NO: 101242 - DNA, 418 bp, Glycine max
  unsure (1)..(418): unsure at all n locations
tttctttgagtcttgtgtttaatttttcaatctaatctatggccactctagaacttccgatgtgtcccacctcggcttgtggtgctatccttttgctttatttttgcatgaatctcattgaattaatgccctgttaaatatcattctgtttagcattcatttcatctnttggttacttacttgtcttcttcttctttcttgagtttaagtgttgctcacattaaggattggaagaggaaattggtgcattgcttgaaggaacattcttgagtcttgaaggttaatgttctgcttccggacagtgcaccggatctcacaagtattttataatggtaagaaccgagtattatactctcggcgaacttgtgttacttagtaagctatttcagtgaataagtgtctactgttgaaatcttag

SEQ ID NO: 101243 - DNA, 485 bp, Glycine max
  unsure (1)..(485): unsure at all n locations
tcaccctaatatcaatcttgtatactaacttactatcgtatctgttcgacaaagcaaagagggtcatatgcccagcaaatattcctcatactcaatttcctagaagatactataccaatgcgacatgtgcttatcatgggggagttccagcgcatatcaatgaacattgtatgacccaaaaacatatcgcgcaaatattgatcaatacatgctggcttatagttgataacgagaatccctagtgaatgccgatgtcgtcacgtgatactatgcatgaatgttgaggaaatttgacggctgatgctagatgttccccatgaaccattaagaacgtcatgttcttgctattattgaaaacaacagncacaattaatatggatgacatcgatgtagtagcactcattctcacttaaatataaggttgcttatatatctactagaatgagaatgtacgccattcgtctgattgctcaatagacctatgc

SEQ ID NO: 101244 - DNA, 286 bp, Glycine max
taaaccacagaatctggcgacaggtgcataattttttattcatgaccagatgggtgaccaggttaaccaaagcatctagtttaccttcaagcttcttattctcggctgatgaagatgaattcgtggctacttcatgcactcctcaaatgacaatagcattcattttggcactaaattgttggaagttggaagccctcttctcaattaaatttctaacttaatcaggggtcatgttttcaatggctttcacactgcaacatctatctacttctctcatggtactgag

SEQ ID NO: 101245 - DNA, 442 bp, Glycine max
  unsure (1)..(442): unsure at all n locations
ctggtatttccgcttcctgaagaatctttttatctttcagaagatgatctttctccttcttggagggtaccacaagatatgggacttccacaccttcatccacagactnttcacttctactcttctttgcattcttatattttttcttcgttgtctacttcattgccttcagctctcacatcaatatttcttactttagtacctgtttctttagccactttctccttgtgcattacactttcttcatcctcagcgttcacaaaccttttactccttgtcatcacaactgtgcattcctccttgggattctatactgtatttgccacacagctgttggatgacctgtcagctatcttgcttggcagtagtgccatttggagcctaaggttctttcatgctgattcagcggctttatgatttgacattggtacctgcataaact

SEQ ID NO: 101246 - DNA, 307 bp, Glycine max
  unsure (1)..(307): unsure at all n locations
agcttggttcgaggtacgtacccgttgatgatcgtataacgacgaacaacgaatgaagatcgtctgagaacggtctaaacctttgcgaacttcttcacggagaacgttacggaaacgttacggaggcgcctcggcttagaatttcttcacggagacaatttctcgcagcaaactcgaaagagagagaagcgcctaaggggtagaacccttctctncttcacttcctccccgatttatagcacaataggggacgtgctggccggccagctcgaccaggcgagccaggtagccttctccagaagcaaca

SEQ ID NO: 101247 - DNA, 267 bp, Glycine max
tcggaggaatcatccaaatctgagagtgggcaagtcctccacaataacaacagcctgtctcgaccttccataatgctactggaccaagcaagccatatgatcctcctccaatgccacaacaacagctgcatcaacaaagacaacaagctactgatgcttttcctcaaccttccttagaagaagtagtgaggcgaatgaccatccagattatgctcattcagcaagagacgatagccttcattcagattctgactaatcaaatgaggc

SEQ ID NO: 101248 - DNA, 451 bp, Glycine max
agcttctggtgggacatcttgacttgctgtccaatctgacattcaccacagattctgccttcttctatattcagagtgggaatgcctttaacagcacctttgacaatgattatcttcatgcctcttaagtgcagatgtccaaatctttgatgccatatactgacttcatctttttttggaggatagacattgtggaggagtaaactggttcttgaggtgtccataggtaacagttggcctttgatctgctgcccttcattagaacttcactcttcttattggtcaccaagcattctgactgtgtgaagtttacattgaatccttcatcacacaactgactgatgctgatcatgtttgcagtcatgtcccgcaccagcagtactttgtcagactaagatggtcatatgggctagctttacattccaatgatctttcttaaagccatcttcaa

SEQ ID NO: 101249 - DNA, 408 bp, Glycine max
  unsure (1)..(408): unsure at all n locations
tatctcagcctgccaatcaacacatacctttactcgatgcttttgatccgncaaatcacacgctgaattgatgtgaagctctggcaattcaacgacataactttttctggatgctgatgagtccgtacatattgatacgctcgaaatgaagttgagctctagtcaatcaaacgacaatacttttactcgagtctgctgagcccgtcatatatgagacctcgaattgaatgtgaagctttgaccactctacgacaaactttttctcggatgctgatgagcccgtacatatgaatctcgatatgatgtgaactttagccatcaacgacatacttttaccgatgctgatggcccgctatttagacgctcgaatgatgttatacttaccattagacacatacttactagagt

SEQ ID NO: 101250 - DNA, 412 bp, Glycine max
  unsure (1)..(412): unsure at all n locations
agcttgtaggaatatggggtacccattacatgtggttcttgtggcggacgggcgatggtgcacaacaagtnttccacattcacaatgcgcgcataaacccaccatcccctgttgcccacctccaactgaacttacgtactcccacgtagcccatatcctcgtttctctccacccgggtccccatcaatcctgccaagcttccacaacattcaatcaaaacaacattcaaacagcacatgctatcacagccaagcaaaacagagcaaaggcagaaaactctgttcaacacatcaaccaaaatcacagtctttctctcttattgaccacagtaacaattccttccatccaattcgttaaccggntgatcgactccagaattatactggaagtctatagtgcataagcctacatt

SEQ ID NO: 101251 - DNA, 363 bp, Glycine max
acaactattgttaatgggagagaaatgttcatctaaagcatacaaatctctaatgttatcaaatcctaaaattcgagctcctagtgagcaaaacaatgtgtgtctcctagagagggcatcagctaccacatatgttcttcccttattgtatctgataacatatggaaattgctctaaggactctacccattttgcatgcctttttgttaactcgctttgcactctaatgaacttaagtgattgatgatcactatgaatgacaaattcctcggagacaaggtaatgttcccaagttcttattgctcttattaaagcataaagctctttatcatatgtggggtagtaacggtcgcaccatgaagt

SEQ ID NO: 101252 - DNA, 343 bp, Glycine max
ctgccgctgcagcttaaagccagcacacaggatctatggtgtcatcacctctccattcaatgggtggtctaaggttgaaaagtgaaatctaaaatgaggtaaatttgaaacaaactctcacctcacaccaatccataacatctatttagacctgttcaaactggttttacacctaaaatcctaccgaatcaaagattgactcttcaacacccaaatttgccctataaatggctcttggttcactttggtcatatgtttgtctctctaacacagtccaagctttctcataagtccctaatgacatttcaagctaggattaactcacctttaccttcattaccac

SEQ ID NO: 101253 - DNA, 371 bp, Glycine max
taatactcaagctctactgtggtactttaactgagatgatatattgcgtgatggtatataaatatttattcagggaaatttccatgactctagtgtagacttatctacttagttccatgtccctaataaaataattttaagtcaaagctatgttatagtgatcaggttaatgttgttgctattggaacaaccaaatcatcccgaatttcatttcctttattctttctattttctttattgaagaatttattctttgcaatccaataatattgtttaattgcaacgatttgatgtacattaattctaagcacagctagggaacaagttcacgaatctcattatttgtggaaactagccataattgacatatg

SEQ ID NO: 101254 - DNA, 462 bp, Glycine max
agctttataagctcttacttggtgctatctctagtctatgtgggactctggtgggtttttcccaatattgagtttatagtatttcgtgtttataaaagattatatacaaggttatcataatcataatcaaaatatctaatatgctttctatatttgaatccttgtgtactctcaatcagtcttgtacctttgtatatcttctatattttaatatggcacagggataattctctgctttgtttactactttatgtcctcatagggcatacttcatcaatcatcatgcaatcacaaccctcagccaaatgtcattgttaagcataaaagactgttattaaaagaacatacgcccttcacaataatgtccttttgagattttgcggtgatgcacgtctcattgtatgttacttaatatctacctgctttgacttaccaaacagatacgccttgagagtctattgt

SEQ ID NO: 101255 - DNA, 453 bp, Glycine max
  unsure (1)..(453): unsure at all n locations
agcttgccagagtcttctgttgaccaaactgttatatttttcagtntttnatagggccttgtatcaacataatactttctttggctttctgaaatccttcttgagcttgaatgagtttagttcgatcatgctttgtcgaagattcaatttcagcaatgtcaacagcatgttggtaacaagttggtgggcctcaaaagcattgttgaagacattgaggattgactccatttcctcatgaagctcatcaactacgagatcatcatatttaaaaacctcattgattgcttgctaaagttgccctttgtagtttggattcgaaagagtatcttcaaggttctaatctaaagtaagttttcggaaacaggccacaacctcatccaaatgggtaaaatgcctggtgagactcgattgagaagcttttgaaggcattgaatttgaagacaaacatctatg

SEQ ID NO: 101256 - DNA, 464 bp, Glycine max
  unsure (1)..(464): unsure at all n locations
tcaagctttgtgtganaggatgtgactcttcacttttgtaattgaatttcaacgttcaaaggcactggtaatcgattaccaaaacattgtaatcgattacagctttntgaaattaattggaacgttgtaaattcaatttgaaaattttttcaaaacaattttgctactggtaatcgattacaacaatctggttatcgattaccagagagtaaaaactctttggtaaaaggttttgtcaaaaactcatgtgttattcaaagttttgaaaaactttntaatacttatcttgattgagtcttctcttcattcttgaatcttgagtctcgaatcttgatcttgattcttgagatcttgaaccttgaatcttgattcttgactctagactttcttcttgagtcgtgaattcttcttgattcttatcttgaactctcgaattgtcttgatcacttgagtggtctttgatg

SEQ ID NO: 101257 - DNA, 508 bp, Glycine max
  unsure (1)..(508): unsure at all n locations
actcagctgctgattacattctnccctttctaagcaaattcttaattcttcttgacatcatcaaaatcttcatgaattacattctccccctttttgatgatgacaaccacctgttggttaggagcaacaacaaagaaaaaatatctatttgcatatagtttactcccccttgattntgcaatgattgcttatatgagacagttgaagatttcatatttttcatatgtaaacaaattgtctcataaacaatagaataattttcttactatnttatctgttatctttctctcccgctttgtcaacatcaaaaacaaatcatgaatagagaggagatagatgttaccactttttccaatgtatgagaatcaagtgataccaaaaagcattaaaacaatcattcaatattaatcaagcgaaaataagtacactaacacatcaatcagacacaatcaaatacaagcaatcatcaaatatttcaaatcaaattaattagattaacaatcaacta

SEQ ID NO: 101258 - DNA, 392 bp, Glycine max
tcgcttgtcgggttcagtatcaattaagtgcttgctgcatcccatgtactgaacgaaaaggctcgagtcattaaagactacgcatcttttaaggcacaaagcaaggattataacaatgaaaccccaatcctacgttctttataagattgcgatgagaaaaatacagaggataggaatccctgggggaaaccatagaaaaataaaaaacatgcagcgacttccttaattgccccagatcttaagagtagtatcgcttgacaacgtccgagttcacaggcgaaggtagttcctcgacattcatgttggcaagcacaaaggcccctccggagatagccctttatacgatgaaaggcccttcgtagttcggggcccacttatccctattgtctttc

SEQ ID NO: 101259 - DNA, 476 bp, Glycine max
  unsure (1)..(476): unsure at all n locations
gtccttctgattctggttgtgcatatatgactntatggcatttgatgaaattcaaagattagatctcctattagttggtatcaatgaatatcttacacacttgtgcgtgagtgatacagtagtcgagagaccgtggcttaagctactttccttgatatctatcttatgcctaaattcatctaactgtatagttcacattgtattcttctctttgaataactgcgtattttgtgaagacaagtgataggtacacattgcttcatctttctcatcatgcaatcatgatatttttaagcataaccctttgtatatagtcactgcatgccattgtcactagaggacaagtgaggtgttctcttttgctagacgaaagcaatactgtaatcttgggaagtgctactcggtgaaatgactacttatggtataaacttgttaactcgatctactcctcaattatggtatttgtaggtataaga

SEQ ID NO: 101260 - DNA, 323 bp, Glycine max
  unsure (1)..(323): unsure at all n locations
agcccattctgaataggctnggcttgcaagccattctctntgtcatacaaatcacttgggttagggggaacatctacagcaggcgagcaattgaaaaacccatgcggctgcatcataaatagcatgaacacaaaactagcataagctgtgttccaagtaaacatcttctntattccatatgaattaagtgtctcaatatatgtgggaacaaataagtgctaacaacatactctgtaacatactccttgtaacacaatttatcattgggtataatttattgaaaagttaaaaataatacaatatattataagcataaaattgag

SEQ ID NO: 101261 - DNA, 470 bp, Glycine max
tactcagcttgtgccttcaatatcctgatgagggtgtgccatatgttctcattactggactaatacatttggtgtccaagtttcatggtctttcacgtgaagatcctcataagcatcttatggagttccatattgtttgttccaccatgaagccccctgatgtccaagaagatcatatctatttaaaaggcttttcctcactctctagagggaggggcaaaagattggctatactaccttgctcccaggtccattttcagctaagatgaccttaagaaggtgttcttgaagaaattctttcctgcatctatgaccactgccattataaaagacattttatgcatcaggcaacatattggagagagcttgtatgagtacttggaaagattcaagatattgtgtgcagctgtcctcccaccacattctgacaacttcttttcatattctattaggactatcacatgaaaaga

SEQ ID NO: 101262 - DNA, 421 bp, Glycine max
  unsure (1)..(421): unsure at all n locations
tgcgcttaagaaacacatcatcaacttgtattattttgctcattggttattagggttgatgaactcatggatattaatcgttccttgtgtatttgaaaagtatgtgttgaatgtgctcattgttatatgggatgccatgaacaacatgatcacgctgctacacactgaagttaatgcatcctttgagacaaatacacatgtggttgtacatgtttttaaagttaccttatacaagaggctacttggtgtggtatacaaggtatgctttatatcaagattgctgctgagcatggtcgtgcacactatgctggaataaaacccttctcattgtggatgtgtgataagaactacccaccgtctancatccgcatgtgagctattggagaatgctcttggtaccactccctttacaaattcatat

SEQ ID NO: 101263 - DNA, 326 bp, Glycine max
  unsure (1)..(326): unsure at all n locations
agcttctcaaggaagctntctcaatataagcttctcatggaagctacctagtctatgaatagaagcatgtgtaacacttgttgtaactatgatgaatgatagtcttgtgagacacaactcatagctcaacttctctccctttatcttacttcaatatcgagctccccctccctctttctctccctctttcttttcctccattgaagcatcctcttcaagcttcttatccaaagctcatctngggtggcgaagctccttcttccatggcttattccttaatggatggcgcctactgtcacctccttttctttgtcttccgctgcatc

SEQ ID NO: 101264 - DNA, 438 bp, Glycine max
  unsure (1)..(438): unsure at all n locations
agcttcgaccgatcgtnttaagccgttattctcgcatatataaatgatannaaatgaatgttcaaccgatcagtttgtgtgtgtatatctcgcgctaatcacttgtctaaaataaatattcaacacgatcanttcacanctgtatacctcgggtaaataaaaaaagggtaaataacgctccaatcgaacactctactttaaaagttcttataaatgagttgataaataatcaatgtttagctcttaaagaactacgtatgtctgatttcctcaccgcaattgaggatacatangaacaaaagccacgcttttgtcgaccccaaaaagggagagattgttaaaggtccaacgccttaacatttctctccttccataanatcaatagatcgtttaaggtgcgacgccataatgattctctcctttcaaatcaaatgatta

SEQ ID NO: 101265 - DNA, 434 bp, Glycine max
  unsure (1)..(434): unsure at all n locations
catttctgccccaaatcgcgaaaggatgtcattntcggngtcgtgaagtgcgtggctacgagtgggacttcgaaaattcaggttggggtggacttctttctcctttgattttcatgggtatggngtttggggagatatgatgggtagtcttgctaggtttctactgtgtgatgattatttgtgaagacatttgttgaaattgccatgtttggatgagttagacatacccattctngtttagggttttcgtgatgatgtntgtgatgtttatatgctgaaattgcccatggaatactgttagagatgaaatgtagagttaacctacggttggaaagtgagaatgtggtgttatgagtggaaaaaaagtgaggctttgagaagtggaaggcttagtctgaattctgtggtaaatggacgctaaagtgagttaatac

SEQ ID NO: 101266 - DNA, 386 bp, Glycine max
  unsure (1)..(386): unsure at all n locations
agcttctctcctatattgctataaattgggggagatattaagaagaatagggtttaaccccttatgcacttctctttctctcgaaatagctgatgagaattagttccgtgaagaatatccaagccgaggcgctttcgtaacgttttcgtaacattttcgtgagttattacgcaaagattctcgaccgttcctcaagattcatcgttcggtcttcattatcttcagtcttcaacaggtaagtacctcanacccaagctttcaattcattctatgtacccggagtggtccacattttgttcatgtgattttgttctacgtttcattcacttgttataccccttgtgacgtgcgtaagccatttattatagtcattgttcgcttaatct

SEQ ID NO: 101267 - DNA, 404 bp, Glycine max
  unsure (1)..(404): unsure at all n locations
cgcacaacaagttactatttggttttggtacatattatatatctcatgtactnccactaatatatacagttactactaagaaggaatggatgtgccttgattatgccagtctaatctacctgattaaaccaattacacaaagcatagcccaaatatgcagtccaattattcaagtgctgagggtttgacttccaagcccaatttgaccctcgatatgatataattggcccaagcttatttttgacaaaattcaagatattattcttagctttccacggattgcacacatgctccatttagagttctgaaatttcctatacgccctgcataagtttgattggtcaagtaaccaaaacaaaatcctaaaataagtctcaatacttaattaagctcaatcatttgcc

SEQ ID NO: 101268 - DNA, 433 bp, Glycine max
  unsure (1)..(433): unsure at all n locations
tgcttactaccatttaaagaatcattggttaaaattattctgttcctcatcttccatatagaccagaccacagccatccaccaactttgccacctacttcttcttaacccttgcacttgaacaaaggagtgctgaaagaaacgctgaactggattggaagggaagcctgtattgatactcaaccattatatagtctcccacccaataagccaaatctttgtgcagtgaaaaaataggtgggacacctcctcattcctaacaccacattaaggacattaaacatgcgaaatctgaacatgtcctcttccatatnacattttgttggtaatctcgcttgaaatatactcacccgacaaatctatcttgctgggaatctcatgttccataatttacaaacgcttggtcatacttgccgtgctcccctcccttacat

SEQ ID NO: 101269 - DNA, 380 bp, Glycine max
cttcattcccgcctcttatactaagcctactgggctattatgtggctcagagcattttatctagtgatgtctttgatcctcatcttgtgtttggcaatcactttattcctgacttcatatcttcccatgtacctctaatttcttgaatttggcgttgtattgtgatcaaaaaataaccgactaatcttagatcacacttgctctgctttcatggtcaatctaatataaccctgaactgttttgcgcgatttaggcaatattctagtctatatcttgctgaacctacactcatttctgccatattgataaaaaaaacaaatatcagtgtatacttatcatgtgctaagctgttatctataatgtcctttgtctagttattc

SEQ ID NO: 101270 - DNA, 279 bp, Glycine max
  unsure (1)..(279): unsure at all n locations
anngctttggtggagagctataaggtgcctgtatatgttctttcatacgctaacgatacgatattctttggagaagcatctatggcaaatgtcaaaactgngaaggttattctcaggagtgttgagctggtgtttggattgagaattaactttgctaacaacaaacttggagctgtcggtcaatctgaggagtggtgtcttcatgctgcaaactacctcaattgtgctttgctccaattttctttctgctatataaggattccgattggggtcaatccc

SEQ ID NO: 101271 - DNA, 394 bp, Glycine max
tcttgggtgctgcattgtaagagaagaatatatattgatttattaatacatgcccaaccacagcttggactactctgtctttgggtggagcccttatgaattattctaaacatctgcgacaaattataatcttcttatttcttatttgtagcgtatatggagactgcaactgctactaaatagatgcatgtatttatttgactacatgaatcgaaaaggaaattgctagattgggataagcgtttcgatattatcagtggcattgctcgaggacttctgtatcttcatcaagactctatgtggaggattattcacagagatcttaaaactagcaatattttactagatgaaaatctggatcccaatatatctgactttggtttggcatcgtcat

SEQ ID NO: 101272 - DNA, 420 bp, Glycine max
  unsure (1)..(420): unsure at all n locations
agcttaagccattatcgtttaccacaattacaatgttaaataatatggacaaatctgacatccttgtctctctcatcctctcacaatcacatcttggcttattcaacttccaccggaatgtgagtgtaagccattggtatgtttgcttaagcgacctgcgctcctgagtttttnttttatacttccaagatcgttcaaataagagatttctcgtcctacacgttggtgagggtgctgtgaacaacgagttaagcataaaagttcaaaaagaaaaagaacaaagcttttgattgactgtgntttcaaataaaaatatagacattcgtatgacctctatttatcattcctgaaaaagttgtctctttgacagagaagttaattatcaagaatatcagtcatctgacttaatctatcatacta

SEQ ID NO: 101273 - DNA, 407 bp, Glycine max
atgctcaagtatctttgttaacacaattcaagagagcttaagacttattttgattcacaaattcagccacaactcagcaccacaactcaacttcatcataggcatcatgtaggaaacttataaaacaaaaaaaaagttcaagaacaagaacaagaaatttgaaccatagaaaatcaaatctagcttctatagcaagtttaattggtggaaaatctaaagaatcatgttaaaaacatttagcacaagacatgtgaggagatacatggagaaaaaaatgaagaaacaacaacggaagataaggtgaagcaaataattaatggaggtttaaggagcacctacttgaagctcttgtgctctgataccacttgatggaagcttgcttgtggagcttctatggaagctggatc

SEQ ID NO: 101274 - DNA, 426 bp, Glycine max
  unsure (1)..(426): unsure at all n locations
agctnttagtattcacacacacacagagacacacactctcacacatncaaacacacacacaagcctaaaacgcagaagctgtccaaagctaattagtagtatggattgccttaagggttgtctttggtggtactacaatttttcttcttcttaggctgaacttgttctagtaccccactaattatgttttagataatcattaataaaactggctttggttatgttggttagaacattttaaattgtggactaacaagtcattttcaattgtaacattatctaagtccactaaaaaacataactcgtctggtagcttagagttttttcaataaattgaataacatggctcgaattccttcgacatgctaaaaaatatctagcctgcatcataaacacaagtcactctgtactctagtctattcatcc

SEQ ID NO: 101275 - DNA, 412 bp, Glycine max
tctcaacgacttgcatcctcaccaacgtgaagatgctgtctattctcttgcttatgaagctgagatgaggctccgtgaccctgtctatggttgtgtaggagtcatatcgctcctccaacaccaacttcgccagcttcaaatggacctctattgtgcaaaatccgagctctcgaggtaccaaaacttgagcacgaccaccaatttgagttctcaagcttctgagtccacagccacgacctaccaccatcatcaaaacacgtctggtggtggtggatttatccgtgaccatcactatcattatcatcaccaccaccagttctttctagggaccaacaccagccacaacatgtggtgaaaagcttctatgcatgcaacaactaccatgcaagtctctaggcaatgaacatatctg

SEQ ID NO: 101276 - DNA, 365 bp, Glycine max
  unsure (1)..(365): unsure at all n locations
agcttgcgtgactcgtgcatgttaaagacaaacctttattgaatttaaggaatatcatggaggaggcattgatagaacatcgttatccccctctcgcctcaagaagcacatatgcctatcattgaatctataaatcttggttggatgcaacatctgcaccatgcacatatgaatggaggtgtcttgttatactctaaggcggatacaaaacgagagtatcatacatgtctttncaatataagagaatgatgtcgttatgactgaactcaacagactgcttaagagaaaccgtcttcttagtatcctgccttgggaagttcatgatacaactatatggagatgggcgcaaagcaacatattacttt

SEQ ID NO: 101277 - DNA, 437 bp, Glycine max
  unsure (1)..(437): unsure at all n locations
acctgtnntattactatttggacgtgtagatattttgctggattatcatctttatcggccgcttcaaactataatacagaaatctgctagaaaagacaaacttattggtcttctctttcttttgaaatgcgagtcatatattgttcaacattgaaagagggtattccgaatgtctctctctctatctctaagaaaagattaatgggaacaacttttgtaattattgttttaaggagacatttataatgaattgcaatgccaagcatatggtgaaatataaaaagaaacttctcatgtatcaactaacatcgacatgtatactccgtcaaggcaaaatttactggtaaaacgttctgaaggctgaaactgacatgacattcttagttgcatgtttgccataattcattataggcctgaacctgtgccttatgtttgct

SEQ ID NO: 101278 - DNA, 400 bp, Glycine max
ctcaagctctgatctggtggactaccacaactacctccgcatacaaagaagtaccttgtattactaactataagcgaagctctctgataataatgaatctctatataactcatgtcagtatctcaaagaggatgctctgcttccatcacaacaatacatcaaagggggattcagcatctgcggatgtggctactaaagagaatctgcgataatctggcaaaagtgggccagcaagtactccgcgaatctagatactggtctcgatgaaccagctacagattaaggcaccaatgaggaagcactcaataggctcattctattcattgcctatttgacagtggtcatttcgagcaataccaagacaaaaaaagctcacatcttaaacgaataattgagctgc

SEQ ID NO: 101279 - DNA, 334 bp, Glycine max
  unsure (1)..(334): unsure at all n locations
ttatatattcacccctctataaacgtaaattaacttgcttataaataaccactgtggaaaactccgcatcttataatcaaacaccgaacatatttactaataaatacagatattgtatcaggagcacaacagcaaatactatttctagctatctcaggaatgaaagaatggtaacatccacacgttagagcaaaaatcggggcgtatcgatatcttcacgcggtctacacatgcgcgtgatattaatcaactcaagaatganaagtgatatagcctcacaagatatgcactctatctctaatggtaacgctactgttactctctagccccatga

SEQ ID NO: 101280 - DNA, 356 bp, Glycine max
cgtacgcactatggaagtcgacgcatagcagagtgtgaggtgctgcgaaacatgaatgcatgatagtattagccactgaacgcaattgatccttatagccgcctaaatattatcatagtgctgccacatttgtctttgcgaggtagctgtctacgtcaaaactatagctagtgacttaactgcgatgcttggcacgataatcctctgtatgacccacacattgttgtgagagtattgctgggatgaaatctatcgagcattgcgatgaacctctactgcggagcctaccataacaaaatatttacctgctactggacgtgtcattatgggacaaaggtcctgtttgaacgctaaaa

SEQ ID NO: 101281 - DNA, 267 bp, Glycine max
  unsure (1)..(267): unsure at all n locations
caacatcaatgcacatccaagcatgagaagaacttcaaaagcatatgtcctgaagacagagaacagtcacacagtataaagattctggaaacaaaatctccatttgaacacctggtgtgctgaattcactngtcatccaagcccaagctaagaaacagaataaacaatttactttgtgggaggtggccaagataaggttcaaatttacttgttaatacaaaagcaaacacacatttcctagtctttagattatacacatcacaaata

SEQ ID NO: 101282 - DNA, 499 bp, Glycine max
  unsure (1)..(499): unsure at all n locations
ctaagcttttgcaaacatttgctctggaatcgatacaataatctggttatctattaccagagagtaaaaactatttgtgtaaaggttttgagaaaaattcatgtgctactcagttcttgaataaaaaatttaatacttatcttgattgagtcttctcttgattcttgaatctttagtcttaaatcttgatctgttcttgattcaatctttaactcattctttgattcttgagatcatcatcttcgttatcatgaagtgttcttgacttttgagctttgctttttgtcatcatctttgttatcatcaaaactctttgaatcaatcttgattcatcatgaagcttgcttctacaatctcccccttcttgatgatgacaacgtctgaaatcaagaaacacacacacacacacactntgtcctattcgatcactcacataaatttccattctccccctttgttttgaatctatgcttcacttgaaattaagttatatattcat

SEQ ID NO: 101283 - DNA, 191 bp, Glycine max
tcgccctattaactaattgccaagccttgtttattcagcctcctctgttctctagtgcgatttattcacgttccaattctccatttcttcttctataaactaagaacataaaaagtgcaagctggccaacattcaaaacataatattgtgtttcttataaaggaaattattcgggtgggctcttattatta

SEQ ID NO: 101284 - DNA, 452 bp, Glycine max
  unsure (1)..(452): unsure at all n locations
acggaactatgatactcagctcttcaaagacaagattccggcttgaccaccttgttataggcatttgaggagccgaggaggaggcttaccacctcttccatcatgcagccaccagattgggagcttccatttgagttcatatgtgatgcctcaaattatgcacttggggttgttttgtcgtaaagagttgattgactatcacatttcattgcttacgcctcacgcactcttgatgcagcccaagtcaactacaccaccactgaaaagaggatttacatatagattttgcattacatatatntagatcttatttgctcgtctcccaaattactgtctataatgaccgtgtagccttgaggtacctgttaaagaagcctgatgcttaacctatgttgattaagtggatgatgtttcttcaagagattgatattgagatcatatataggagtggt

SEQ ID NO: 101285 - DNA, 324 bp, Glycine max
  unsure (1)..(324): unsure at all n locations
agcttcatgggtgtccncganatctgttttctgatttggatcctatcttcatcagcaaattctggaaagaactttatcggctttgcggcacataactacgaatgagcaccgtccatcatacacagaccgatggtcagacagaggtgctcaatcgtgtgttggagcactatatacgtagcttccttcatcagagaccataacaatagaggaagtttctcagtctcgctgaatggtgctacaacaccattagatactcatcaactaacctctctcccttcgaggtcacatatggcaagccatcatcggcgattacagactatcttc

SEQ ID NO: 101286 - DNA, 362 bp, Glycine max
  unsure (1)..(362): unsure at all n locations
ctgaatgctctattcaaaggagtngacgagaatatcttcagatctatctacacatgcacagaggccaaggatgcattggatatcctgataaccactcatgaaggaacctccacggtgaagatgtcccgattgccactattggctacaaaattctaagatctgaagatgaacgaggaagaatgtattcatgacttccacatgaacattcttgaaagtgccaatgcttgcactggcttgggagagagaatgacagatgaaaagctggtgagaaagatcctcagatccctgcctaatagattngacatgatagtcactgctatagacgaggcccaatacattntcaacctgagagtggatgaact

SEQ ID NO: 101287 - DNA, 416 bp, Glycine max
  unsure (1)..(416): unsure at all n locations
agcttgaaggcatgtaatgttcaatgtgccgacaagttcaccatatcacgcaagtagtataaaacgataagaaccgagtatcgaactctcgagcaacttgttttacttggtaaactgtggatcagtatataagcgtcttgttgtaaatggtttgtgtggggtatggacaggtttgtaaactaaactattaaaaaggcagatcacgtgaataatggtgtttgaagacagatagacaacgtgtcagtctttctagcaggttcctgatgttataaaggattntctctacctaacaatgctcatgtgttctatgttatctcctgaaatgctaaaccccgatgtcttgtgcatgtttagcctagtcttacttaagtatcatcctagattcctcttgtggactaacttgacacaaccgcatt

SEQ ID NO: 101288 - DNA, 414 bp, Glycine max
  unsure (1)..(414): unsure at all n locations
ctgagccanaatcctgactcaccataaaccttgacccatggtgataatgtcaatccttaccctcggaagcaaaaaagaatagaagggaaatttccaatcaaagataagagaaggaaaatttccaatgaaagaggaaaaaagaaaagaaaggaaattcccaatcaaagagtgggagaaagaaaaagaaaagaaagaaaattcccaaccaaagaatgggagaaagtaaaaagggaaggaagctcctggtcaaagaaaccagagaggtctttggaccagataatatctgaacagtacagaattgtcaccaaatgaacataaaggaaggaaaggaaaccacgacctataatggtcttctccctttaattaccaaccaaaatcccgtgcgctagcgacccttttttctcgccccgcact

SEQ ID NO: 101289 - DNA, 473 bp, Glycine max
  unsure (1)..(473): unsure at all n locations
agcttatatgccattcngaataggggctcgtgtctgtgttggacaacacttagccatgacagaactgaaggtgagtttgtctctcattctggtgaagattcacttctctctctcattaagttactgccattcacctgccttccgtttggttatagaacctggccagagagttgttcttaagatgacaagaatntaagcaacaatgtaacagatgaatgatgaaaacatgcacgtaatgggatggatgatataatcataagacatcatttctctagctgatgaatgctaataagtttctttctttatccaaattagataataatatgttttttttatgaaaggaagatattctcatacttcgtagctatgagaccaagatgatcataacttatcatttgatgaatttttttaagattaatttaattacaaaaactacaaaacgcataacgcatatactttttagatacatttgt

SEQ ID NO: 101290 - DNA, 267 bp, Glycine max
tgcctagacagagaagaagagagcgcaagcaatataagggctcgcgttctatatattttaaatgtaagcctaacatcgattttcaacacaaaactgatgttaataaaatgatgttaatgttaacatcggctttctggaagaaatcgatgttaatttatcatacgttcacatcgatcttctgaaaacccgatgttaactaactaacattaacatcgattttctgataagtcggtgttaatgaactaaagttaacatcgggtcttgata

SEQ ID NO: 101291 - DNA, 321 bp, Glycine max
atactgacttttgaggtacgctgacgggcggaaatactctagtggctatccgtataactctttgcttttgtatatgaaaagcctaatagacgcatagacttacgttgttttctgtcccctttgtcaatcgcgatcgacaagaccgttggcacgctgagatattcgtcatgtgtcgcgctcacaagatctgtcatactgactttagagtcacggctgccggccgaaatacctgagttggtactcatatgaaccatttgctgcgggtagccgaaagcctgtcatccccaagatctactacgtttctgcccattcgttatcctg

SEQ ID NO: 101292 - DNA, 440 bp, Glycine max
  unsure (1)..(440): unsure at all n locations
tactcaagctcgtctgngatggtngttgttctagacttactcgtctactaagctggtgatcttactgtgcttgactctgatttgacttacaaatctttttattttcgctggttacagtgactaaattcaatggcattgactggctgttttctaaattgttttggcaatggtgttttaccctctaaagttataaagccgcatgtcttattaattgggaaagtgaattgtgaaaagaaataatagactgttaactatataagtgtgaatataccttgtagtatttttgcaagtatgctgtatgcattgtgatgctgcacgttgattaatggtcttgacgctgattattggaccgccttttatgtgcagagatgttataacattaactagcttacttgatattcagactgtgttctttatgaataataacatgatctttacgt

SEQ ID NO: 101293 - DNA, 216 bp, Glycine max
ctcaacacttgacttatgcattcgctgcccaagcttcatggtcttgcgcgtgaagatcctcataagaattataacgagttccatattggatgtcacaccatgaagcccccggatgttcaagacgaatcatatcttctaaacgctctttcttcttctctggaggggcctatgaatggctatactaccttgctcccatttctatgttcacctaagatg

SEQ ID NO: 101294 - DNA, 318 bp, Glycine max
gagagttgaccaccgctgtggtttcccgcaatggtgttttttatatacgcccgagtgggtgtataacctaaaccatatttccacgattttctttggcatttatcaggctagttatgccgacattgtctttgcctaaacccattccgggtgcgtaaccgttgcacaacataactcaggccatcattactgctgcatctgacacgcatggttgcccacagaaagagttcacacaggaaatgcttaccacctcataagactgaaaagcgaattctaatgactcctctgccgctttcacataatgcatataggatgggcagc

SEQ ID NO: 101295 - DNA, 130 bp, Glycine max
tctgaggtactgatcactcaaccgactacacgcggcacgagatgttcccttaggtctagcagcacatgccgatcttccgcaaaagtgtctcaggtggccacaatggttatacctggcttcttacgaaaaa

SEQ ID NO: 101296 - DNA, 381 bp, Glycine max
tctcttgatggagtgtacaacatcttgaagccgcccctcgcgattctcatattggtcaagcttaccatctgagaaattcaagcttttcttatattgctcacattcaacccataagttatgtttacttgccttcaagatttcataaatctcatggacctgtgtgtagcacctcaagttctttttttctgaaatgtaactctagaataagttaaataataaatattatggaatacacaccatttaatttagtttctatttctaagtagataaaatatctgaatctatatttttttctttaggaaaagaaggaacacatacacacagacattgcgtttgataaagaatgcatatataattaaaatgctcatcaataaatgatat

SEQ ID NO: 101297 - DNA, 469 bp, Glycine max
  unsure (1)..(469): unsure at all n locations
ttactaaacaagctgaaattaatcattatcacaagtaagatatcctaactacatgcaagaggttagaatgaaaatagaaaagggaaagaaaagctgggttgcctcccagtaagtgctcttttaacgtcactagcttgacgcatcgtcctgttatccaggatccaagagagttcctacttcaaggacctctttctcatgtctctttttctccatcacatgcactatcagatagacattctggcgaggtggatctttgtcctcatggaacaaatcaaagctgatattctaatcttctatgctcatctgcagtattttcttccncatgtccaccacgcaacttgcagtagacatgaatgggcgaccaagaatgagaggaatgtcagcatcctcttctatgcctatgacaacgaaatcagctgggaatataatgtgtttaaccttcaccacaacatcttcaatgacatcatat

SEQ ID NO: 101298 - DNA, 143 bp, Glycine max
ttgcaccacaagactcgatcaatatattccggcctctcccatgtacctgactgagtgtcttcgtggctcattgctgttagcaagtttacacatacagcttttgctttttcatcattgccagattgggattcttctaataaaat

SEQ ID NO: 101299 - DNA, 116 bp, Glycine max
gactgagcatgcactggcacgctgcatcacaaacaatggatcttccacttctctgccagaaataacattgcttgacacacaactctacggcggcaaagacaatggctttcaaataa

SEQ ID NO: 101300 - DNA, 382 bp, Glycine max
agatcactgatatgtgaccatggcatgtaatttatatcggcattctattatctctttcaacaattgagaaatctgtctttcaatcttcggtctcaacattattcaactctttcaacacatttgtactgaatctgcttctgttcatcttctaaactttatagtcaaaactttttctttccaggaaaatctttgatcacagacttgtgtgattcatttttttcattctggtctctctttgccaaaagaacgaaggactaactcgctaaattcttttgtgtctctcctctccccttcgaagataattctactgaccttcactgagaaatcttatgactcgttcctttccttcacgaaaggtttataggactaatcacgggagata

SEQ ID NO: 101301 - DNA, 233 bp, Glycine max
tcggacccaaataccgagccgcactaatccatgaccaactggtttaactttaagccaggcaaaatcaaaccttctcatcggggatgccacgacaaaatacaaaaatctatattttatatgattcacaccattaacagcccacaatttcaaaaaacgaggttaactctgcgaaatttaaacacgacaacttctaacaatatgtcaaatcaaccttggaaaaccacctcgagaca

SEQ ID NO: 101302 - DNA, 441 bp, Glycine max
cttaagtgactgagctgcaactgtgcaataaatatcctacatttcttagcatgcatgttgaggccgtcttgtcagggaaccagaaggtcaatcaccttctaatgacacatgggcactgcgcccccaaagccaagtaaaagagaaattttccgggctctcgtgttccgaaaatgcattcatatcatgcatcgtataagcatactttcataacataataatgaacatatcattcctgcttttgtccgttatcatattccaacctcacattttgcatgagtcatggcatcatcatgcatatgcgttcaacaaactttttgattagcaaatatgcataccaatatgttgtaatgtttgctcattcttggcgtttcctctacaaacacaaacaaaagggggatgcgagaaacatcacactacattcttagttgcttgtgttacgca

SEQ ID NO: 101303 - DNA, 304 bp, Glycine max
cacgattgacgtttggcacagaagacgacgttagtttctgcgtgttatcaagcttttcgtcttaacagatagccaaaagttcatgcgggataccactcgggtttatccgtccggtatcgtgacatcaaagtcagtatgaccgatcctgtgagtgcggaagatgatggaaattctccgcatgtcaacgggcttgggagacgcgaatgacataggcgcacaagacgacgttagtctctgcgtcttatcaagctttctctcttacagacatacaaaaagtgtataccgataaccaccttgggtattt

SEQ ID NO: 101304 - DNA, 274 bp, Glycine max
gaagggggggggaaaaaaaagaaaataaaaaaaaggggggaaaaaaaaaaggggggggagaaaaaaaaaagaggaaaagtgtaagagatggggatgggggggtgtgaggtagtgaggaaaaaaaaaaggaaaaaaaaaggtggggatggggataagaagataataaaaaaaaaagggaaaaaaggaggaaaaaagagggagtggtaaaaaaaaaaaaaaaggggagaaaaaaagagataggaaagtagggaggaaagagaaaaaaaaaaaagag

SEQ ID NO: 101305 - DNA, 432 bp, Glycine max
tagaggagagaaaggggttttctatgattaatgacaactcatttataatagaacaaaaaattccatcataatatgtttattttatcttgtgtaaacactttcatactaacttaaccaccgatttattttgtttaaagagttatgggcgtcttctagaagcaattgatgagtacaagaaaacaaaacataatcacgtgaacgtaaatactaaattaaactatacattaaaggggccgcgcgaacacaggccctcactaccacaaattatgacataagctctgccacttgggcagaccttatgaaaacacccctccttaatgcaattggagtgacttcctatgccatggaccttttgatattcattgactccttcaagaagtatgtataacgcgtacacattcgttttatagttttcttactgtacttgacaat

SEQ ID NO: 101306 - DNA, 394 bp, Glycine max
ttttataccacctctaggtggggcatagagcaatgtatccgcccgcccaccaaccttaagacttatcttgcccctagtaattaagctccctaaacccaattcacataaactcttttttattaaaaaatgttttaaatgagattattgtgcgatgagtaagtgctctaggcgagtgtgatgagaatcatgagttgaacaagcacactcaagaatcttaaggaatcctatacaaattccaagaaggcctattcaaagtggaaacattaaatggacttgttcacgacatttggcccaaccataattctgtccaatctaagtctgagcttaaacaaaggtgtatactaatttgggctaaagatggagctgaagaaggagttttgggccaataccactc

SEQ ID NO: 101307 - DNA, 452 bp, Glycine max
  unsure (1)..(452): unsure at all n locations
agcttggtgcatatgatatatatgctccagcttgagggggagtgatgaatgttgaatatttcttttgtattttagcctcgtttggtagcttaatctgtaagccttattcagaaggcagcagtgagatgtcactgncatctctcctctctcttttttgtatcctatatatatgtaacattttgaatctaataaaggtgtgagagaaagtgaggtgttgactcctcctcaccttcatttcaagtgcaatcaaagcaattctgaggacctttgaactagtatcaggcctcaaaattaactttgcaaaaagttgtctttggtgcaattganatgtcggataagtggaagcttgatgcaactagttgtttgaattgtagcttgctgtccatcccgtttgtttacctangaatttctatagggacaaatcctaggcggtgtcagttgtgcgatcctat

SEQ ID NO: 101308 - DNA, 266 bp, Glycine max
  unsure (1)..(266): unsure at all n locations
ctgcacttcaagctgcgtgagcgactctactgcctactctttagacgtgatcctagctcttgaccttgactggatagaacctctttttaagagaaggcttttgacttcccccttgtatacaaaagcaaacccagtgcgaatcaaaactccgacatctattatgggtggaaatggatgaatgcatgaagaaatgcctatgacacaaatgcaatntatgaatacaggagcctgggaaattgtctcctttttagatacaacgtcttggg

SEQ ID NO: 101309 - DNA, 283 bp, Glycine max
  unsure (1)..(283): unsure at all n locations
tttattctcgntntgtttacttttataccctctgttgacgtngctaagccattttacttaagtcatttctcgcttaacttaaaaataaaataaatttccaccgaacgttggaatggtataatccgttaacttcggttaaaatgaatttcgaccgttcggtcgtgccgtaaccacgttggaaatcaaaaaaagaggtaaaaaataatatattattcaaaaaacactcttttagtaaaataaagcggaaaatcaatcggacgttttctctttgggatttctcatt

SEQ ID NO: 101310 - DNA, 416 bp, Glycine max
  unsure (1)..(416): unsure at all n locations
tatgggacttatnacaattcaagggttgtgatattgaactcaaccagttgaactgatgctaaaatgctacactttagcctaattcttanaacacactgaatctgaatttnttttattaaaaaaaaaattgaacttacgaaaattaacatcaagcctaaatgagttagtgaatctcgggatcaatgggtagtcttaattatattttagacagacagctcacaataatcatgtgtgatcaattaaaccatgtaagtgtttgtcgactgaggtgttaaagcatgttataaagcaattgtagtgtcctagtttcttgtatacacatttttttccattaaaaaaataatactgggatttaaagatttaattttttatcgatcatataatatttccaagataatttttgaattgaagtggga

SEQ ID NO: 101311 - DNA, 416 bp, Glycine max
  unsure (1)..(416): unsure at all n locations
gtctntagattgagagtgggaccagtgggtagaggatatatttcgttntgatatctacttccttgntagcatctccctttcttatttatagtatgggtcaattggatataaagacagaaacattctgagagcttctctaaaagttttatatntttcaaataaaaaatttctaaaaaactggtttaacttaaatctaaacagatcgacccacacgttacccttctaataaatatatatttttttgaagtggataatttcatctctgtaattaggatatgaagcaatttctttgtttataaaaagtaaaactaacaagtacggataacgagtctaggtaanaatacgctgantaaaaagaagcgacattctttattatttnttatttgtaatactgaaaggggagatttaatttttcc

SEQ ID NO: 101312 - DNA, 353 bp, Glycine max
  unsure (1)..(353): unsure at all n locations
ataaaatcaaccgatcgttcacggtgtgacctgagttaaatcataatagccacattatctttaaataatcacaatatgttctgacnaatcattatgtaatattcaaaatattgttcgacaggagattaataacctaatcacaatatctttaaaataataaaatatcttgagaaaaactattatctaataatccacaacatcaatcgggcgctnttctttgagagtttcttgaatgaatggactaattatcaagtgaaacttaggctaaaatcactcacaaaccatgctttgttcgcaaaagttactctaaaccgttttagggccaacgcctataacggctcttttgttttatt

SEQ ID NO: 101313 - DNA, 470 bp, Glycine max
  unsure (1)..(470): unsure at all n locations
tagaactgtggttctctntgctttcgttgcagatgtgtgtctattgttccagtattggctnttttttaaagcaacattaactatgtcctaatatattccttggaatagttagtcacgcacgggggagtagccacgatgtcatcaggatgatattatcggtttgcaattttcgcatgcattctattttttattttgttgtttggctaggggttattttgaaccaatttgcttaacttcaatcctttttttgtgtgacatcagtgagattgacttctatttgtttttcacttcatcaagctgaagattgaccagtaattcaattaggccaagagaagctacttcaatgggatcactcaacagttcatcacaaaatactntctacctgtttagtgaatttgtaaaatacgacatttgtgttggaattctaatttcaagtgtgttttaataagcatctgaatcttntgtatata

SEQ ID NO: 101314 - DNA, 440 bp, Glycine max
  unsure (1)..(440): unsure at all n locations
tcattcactccagaatgttgtatagtaggacagagatctgtatggtgagctgcagaagaacatagatcacagaatcttgcaacaagtgtagatttctgattcatggcaagctgggttactaggttgacccacgcatcaagttttccttcaagctctttatttcagtagatgaagaatgaattatggccacctcatggactcctctaagacaatagcatcatttcttgcactgaatngttgggagttagaagccatcttctcaatcaaattcctagcttcagcaggggtcatatcaccaagggctccaccactggctgcatcaatcaaacttctctccatgttgctaagtcccttatagaaatattgaagaaggagttgcttanaaatcttgtggtgaggacagtttgcaaacaatttcttgatacttttcagtactcata

SEQ ID NO: 101315 - DNA, 472 bp, Glycine max
  unsure (1)..(472): unsure at all n locations
catatattgatttattgattaaatgtattttttctagtcctgaatctgtcatcaagtggtttgaacaaagggatcgagctgtggacagtagaggggttgcggaatatcttcgagctcttgtggtcactaatgctattagtgaatatcttcctgatgaggattctggaaaagcttctagccttcctaccctggtaatcattttgagcatcatgttctttatatcctgcttttcaatttttagcctgtgtaaccaaattcttactgctgcattttcattagtagaggtggaggggtttcctgtgcatcttgtttggcatctatttgttaataataatattggtctgttcaaaagtctattctgttttatttccatacgcatcatctaagatatttggattngtttngtaatacgtaattcaatctgtgactgttgtgatcaaagtgcttaactgatgtctgtttattctcctgg

SEQ ID NO: 101316 - DNA, 382 bp, Glycine max
  unsure (1)..(382): unsure at all n locations
gatgatttcaatgatgacaacaaaagattatgaacaanaagctcaagtgaatcacagaacatctcatgagaatcaagaacaagtcatgactttcagattcaagattcaagatctcaagaatcaagatcaagattcatgttcaagaatcaagactcaagatctcaagaatcaagatccagattcaagactcaagattcaagaatgaagaaaagactcaatcaagataagtattaaaaagtttttcacaactttgaatagcacatgagtntttgacacaacctctaccaaagaggttttactctctggtgatccgataccatattggtgtaatcgactaccagtagctaaaagagtttgaaaagttttcaactgaattacaacg

SEQ ID NO: 101317 - DNA, 412 bp, Glycine max
  unsure (1)..(412): unsure at all n locations
gtttagtccaatggtctggcctctcccctgatgagacctcttgggaaagctggccccattgtgtcgggattatcaccttgnggacaaggtgcatttgcaatggccgnggaatgatagggaaacatgggtgcaagaagcaactattagtgagcctattnaagacattaacaatggggggcaactataacacaccgcgaatagaataatcattaagccctcatacctgcacgactacatgtgacgatcttgctgagatggataagggaaaatttgcagatgattgttgtctggaatcacgggatagcaataccaaaacctgtgatgctgtgatcttttcgtgattgcttgtgatctcttctatcgacaagatcacaatcttgttaggaaattactctatactatagctatgcat

SEQ ID NO: 101318 - DNA, 417 bp, Glycine max
tactagctgccgcctccttaattttcttgttgattcaaaaattctttcctatcattattctttcgtggggggacgactgaatactctgaaaactggccttggatcatgatgctctagaaatcgcgtataatccctctgcttttgaatcttgagacttgtcgatataaccatctcacaactaattgatgttccgcgttgagcgtcacctatgggagtttgagtctgagtctttgccttcatcaattatcaccatgctgttatttaagcgctgctgaagatgcaactgcagtttttggtgaagcagctgctctttgcgtacaaaaacaatacctacatggctcgacctcttttaagttgcattcatcagctgacgattgtaatatatgtgacactatacactctgcctagaagacacaa

SEQ ID NO: 101319 - DNA, 248 bp, Glycine max
ccccctcaggtaacttatgtgggccccctttcttcacttactttttgttcccaagccgaataaatttagaccatgtactaagatcatctctttaactttcaacaactcatttatgtttatgttttaataccaatgagaaacaacatcctaggttttccgggtgaaaatccgatgtaacactttggctttttcaatacttccagtattgaagtcttaaataatccaattaccccttttttttttattta

SEQ ID NO: 101320 - DNA, 356 bp, Glycine max
actgagctgcagctgcttgatgcaatctcatgtatgttctacatttctgccaaggcaagaaagttgtggtcattggtgggggtgacacttgcacagattgcataggaacgttcattcgtcatggttgtagtagcgttgtaaatcttgaactcctttctcagccaccaccaactaaggctcctggcaacccatggcctcaggttagatttgaatcattagttaaaagtctctggtatgtatcttcttagcagtagacaacctaagagagattgggcacttttaattactagtaatggctaaacaatcggtttcatattaattgttcttgacttgggtggttgaatataaccaaatgt

SEQ ID NO: 101321 - DNA, 356 bp, Glycine max
tgtgcgaatctttcccttttgttcgagtgatctccatgggtattatagaattcattagtcaaggccaggggtgttggttttgtctttatcgggtacccgaattgtcgtccagcgaggagtgggttgtagctaattccgccacgcatactcaaaagaggtacgttgggatattcaccacaactcacaataatctctccaacatcactagctgcttggtaccaaacaatgtcagatgggtcaagagtcatgattcggcgaggccaggaaagcttgtcatcattggtctttgaggcacgggattgaggtaagtggaagggtaaccactgatagagtaaggtgccaacaagaaatggtcc

SEQ ID NO: 101322 - DNA, 456 bp, Glycine max
  unsure (1)..(456): unsure at all n locations
agctntgattgcaatgacgctacatatcaatttattactgtaacttcagttcatcaacaagtagattatttctatcctcaacagccagcgcaaggtttaacaatactacctacacaaaattaaaataatttaacaccatagtaggagtagagttttctaacgacatataattgaaacacaaagctaaaaatttgtatttgtcatctacaattaaatctacatatggcgtttctgatgtaaatttgcatatggcttttcatatgttaagtttcagactagaggcattattcccaatatggtacctacaccttcatgctacatactattactagaccttcatatgtatttgttaacattgagcaatttatctgtaatatctactaacatatatacaaattaaataaacacacgcttgactataattaggtggaatatttgttggaaaagattgattat

SEQ ID NO: 101323 - DNA, 388 bp, Glycine max
  unsure (1)..(388): unsure at all n locations
ctattaacanataanattatacaaaaaagaaattgtttacttctatgataaacccaagttttccttgtcactagatagatggagattaggtttagaggtggactcttcgactcccacaaggcctctcctttgtcctttcccatcaccgccaccaagatctaatcaaaatcttgttctcccactctcgctgccaccatcaccacctgcgacagctgtatcccactcattggtctcactgccctagtttcgactccatcctctcgccaccagcatggacaatgcaacaccaccactttaacaacaacaagtcgatctaagaaccacataaatccagatattcgctctccgcacacgattattaatccaagcttggccgtcgagtctcaca

SEQ ID NO: 101324 - DNA, 445 bp, Glycine max
  unsure (1)..(445): unsure at all n locations
cttaatataaagaaatacctcattcatttcttttctggaacttcttcaagagtaaggactcatgtatcatgaagtatcaattggaaagcaaggatcctctttatcagaaatccactcatcattcgattcgaaagcatatgatcattagtatctcttttctcctctctagtctctcgtctcatttgaacttaaaacttaatgaagacaagaacatttaatctttggtgctctaagcaatatcttttcttatttcttaatatgaacttgatcaaatgtgctccaatttctttcgcaccagtagcactacaaatgagactcaaaactctcanttcttgcttttgtaactctttgtcctctccaccagaactttctcacaaaagagttgcagtgtcaactataagacaacataaaaattcaaactatatctttactgtcatgaatcatg

SEQ ID NO: 101325 - DNA, 449 bp, Glycine max
  unsure (1)..(449): unsure at all n locations
agcttcagctttgtccccaatgcttcatgtatacttgcccaaaatcgcgaagtgaacctcggatccctgtcggatacaatactggaaggaattccatgcaaccttactacttctttgatatacaactccactagcttctccattctatacttcatattcactgaataaaatgagcagaattggtaagtcaatctactatgacccatacaacatcatgtccccgactagtcttaggtaaactagatacaaaatccatggatatgctctcccatttccattccggaatttccaagggcttcaattctcctgatggtcgttgatgctccgccttagccttttgacatgtcaaacaccttgctacatattcaactacatctntcttcatgccatgccaccaaaaacttctcttcaaatcttggtacatcttagtcattcctggatggaaacta

SEQ ID NO: 101326 - DNA, 446 bp, Glycine max
  unsure (1)..(446): unsure at all n locations
agctttgagccaaaatcctgactcactataattctcttgacccaggtgagaatgccaatccttaccttctaaagcaaaaaaggaaatgaaggaaaattccccaatcaaagaatgggagaaagcaaaaaacaggaaaagaaggaaaattccctcatcaaagagtgggagaaagcaaaaagaaaagaaaggaaaattcccaatcaaagaatgggagacagtaaaaaaggaagaagaagaaggaaagaaagctcctgatcaaggatcgaaagaaaccacaagatatgtgcacagaggtctttggaccacacaatatctgaacagtacagaattgtcaccaaatgaacaaaaaggaaggaaaggaaaccacgacctanaatggtcttctccctttaattaccaaccaaaatcccgtgcgctagcgaccttttttcctcgcccccactaaa

SEQ ID NO: 101327 - DNA, 342 bp, Glycine max
  unsure (1)..(342): unsure at all n locations
taattgaagatactttacaaccttcaccagttgtggatgatacctttaccaccattaacacttccaagactcctcgtgagataactcctttgatcacatttgctccaagtggtgtggatgaagaaagggatcaagaattgtttgccttcacaggccaacttggaagaaactatggaacgaagattcattgctaaattcatggagaccaacttgctgatcgagaacactttggagtcttcactcaaatacttcaacgattttgttctctacaacatgaatctgctgatgcaacanaggatgtcttcatctgttctacaacagtatgcacccacacctcaacca

SEQ ID NO: 101328 - DNA, 372 bp, Glycine max
gtcacattcttggtctgttcttgtctaacacacacattctcctcaaaatcatgaaaagaaacaccaacttccttcagaacatgcgctccatttaaaaataaaatcatacaaccatttttcacaaaaaagaataaaagtgttttcacttgcaatggtattcaaaacaagttaaattgttcaaaatgcttcacgaagagcaaacctagtattcataaataaaactagcagggtatataaacataaaagagatgctatattagaaccataactaacataataataaacccaaaagcacaaagtgtcatcaggaatcaacaatgtcaacaatgtctacactggggaatcagtgagagcaacaacttctccagatga

SEQ ID NO: 101329 - DNA, 334 bp, Glycine max
  unsure (1)..(334): unsure at all n locations
gtcgtatctagtcaaggtctgagagaccatacaagttttttaacgattgctaattatgtgggccattaagtctatcatatgctgacaatagccgagaagcccatgaatttcttcgggggcggagtatgtgtccgccatcgccttggccttggctaacaatcggagaagttcctgactcccgttcaaggtaagagcataccgatccatccacatggatgccttcttgtgtaaagagtcaatcaccctttctatagcctctttntctgcgtatacttgagcatactcgtccgcgaccctatgctcgaggggcgaggtaggcctaactcttcttggt

SEQ ID NO: 101330 - DNA, 395 bp, Glycine max
  unsure (1)..(395): unsure at all n locations
tcgtgcttttcttgtgactgtcaatggccttgaacgaacttcggtgctttccttgtcactgccatggtctttgaacaacctttgttgctttccttgcagacattccttttgcatgaaagcattcctttggcacgacctttgtttctagcttcggataccttgagactanggtcaggccctttgattgcactatatcagaggtgagtgagcctattagcaattacctcttagtcatttttctttgtgttggtggtgatgaagctccatttttgtagctntaggacttgtacttgctatttctttcatccacagaaggagcatngcagggtaaatattgcttttcttgataacatttcactaaacatatgggtgtattgcatggggttgttctatac

SEQ ID NO: 101331 - DNA, 426 bp, Glycine max
  unsure (1)..(426): unsure at all n locations
aattcttattgttatccatgattnttctttataaaaaaaacttctattttaaaagaataaacaatttaaacaaatgcataaaaaataaaaataaaaatgcttattttattaatttaaaaaacttaaataaacaggtccttattatgctgagttattatattcatactttctctctcttctggtcacatacttagaaatggagtataggttgattntttcctgtagcgatttgaattcgggaacataattcatgtcgaattattagcactgtacaaatacaaatggcgacacttgaacagtacactacttgttaggaatgttttttttttttataagaaaacatatttaaaggctacctgtaagggattaaatattatttttttcatacaaaacattgtaattaaggggctaaaagttattcaatgc

SEQ ID NO: 101332 - DNA, 412 bp, Glycine max
  unsure (1)..(412): unsure at all n locations
ctgcagcttgaggccttggatcttcttcatcaatggagtcttttgcttcttgaagatcaatggcagcaaaatggagaaggaagaaagatgattggagacgcccttcaggaaagatgatcagaacagcttaccactagaagcatggatagagcttgatgaggagaagatatatggagggagaagaagatnaagagcacagaatnttatgcctcaaatgaggtctaaactttgaagtgtaattctcaaatgatcaaagttgaaaaaatgcatacancagggcctctatttatagcctaagtgtaatacaaaattagaggaaaatttgaatttctattcaaattcacttgaatttgaatttngtggagccaaattgaggtcaaaatttcactaattatgattagtgagatttagc

SEQ ID NO: 101333 - DNA, 468 bp, Glycine max
acttgagtcatctagagattatcaatatgtgaccatggcatgaatttcacatcatctttttcatcatctgtttcaacaatcaagaaatctatctttcaatcttctctctcaacatcgttcaactctttcaacagattttttctgattcatcttctcttcatctttctaaaagtttttgttcaaaactttttctttcaagaaaagttctttgatcaaaaacttgtgctactcatcttttttattctcttctccctttgccaaaagaacgaaggactaaccgcctgaattcttttatgtctctcttctctctttccaagagaatccaaaggacctcaactgagaattcttttgattcttcccttccccttaaactaaagatctcaaaggactaaccacctgagatatcttttgtttcccctttacaaacattcaaaggactaaccgcctgagaattctttgcccaacaca

SEQ ID NO: 101334 - DNA, 417 bp, Glycine max
  unsure (1)..(417): unsure at all n locations
tctcatagctcaaaggtttaatagcagcataaagttcacacatttactgttgaaagcctataatgtaacctagttgtgtcaatgtaataggtatttacggttcgttccacagtacttttatacttcctttattaaggccttaaactgctttggtcgtttcacacttttgtgtatgtgatgattgaacgctaagaaccaaatttgtggcaataactgtccccgatgcaacctgttctttttggcgtaattgggtccgcagtagcttacttttctcaaaagatctatttcagacaaaaactttgcttaagcaatttaagcctaaaaaaaataaaagtgcaagctgaattgaagtntcaacctaccttataattcatatgaactttgatatttaataaccttcaagtatccaataaaatg

SEQ ID NO: 101335 - DNA, 460 bp, Glycine max
  unsure (1)..(460): unsure at all n locations
caacaaacatattactaanaaaacagcatataacataagttcgagacattctttattatggtcatttctaacaatacaaaatctatatcaatataagtaattaattgcaagttcgaggatggaagtgtgtcactttaaaaagtgagcatgcacaataagtggaatcaaaggataaaatacgcctaaataacatcatcaattaaaaaattccataaaaaacatcacgataaaaatactaaaagataaaaatttaatattgtttgacaaacttttgcttacatctattacaacatctcaacaaatatttattcatcatcctaaataaaattacaatttttttcagaaaattgagaaaatccttgccattacaagttttctagaatatttgcgaagatccttcatttagataaacttgaaaaactcttgtcaatttcaagtttctagacatatgtagacaagc

SEQ ID NO: 101336 - DNA, 202 bp, Glycine max
gcttcttagttttagatgatgcaaatgggtttgtagctacctcatgcactcctctaatgactatggcatcatttctggcgctaaactgctgggagttggaagccatcttctcaattaaatttctggcttcagcagaagtcatgtcttcaagggctcaccacttgcagcatctatcatacttctcttcatatttactgagcct

SEQ ID NO: 101337 - DNA, 443 bp, Glycine max
accttgaacaagccatcaactcctctttcagaaccatgctatgtgctcgcgactggttcctttcttcccttcgcaacttgagttcactattgctaccccatagagctccgcgaaatttgttccggccacactcttccttgcgagccctcttggtctctcgttcaagggctcttgcggtaattgcattctcttcccgtaacccggcacattccttccgaacgtatgtagcagccaacttgaacttctccttggcgagttttgcctttcctaactcgcttttgagagcttggacttcctcgtcctcttccggtgcttcaaaattctcttcgctgacgacttttaacttggcgagccaatctaaacctcgtatgcgaactttcagccattcgtggtacccaccaatgatgccattacgaacgcctctgagctcttgatcttttctt

SEQ ID NO: 101338 - DNA, 141 bp, Glycine max
tatttacaaattctaaatcatatatccttgctttgattccacaccattaaagttggtactaaattatacgtagacacgtttttttcaaaacgcaatactttgtgactatcatataaaaaaataattttctataactgcaga

SEQ ID NO: 101339 - DNA, 122 bp, Glycine max
aaaacgtgttatcatgacatgcgataagttcaacagccatagctgcggcgctgcgcacttgcatacagcatataaacatatatatagagagagagagagagagagatagagaaacctacata

SEQ ID NO: 101340 - DNA, 372 bp, Glycine max
  unsure (1)..(372): unsure at all n locations
tgactgattattttataaagtataaacttctattttatatgacgtcaccattcttatcaaacgcacactattattgaaacgtttatgcttattatttttactcaaccacactcaaatttacatgtccatagtatgcagcgaattgctatacctacatgctactatacaaagggacggccgtaaaagtggaataaaagtagcacatttcgcgttggaattggaacactgaaacgagatgcatcgcgaactatggcctccagacatccccaatgagcgtcatatagggataacgatacacgtggtggactcttgtacctgacattagagtatctaatcatgtgctccctgcanggccacatataatatgtagat

SEQ ID NO: 101341 - DNA, 395 bp, Glycine max
  unsure (1)..(395): unsure at all n locations
cattgngacgacagttacaacaaggttatctaaactattttggttaacaaaattaggtttttatgcattaattaataattaatgcactgtttggttaggggtggtttggttgaagagagaaaattactattcaagaagaacttttcaaaaaaatagcgtgggtcccacacctctttctctactttaactaaaatatttcttctcatttctcttccattcttttctcttctacacaaccaaacacacacttaagagttttgaaaagagaagggaagtgaccatgtatttagaattggttgagtccaaatatatcagctagtttctttcttttccttcctcctcaccaaatattatgtctttcttgagtactttatgtgaacgaaccaaccaaccac

SEQ ID NO: 101342 - DNA, 179 bp, Glycine max
  unsure (1)..(179): unsure at all n locations
tttttgttttttcacatctgcgccttcgccaagtatgtgtatatgtgtattatattcgttgttctggctagtgtttgcatctttgtttcgcgccgcaaaaataagaagaagtagagatgagagtcgtcatcacaataagggctggacggacgaaatcagngtcctatcttagctttcct

SEQ ID NO: 101343 - DNA, 279 bp, Glycine max
  unsure (1)..(279): unsure at all n locations
tataagtacaaaatagcctatatcatttccaaatatgcatgtgttttangaagcatcaacgagaattaagccaaggctattgtgcaagcaatcaatggggcaaaacacaccaaaagattatgatgatggatggctcaaattctcacaaaggtcttatcactttcaaattgagctttcaaaactatcatgacatgtaaaggaaaaaaaaggatntcaagtcacaaaatgttaagagacttttattttcagaacaattacccattgtcgcaacgtgccctt

SEQ ID NO: 101344 - DNA, 452 bp, Glycine max
  unsure (1)..(452): unsure at all n locations
agctnngatgaatgcatggttcgtgtgtgttttctaanattgattcgaagattggatactatcaaatccgcatgaaagaaggtgatgaatggaaaatagtttttaaaacaaaatatggtttatatgagtggttggtgatgccatttgatttaactaatgcacctaatacctttgtgaggttaatgaaccatgttttgcatgttatcattcaaaaaaatttgaaaaactgggagaaatgcttgccacatgttgagtttgcttataatacgtttgttcattctattacttcttattttcctttcgaagttgtgtatttctttaatcctcttgactcctttggatatcttacctttgccttccaatgagtatgctaattctgatggtaagaaaaaggcagattctatcanagatgtgcatgcaaaagtctgagccaacattgagaagaagaatga

SEQ ID NO: 101345 - DNA, 60 bp, Glycine max
tctttagctgacttttcataacacatggtttttcaaaataagttactctttctagaagga

SEQ ID NO: 101346 - DNA, 311 bp, Glycine max
tcgatttctaatcgaacggatgccctacactcaagcatggcctaacacgatctccacaacgaaagcacacaacaaaccagttagaagcatttaatagaagggtaatcccctctcactggatacatatactcaattacaccagaagagaagtgcattttactcattctcatacacataaacacctcatgcttaactaacttgattgtcagagtctcttttttaggtaccccaccacacattaatgaagaagatcgaagatcataccaacattagacaaagaagaagatcagactactcaactagtaaacttg

SEQ ID NO: 101347 - DNA, 442 bp, Glycine max
  unsure (1)..(442): unsure at all n locations
gatgttgcatttcggtattagctcctctaatggaagatcgatatgcacttcttgcattgtaaatatgtttgattgtcaagcaattattgaccttatgctccttcaacattagcaagatgttttttggtttcaccatcgactttgtcatatcagcaataattttcttttcatccttggtcaatcacccaacgtatggatgtccaactaaagacttggccaattcatgattgtgaatcctacaaatcaacttcaccatccaaccttcccttccatgcactggtttctcacgaagcctgaagggacaaccacatttcttactccaagtgtctcttctaacaaattcattattcctacacttgtgcagaccactcctttcacacccaattaacacaaatgaacttcttnctctgctaccagtatctatgtcagacctcataatcac

SEQ ID NO: 101348 - DNA, 448 bp, Glycine max
ctggatgcatggtaacttggttaccaagctggccttgaatcaaaaatatgtacctgtcgcaagggtttgtgggttgtgcttctctgctgaccaccatacagacctttgcccttccatgcagcaacctggagcaattgagcaacctgaagcttatgctgcaaatatttacaatagacctccttaacctcagcagcaaaatcaaccacaacaaaacaattatgacctctccagcaacagatacaaccctggatggaggaatcaccctaatctcagatggtccagccctcagcaacaacaacagcagcctactcctttcttcaaaatgttgttggccaagcagaccatacattcctccaccaatccaacaacagcaacaaccccagaaatagccaacagttgaggcccctacacaaccttccctcgaagaacttgtgaggcaaatgactat

SEQ ID NO: 101349 - DNA, 296 bp, Glycine max
acgcatgtgcaactctggcatcatcagaacattcagcttgatcctttgtgtacaatctgcccctttttgatgatgacaataccttgaatcaagaacagctatattccaagaggatgccccgttacaccaccctttattccccctatctttgggcggtgttgcctaactttacttaatgataaatttctaattgataattgatttctaacccaaggtcttcaagttctctccccctttggaccatcaaaaagaactaagccacataatcaatatccacacagagccaaacaataaac

SEQ ID NO: 101350 - DNA, 294 bp, Glycine max
actgagcatgcagctgaacactctgaggacgctgatcttcttttattcaaaaaaagtaacctttcaatgggcataaaagtgttaaacttcaaacactagctggatgatcaatctgactgttatattgagaagatagaactgcaactttgtacggaatcaactaaaaattctgcaccactttcatatgttcacacacaatctatggctcccttgtaaactaactctgttgcatttcgtaaacattctactgtctacacaaacgttaattactgcatggggtatgtaaaatcctct

SEQ ID NO: 101351 - DNA, 462 bp, Glycine max
  unsure (1)..(462): unsure at all n locations
cttcgttagaccactataattcctattaagaatattggtcttgtattttgttcccctctaatgttttcatgatcctttatgtttatttgtatgacttcttgtttgtctgcgaattattcaatgttttgacttcggtaatgattaaggaaacattatagattcattctattcttttttctttaagatgaaaggaacttggaaaaaaataggaagaaagtaaagttattataagaatctagtgttggactagaagagggtatattgagaaatggatgagataaagtaacgtgtgtatggatagttctgagtaatgatgggaacgcttatcatttctaatactttactaacactaggcattntggtttatctcctagcaacttgcatctctctctcttacctgtctattatcattttagtgcccattatnttttttgtcgtctacaaaagtataaaatgaattta

SEQ ID NO: 101352 - DNA, 439 bp, Glycine max
gctgtcctggtttagacatgattgttacattgattgtgacatgtaggattcaatttgggccaaattggatgagggaaagagtggttttcgaaatctgcactttatgcagaattttgctgttgaaatgtgcagcagaattttgcataagtgcagaaaaatgctatgtatctgctggttgtggaaagggtagtaaatatggggttctggacatttgctagcagatcccaacggtcaaaatgtagacttacatattagagacttccagtaaaattttcgagtcgatccaacggttaacgaattggacaaagaaaatgttactggggtatttgtatgtgaaaagctgtgattttgagttgtgttttgggcagagtttctgcctttgccctcgtttgcttggtttttgtagtccatgatgattggatgtggaattacctggatg

SEQ ID NO: 101353 - DNA, 441 bp, Glycine max
tagtgtaccaaactaccgcggctctggccaagctatcttgaaaaaagtgtattaaaagcttctcatccttagagtgtgcgcccatcttgcgacagtacatcttgagatggttcttgggacaagtcatccctttatacttgtcgaagtccggtactttgaacttcggggggataacaacatcgggtactaagcaaagatccgtcatgtctgcgaacggatagtccccaaatccttccacagctctcaatctctcctcgaggagatcgagcttcctcctttcttcagttgtcgggggtggtccttccatggacaacactattggttgtgtcgtgatgttgggctgaggcaacgtgctgggtgccggcccttcgaggatcgggggatagaactcaacatcccttcgagcatagtcttgagggtcttcgtggacctcatcgggct

SEQ ID NO: 101354 - DNA, 403 bp, Glycine max
  unsure (1)..(403): unsure at all n locations
ggcacttcttcgctctcctcaaggacttcagcttctntgccacttatgccttttagctatgggaaccaagttatcccttgcatcctagacttcaaccacttgtgatagccaccgatgatgccattgctacaaccctaagctccttatcttacctctccgctgtattccaagctctacggattctcttaagtatcttcgcattggcttcattgaaacctcgtgcgatgaaaggtacgatgatctcctctgacgtcgcacctctcatagggtagcctagttgtcttatggccaacatgggattataattaatacaacccctcgttcccatcaaggggacgtttatgaatncttcacacgagcataacacttttgcccctccttctttccatcgggggaaccagct

SEQ ID NO: 101355 - DNA, 433 bp, Glycine max
  unsure (1)..(433): unsure at all n locations
caccggtccttttcttgctatnatttaaccttcctttcacaattgagactaacgcttctggggtaggtatggatgcanttctctcccaaaggaaccaccccataactttcttcagaaagccatttcctcccaaactgctccacgcctcaacgtatgtccgcgaactattcgccattacagcaccgataaagaagtggtggcagtacgtgcttggttgtcgcttcaccataatcacagaccatcgaagcctcaaggaactgttgacgtaggtgatacgggcgctaaagcaacacatgtacctcgcacggttgatgggttatgattaccaaattcaataccgtgtcggcactcataatcaagcggcggatgcactctccaagtgctttgatcaggatactggttctttgataagcctttctgcccttgccctctt

SEQ ID NO: 101356 - DNA, 457 bp, Glycine max
  unsure (1)..(457): unsure at all n locations
agctntgatctaccaccaccgccgccaccatcatctntagttttctattatttaatattactagtactttgttttctagctgcgtatttggctatattatgacatttggataatttagtatttctttatttgcatggtttgattgaacaattatgaattatgttatctgaccatgtgngctttatatatttgatctattcatgtttcttgcttcatgattggtttatattcttcaatgtatgccttgtgaatgattaatagtatatgtttgtcttatacttgttacacactttggctttttgttgatgccaaagggggagagaaatatggattaaatcaagaactcacataagtaattaacttaatttcaagtgaagcataaactcacaaacaaagggggagaagttaagtgagtgatcaactatgaaaaagtgtgtgtgagtggttcttgatttca

SEQ ID NO: 101357 - DNA, 326 bp, Glycine max
  unsure (1)..(326): unsure at all n locations
catcacatgtggtactaggtggcggtcgggcgatggtgcacaacaagtgtttcacatacacaatgcgcgcataaacacaccatcccctgttgcccacctacatctgagctcacgtactcccacgtagcccatattcctcattgtttcaacaccgggtgcccatcaatcctcccaagctttcacaacatcgcaagcaaacaacattcaaacagcacaagctatcacagccaagcaaaacagagcaaaggcagaaaactctgccaaaacaccaaccaaatcacaactnttctcacttaaagaccccagtaacaattcctttgatccaa

SEQ ID NO: 101358 - DNA, 453 bp, Glycine max
  unsure (1)..(453): unsure at all n locations
agctngcagcatggaaaggaaatcatagttctgtggtgggcatgtagtgaaaataaactcccttctaaacaatctcccactatactacttctccttctttagagcctcgagaaagattatccacaccctctcgagtattcaatgcaagttcctatggtctgggggtggtctgaagagaaacgaattanttggattgcttgggaccgtgtatgcctttcaaaggaaaaaacggggttgagggtgaagaacctagagatctttaatgccagccttctagctaagtggaggaggagaatctctatagataagcacactatatagtttgattttctacatttcacgtatgactattgattggatgtggaaggtagtttaactcatagtcaaacttttatatggtggaaggatatgatggnggaaaatcataattcattatgtccggtgaattggttt

SEQ ID NO: 101359 - DNA, 297 bp, Glycine max
  unsure (1)..(297): unsure at all n locations
ngatgccaaaattgactcctatactggaactgttatcatggaacctaatcatccaaatgtgtaagttaacattgattactgactcgatggataagggcttttattgcttcctattgtattgtaccattctgactcagctatgttgatcccttcctttccttcatgttgcatgtcatacttttcaagaccgttaatcttatactatatctgcacgtatgagcaactgatagaccataccaaggcccttaacggacgtacttacaagttggtcaatcaacttctggaacacgcacaaac

SEQ ID NO: 101360 - DNA, 454 bp, Glycine max
  unsure (1)..(454): unsure at all n locations
tgtctatttctcacagataatctatgatagtgctctaaaaatttatcataggtcattttcgtacacagccatacaagttcagtgaatgctatgcagatagaaaattctttgataggaacaacatatggatgaagaaaccaaaagaaaaaatgtggcttgaatgatgtcaattatagtttattcattagaaaatattttattacttaataaaatcaatcgcnttttgtgtcttttttcttatgtctaaaagctcatcaacagtatgcatcatgtcttgaaccttgatacatataattagtccctcaaccctgtgcctctctcatttttatccgagtattgacacaccataattcattaactgaaatgaattagcactattacttaatatatgaacatcggtgagatttctattcaataaccattcgcttagtttacaagcgaatttcacctacac

SEQ ID NO: 101361 - DNA, 465 bp, Glycine max
  unsure (1)..(465): unsure at all n locations
actaagcttgccaatggaactgatggtttctcaacaacaaacttgatatgtctctggaaattatagctctgtctacaaaggaactcttgagttagaagacaaagttgttgcaataaaggtcctaaaccttcaaaaaaaaggagcacgcaagagtttcattgctgaatgcaatgcccttaaaagtattaaacatcgaaatctggttcagattttaacgtgttgctccagcacagattacaaaggccaagaatntaaagctttgatatttgagtacctgaaaaatgggagcctagaacagtggctgcatccaaggacattaactcctgaaaagccaggaacattgaaccttgaccaaagattaaatatcatgattgatgttgcttctgcaatacattatcttcatcatgaatgtaaggagtcgattattcattgtgatttaagccgagtaatgtacttcttgatgat

SEQ ID NO: 101362 - DNA, 440 bp, Glycine max
agcttctcctactgcaattgtcaaacacggttgctaaatgtgagttcgaataacaacttcttttacatggtgatcgcggatgtacatcccaactttagtcatattcagattctcgttcaaactagcgtccaccattgcactccaacctactcaatataggagggctccatatttcaattgtgctataaccacgcattctctctaatctccccctgcaccttttttcattgaaccaatcctagagaaaatatttgcataatgaatcacctccgaatctgtactatccttattgctccaaagcttttcattccatctcctccaaacactccataacatcatagcaacacgtttcccttgccggactgataggacttgaattaatctgaatatgaattcagagcacgaactctcatcaaatatcgttaggtcctcaacaacat

SEQ ID NO: 101363 - DNA, 383 bp, Glycine max
  unsure (1)..(383): unsure at all n locations
agcttcagagtangtctgctttgcatttttattttttttttgcctctcttattctctatatttacatgttctgtcgcgtcttccttttgcacttgctanttgctattgactttttttacatcataccatttttatcaagctggagtttgtttggttataatttttttttgaactaaggatgcattaagtcttttttttttaaattgggttttggccttgaatctcgctcttatctttgcacaatggttattcattattaacgaattctgcttcgtgtttgattgctcattatgtttatacatgaacatatgggttaaacagaaaaacttgaacctatagattcgtcgatctttatttttgaacaaatgttttggcatcagggg

SEQ ID NO: 101364 - DNA, 436 bp, Glycine max
ttgacgtactttccccatctttgtttgggaacgatatatatctatgatgtgattagctgcaattaaccgtgatcatcaactggtcttgatatttatggaaatttgatctattgagcttgaatgtagttgtagaagacaatatgtccttatcatgcaaatgcaatcatccattcattttccttactcctcatccccgagatatagtcaattagtcagtcatctgtttaagagtaaattgacttgtttttttggattgaccatgactttaatattctaattagtatacagggtgtgccttgaaattcttttttcttctatctccaaagatgtggttgtgtttttttcttccatctactaagacgagcggagactggagcgagcagagcactgatgagggacgaaggactctattttaatttttaatataatggtttac

SEQ ID NO: 101365 - DNA, 475 bp, Glycine max
  unsure (1)..(475): unsure at all n locations
ggatccttaagtcacctgcagctgcagctttatgggaagctattaaaacatcctttctctaagtattatttttaaaaaattgatatcaaacatgggaaactaagtttcttaacttatgattcttganaataaaaaatttctcccctaccaaatgtcccctaaaagcaatgtgttatttgtattgaaaaggctaaagtcaattgaatgtcattattcaaccccatctctagtgaacaactaactcatttcaaaggtgacctgaataaccataactacaaagttgattaatcggagaaggaaagatacattgtatttttttacttcttttcaattgattgtttcatggaagaaggaacccgagagaggaaaagaaaaacaattaaaaaaatcaaactcacttatagtgatagggtttagatgtcactcttgtataaacacttattttgaatatgcatgtttacttgtagttaaaaac

SEQ ID NO: 101366 - DNA, 408 bp, Glycine max
  unsure (1)..(408): unsure at all n locations
gcttatacaaagaatacacaaacaccaccatttctgcaggaacaattatgaggatgcagctcatctattcttcaactgcagtaaaaccctccctatatggtgggaatctttgtcttgggtaaacatctcaggtgccttcccgcanaacctgagacatcatttcctccaacatgctcatggggggatacgctggactaagggctcatagatggaagtgttggtggatagcattaacctggactatttggcagcatangaatcagaatagtttctcaaacgatagctttaatggtagcaaactgatggatgacgcaaatcttcttgtgttgtcatgggttangaatatggaaaaaggttttgtatgcattntaatcaatggtggagtaatctaataaagggattttgaat

SEQ ID NO: 101367 - DNA, 460 bp, Glycine max
agctaaatggctcatgagcaggggaaatgatatttttctacaagtgaagataccattttctataggaaactactgtgatgaagttctatgtgatataatccctatggaagcaaggcacattttgttgatagaccatggaaatttgacaagaaagtaattcaaaatggtctcaccaacgaaataaccctcaaccatggaagcaaaaagtcaaacttgttcccatgaaggttacaagtggctgcgggatcaagtacaaataaaactcaaatgggatgaggaaaagaatataaaaagaaaagaaggataactttttatgtttaaggaggagtgtaaggaggtaagtgtctccttcaagaggttagttaagaaggaaagctcattttcaataaagacaaacattaaagaaagcttccttcttagacaaccttgacatctcctcctttgtaaaggacacttgtta

SEQ ID NO: 101368 - DNA, 478 bp, Glycine max
  unsure (1)..(478): unsure at all n locations
gtatgcccgagtcattcatccctatgagatgttgttgaattattggcgatcagaattgccattccttggattatagggttgaaccaagctcacgcttttacaaaaaggttcatcaagtcaagttgaaatatggaagtaaccgtcttgcaaaattggggcaaaagatgaatcgagtcacatcactgcttcgtctattgccaaacatatttaggattatggatgtccttgttacttccagtttcaccttgacaaagatgtcatggaccatgttgaaaatctaaattgattcaaccccatatcttgcgtaaaaattcgcaatacttcaactgtacatcattcgcatgcatccatgctnttcattggttgcattgctcgttgcattctttccttgaaaaataaaataaaatgaacttaatcattgttataaaaaagaaagggacacgctttacgacgcccttaccgaactcgtgctagagct

SEQ ID NO: 101369 - DNA, 358 bp, Glycine max
atcatacaatcacaaaatggaatgatatactcacttcggttagcatctcactttctgttcaagcataactttgaaaggactacagatgcttgatcaccacccaaaagaaaataaggatgttgtagatcagcatcggctaataagaaacctattcttatggaacgcctctcggaaacaagctttgttgctaagtcccatgctctaccataacactactatctataatttggaattcaggtacgacgcgagtatagtccctctatatattcaaatcatatacacaactgttcagttacaagtttaaattcttcaaaacaacaagaaaccataagcttggtggttccatttgcaggagtac

SEQ ID NO: 101370 - DNA, 375 bp, Glycine max
  unsure (1)..(375): unsure at all n locations
cttgcccaggtggtcagttggtggttttgcgcaagccactggaaccatttcagtgctggcccctctatgtagaatgaggctatggtgaggcgttctgattttggggtagagtcggacgcgaaaaactgttggattttgaagatccaccctgatggatcagaaccattaaaacgtggaacgtcaagtttcattttgtgtgggttgagactattatttatggatgcagggttagctaatgaagatgaacgtgagtggctgtggctgctactgtgttccangntatctacactaaagaggacatcctcaagcttctcagtaatatggatttgggcagctgcnnncttactgatgacatccccaacgctgtccaaactg

SEQ ID NO: 101371 - DNA, 120 bp, Glycine max
acccccttttgccgaccattttaggttgccgctcatctattctttactgcatttagcactacctaatggcgcgaatctttgtcccgcgtaacatctactgtgcctgacccacaacctgaa

SEQ ID NO: 101372 - DNA, 376 bp, Glycine max
  unsure (1)..(376): unsure at all n locations
gcaagcaataaatggggcaaaacacaccaaacgattatgaagatggatggctcaaattctcacaaaggtaaactcatcactttcaaaatgaggcttccaaaactattatgacatgtaaatgagagtcatggatttcaagtcacaacatgccaaaaacttttatttacaaaacaattacccatttcttgaacatatcctataattcaaagaaaaacatgctaagtcgtacatgcacacaatatngacccaatatattaaactaacatatcgacgaaactaacaacattaactaattacattaccaactaaactatcaaaaccatagaacacccccccctccctcccatactttaatagcacatatgtcctcaatgta

SEQ ID NO: 101373 - DNA, 285 bp, Glycine max
  unsure (1)..(285): unsure at all n locations
tctattcacttataaatatttngtaacaaatagntaagagcatttatntgatacactacactcttcttcttctcgttgcgtgctggaggttactcgggcctcgaataccaattataaccgatctggacgtaggttatcnnnctattaacaatacaaagactcctgagtgaagctctgcctatacaacacnnntctgagactgtgtttatttgaagttagatcatgggtggattcatcgaactttatgggactacatatctctttacactatccaagctgtgattc

SEQ ID NO: 101374 - DNA, 437 bp, Glycine max
  unsure (1)..(437): unsure at all n locations
tagcctgcatttggaagtgcgaaagctccactctcttcatatgatnattacctgaccatctcaacaaacaaatcaaaccgtatcacgacaattatcgttgcttggttgaataccctaacccactcaagtgtatcacacaaatatggctcttctctaatgaaacactctcgcctttaaccacttctattccccttgagtccttaagcaattcaagagattatggccacaacaaagaacaattcaccaatatgtgcaacgtaaggctatacaacgaataggttaacccagaacaaggcttacaatgtttttaggcacaaatgaaggatataaaattcaaaagttaggaattcaagtaacaatccttcatgctaccaatatatcacccttaagagttttaatttaagttctcatgcctgaccattcaaccaatatttttt

SEQ ID NO: 101375 - DNA, 414 bp, Glycine max
  unsure (1)..(414): unsure at all n locations
agctcgtaaagaatgaagtctttattgtcatcctcaagacgnagtaaacacaatgtggagaattataccttaaagaaattcttaaccaaatttagtggaggaacagaaaatctagcaaaccgtagagatatatattcctgacgaggatatcgttgttcgttatttctgaggcaaaagaggacacatgacgtccagatgcagggactcacctaagaaggggtgcatctaatgcattcttaactaacaagaaaagaccacatgttctgggtacctaaggacaagaatatttatttttatatgttcttgataacacgaaagacacatctatcatggacctggatagtgcttgctcacgatacatgatagaagaaaagtgtttgatctaattgcttacccttatgcattgtggaactg

SEQ ID NO: 101376 - DNA, 439 bp, Glycine max
agcctggagaggatgctttattggatgaaattatagaggagagaaagagagagggcggagctcaacattgaaggaagaaaaagggagagaagtcgcactttgagttgcgtctcacaagactctcattcatcaaagttacaataagtgttacacatgtttctatttatagactaagtagtttccttgagaagctttcttgaaaaacttctgagagcttcttgagaaaactccttgaaaggtagagcttagctacacatacccttctcataactaagctcacctccttaagaaagcttcttaagaagattcttaaaaaagctagagcttagctacacacacacctctctaatagctaagttcacctccttgagatgagaagttagagcttatctacacactccctataatatctcagcttacccatatgccaaaaaacatg

SEQ ID NO: 101377 - DNA, 327 bp, Glycine max
  unsure (1)..(327): unsure at all n locations
ttcgttcacagctttatcacttctactcttctcttcattttcatttttttcatcttttcaattttttattttcccttttctttttattggtcattaaattcttttttcttgaccattatttgtttctctttttcttgattgctntcatctctcacatctttctcttgcccttagtacccttcttttcagcagctttctccttatgcacaacactctcctcaatctcagcctccacaaaccttttactccttgtcatcacaacttgcattcctccttgggattctttatgtgnttgcacaaaactattggatgacttgtcagctatct

SEQ ID NO: 101378 - DNA, 483 bp, Glycine max
  unsure (1)..(483): unsure at all n locations
ntagctaaataaccaaataccagtagggatataaatgagccatacaaactattgaactccagcttgttaagtgctcaatcaatctcgtttgattagccaaataaacgagttcaaacttaaagttgggctcaattatttaaatgagcccagctcaagcactgtagaatggatattaataactagtaattagcttatatgtatacctagattattantaaattatagttntgttcattatatttactagaaagattacaattgtatttcttactatcctacccatatcatttatcttattatatcaatcatcaagattcatattctaaatacacaaccataaactttcttcagaagattgaccatttctatcattcattaaagaattcatttctaatctcaaatcatcattataaatacaaaattatactttatttctgttttacttcacctagtacaaaattatgttaaataataaatattaaa

SEQ ID NO: 101379 - DNA, 423 bp, Glycine max
ctgcagctgagatacaagaaaacatcttttttgtccacaagatcgaaggcattatctcggatctcatgtatctaacatcaatatcctatgaaagaaccaaatgctgcttcctgagaacaccaaattagactatttaaaaacataaagcattgtccttgacttgatgaacaaaaaaaaaatgtgttctttattgaccatttgacaaaaaaaaaagagagatcgatattatcatttcttttaatttggaatcaataaaaagtaatttatgatgacaatgatttataaatattttgttctagcaatgttcacccagcatgttcttaatttggatgtataaaactagcattggatatgtacctatatgtttatgaattttaaacacatccaaatgttagaccggatcccattatattatatatttat

SEQ ID NO: 101380 - DNA, 324 bp, Glycine max
tcgaataacaaataaatatattatagtggatgattgcgatgtaaagaaaaaattgtcaacattgaatcttcaagaataggtggttcaactgatatgttcataaagccattaaagaaaatgaatgattggaaaaatatattggtcacggacctatgttaaatatgaatttctaatatagatactttccatttgaagcgcgaaaactagcacacttttcttaagtcataaaaactcacattgtatttcagctgattatataaaaatataagctcactaacaatctgtggcaccattccatcgatacactatattgggcctaaatta

SEQ ID NO: 101381 - DNA, 415 bp, Glycine max
  unsure (1)..(415): unsure at all n locations
agcctgctcacgttatgcaatgtgaactataattaatatatattcatccattggaacatttgtacatatattcctcccccataccttcgcatagcgaagagcatctgggcaatggggtacgaaattttattctttttccancaatgtactggtctcatggagtcacaattgtcctctatttgtataggtgtcatgactagtagcctgtgtgctgaaatcacaaatgggtcatctaatgttcatgaagtatggaagcttgcatacacaaaggatcggtatnttcttccttcaccagtcaaactatccccgtgttacttgctcatgattgcccacgcatgaaaagggggctgctggaagggtggtgatgggttgaccatgttgccagtttatatacaattcagaggtcattcatggc

SEQ ID NO: 101382 - DNA, 363 bp, Glycine max
  unsure (1)..(363): unsure at all n locations
attcgggcataattaatattgaagatattataacattttctaaaacggaatatagaaagacagatctgaatactctaatgagtgttaaaaaaattataatatatctttattaccatataatatttacaaatttgattatctttaatattattcttacaaattcttaaacaatatnataataatactcatctatttaattttgaagctttaatttataatgtatttttactttatatataaaaaaattataaatctatataagatatgttaaatacaatcttttatagataatatataaaagattaaatcttatatataaattttgccaacaaacatatcaaatcttagcttgtcatgatataa

SEQ ID NO: 101383 - DNA, 389 bp, Glycine max
gctccttctttcatggcttattccatagtggatgacgccttctctcacctcttctcctttgtcttccgctgcatctccatggtggaaaatcaccattaaaggacatcattgaagctcaaagattcatccttcatagaagccccacaagcaagcttccatcataatgagctattttggacgatggagacctcatccggccatatgccggcttccacggcgtaagaaatatttttctaccccaaatacatatataaaaattgcgattctgataaccggagcaaaagttatggcccgttgaaagtttgacaaacacaaaatttgctacttttttggaactctcaaatctgaccaatctaaaggctctagctatttttcccacacaatatgga

SEQ ID NO: 101384 - DNA, 454 bp, Glycine max
gacattttaaatggctgcaaacaatagaatatgccaacatatgctaaattcatgaatgatttgcttacaaacaatagaataattatggatgatgaaacattggagctagaggcaggttgtagtgcaattattcataaatccattctatagaaatctcgagatcctagtagtttcacaattcctgtgactattagaagattattaataggaaaggcagttctttatttaggtgcaagaatcaacctaatgcccttgtccatgatcaagcggataggagaagtagacattagaccaacaaggatgactttgcagtttgctaacagaactatcaagcatccttatggcattattgaagatgtattggtaaaagttgacaaatttctctttctagtcaactttatggtgatggatatgaagacaacgaagttccattgattcttggcaggccttcatg

SEQ ID NO: 101385 - DNA, 301 bp, Glycine max
  unsure (1)..(301): unsure at all n locations
aaatgcaaaaaaaatgcctcttcaattttctgcatcatctttatcagcaaccttccttttgtttggctcttgttatggctagcttatccttgctattggtggaacagtagttgctgggacctacatgtaaatgccaaacccatgaataattgtaatatataaaaatggagtgctgcaacaaattaggttcagataaaactactttgtngtgacaaatatttaccatcaactccatgtcactatcttgtgacanatgaggctgagataaataatctccaccgatctgttgaacatgacacac

SEQ ID NO: 101386 - DNA, 456 bp, Glycine max
gcttcccctctaagcttcttatccaagacactatcttggtggtgaaacttctccttcaatggcttattctctagtggatggcgcctcctctcacctcttcttctttatcttccatatcaagtccatggcttaaaatcaccattgaaggaccttattgaagctcaaagatccagcctccatagaagcttctcaagcaagcttccatcaagtgctaatcagagcccaagagcttcaagtaggtgctctttaaacctgcattaattttcagctttaccttctcctcaattgttgtttcttcatttttctccatgtatctcctcacatgtcttgtgttgaatgttgttaacatgattttttagaatttccaccgattaaacttgctatagaagctagatttgattatctatgggtcaaatttcttggtcttgttcttgaaccatgaattgtgttgagttt

SEQ ID NO: 101387 - DNA, 459 bp, Glycine max
  unsure (1)..(459): unsure at all n locations
agcttgaatgcttgcagcagtcnttgtgctgttcgattctattgaccgctcagcgcccaccactctacactcaaaaatgcatgattttagctaagtaggcccagagcccgagttagcgagagttgtaggttttctgatctgcatatctcaccaagtggtctaatccacgcgctaagcctgactctaaatatgaaaaaaaaaaagaagcttagcgcaagggttcgctaagtggaaggtcttgagaaaccaaacgtctctctggctagcttagtgcagcggtgcgctaagcgagaatgttgaaaactgctcaagtaagtgtaacggtggatacactcacaattgccagatttcgtaaactttgtctgtgcattctctctccaaaattttgcacatattgcatttgtgcttttcttttgcattatcaacttccatgcaataaccattcaccatccaagtaag

SEQ ID NO: 101388 - DNA, 285 bp, Glycine max
  unsure (1)..(285): unsure at all n locations
aatgggtgcacaggataatcttatatacacacngtatactttttatctaagaggctatgctcaatcgaaacactggacttatcatcatcaaattcatgcattcattccatacctagagaatcatgcaataatcagtactcatagttaggcactcactcncaattcaagatcacactctcatcgagttagcggttaagccttccttacaatcaacttgacaaatgactaacattctttggatgaacataataccatgttcttcttttctatgactgcatgctcatt

SEQ ID NO: 101389 - DNA, 460 bp, Glycine max
gatcttaagcacctgggctgcagctgcattggaatgcgaagctccacttcatcattaggattagaacctgacatctcaaacaaacaaatcaaacgtaacaagacaattatagttgctgtttgaatacctcacccactcaagtgtatcacacaattatggcttttctctaatgaaacactcttgccttttatcactctaattccccttgagttcttaggcaattcaagagattatgaccacaacaaagaacaattcaccaatatgtgtaagataaggctagagagacaaggaaaaggttaaccaagataaaggctaacaatgtttttatgcacaaatgaaggaaataaaattcagaattaggaattcaagtacaatccttcttgcaaccctatattaccttcaagagatcatttttttataaagtcttcaagcatgaaccataaagcccacattttttttt

SEQ ID NO: 101390 - DNA, 461 bp, Glycine max
  unsure (1)..(461): unsure at all n locations
tcataggtgaaatcaagtgcagccatataccttagagtcctctcatgaggtggaagttgtgccatgttctcagaatgtgcaaaatcagaatgctcataatcagaatgctcaaaattataatgctcaagatcaggatgttcaaaatcaccaataacagaatgcacagattcaccagttatggaattctcagaatgatcaaaaggtataaaatgatgcctaactaatctatgaaatgtcctatctatctcaagatcaaagggttgtaagtcagatggattgcctctagtcatacactacattcagcatgcacacaactagttgccttgtcatgtaaataaaggtgtaggtttgaactacatctaccctcaaatgatatcccaatgaccttgaaatntgcgagcaaccttattaaatgatgagaatattgcaccataaatttcagacaaaatctcaagtcttac

SEQ ID NO: 101391 - DNA, 411 bp, Glycine max
  unsure (1)..(411): unsure at all n locations
agctngatcaatcccgacccaacccgggcatagtcagtcagtgagaacctgtgacgtacctaaacaggcgagctcctgccagtcaaccaataaaagaacaaagaccacaaagcaagtaggcttgtgtggtggctggccagctatggattttgagtgatatctggaatatggcctcttgtaatcgattaccaagggtgtgtaattgattacaaggcttaaaaatggagacaggaagttgagatggcctctggtaatcgattaccaaggggtgtaatcgattaccaggcttagaaatggagataggatgttgaggtggcctctagtaatcgattagcaatgctgtgtaatcgattacacagagtaacagggcactggtaattgattaccagatatgtgtaatcgattacatag

SEQ ID NO: 101392 - DNA, 438 bp, Glycine max
  unsure (1)..(438): unsure at all n locations
tgtgcgaatcaagtcactcccacattntatctctagcatgcattgtatgttggnctcatcctttgtcacgggaagccggaaggtccatatcaccttcttaattgtacacatggggcactgcgcccccaaatgcacaagtaagaagagataattttccgggctctcgtgtccgtaaaatgcattcatatcatgcatcgcataagcatctcttcataacatcataatgaacatatcgttcctgcatttgtccgttatcatattccagcctcacattttgcatgagtcatggcatcatcatgcatatgcgttcaacaaactttttgatctgcanaattgcataccatttgttttcatgtatgctcatccttgcgttntcctctaccaaacaaaaacaaaaagggggaagcgtgaaacttcacactacattcttagtttcat

SEQ ID NO: 101393 - DNA, 469 bp, Glycine max
  unsure (1)..(469): unsure at all n locations
gtcccggatccttaagtcacctgcggcatgcaagcttcaactaangtccataagttgttgatcttcattgattctatttcaaattccatggctgtttgccatttgatgcaatgcgagcttttcatggcctcttcatagctcttagggtcatcatcattatgataaacttcatttgacatgtcatcttgcaccattaagtttaatttatcaagtgcatgatgcattcgagtagatcttctaagaggttcttgtgttgggttcaaaggttgctacaattgttctaagattagttcattaactttttcttgaacaacaacttgttcttgaccaatagttggttcttgagccaaaatcgtttgagttgaagagctttgtcctaatttcaaaacataaaaaaaaggcctcttagtttccatctcatgttcttgagttatgttatcattggtgatttgagtctcatcaagttcaa

SEQ ID NO: 101394 - DNA, 447 bp, Glycine max
  unsure (1)..(447): unsure at all n locations
ctgtcattacannattgttcanacacatggtttgtatgtntcttatctaattggtcaaattaagttttcaatgtttcttgacaggttgcaggctattagattagattacacaaatttcttttcaatatcaaaataaatttagaaacagaaactttgttttcttgtctcatattttttcttaattacaagtgtaacagtagtctaatagttgcatattattatcctaacttacctttttttttcttaaccctctcattcatcagggaaaaataatcctaactaatccacataatttatggagtgtatacagtcatttatacatcctaaccaaatgatagcanataacaattcaatttagacatcctaaccaaatgaaagcaaaatacaataagtgatgtatcaaaattatggagtttgtgtaagtaaataccatatacactttgtaat

SEQ ID NO: 101395 - DNA, 196 bp, Glycine max
agattgatctatcatctctcaatctggaagaatcaacttctttctctttgaccacaacaatgtgtccaagatggaggaatgcatattccacacggaggatcgctcctgtgacgagattttttgttcaccgatggataaataaaccactgtttatataacacgagcacttatgccctccgacaatacctgctcttct

SEQ ID NO: 101396 - DNA, 197 bp, Glycine max
gtctatgtctaatactcttatatatgtgtactacttcggaaccctgtactaaggtctacactgatacaacgaaatgtatacaattatattatatattctcatcgtggatcctcctaattcttttacaatgtatggactacataacagtattgggcatttgaggagcaaactggccactggacccagatacaatcctg

SEQ ID NO: 101397 - DNA, 193 bp, Glycine max
gtgcagacttcccatgtgctagggctataatatagaaacatgtgtaacacttcgtcaggacgtttgatgaatagagaaaacttgtgagacaacacctcaaagattcaacctcccccttcctatatctcgcttcaatatcccatgcaccggcccccccctccccccaccctctatgttgcaagccttccctcta

SEQ ID NO: 101398 - DNA, 397 bp, Glycine max
agctcgtcacatatgaggtagcttcatgccttttattcaatatgaacacccatcaagcgtgtcctctattaaaggtcttatcctatttaaccactctagcaaatttggtgggacgcccaaatactcctcaagaatggtgcgggtcgaaacctttcaaacaacaatgattttttgactcaccctttacttacctactattcttcttaagatactaaagctactatataattcttctggtactacgctacatgtacgaaaccatctagaaatccaatttcacaaagggattcgcatcaactatcattttagacgcacttttataggctaactaaacacagcattcttttaatcctatactgcatgtccaactatgatgcaaatgattgtaccatggcta

SEQ ID NO: 101399 - DNA, 408 bp, Glycine max
cccctcttagctggtgaatcaccagtgctgagtccccgtatactttgagcagtttgacattaaagtcaattgccgcctggacgaccacggcacacgcttcatactcagccatattgttggtgcagtcaaaccccagcctggccatgaaaggtacacattgattgtttggagagaccaatactgctccaatgccatggcctagaacgtttgacactccgtcaaacaacacggtccacttgtcccgatcctcgtctagcttttcctcaaataaggccataatgtcctcatcgggaatttgggatgcatgggctgatagtcgttgagaggctgctgagccaaataatctgccaaggcgcttcctttatcgccttttgggtggcgtaaactatatctaactcggatagcaaa

SEQ ID NO: 101400 - DNA, 392 bp, Glycine max
  unsure (1)..(392): unsure at all n locations
tacccatcacatgtggtcctaggtggcggtcgggcgatggtgcagaacaagttntccatatccacaaagcgcgcataaacccaccatcccctgttgcccacctccatctgagctcacgtactcccacgtagcccatatcctcgtttctctcaacaccgggtccccatcaatcctcccaagctctcaaaacattcaaacaaaacgacattcaaaccgcacaagctatcacagccaagccaaacagagcatatgcagaaaactctgccaaaacaccaaccaaatcacagcttttctcacttaaagaccccagtaacaattccttcgttcgggtcattaaccattggatcgactcgaaaatattactggagatctctaatacttaagcctacatt

SEQ ID NO: 101401 - DNA, 412 bp, Glycine max
  unsure (1)..(412): unsure at all n locations
agaacgatgaagaacgaatgaagaacgtcgaagaatggtcgaaaccttcgcgaaattcttcacggaaaacgttacggaaacgtttcggaagcgcctcggcttaaatttttcttcatggaaacaattnttccaagcaaattccaaaagagagagaagtgcctaaggggctaaaccccttccttcttcacttcctcccctatttatagcaaaataggggaggtggttgccgcccagctcgcccaggcgagctcaactcgcccaggcgagccaggttgcttcctccagaagcaacagccttctggaggaatattctggagggcccaagtgggcctgggtgctatttgcacccccattattactaagtaccaccccctctgctgttnttggtgagtcttttttcgtaaaagtaccg

SEQ ID NO: 101402 - DNA, 456 bp, Glycine max
  unsure (1)..(456): unsure at all n locations
agctgcaacccatggaagctcctaatatctcctacactntntgnggtgggccattcttggatggcgttgattttctcaaggtccacttggaccccatttctacaaactacaaaccctaagaaaactatattatctacacaaagggtacaatactctatattttcatagagggtgtttttcctaaggactgaaagaacttgcctgagatgtcctaagtgatcatctangctcctactgtacactaaaatatcttcacaatagacaactacccatatacttatgaaatcccctttaacactaaggcataccccataaaaggcgctggtcattagtgacccaagggcattctagcattctacaaacaaattggcttgaagcggttttcactctcaccctttaatctaatgtgggataaccctttaagacaattttaaaagatgtggcccctgcactcat

SEQ ID NO: 101403 - DNA, 431 bp, Glycine max
  unsure (1)..(431): unsure at all n locations
accctctcagctactggtgaatgtatgtatatgctacatngatgtgcaccacggaaagtaggacctactagtggaccgtactgttcaaacttanccgctttaagcattatgtatacctaatgactaatgggcaaaccaatagcggacgagcgttcacacaatctaagatgatgtgtttagatattacatcactaacatgcactgtgaatatgaatataaggacacttaaccaatattaatcaatgcaatccctttttattataaggttgtatactactctactgctccacattttgctctgcctctgtactcttaaaatgattttacattcttgtaactcttgcattcacaaaagagatctctgtagacacttgagaaaccatgccattgttcagacgcgaatctgtactccatggctaatcctatgatca

SEQ ID NO: 101404 - DNA, 251 bp, Glycine max
agctggattgattcggcctgacgaaagatcatcgtttagttatttaggcttcaaccttcaacacacaagcctgattgattagagaaatatatttatatgcataagcatgttcgtttaaaagacacaatatttctacctactgctatcacttttacttactttgcattttataagtttagcataagaagtaggtttaaattctatttgaaattatcaatcatacatgttgtctcaacgatgcttcatttctg

SEQ ID NO: 101405 - DNA, 463 bp, Glycine max
acagaccagtaataggctctcagagtaacaatattcggatgccttaactttcctattgcttcaacttccgtttggaactctttaaacctttgagaacctccctcccctaatcttctcacagccaagttgagcccttcttcaagcacaactttgtagacaatccctatttcactctttccaagaacaaaagctgaagccttaagaagcttatccaaatcgaatgccacttgagcatctaatgggacaagatcatattgttcatcatgatcggatagggtctcagattcatccttcctgaagcataagcactccttcctcaatctccttcccttgtcaaaacccttttcctcctgatcctgagttaaaccccagacccttgagtagcagtaagagaacagcaaacccaagagggcaagttcaactatatgccccacaacaatcccaaccacagcacccttactta

SEQ ID NO: 101406 - DNA, 403 bp, Glycine max
  unsure (1)..(403): unsure at all n locations
ataaatatgcaattgtaatgacataaaaggtagaagacctaagttctgaaaggcttgaatgcaatcaaaggtttcagcagaaaagaattccatatcaataaagttacggtcgataatggaacgagatgagaaaagattggagtaccgtttctgctgttcgttggaagaaaacactggggaagacgacaatgatggtggaattggtgctgtggatgcgctagtggctccggaacgatgagctcttgaagccgaagcggacgcggaagaaccctttcgtttctttgacgattctgccatttgaaggagtttttgcagattntaatcggtgaaatcaaaagagaaataaaaaagaagacgatcgctatttaccggagtcgatntgatggagaaatgagtgagatac

SEQ ID NO: 101407 - DNA, 444 bp, Glycine max
  unsure (1)..(444): unsure at all n locations
aagcgctggatattaggcctaatatacttatctgtggtgggagttcgtatccaagggaatgggactatgcgaggttcaaacaagttgctgataagtgtggggcagtgttgatgtgtgatatggctcatatcaatggtcttgtagcggctaaggtgatnntgattttctgtcttttctcttgtttctggttgaattatgttatcgattttatggctgtttatgcatctgatttagttttctttggagtgtaaaagcagttgtattgtatgctttacaactagtaaagatggagttgatagaacaatttaggtgcctgtactatgaaccaacatcttcagacttattcctgtcttatcgtgtgttcgaggaaagtgaaaataatttaacctctagctatagaanatactagtaatggatttacgcctttggatattcttctcctat

SEQ ID NO: 101408 - DNA, 419 bp, Glycine max
  unsure (1)..(419): unsure at all n locations
naagctggttcgaggtacttacccgttgaatatctataaacgacgaaaaacgaatgacgacgtcaagaacggtcgaaccttcgcgaaattcttcacggaaaacgttacggaaacgtttcggaagcgcctcggcttaaatttttttcttggaaacaatttctccaagcaaatttcaaagagagagaattgacaaatgggctgaaccctttttcttcttcacttcctcccctatttataacaaaataggggaggtggttgccgcccagctcgcccaggcgagccaggttgcttcctccataagcaacagccttctggaggaatattctggagggcccaagtgggcctgggtgctatttgcaccctcatttttactaaacacacccccctctgctctttggtgatacttttccgaacatcac

SEQ ID NO: 101409 - DNA, 357 bp, Glycine max
cctgagagacaccacgaggtttcttctggatgaagcctctcttgaagcttctagagaaagctacatgaagcagcctcggtataaacgctgcccagccttcattaaccgctggatcttctcgaaatatggtctggaacttcacaagacacttgtccatgatctgaccatcggaatctttgagaagatgtctggagtgtgctacaagcctcttatgaagcttctggaggacccttcttaatgaagcttctacagaaaactacataaagctgcctcggttaaaaggctgcccaggctttagtaaccgttggatcttctcgacatttggtattcaactttcaaagacacttgaccatgatc

SEQ ID NO: 101410 - DNA, 283 bp, Glycine max
  unsure (1)..(283): unsure at all n locations
gctccctacccggctgtcttctattcctgacctttactgatgctccttcgacaacgatcgtatctgaggcgccatcccggactcgtgtggcttcgtatataagccggtggggtacatgacgctctccggataccgcctctcccggaagattccatcgccgttgggaagctggacctgaatactgaggattcgtctcgtaacaaagctgagggtgatgcgtntgtgtctgttgggtcggagaaacgcacggcgatgatgtatatggcacacaacttgttagcta

SEQ ID NO: 101411 - DNA, 461 bp, Glycine max
  unsure (1)..(461): unsure at all n locations
agctntctaaaaatcatttcaaacatttttcttatgttttcaaaatgtgtaatcgattaccaacatattgtaatcgattactagtgactctgaacgttggaaattcaaattttaaattaagagtcacaactgttcaagaaaaataactgtgcaagactgtaatcgattaccagtgagtagtttcaaaaaatattcccaacagtcatagcttttcatttgaatttttaaaggccatcaaatgcctataaattagtgaattgggaacaaaatttgaagagagttttgcttgatcaaaaatgtcttatcctctcaaaagatgatgagagttttcattgcccaaaaagttatatcttctcaagagattaagagagtgtttgattgcccaaaaagntttatcctttcaaatgattaagagagnttttcactgagttcaaagttcttatcctctcaaataaaaatca

SEQ ID NO: 101412 - DNA, 433 bp, Glycine max
  unsure (1)..(433): unsure at all n locations
ggctctanattacattgatatttgtatttattggaggaggttgtatgtcgtttttgttttaagggtagcatttctgggtaaaactaactttccaaatgtttgcctttgcaggaaatggccccgaggaagcttgcctcaaagaggtccaggaaggacaaggcggccgaaggaactagttccgctcctgagtatgacagtcaccgctttatgagcgctgtacaccagcagcgcttcgaggccatcaagggatggtcgtttctccgggagcgacgcgtccagctaagggacgacgagtatactgatttccatgaggaaatagggcgccggcggtggacatcactggttactcccatggtcaagttcgatccagaaatagtccttgagttttatgctaatgcctggccaacagaggagggtgtgcgtgacatgagat

SEQ ID NO: 101413 - DNA, 276 bp, Glycine max
gtatcactcagaacgtctgcgtatttttcatagactctgatagtactggagcacccaaatgcttattttgtctattgtgcggtgagcactttcacaagagaatgtggttgaacaaactgctgattaaggaagctattgtcacaaccctgattaggaatggaatgtttgacaatacccacatacgactttctctaacacgaggagagaaggtctaatctttactctgtatcatacaaagcacgtggcaatctgttattggtattgactcggaaacat

SEQ ID NO: 101414 - DNA, 375 bp, Glycine max
  unsure (1)..(375): unsure at all n locations
ttatgttcatattatcctacttttgtgttatctgttatttcaatttgcaatttgattttgttatttgaattacaggcatgatcagagaagatccatcaataanaatttctttgattcaagaaaggataaatagtgaattttcctataaggtttcatacagaaaagcatggatggccaaacaaaaggcgattgcaattgaatatggcgattgggaagagtcgtatgcgaaactctcgtcatggctaacacacatgcaaaatcattctcctggctcttactttcaaatactacatgacgattttattgttggtaataagataagtcgcgaacatccgctgtntcatcgagtattttggacatttggtcaatgcaaag

SEQ ID NO: 101415 - DNA, 401 bp, Glycine max
  unsure (1)..(401): unsure at all n locations
tgtagagttatgtctcgcattggtttaatcgattatagccttatcgtaatcaattacacagttgtttttaagataatgattgatttatctaggagtctctactttaattgattaccatgtgttataatcgattacttctctttctataagtgttgcaaaagtgaacaagaatactttaatcgattacattgttcttgagctgtttctaggttttgggaagaacactntagtccattaaaaagataatctaatcgattacttcattgaattaatcaattacctggtaaatttaatcaattataggcgggtataactattttctctataaataaccaacttgtgttctcttcatagtacaacgaaataagcttctgaatgagctaagatcatgtgttgntatt

SEQ ID NO: 101416 - DNA, 331 bp, Glycine max
  unsure (1)..(331): unsure at all n locations
ccgcaatgctttttttcatgtcttggctaaggggcgttatacctaataccatactttcccacgatttccttgagtatatatcagggctanttatgcccgccgtttgttttttcctaaacccatctccgggttcaaaaaccgttcctcaacataactcgggccatcattaccgctgcatcggatagacaagggtgcccaaagagggagtccacggaggaaatgctgaccacctcaaaagactggaaagcagtttctaacgattcttctgccgcttccacataaagcatggaggatgggctgttannnagatatcttcctcgcctgacacgat

SEQ ID NO: 101417 - DNA, 456 bp, Glycine max
  unsure (1)..(456): unsure at all n locations
tgattcggtaatcgatcaccagtggttgtttctgaataaatcaaaagttgttactcttcaaatggtttctgactctctcaaattggttttaagtttttctaacagttataactcttcaaaatggctctcttgaccacacatgaagagtctataaaagcaaggctttgttntgtattctcaatcgatctttctatcaattcatctcaatcatatctttcaatcatctttcaatattttctttcatctctttcaacagatgctcagtttcatcttctcttcatctttctaagagtctttgttcaaaactttctcttccaagaaaagttctttgttaaaaaacttgtgctattcatctttttcattcccttctacctttgccaaaaagaattcgccaaggactaaccgcctgaattctttatgtgtctctcttctcccttnnttcaaagaacgaatgac

SEQ ID NO: 101418 - DNA, 393 bp, Glycine max
  unsure (1)..(393): unsure at all n locations
ttgttatgatgaaagaaatgacttccttactgaagtacaatacacattattctatcaatgtgaactttgcataaagaagagacgtgccgatggacttagacgaagaataaagtgagaaattcaactgttgtgagacaacaaatacttacaaatgaatatcatatatagaacgaactttgaagaagatagacacgcatgatctatgtgaatcattttttcttgtgaagctttgtgtaaattataataaatatataagctggcgaatgtctcttatatcttaagagagaagactcaaaatattgagtgatatttgcggttgtaagacgatcacataattcagtcaatatgcaatcattcaataantctgtctgatttgtgtatagccgaaaatga

SEQ ID NO: 101419 - DNA, 330 bp, Glycine max
ctcactttacatacatccttagtgttccacgatttatatcagccacaacttaaagttttattggaatgcctttggcataaaagaccaccctgtgtgataactcatcatactcactatgattatcactttggttaaaggcatccaatttgaaaagtttaaatgcttcatgtaaattgaattcactaagacagtgtatctcatcagctatggatcattaagcaccagctcatctttatgcgttattagtattctactacctgctccaaaatgatgaagagtattcacaataaatttgtatgagatctgagtcatgcacatcataaataacaa

SEQ ID NO: 101420 - DNA, 298 bp, Glycine max
ttcttcatcattccttgtatattgggctctccttcctcctcctcaatttcacggtattataatattaccctttatatctattggacaaaaattagatctggctccaagcgtgcttttgatgttgctctctaatcatcaatagaattctacctagatgagactccacctctgattggaaacactgtccaaacacttggaagatggaactgatatatttctgactttcaatctataaatcgtcagcatatttattatgacttttttgctgaagtaagatttgaatatgttgtggttaaaa

SEQ ID NO: 101421 - DNA, 468 bp, Glycine max
  unsure (1)..(468): unsure at all n locations
tagcgacacatgaaactctagctgcctcaagtcaatgtattacctgtcagtctaatagagcctctacagaacatggagtgtatctgtcttcagtatcacctattctcaganggtcattttcagctgtgccacatgggtagacactcccccaacatatcataacagcaacatggtatgaaccggttgatatcaccttaacaaactctctgttgagtggaacttcaaccatgattgctttatccctggcatgaggatgtcctaagtagccatagttggcacttcccattgctaaaaccttgcccatgttaatgagtgctacagtcaacattcttccacatgacacttgtacaaaatcatagcccacgagttcgtgtaacacgtgattggacaagcatgcttccattatcaacatgaccaagcctcctctcgtctccatcaccccatgtgaacaacttaccactagcacta

SEQ ID NO: 101422 - DNA, 439 bp, Glycine max
  unsure (1)..(439): unsure at all n locations
tatcaagcaagcttcagtgttagcgacaaaaggaaagtgcacaaacctaacctcttgaaatttcattntgcctctattatgtttgaattgctaacatttaaatttaagataaggacataaagaaaggaatgaacaaaggatattcctcttgggtcacttcctcaaaaagaagatacaaatgcagttgtttgtactttttntgttgttgtctgactctgctattcctctctctaaccaaagcatgccatgttgctctatgcctagatgtgagacaacggtcatatcaagaaagcgagcatggatcccacaacggatacttcactaaagtctatataaataaagactcaagttataaagtgaagtanagaagtgaaatatgaagtgaagcatcaaagtgaaagaattgttntctacaagtcattggacaatacattctata

SEQ ID NO: 101423 - DNA, 206 bp, Glycine max
tattacggacctttaaactcagcttgccttgtatggaaaacatgatgccttgcatgtctttgggccccacaacgggaaatggagaatgccttagggtctctctttggcaatataaacccagctccaaactcaaaattgagcccacttgatcagccctatgcattaccatttatttggctccggaaaaggatgaaattggaggattg

SEQ ID NO: 101424 - DNA, 432 bp, Glycine max
  unsure (1)..(432): unsure at all n locations
cttaagcgactgggctgcagcttntgttcatcaagtggagtaccagatttgtggtatagtcttacatcataatcaattagagtagagacaggtttgctccctaacatgcctgcatcatgcaatatatcaagaacatattttctttgacaaatattgatcccttgtttactgcgagccactttacatccaagaaaaaatttcaagtcaccaaggtttttgattctaaaaacttcatccaaaagctaagtcatggatttaatctctagaagatcattgtctgataagacaatatcatctacgtaaaccagtaaagcagtagaagactaaagatgttgcttaagaaacaaagaatgatcagaagaacactgtctataaccatgtgagatgaggaaagtggaaaatcgagcataccattgtctactggcttggtta

SEQ ID NO: 101425 - DNA, 334 bp, Glycine max
tatgctgtctatttcttatgcttcaagcctcacactaaagggttcttttcctttgatctttccactagagccacaatggtgtctagacatgtcattttccatgaagactgcttcccttatgcctctcctaatgcctctcaatatttcccatatttcttgtgcattcctatcctaccatttatgatcatgctaaggaattgggtttttcttaaccaccttcacactctactatccctgataattctcagtcacctaacactcttgttgatcattcacaaataagcctctcaaacacttctttagatccaatcaattcactagatattgtgctctt

SEQ ID NO: 101426 - DNA, 442 bp, Glycine max
  unsure (1)..(442): unsure at all n locations
agcttgtgcanatcttctacagttagagtgttaacatgcattcctcttgaacccttacctgccactctttcatcatgttgagactcgggaagcccaacagggtttgtcttttcaatgtactctgaatagaattcaatagcttcttctgcaatgtacctttccacaatagatgcttcccgatggtgtagattctntgtatacccttttaagatcttcatgtatcgctcaaccgagtacatccatgacaaataaacaggaccacaacatttgatttctctgaccagatgaacaattaagtganncntgatgtcaaagaaagtaggaggaaaatacatctccaactaatacaatataatggcagcctcgttttccagctcatctaacttgacaggatcaaggactntgctacatatggcattaaagaataagcacagccgagtta

SEQ ID NO: 101427 - DNA, 309 bp, Glycine max
  unsure (1)..(309): unsure at all n locations
cgtctggtttatgaatgtagcatatagatccttagacccttacatgctttgctgatggcttcgtcccggtccaagcttcaattggagtcttgtctntttcagacttagttggacctctggtgagtatgtaaacctcatggtagactgcttcagcccacaatgggataggtagncccttctccttgagcatcgatctagccatctccataactgtgcgaattcttcttctcgacactccattntgttgaggagaatatgcgactgtaagttgctgctcaatgccttcattctcacaaaatctttccaact

SEQ ID NO: 101428 - DNA, 361 bp, Glycine max
  unsure (1)..(361): unsure at all n locations
caattgaaccaattggaatctggaacttaccagtgttaacaccatctgaatcaaccgatttttacgcaagaaaatggtttaaacacaataaacatggaaactttnttctattaccttatatgcaatggttcccaaagaaagctaattgcataatggatacaataattatagaaaacccaatttaaagaccccaattagttgttgaaaccccacaaccacaaccactcaacacgaagatttgagcctccccaaatctaacaagctaaataaggaaaacgaacaactcgaactcataaattcacatataataaatcaacgccgattgatgcacaattatccacacaaaaaagggtaaaaagac

SEQ ID NO: 101429 - DNA, 452 bp, Glycine max
  unsure (1)..(452): unsure at all n locations
cgttgggtaagctcacattggcatcacccgcaaaataaactgacttcatgtaaggcagtctgcaaccacgttgcataactgacgacctaaataagttgtcatgtgaaacaaattttgaaaacttaaatataaataaagtctaactaatttcgtcctattccataatatcatatgtaaataaaccttattcaccaaacaaaatatctaaaatatccttaattaataagagttttatttttaactacgtttttatcctgtgcagttaaatgtaaatgatactttaagaaaataattaatctttaaatgagactattaaaattaaatgatgttaacttatntttttaattagcatgtatattttgtttcttcttatatgttagacttctcaatgtagcgttggataagaaagttaaataatttaaacatacacaataaggaaatattaatagtat

SEQ ID NO: 101430 - DNA, 346 bp, Glycine max
ctcgcttgtggagctgctctggccgctggatctttgagcttcattgtggtcctactatggtgataatacaccacggttatgcttcggatggcggacgataagatgggaggggacgctcgattctcttgtggtgacactttgtcgaatgaactatacccccgcgaagcgtttgtcataagcttgtttgagaaaagcctctttataactctctttagccaactctctctgtgaggctctgcttatctatgcgccaccctgtccttattaagctcacctgcctgggttacatccctgatactactcctcaataatattgagtttagactcacgttcctctctgatatct

SEQ ID NO: 101431 - DNA, 477 bp, Glycine max
  unsure (1)..(477): unsure at all n locations
ggatcttaagcaccgcggctgcagctttgcttccattctccctctttttgatgatgacaacttctgaaatcaagaaacacatgcacactttttcctagtcgatcactcttataaatgctccccctttgtttttgaatttatgcttatcttaaaaataaatttgattactcatgtgaattcttgatttaatcccatttctctccccctttggcatcaacaaaaagccaaaatgcgtattaaataaatntaatttaaaactccatacaatgttcataaaaaaaacaaccaaatcaagaagcaagaagcaagaaccatgaaaccatgaagcanacaaccatgcatagatagattataaactccacatagtcaaataacatacttaataattgttcaaacaccatagtaatatagagatttattttgataagtcattaacatctattagtcctacatctctcttatgttataaaaagtatc

SEQ ID NO: 101432 - DNA, 61 bp, Glycine max
  unsure (1)..(61): unsure at all n locations
tatgagaactcacactgccganataccggtcaagaatctncactnaatgatgaattatttc

SEQ ID NO: 101433 - DNA, 313 bp, Glycine max
ctcaaaacgtctgcttattttttatagactctgataatactggatcacctaagtgcttattctgtctatggtcttgtctacgtctttcacaatgatgaatgtgtttcgtacaaattgcagattaacgaagctctttcacaaccccgattaagaatggaatgtttgactattcccacattctactttctctaacacgaggaaagaaagtcaaactcttactctgcttatcaaagcacttgtgcatcttttattgtattgacttgaaactccaacattcatggttgaggtgccaggtttagctaactatatgcac

SEQ ID NO: 101434 - DNA, 431 bp, Glycine max
attacggaccttaaaactcagctttataaaatgtgtgcagagatgagtaacacagaataatgctctttaggatgaaataatgactactcatcactgaaaagaaataaaatgcctctttaacaggcctaggcacttaaagattcaagccagaggagtcatacacacatacgactatgaaataatctctcttaacatcttctcgttgacataccaagttcttcaaaagttatccactgagtgattcttagagtgaacaccttttatcttctgtaacccattgtaagcactgcgagtgctagatttgtgtgaaagtcgttagcctaaagaggctttccaatagcaatcaatactggtgtaataacccaaaagagacctatttgataaagaacactatgtctttggcctgagcactcgagagtctattatgaaca

SEQ ID NO: 101435 - DNA, 385 bp, Glycine max
tcttggatggccttgattttcttagggtccacttggaccccatttctaccaactacaaaccctaagaaaactatattatctacataaaaaagacacttctctatattttcatagagggtgtttttcctaaggactgaaagaactttcctgagatgccctaagtgatcatctaggctcctactgtacactaaaatataatcaaaataaagaactacaaatctacctatgaaatcccttaagacatgatgcataagcctcataaaggtgcttggtgcattagtgagcccaaaggcatcactagccattctacaaaccaaacttggtcttaaaagtggttttccactcatcaccctctttcatcctgatttggtgataaccactttta

SEQ ID NO: 101436 - DNA, 416 bp, Glycine max
  unsure (1)..(416): unsure at all n locations
atcacatgtggtactaagtgtgtgtctttcgatggtgcacaacatgtgtggcggattcacaatgcgcgcataaacccaccatcccctgtagcccacctgcaactgagctcacgtactcccacgtagcccatatacctcgtttgtctcaacaccgtgtccccatcaatgctcccaagcttccccaacattaaagtaatacaacattcaaacagcacaaactatcacagccaagaaaacagagcaaaggcagaaaactctgccaaaacaccaaccaaaatcacagcttttctcacttaaagaccccagtaacaattccttcgttccaattcgttaaccggtggatcgactccaaatttttactggaagtctctagtacataagcctacattntgacgcgtgggatctactagctaaca

SEQ ID NO: 101437 - DNA, 380 bp, Glycine max
  unsure (1)..(380): unsure at all n locations
tctacaantctggcaaggctcaagctataggggtcagcaatttctctgtaaagaaacttcaggaattgttggatgtggcaagtgtgcctccagctgctaacccaacggaattgctcccttcattacaacagccataattgcatactttctgtagatacaacggactgcacaaactagtgagggtgcaaatttaaatccaaacatttatgcatgctacatgaacaatgattttaagatcggaccagtgattgaaactagttcaatggttcgactgtagttgaatcggttttatatttcttaaatataatataatatttcaactaataaaataatatataattaaaaaattatcactcaatctccatgattaaattatatat

SEQ ID NO: 101438 - DNA, 345 bp, Glycine max
tgcatgaggcgcttatcgggctctacaaaaaagactttgttcttaacgacacaggagtgtctcgtagcggaaactgctgctgtctcgagctcgccaaaatggcttagcgaacaggaatgctccgcatagcgcacggctattaccacaaaaactggataagctacctaggcttaacgattcagccttgcttatccacaggtcgattagtagaaggatgagtgttcatcctcaacagatgaactcacttagcgcgcttagtgaaggtttcagataaagcttatatacgatgagctttgatgaacacccttctagccgtatgctcctttcacgagtacatactgttat

SEQ ID NO: 101439 - DNA, 439 bp, Glycine max
  unsure (1)..(439): unsure at all n locations
ctctatggggctggtttttgattcttaatgagggccttcaatggagagtttccaccatggagatgcaaccgaaggcaaaggagaagatgagaggggaggcaccatccactaaggaataaaccatggaagaaggagcttcgccaccaagaatgtgccttggataagaagctnggagaggatgcttcaatgcacgaaaagaaagagagagggaaagagagagttgggagcacaaaattgaaggaggaaaagggggagagaagttgaactttgagttgtgtctcacaagactcccattcatcaaagttacaacaagtgttacacatgcttctatttatagactangtagcttccttgagaagctntcttgagaaaacttccttgagaagctagagcttagctacacacacccctataataactaaagcttacctccttgaga

SEQ ID NO: 101440 - DNA, 362 bp, Glycine max
  unsure (1)..(362): unsure at all n locations
gctggaggtggattctctnttagtcctcaagggctttagtgttatcaatatggctttcttaggatttaagaaatgtctggatgaatactctattctattgtggcccaaatggagttttgtgtctcccatattttctgagatagtaatgtatgcgctaactatggtgtagaattactctattatgttggaagataaactctgaatttggatgaggtgtacaaggggagatacttggtattgcaaggacagaaaaataaaggtaacctttgttatttggatggacaagccttgaagagaaaccatgattgcaaagtgaagaagaaaatgatagtttctaatattgtacaagtgttgtgagatac

SEQ ID NO: 101441 - DNA, 408 bp, Glycine max
  unsure (1)..(408): unsure at all n locations
gagcctgagtagtcgaagagaagttcaagtccatagccctcaaagtctgaaaagagtatgatgaactaagggacgtcaatatggccactgctgatgccttggaacgagaaaccaagaaggcccaaaaggaaaaacacgtgccagcaaaagtttgaggggctttatagggcagcaatagtaagctcaagctccgaagaggtgaaaggaatcatcacgggtcaaaggcatgatcttgaaggacgagctaaaggcttaccttangtcgaaaagaaatttgtcccaacagttaaccgagactgaagggaatatgtgggccgtcatcgatgagtgcaaagagaagctaaatctagcggcgactcacgagcaaaggctagaggatgagtacgccaagatatcagcagaaagcga

SEQ ID NO: 101442 - DNA, 470 bp, Glycine max
  unsure (1)..(470): unsure at all n locations
gtcctctaatccctcttgttggactagacttagaccaaacagcattattgttacagcatacttaataccaaaacttaatccgcagattcctcttgtaaggctaagtttcaattctgcttcattcaagttcttaggcaacaatacatttcccaatgctaaagtcacctaactatgcacacaaatgggtgatcagaccaagagcatacggaatttaagcactgaaagaagcattgaacacaagaaacacaatcaattagatggtaaaataattacatcagctgttctttagaaatccccaacaagggtgtttagccagccattatagaagaaaccctaacaataatgagcttacaaaacctaggtatatctgcaaaaggtgctcctcttgctgcctccagagctctattcccgaaatangaatngangtgttctttggaatgttgtaaaatttgtgtaaaagtttgtaccct

SEQ ID NO: 101443 - DNA, 413 bp, Glycine max
  unsure (1)..(413): unsure at all n locations
agagaaagagagaggggggagcacaaaattgaaggaagaaaaagggagagaagttgaactttgagttgtgtctcacaagactctcattcatcaaagttacaacaagtgttacacatgcttctatttatagactaggtagcttccttgagaagctttcttgagaaaacatccttgagaagcttctttgagaaaacttccttgagaagctagagcttagctacacacacccctctcataactaagttcacctccttgagaagcttccttaagaagattcctaaagaagctagagcttagctacacatacctctctaatagctaagctcacctncttgagatgagaagctagaacttagctacacaccccctattatagctaagctcacccccatgacanaaaaaacatgaaaata

SEQ ID NO: 101444 - DNA, 466 bp, Glycine max
  unsure (1)..(466): unsure at all n locations
gctggagaggctaaccttctaaacgaaatactcttccancttagaatttcatttggggcggttcctttgagtttcccgacgttttccacaaataaacattggtggcgactccgcgcatctttcctcctttggaaagcgcacccgggagcctcgcctcgatcgcccgcaaaagggcacattgcgacaaggtccaatgccttaatgtttctctcttctcataaccaagagatcgttaaagatccagtcccttaaatgtntctctccttttaaaaaacaagagatcgttaaaggtccaacgccttaatgtttctctcctcccaaaaaagagatcgttaacggtccaatgccttaacatttctctcctttcaaaaatcaagacatcgntaaaaggtccaacaccttaacaattctctctttcaaaatcaagagatcattcgaaagggtccagtgccttaacaattctctc

SEQ ID NO: 101445 - DNA, 333 bp, Glycine max
ctcacagctgcaacattcaaaatcaagcgtctcgatatgctacgggactcaatccgacatccgagaaaaagtaatggcgtcagataggctgagagcctcaaccttccattgcaagcgtctcgatatgtaacgggactcactcaaacatccgacaaaaagagtatggccgtatgtactggctaagagctgcaacattcacattcaagcgtctcgagatggtgcgggactcaatcggacatacgtgcaaaaagggatggacgtccgatcggctcaaacttcgacatcaagtacaacggctcatatgtacgggatcaatcatcatccgatgaaaag

SEQ ID NO: 101446 - DNA, 430 bp, Glycine max
  unsure (1)..(430): unsure at all n locations
tcctctgccgtganatagatattatcggccagtgtttgtattatatttgcgcactgtcagctgagcgaaatccgtctgggctatttaactgccgatggccgctatcgttttttctattccacccctgaattatatttggatgatgcctatcacgaaatggtcggtcggggtcatccggtcatgcgtcttattgaggcctcgatctgtcgtctttcctagccggccgacgtctgctagcatttctttcgatcaatatctgtgtgaatcaagttctcttatgctcacgagggctaatgttttcgtggccgacatcatgagaacatgccagtgtcaggcgacacactatccctctctaggaaccctagcccacctacattgaattatttcacgatttccgagcactaaactcatctacatgagcataattatc

SEQ ID NO: 101447 - DNA, 378 bp, Glycine max
  unsure (1)..(378): unsure at all n locations
agctntggcctgtaagagcgtgctgctttattacttcttccgccaacgcatcgnagtcagcgcctattggctggtgattggctacccacggataatgccttcttatggtggctgacgcatccaaacgggtaacgacggctggcacaggtctgtggcagacaactatgaattcgccatgcgtaacgccagtgtggatgttacgccgggatggaacagaatgcctgccggagccagcttctgtgtggcggtgccgtatccacacggcattgccgaagagatgtctttgcacatcacccatcaaaacgacaagctgaatggggcgttagactgtgccgcaccgctgtgctggtatgaatactcatgatagcaaaccccgct

SEQ ID NO: 101448 - DNA, 362 bp, Glycine max
tctccggtgcgctgacgatggtggatgaatgcaactgatcttgtgaactccggccgaacactttaacatcgacacgatcacctgcacgatatagcgtgcgatcatgaaaaatattcaaacgggtgttgtagatttcactttcttataagaagatctcggagacaaaaacgccgccttcaacgtccttactcagaacgtatgaacgttctggcgatatatgttgtaactgcaaggtaccgctgtcatcggtcacaccgcgggtcatcacgccaagaccgtcattccacaagatctctgagccgggcttcgcttcacccttgtttttacccgcggtccacaccagaagctctttgcctgacact

SEQ ID NO: 101449 - DNA, 327 bp, Glycine max
tatagcttgtatgtgtatcttgatttcacgcttgtcaccatcaaaaaaggtgagattgtagaagcaagcttcatgatgatgaaacaagaaattgtgaagatgccaaaagcccaagtgattgattcaagacttcaagatcaagcatcaagaatccaatccaagattcaagattcatgagaagaaatcaagaagcaacaagtcaagacttcatataggataagtattaaaaggagatttcaaaaaccaaatagcacagttttgttttacaaaagaattttctcaaattatctaaagttaccagagtgattactctctggttatcgatta

SEQ ID NO: 101450 - DNA, 439 bp, Glycine max
  unsure (1)..(439): unsure at all n locations
ctgacanagcatgctagagatattttagtcctttttatttctatgattntgttcctgatattatttgtaatgctgcgacagctgatctagctcaaaatcctcaaatcaattttcgtaaaggcttataggttttggttgaaatataagggtcaaatgaaatttcatatttgataaaaatagaaaaattaaacacaatataaataaaaaaaaatcactgtttattcctcttgatttcctaacaagtttcttttattattatgtcattgaccaaaacaaaaaacattcatcttctccaaaatttatacaatggaatcatgaaaaaggccttgtgctacgtattgagaaatctatcaaacatttcttccttcattcgtttctctaagtttcaccctattattaatttcttgaatatatttgtcaactagaatacctttctgat

SEQ ID NO: 101451 - DNA, 449 bp, Glycine max
  unsure (1)..(449): unsure at all n locations
agcttgttaatcattaaaatcatgttttcttttcatatggaaattacgcaactcagagattttgagttgaattgaacacaagaaattgaatatggagctatagaataattgcactagtccagtcttaataccagacagtgctgtaaaacaggacagtcaaagaaattaattgatctattgccagagctggaacgatcatttccatttacaagtttaggtaaactttaggcacacgcatatgttggataaattattgatgaacaaaatgtgctgaaggtaaaaagaaatagctgtgacaaataaaccatgtattaaagagatactagtacgaatattgagtacgataagatacatgtgataattttttatttattaattacttatantttataccaaataaaacataattatatttataaattacttatattttattaatttttttcttc

SEQ ID NO: 101452 - DNA, 368 bp, Glycine max
agcagtctcctctaggtcgataaattcttcccttttctgagcctcaacaattgcttttttctcttctgctaaccggtggatttcagcaattttattcttcattttttcaacatattcggccttctttttttccatgctttcctgataaaagaatttcttttttaaagtaacatacagctaatttataaaaccaatcatattgatgcattaattgaacataagtctggtgacacacagaagatccaattctcttgccaattgtcatggctagctaacaatcacagtgttcacgcagaaaaccttcgagtttaatagttaatcacctcaatcttcttgagttgtgcctctacggatgctttcttgctatc

SEQ ID NO: 101453 - DNA, 245 bp, Glycine max
ctgctgacccccgcgacatatctccaggtaccactctgaggacaacgaatgaacgcatgaagcaccacccttctacactggctcatcacaagcttgtatgacttaggggaacccatcacatggtgcactaagtgggaggaaggcgatcgcgcacaacacgtgtccacatccacaaagtgcgcataaacccaccatcccctgttgcgcacgttcaactgagctcacgctctttcacgtagcccata

SEQ ID NO: 101454 - DNA, 52 bp, Glycine max
gctaaatgaagatttgatgttgacccgctctccttttgctgatacttctact

SEQ ID NO: 101455 - DNA, 236 bp, Glycine max
cattgctttacttgcagattaaaaatgcatttgtcccagaaacactgtcctttaaaaataaaggctgatctttgatgcttctcggccggagctcccattctagcatggctcttgaaagagggacatccgaaagtgccttacccttctctctaacaccctactagtaaatgagtcaaatgcgggaacgcatgctcgatatacccactattttctggtaagagacacgacgtatacct

SEQ ID NO: 101456 - DNA, 402 bp, Glycine max
  unsure (1)..(402): unsure at all n locations
ttcagccccttaggcacttctctctctttcgaatntgcttaggaaaattgtttccgtgaagaaaatccaagccgaggcgcttccgtaacgtttccgtgagtgatttcgtgaaggttttcgaccgttcttcgacgttctttattcgttcttcatcgttcttcagtcttcaacgggtaagtacctcaaaccaagcttttcgattcattctatgtacccgtggtggtccacattntgtttcatgtatttttattctcgtttcatttattttttataccccctcttgacgtgcttaagccattttatttaagtcatttctcgctttaacctaaaataaaataaatttccaccgatcgtttgaattgtattatccattaactttggttgaaatgaatttcgaccgat

SEQ ID NO: 101457 - DNA, 479 bp, Glycine max
  unsure (1)..(479): unsure at all n locations
tctaagctttctcctaagctgaatcctacttgcatcctacattatattaagcgaaatcatctatcctatggtccgagaaataacaatgcaaatgaacgatgcaagagaacttacttggattatgtctgtgcaaggaaatgaatcaagcagatgcaatgtatgatttggaagcaagaatatgcagtagcagaggtagaggtaactttgggtatcacccanagtgcctcatcctttggcttttttttaaaaaaaactgaaattcgcatggcgcgcctccagagcttttttcttgaaataggcattgtggtgtgctctgacttctatgtgtgatgtgtttctctggattgttgccctaattctacataagacaggctttaaatatgctctgaatctgcgatgttgcgcttagcgccaccctcgcgcgttgcgcgagtatatggatttgagcttatcaccagtcatgcactgagcctgactga

SEQ ID NO: 101458 - DNA, 409 bp, Glycine max
  unsure (1)..(409): unsure at all n locations
tgctgacaataaccgagaagtccgtggatctcctcgggggtggagtaggtgtccgccattgctttggccttggctagtaatcggggaagttcttgactcccattcaaggtaagagcaaaccggtcaatccacattgttgcctcttgatgtaacgagtcgatcacccttcctctagcctccttttctgcgtacacttgggcatacttgtctgccactctatgctcgtgggccgtggctagatatagttcttcttggtacctactgacgatggctagcatgttggtctctgtttcgcataaccgctgagacaagtttcttttggacctcgagcaaacctttaactcatctnttaagatcaaactgtctactcgagattggtccattatctctctccggagcttaagctcac

SEQ ID NO: 101459 - DNA, 394 bp, Glycine max
tctatggaggctggatctttgagcttcaatgaggttcttctattgtgtatttccaccatggagatgcagcagaagaataaggagaatccactatggaataagccatggtagaaggagcttcaccaccaagagagtgccttggataagaagcttatagaggaaacttcaatggatgaaaataaagagagagagaggggggagggagcacgaaattgaacgaggaaaagagggagagaaagtgaattttgaaatgtgtctcacaagactttcattcatcatagttacaaccagtgttacacatgcttctatatatagcctaagtagcttccttgagagacttgcttaagaagcttccttgagaagctcgcttaataaacttccttaagaagcttct

SEQ ID NO: 101460 - DNA, 295 bp, Glycine max
aagacccttatcacaacacaacatttttcccaaggaatggagaacactaagggatttctctatggacaacataattggagacatagaaaagggagtaactactaaacactctttgaacttgttttgtgaacatactgcatttgtgtctcaagtagaacccatgtctatagagaaggcacttaaagatgagttttggataatgtccatgtatgaggagttgaaccaatttaaaaggaatgatgtatgggaattggtatcttattctaaagatatgaacaccattagcactaaatgg

SEQ ID NO: 101461 - DNA, 437 bp, Glycine max
ctcagctgtcaacaattacatttcctattatgcagggttgtgtgtttcatttaaaattccgtgtttgttgaatggtttgaaatgatcgattgcatgatttgagtgaagtgtaatgcatagattatatgctttgaatgagcatgcaacgattagaagagaaagaacatggattatgatcatgacttgaaatgttagttagtttgacagattgattctgaaggtaatcattagccacaacccggtgagtgtgtgatctttaattgtgagagaatgactagcatcgagtaatgatttttgcatgacattctgattatggaatgaatgcctgagttgaagatgatgaaggccatgattgattgaaacatccacttagccaaaaagcttaccttgtgaatgaataatatatcccttgcacccatgttgagctaaaactttga

SEQ ID NO: 101462 - DNA, 264 bp, Glycine max
aattattaatggtttcggacctcacaacactctactcacgtcttttatgatggtaggacacctcctgtttaatgctcctaatagggctttggtgtatgtatatcctcttgccttttaccactcgtgttacctcttaagttcctggatggaccacattatacacacaacgttatatagataaaaggagagcaatattatgatcacaaacggatttgatttgggaaacaacatggacttgattggatataatatattaatttggat

SEQ ID NO: 101463 - DNA, 481 bp, Glycine max
  unsure (1)..(481): unsure at all n locations
aatgcgaaagcnccactccatcattaggattagtacctgacatctcatacaaacaaatcaaacgtgataagacaattatagttgttgtttgaatacctcacccactcaagtgtatcacacaattatggcttttctctaatgaaacactcttgccttttaccactctaattccccttgagttcttaggcaattcaagagattatggccacaacaaagaacaattcaccaatatgtgtaatgtaaggctagagagacaaggaaaaggttaaccaagataaaggctaacaatgtttttaggcacacatgaaggaaataaaattcagaatttatgaattcaagtaacaatccttcatgcaaccaatatattaccttaaagagattnttttaaagttcttcaagcatgaaccattcagcccaattttttttttnntttaattnttgattatacaaaattctgcttcttttttttttttttttatac

SEQ ID NO: 101464 - DNA, 453 bp, Glycine max
  unsure (1)..(453): unsure at all n locations
agcttgaagaactacaaagttcacttgaatacatgatcaaagattaagagaaaggaatcctgagaagcacaatgatcaagccttacaagcccaaacaagcagaaaatttgacaagcaaggagacaaatccaaaaataaaaaaggaaagtggcatgatgagaagtggagaaagactgaagattcaaaatgtggtgattctggatcatcttcacagaaagctgtgtcaaatccaagaagccaattctcagggaaaaagaaatgggtcgacaagaagaaggtgcagtgttacaactgcaggaactntggccattttgcagctgattgtagattcagtagaggatttcaagtgaaaggtgaagaagcaaggttggcacaagaggagaatctagaagatgatcattatctgctgatggttaccaccaaaaatgatcttcagtgtgctaacttctggta

SEQ ID NO: 101465 - DNA, 406 bp, Glycine max
  unsure (1)..(406): unsure at all n locations
ttttgcctcctgtgtgaagtanaggtgacacattatccaatgcttgccgggcacgggcctctatataccatgagtaatgcaatgcaaactgcatcatttaagaagtttatcagactataaagtgcaaaccaacatacaatntcaagatggatagaacataattgtattcaatgcaatagtctaactgcaaacattatgctgattttgcttgtactgacaaaacagtatgggtgttttgcatattgaagggggaaacaaggtagttatgaagaaaaaaatggtagacatatcaacaaataatggtttatttaattcgtatcaggacaactgtagtggaacgagggttttgcaagaacaaaattagacatcaaattaatcatcttaaatgaactaaagaaatgttaac

SEQ ID NO: 101466 - DNA, 442 bp, Glycine max
agcttcatcaaggtaaggagaacattttttttcttgaaccctaaccttgttgtcttttaaagctaggcttcattacatgttgttgagatgtttaaaatttcgtatatgctaccttgaccggaattggacgatatgttgtttttatggaagttttaagtttaaaaatgagttctaagtgttaaaacttagggttaaccttaaatttcacttaaatcggagttttctagcaaaagttatgaacacaactagttttaaggatattttgtaggattataattgtcatgaaataaaatggtggttatggatgtatggactgtttttcttaaagagttgacttcaaaaatgagtctgttaggtgtgaaaatatagggtagcaagtaaaatttatgtaaaaccaattttcgaaacacttactaatttgaagacaagtttaaaagtgaaa

SEQ ID NO: 101467 - DNA, 463 bp, Glycine max
  unsure (1)..(463): unsure at all n locations
atcagaactagatgagtcttttgctgatctacgactagacgacaactctatagcaaccagntcgtccaaataaaatctagatatagaagcgtccactctacaataatttcaagaagcatccactagatgcatcatgagaagaaataatgtagaaagtcaaattattggtgatctagcagatcatgttcatacaagatcatcagtcaaaacacaaaaacacactacactgatttctgaaatggaacccaaacacattgatgatgcaatgcaagatgacaactgggtagaccaacacaagaaaaggttgattaattntagaagaatgatatttcgaaattagttgaatntccaaaagaaaagaagactatnggagacanatgggtctttcgcaacanactatgcgaaaatggtaagggtgtatgaaacaaaccaagggtagttgctaaaggatactcacaacaag

SEQ ID NO: 101468 - DNA, 247 bp, Glycine max
cataccgtagggaaaaacgcagtggagcaacactgaaccatcccacacacgacaatgaggcggatgctacggcaagaacaccacaaaatcagcactacttggggccaagggaggtcataatccactacgaccaccaaaggtggaagccctcgaaaacgcaaggcaaaaggcaaaaaaaacacgccaagggggtcaactacagggagacgtgccaacatatgagcaagcacaagaacggcaagaaaaa

SEQ ID NO: 101469 - DNA, 449 bp, Glycine max
  unsure (1)..(449): unsure at all n locations
agctngtcacatgtagatcttatggtattgattttcttagnnattagaaaaatgctagcatgcttatctctaaagaaaacagaggaagctttgatgatgcctaaaaagatcttttctccaaggtggtagctgtagatatggaatggccaacacaaaaaaatagaaacaaactttcatctacctaagcttttcacatgcacaacaatgtctcaaggaatcagtgaatctaatcctcatctacagtgtcaaccattttttaacaactctgattggactgtgatactaagtcgtgaaagtaaactcagttaaactttctaaggtacccaaaccatgtaattgttttaccatatatttagataaactcagcagaattccccaacagatgggtttagcctctcatcacatggaagcacctttaacaatcaagaagtgggcttttagagaaaaca

SEQ ID NO: 101470 - DNA, 384 bp, Glycine max
cctcatgtctcccaagtcttagattgtttctcttttcatccttgtgtccggactctcagccacttatgataaccaccgatgatcccattactgcttcccctaagctctctgtactctcttcatgcacgcatcccatgccttgcgaactccatggagtaccattgcatttgggtcactgaaaccccgtgtaatgacaagcgtgatgctttcgtctaatggcgctcctctcatggggtagccaaactgtcttatggcgacgacgggaatataattaatacaaccccgtgttcccatccagggaacatatggacattcttctcatgaagatacaatactgattctgcctttcttctagcgagggaaccaatgaacagacgtccctca

SEQ ID NO: 101471 - DNA, 407 bp, Glycine max
  unsure (1)..(407): unsure at all n locations
ttctatcaatagacctccaatctttaatggagagggttaccacgactggaaaacccgaatgcaaatttttattgaggcaatagatctaaatatttgggaagccatataaatagggccttgtatacccaccacagtagaaagaattacaatagatggtagttcatcaagtgaaagcataactatagaanaacctagagatacatggtctgaagaggatagaaaacgagtacaatacaacttataagccaaaaacataataacatctgccctgcgaatggatgaatacttcacggtttcaaattgtaagagtgctaaggaaatgtgggacactcttctattacaaatgaaggaactacagatgtttaaagatctatgatatatgcactaactcatgagtatgaattatt

SEQ ID NO: 101472 - DNA, 432 bp, Glycine max
  unsure (1)..(432): unsure at all n locations
tgcgcacgagctacgacgtngtgagtatttatatattatgacgcattgtaatcgattacaggtgttggtaatcgattacaggcccaataagccttctggtaatcgattacaggatgttgttatcgattacaggcggcctgttcatgtgtaatcgattacactgattggtaatcgattaccagagcctatcctaggctagtttctctaaaataacctatgtttatgctaaatacatctaacactatcaatcatcatcactaatatgtatttaattcattcaaccaagtatttatcaaacaattaacacacaccaatcaaatataatcaaatatttacaattaaacacacgtcaacaaaagcaatcatcaaaacataatctaagacaacaatccacataactatcaatcataaacattaatgacaatcaaatac

SEQ ID NO: 101473 - DNA, 451 bp, Glycine max
  unsure (1)..(451): unsure at all n locations
gatcttacagcacctgngctgcagctgctctaaatacattgatttttgtttgatgggaggaggttacatgccattnttgctttaagagtaacgtcccactggtaaaactaactttccaaatgtttgccttcgcaggaatggccccgaagaagcttgcctcaaagaggtccaggaaggacaaggcggccgaaggaactagttccgccccggagtatgacagtcaccgctttaggagcgttgtacaccagcagcgcttcgaagccatcaagggatggtcgtttctccgggagcgacgcgtccagctcanggacgacgagtatactgattttcaggaggaaatanggcgccggcggtgggcaccactggttactcctatggccaagtgtgatccanaaatagtccttgaattttatgccaatgcttggcccatagagganggcgtgcgtgacat

SEQ ID NO: 101474 - DNA, 409 bp, Glycine max
  unsure (1)..(409): unsure at all n locations
tctgatgtctgattgagtcccggaatatatcgagacgctataatcgtatactgaagctgtgagaaaattcaaacgataataactttctactcaaatgtccgagtgagtcctgtaatatatcgaaacgctcgaaattgaatatggaagcttgagcaaattaaaccacaataactttttactcagatgttcgatcgagtcccgtaatatatcgagacgctcaanattgagaaccgaagcgcctagaaaacttatacaacaataactttttactcgaatgtctgatagagtgttgtaatatatcgagacgctcaaaattgaatacgtaatctcctagataactccaacaacgataactttttacacgaatgttcgattgtgtccctatatatatcgtgacccttggaattga

SEQ ID NO: 101475 - DNA, 408 bp, Glycine max
  unsure (1)..(408): unsure at all n locations
agatattaacctatgaatactaatgatttacatggaaaagtataggacacatcacgtggaagcattatgggaataacttcctatactttagctccatttatgattttcgtccactctacattgtatacctattttaaaaaatagtaatattcattgtgcaacgtgttgctaataaaacaaacattgaaaaatagtagatcatccactatgcttttctaacacatccaaaaggactcttaaacacttacataaatatttctatcttttataagtatagtccaaaaaccagtgaatntgttcatacaaaaatatttctgctttagattgttccttattgcatgattaaactaatgtttgaatctagcattattaaagataaatntagaaaggatatattcaatatcaatc

SEQ ID NO: 101476 - DNA, 411 bp, Glycine max
  unsure (1)..(411): unsure at all n locations
cttttcaatcgctggtagggtgatagatttcaaaatcatctataccgagtgtatactagttttcttccatgttttagttgtacgtagtttatgtcttcttgaaagatanggtatgcacgatggcccttaacactatatccactcaaattctcatattctgaaaagtcattaatggtataaaaaagcattgcccgcaacttgaaaagtctcattcaatacccatcaaacatggaaaccccatcgtgccacaactttgtcaagtcttcaatcaagatattgagataaacatccatttcttggttgtcttgggcccggtatcatcatagacaacatcatgtatttttgcttcatgcacaacaatagaggcaagttgtaaattaatagcaaaacagggcatgaactgtgtggagt

SEQ ID NO: 101477 - DNA, 315 bp, Glycine max
agctacaattgtttaatccgcccttttttatcaatcaatctgatagatagggggatagactagatgaaatattctgatgagatcaatctaatatatctagataagatagatctaatttttagaataaattagctgcctcttcaagccagcccaatctagattaagcccatgctcattaattcctgaatagataaaaacataaattagctgatgggccaaaaataaattgcctattatgacattagaccaatcatattaaagggcaaagggttgaaataaaaaagaggccatacccgtcgagagagtcgagttctg

SEQ ID NO: 101478 - DNA, 408 bp, Glycine max
  unsure (1)..(408): unsure at all n locations
ctttcgattcattctatgtacccgtagtggtccacattgtgtttcgtgtcattttattctcgnnttgtttactttttataccccctgttgacgtgcttaagccattttacttaagtcatttctcgcttaacttaaaaataaaataaatttccaccgaacgtttgaattgtattatccattaacttcggttaaaataaaattccgaccgttcggtcgtgccgtaaccacgttggaaatcaaaaagaggtaaaaaataatataataatcaaaaagacatcttttagtaaaataaagcggaaaatcaatcggacgttttctctttgggatttctcattcttaatcgaattgattaataactaaagtgaaactaaaggctaaaatcaattcgcctagtcaagctcgtccaca

SEQ ID NO: 101479 - DNA, 392 bp, Glycine max
  unsure (1)..(392): unsure at all n locations
ccggaatataacgaaacgctcgaaattgaatgttaagccttgaaccaattcaaacggcaataactttttactcggatgtctggttgagtcccgtaatatatcgagacgctcaaaagtgaatgtttaagctgtaagccaattcatacgacaataactttttactcggatgtctgattgggtcccgtaattaacgaaacgctcgaaatngaatgttaaagccttgagccaattcaaacggcaataactttttactcggatgtctgatagagtctcgtaatatatcgagacgcttgaaattgaatgttgaagatcagagccaattcaaacgacaataacttctttctcgtatgtttgattgagtcccgtaacatatcgagacgctcgaaattgaa

SEQ ID NO: 101480 - DNA, 484 bp, Glycine max
  unsure (1)..(484): unsure at all n locations
aaacattcaatntcgagcgtcttgatatatgtcggtactctatcttacatccaagtataaagttatcgtcggttgagatggctcagaggttcaactttcaatttctagcgtctcgatataataccggactcaatcagacatccgagtaaaaagttatcgccgcttgaattggctcagatgttcaacattcaatatctagcgtctcgatttatacgggactcaatcagacatccgagtaaaagttattgtcgcttgagttggctcacaggttcaacattcaatttcgagcgtctcgatataatactggactcaatcagacatccgagtaaaagttatcgtcgtttgaattggctcagaggttcaacattcaaattcgagcgtctcgatatattacgtgactcaatctgacatccgaggtaaacgttattgttgtttgaatatgcctagagcatcaacattcaatgtcgagcgtgtcgatataata

SEQ ID NO: 101481 - DNA, 359 bp, Glycine max
ctgacccttatatacgaaagacatattcaccttcatttaacacatcagcgtaatactctctttctctattactatatcccaacttggcaaacacaatacactacatgtcttcctcatatgattaatgttcagtgcacttccatgatccgataatcaaagtatatgaaggggatacatttcaacgccctttgctgacattctttcaaacaaagagaggccttacacttgaagcctcgtaaagaataatccaccacaggatccgactccaaccactttaccaagtctgcgatatctcatatctatacccataactatgtggacgcagaatgctcaagtttatatgtgtgcaactcgttgac

SEQ ID NO: 101482 - DNA, 393 bp, Glycine max
attcttataaccaagaaaaatgcgcccatatacaatcaaatcaccttcggtacctaaaatatttacatgtacttccaaggtgtatttgttacctacatcacacacattttctttgcttaattcacatacatgcatactctaagcactttggctatcaaaaattgcatacgtgcacatcttggtatttctaatacctatacatacacaaacttcatgatgaatcttgactatctacacaataaggtgctaaatttcatgccttctttttttcaagtggtttttactacctaaagccgcatgccaattcaagtatattttcttttgctcactaaaattgtattcaaattaaaagggatgtttgtaatgtatttcctttacataacatgcaacata

SEQ ID NO: 101483 - DNA, 424 bp, Glycine max
  unsure (1)..(424): unsure at all n locations
gtccgaaaaagcacttaaaccgttaaggccacgccttttatgtctttgcnanancgggtaacatggaccgttcaaaagtataaaatcaacacataactttaccgctttcgcaagaactacgtaggtctgagttcctcaccacaaatcgaggatacgtaggaacaaaagccccacttttgtcgaccaccccttttcaaaaaaaaaaaaatacaagagatcgctaatggtccagtgccttaacgtttctcttttttcacaatcaaaagatcgtttaatggtccaacgccttaaatgacctttgttcagttaaaacctatctcgcgataaaagaccaaaacaaattaaccaacgttcagttcttaaagaactacgtatgtctgatttcctcatcgcaattgaggatacgtatgagcgagggaaacac

SEQ ID NO: 101484 - DNA, 371 bp, Glycine max
tattttggtccctcctaaatcaacacattttggtctggatacataataattttggtttttgcggagagtacttaataatataaaactatttttttatcattattattatgaatagggcctccaatatgtatatatgtgtatatatatatatatatatatattcatcttggtgcctctaaaagtctatttaatctgcattaagctatttgaaaaataattggcaggggttaaaaacacaatatgcttatctctgagggaccatatcttatatatatatatttgaacgactaatacaaaataacctgattcacaacaaaatttttattttattaggacttaatgcaagaaaaaaatatttatgttcatatgaa

SEQ ID NO: 101485 - DNA, 229 bp, Glycine max
tatgtgtgggacttctcaatttcacgattcggaggacgtctttctcctacgatctttacggggatggagcttagggagacattaagggcacgctagctacgatacttctttatcgaggatatcacgtaacaatctagttgcaagcatgttgaacttgcccagttcggatgagtcaaacatacccattcagtcctagggtcattatgatgatgctcgtgatgtctatgtg

SEQ ID NO: 101486 - DNA, 407 bp, Glycine max
  unsure (1)..(407): unsure at all n locations
gcaagcttgggaggatagatggggactcggtgtttatatatttgangatatgggctacgtgggagtacgtgagctcagttggaggtgggcaacatgggatggtgggtttatgcgcgcattgtggatgtggaaaacttgttgtgcaccatcgcccgaccgccacctagtaccacatgtgatggataccccataatcctacaagcttgagatgaagaagtgttgaagggtgaaacttcctgtttttattgttgaccacagagtggtacctggagatatgtcgcgggggtcaggagaccttggggacgtcatgtggggtgctattgcccaaaaccaagcttgaccaatcccgacccaacccgggcataatcgggcagtgagaacctgtgatgtacctaaacaggcgaact

SEQ ID NO: 101487 - DNA, 410 bp, Glycine max
  unsure (1)..(410): unsure at all n locations
taatttgctatctgaaaagtattacatgaacaaaaatatgaatcggattaaccctttatactgtgtggccggttgcacattatttatgttttaataaaggacaaacttcaaggacttcacaccctaaactctattgataagtttgcgcagcttgagctctgagcccccatagtcatatgtttaatttttctatctctttcgtaagctccttctgtatctctggattgaaattatatttgtttgttctatcgatcacttcttactttcacacacacacaacaagatttttattnttctgatcttgttgatttttagggtgggaaatatatgtccataataattatctctatctngttatcaacgacttactggaaacattttcccctctcttgaggacatgatatgctcaa

SEQ ID NO: 101488 - DNA, 402 bp, Glycine max
  unsure (1)..(402): unsure at all n locations
tttgtatctctaacattccaccctaacaaaaagaaggttgggtttgaaaggtggctcatacataaattaatttttcttaatatgaaaaattaaattatttcatgaagaatgggaacaggtatcatgcaatcagagtaatgatattcatgtaacaaacattcacattaaaaatttatgctattatatgaagccatacataataaattgaaaacctactcaatggtcatgatagaattcttgtacatgtaataaagtggccgcaagaatgtgacacagaaattgaaatatatgaaatatgattaaaactaaccctctgttagtggtaatttctgagttaatttatctttcanagtcctagaacaactttctagctcccctggatcaatgggttaatcagaatga

SEQ ID NO: 101489 - DNA, 415 bp, Glycine max
  unsure (1)..(415): unsure at all n locations
gctcattgactccagattgctgcaaagattgacttatatctgtatggtgatctgcagaagaacatataccacagactcttacaataggtgcagatttcttattcaaggcaagctgagttactatgttgaccaagacatcaagttttccctcaatctttttattntcagcagatgaagatgattccatggccacctcatggactcctctaaggacaatagcatcatttcttgcactgaattgttgggagttggaagccatcttctcaatcaaattcctagcctcaacatgggtcatatcaccaagagctccaccactagcagcatcaatcatactcctctccatgttgctaagtccctcatagaaatattgaagaaggagtngctcaaaaatctggtggtgaggacagcttgcata

SEQ ID NO: 101490 - DNA, 333 bp, Glycine max
  unsure (1)..(333): unsure at all n locations
gcttgtaaatactaccttgggtattgattatattttagaaaaanaagacattttatatttgttaagattagttagcttcattaaattttgttattttcaattaaaaataattttttctaaactatcattcattgaaatttgatatcaaacataaaataatggataaataatcatttttgtctcttaatgtataaagcgctacaaaattcgtttttaaaatattaaaattcaaattttagtccccgaaagtgaaaaagtgcgacaaattcattcattcgttaattttcatcagnagcagttaataatatccttcattattgtttatatttcttt

SEQ ID NO: 101491 - DNA, 448 bp, Glycine max
actaagctggatgggtctgcttattaagaaatgtttctttccaaatttgttgtttatatcagacaagggaaccgatttgctagtggctatgctatcaggacgagttggatggactataccaaatatatcttatgtgtattgcattcaccacattacatcaaattttaacaaacaatttaaaaatgttgactttaaaaaaacaagtcattaatatgggtaagcttctaaccatttcatgcatcaaatacttgatgtattacgtgtttaccatatttattactcattcttttggcttttgccataggatatgagataaggaaaccgtcgattgagacaaaggttctcgcaatgcaagcagtgttttcatgagcaaccgagttggtggaaccaaatcccaagagtaaaatgactcaagcctgtggtggaggaaaacagtatgaccatatga

SEQ ID NO: 101492 - DNA, 459 bp, Glycine max
  unsure (1)..(459): unsure at all n locations
gatcttaagcaccgcggctgcagcttaatggagcttacaccatgtgtgttatgatcatcttcatctaggggatgttcttttgcttcctctatctttttgttcggagaattctctttaattccttgttcttcatcttattctccatgtatatcctccattttcttgtggtttggtgctgtttagagtagattcaaaaaaaaaataaaccgattaaatcttagatctatacttgttcttgcatttctatggttcaaattttgtagatctactcttgaatcatgtttttgtgttgattttagttctatcatttttcattcataatattcttgtgctgaaccttagatcctaaatttcttccaaaatattgattagaaaacaaacacaaatctaagtgtaaatcacttaatccatgttgtcttagagtcatgtntagtcatagtaattgtcacattatgttct

SEQ ID NO: 101493 - DNA, 485 bp, Glycine max
  unsure (1)..(485): unsure at all n locations
gacacttagatactcaagcttcagtctaatgttattagagagattgtggcttgtttgcnggatcaaaacacctacccaactcatcctttggatctcttcatccctcgcaacatagataggaatagtgtaacatcctagtttgcgatgataaaatgaaaagactctctacgaaacataaatacaataaataaagtcgtaaagagcggtgaggttgttatgattcaatatataaagaaaaatagctgtaatataataatgccttgaacaaaaacatatatagttgattgatacatttgataagagataaaatatagtgtttttttataaaataattaaagatacataatggagcaaatataggtggggagtacgctatgtataaatagccatatgtaagtcaatttttataccgacgatgtgttctcttctccttcaaaaccctctcaaanaaggacgatctcagactcattcaccggtggatcatc

SEQ ID NO: 101494 - DNA, 388 bp, Glycine max
  unsure (1)..(388): unsure at all n locations
tagagacacccgcggctgcaagctagtccagancaaanatttgattttatctggcanaaaatcagattggttgcttttaatacatgccagggtgaccaaggtagagcacatcctcaaaattcttacctggctaatgtacaattgcttcaaaaataaacatcattagattaccatgatattaaatgcttgattaattattatatgctgctacaaagcactgagcttttacaatgctatatcccggcaacccaaaaaatgtataaacatccctcacattaaaaaaactttttttacattgtctatgactatgatgctccagatgtacagacaacccaaatggttataccatttaagctacgcatagaatacgacactactgtcattaatt

SEQ ID NO: 101495 - DNA, 348 bp, Glycine max
  unsure (1)..(348): unsure at all n locations
tgtatggatgctcactagaagatatatattaggaacttgtttatttctccttctgcgtgaatatagatcttaatatcttntgaactctacgctgaactataagatatctgcaactcatatgatatggaaccatatctcacaaaggatgagatactctgcacctaccggcaatgtacttgagccttcaaatgctgacatagaattcgttggggatgctgattcaataagtatgcgattccttatcacagattggtcatcttcttctatctattaagggttgaactctatttcattctctgtgcatatatgtactaaaggatgcaacttgtctaagcttattaacgatga

SEQ ID NO: 101496 - DNA, 398 bp, Glycine max
  unsure (1)..(398): unsure at all n locations
acatatcggtcgcgtgtatgatatccacttcacaaggttngaagtaaaggagaccttcaaccctataacgcaacgtggcaaacaaaagtgggcagntaacttgaatgttcatcattgtcaatgcggaaggtattctgcgtttcactatccatgttcacacattactgcagcttgtggttacatgagcataaactactaccaatatatagatgttgtttacacaaattagcacatcttaaaagcttacttcgcacaatggtggcctcttgggaatgaagcggctattcctccttctgataacgcatggacacttatccctgacccaactacaattcgtgtgaaaggtcagcccaaatcaacaaggataaggaatgaaatagattggttcgaatcatctg

SEQ ID NO: 101497 - DNA, 430 bp, Glycine max
  unsure (1)..(430): unsure at all n locations
agtctgctgaagttagntagttagtggatagtgtttatatttcattttttaactcaatctatttaagtaatatctgatgcaatcaataaaggtgtgcattctttgttatttacaatattcaactctcttcttctttaatatatctccaacaaactggtatcaagagctatttttctcaaagggatctgtgaataattcaacaataaatcctaccttccttgattcaatccataacatggattctgaaacaccctttacagcattagtgccacaataaaaaaaattataaattatgggcagctaggatgaaagcccaccttaaagcgaatgatctctgtgaagctgttgaggaagactatggagttctttccttaatagataattcaaccatggctctagctcatgagtataccttaataaatcaggaagt

SEQ ID NO: 101498 - DNA, 403 bp, Glycine max
  unsure (1)..(403): unsure at all n locations
aatatacgcatcataaaattttggaacaaattaactcataaaaaaaatccgcattaaaacagcccttangattcactacttttaataacaacatattttgttgggggtggggcattattatctctagacaaatatttgcttattcatataatagtacagtgtcaaaatatgatccaaggattttgctgcatacttcagaaaccaggaatatcttatcttccttttctttatatttaccttaataataaatttcttcttttaccatatctaagaaatccaaatgcaaaagaagatttatttgtaattgccacttactttagtaaagactctcgccaagatggttccaggtagaagctgtagttcagatccaaatctttgagcgtagtactctcatcaatntcta

SEQ ID NO: 101499 - DNA, 453 bp, Glycine max
  unsure (1)..(453): unsure at all n locations
ttgacctaagccagnaccctaatgtctacgaaatttcaatgtatctccgtgggatntgtacaaatactgcttcttatgtgtgagatgacacacagacacctaccaaaatgaccaaacatgctcaaaaacgaaatctttgacataatatgcacataaaaggaacacttttgcgatagaaataatgagaagattcagacctcacgacttttaacataagtttttgataattgcccctcaaagccaaaactcttcactttcaaggactgtttttcaaaaccgtttttcaattaacaatttcaataatttcaacacaacgacggttctcccatatattatntcaaaattttattgttatttataaaaatatcagcatttttaacaatgatgattttgataatatgtcgtgaatcaccatagataagctaatttttagtactagtcttatctatgcca

SEQ ID NO: 101500 - DNA, 409 bp, Glycine max
atatctctaagggctaccgtgtctacaacttgcaaactaagaaactcgtcatcagtcgagatgttgaagttgatgaatatgcttcatggaattgggatgaagaaaaagtggagaagaacgttcttatacccgcttaactacctcaagaagaatatgaggaagaagatccaggtgaaccaccttcacctacatcacaacaacaagatcaagaactatcatcaccagagtctactccaaaacgagtaagatctttggtggacatatatgaaacttgtaacttggccatacttgaacctggaagctttgaagaagcgtcaaagcaggaagtatgggtcaaggcaatggaagaagagatacagatgatcgagaaaagcaacacatgggagttagtaaatcgtcctcatggaaa

SEQ ID NO: 101501 - DNA, 374 bp, Glycine max
  unsure (1)..(374): unsure at all n locations
atgcttcagaaattgagaagtacttcaaagtttaaagaaatattattgaatattgctaattaatattggtatgaattatatggggtgtcagaattatttctataccgttttcaattacaagtaaggcttgatgtanagtaacatatatactangggatgcataatgttaatgaagtttattcagtgtgttatttttaaaaataaaattgaagatgtagtttcctaaactattaatatatagatgtaactttcgtaatagttataataatattcatatcttggaattaaataaggtgttaagcataaaaaaattaataattaatatgaaataaatctcttcacatatatagataagtcataaacactaaaattag

SEQ ID NO: 101502 - DNA, 459 bp, Glycine max
  unsure (1)..(459): unsure at all n locations
tcttcaccatgagcagcctcatcacctatctgatatcctcttagtatttctcaatgganaaaagatccgaatgaagttgacaaagataacaaagataatcccaaggatttggactcccatttgcctgaagccggtgctgagcttgttggaaccgaaaccataaaagaaaacaacgtattgagcattatgtccatagaacaaccggttgagtcttggatcagcaaagagcccagtgaggagtcctcctanggtttctgcaatggcatgagtatggaacactgccatagtatcatcaaccttctgcagtagctttgatctcttatggatgaccatcatggtgaaccaaggaattgagcctgagagaagtccattataagtgatgcccattcctgaacaacacctgcagcatgggttatgcanaccaaaccagtgatcattgccttgacagctcccaataca

SEQ ID NO: 101503 - DNA, 352 bp, Glycine max
  unsure (1)..(352): unsure at all n locations
atacaatccagttcttataagacacccctactggaattccaagataagataatggaaagtccggttggctgcaattgaggaattgagctgcatacctacaccatacttctgttatgcccaagcagccgaaatggctnttaaaataatttatcttagtcagcagaatcaagttatccagcagatgggatctcacaaagatacaggatgggaatgggctgacatctgcaatacgaagattgatggggaattgggaaataaagacctgtccaaattcaatgtcatctttatgggaagatggatcctgggactaacttctaatacaaccagctttggccagacttttaccttcaat

SEQ ID NO: 101504 - DNA, 378 bp, Glycine max
  unsure (1)..(378): unsure at all n locations
tcgaaagaacttttttcatggggcgnggggagcaacagaaaggccaaagggacataanggncgcacaagcagcgaacaaaccaaagcatggggggagaacgaactnatacgcactnngnacgaagagcaggcctctttgatttacaccccaaatctattgccaggggtcactagctaaagaacggtgggcgacattgcgacatctccagcgaaaacaccgaccgtataaaaaatttaaaacaaacttggatccgctcgtgattcatgtctcgactcttgtagatatgagctttttgtgtatcttacatatgaatttgaacattatgcattattatttttatgaaagaaatgattggtattatagatttgagttcaacc

SEQ ID NO: 101505 - DNA, 402 bp, Glycine max
acaacatcttctccttatatccattcttgagcctcactaatggctcccgaacgaatagatagatatatgatctatataggtggacgtgatgagaaggatgggaggaagaaacattttttcttcttctataaaataggggatgggtttgaagtctcattgctgcaagcttccttctacaattggagtgtaggtgtctgtgcctcgcatagctcttgcttgctttgatcatattatgttgtgatgattccatattcttattttttattgtgatgtattttactattttcctaaatattagatattgagtacttttaaggttgccgattggataaggtgatcttatctttcatcattcatgatgaactttgcatgacattacttgagaatatgttatgattcata

SEQ ID NO: 101506 - DNA, 450 bp, Glycine max
  unsure (1)..(450): unsure at all n locations
agcttatgcgcatacttcttcacgaactttctcttgttcaagacattcttataactaagaaaaatgcacccatatacaatcaaggcaccttcgttacctaaattatttacatgtacttccaaggtgtatttgttacctacatcacacacatttcatttgctaaattcacatacatgcatactctaagcactttggctatcaaaaattgcatacgtgcacatcttggtatttctaatacctatacatacacaaacttcataatgaatcttgactatctacacaataaggtgctacatttcatgcttttttttcaagtgtttntactacctaaagccgcatgcaaattcaagtatattttctnttgctcactaaaattgtattcaaattaaaaggtatttttgtaatgtattntctttacataacatgcaacatatttatagatctttgtga

SEQ ID NO: 101507 - DNA, 483 bp, Glycine max
  unsure (1)..(483): unsure at all n locations
tgtaggattatggggtatccatcacatgtggtactatggngtgtgtcgggcgatggtgcgagtcaacactccacatccacaaatcacacataaacccaccatccccagttgcccaccttcactgagctcacatactcccacgtagcccttatcctcgttcctctcaacaccgggtccccatcaatccttccaagctttcacaacatccaagtaattcaacatccaagcatcatgaactaacacaaccaagaaaacagggcagaggcagaaaactctgcccaaaacacaattcaatatcacagctttccttacttaaagaccccagtaacatttccttcgttccaattcgttcaccgttggatcgactcgaanaatttaatggaagtctctagtacataagtctacattntgaccgttgggatctgctagcaaatgtccagaacccaatatgtactaccctntccacaaccaaccatacacaag

SEQ ID NO: 101508 - DNA, 366 bp, Glycine max
gcttagagctttggagctatgcaaaatgtatttttattcccccccttcaaaggctgtttggtggacctaggaaaagggaaccctactgtaactctctttgagtacgttctagaagacccccatgagcacccttccaaactccaagaaagtgtacacttgccctgttttaaaatattatctgataaggttggggcctcggatggtttggctgatgttaaactgttgtaggagagaaaggctactttaatgataagaccgacgattccctctttatgcgaactttcatccaactgcttacgaaatgagtgattgataacgaatatgaccttaccttatcataaatcgttcgagacgtaaaaaagtggg

SEQ ID NO: 101509 - DNA, 355 bp, Glycine max
ataatatgttcaaaaaagcacaacgacaacgaaactgtgagtagtcaataataacttaaatagttgttgatattcaagaacaagattagctgagtgcggaaaggcgagtaatttagctggaataaaaagaaagaggttaatctatggatgaatgctcttctagaacttaagttattgaagaccagcctcattacaagcctggtaaaagtccttcagatcaagaatgtgtgcacttgactgtatcgtatgggatgaactgcctagatctagacttatcgtggatggtgactgatggatagcctaaacacctgtgcttgagtgacacattatttgtgatgcaatcctacatctcgat

SEQ ID NO: 101510 - DNA, 464 bp, Glycine max
ccggatcttaagtgacctgcagctgcagcttggtagtatctaattgactttgttttttgtcatcttcataacatcatctacatgtgagaaagcatttggattttgaacacatgagttgctatatgactctaaaggtaccccttatttccattcataagctttccaccttcccattttcaccctttgcaagcacattcaaaactagagcaaaattgatagataaatatatatagtaaacaacataaacaagcactactatacaaggaccaatcaatcgaataaataattaaaaaataatccatgtggtgtcattgatactcactgtcccaactcttgtgtatgcataaacacacatcatagttcatcagaagaacttctccaaatgtggaaatcagaacaagatctataagctaaaaatgacatatttggaagtagctcatttgtaagcttaaaaaacttaatta

SEQ ID NO: 101511 - DNA, 477 bp, Glycine max
  unsure (1)..(477): unsure at all n locations
gcttgaatgttgaattcanagcagctcatanaaaattactgttccacctatgaaatctgaatggaggcactgttntcattntttgcacaatcattagcttagactttgagaagtatagctagtgccaccgacattagtttatcttaggcaccaagtttatgatgctttattattataatctacctataaaagcacctctgtgtgccacattatgaatatgaatgatcaattaagtaaattatgagtgaatgaaatttagttttatttctctcttcctccagttagtgtggtaaaaataaaaagttcttctctctctctntatttctcccactatgtgtgtgtggttgtggttttaatttattccactgttaacaatgtataatatntccaaatttaaaggtataatacanagtttatcataagttcttatgcccaagaatacttggagaaaagtgacttacatgactagctagcata

SEQ ID NO: 101512 - DNA, 371 bp, Glycine max
  unsure (1)..(371): unsure at all n locations
cttggccagtattatgattagccgatgagatgcttcacctttggggacttccagctatcacctatggtagaagaatttgaagagatcctaggatgccctctagggggaaggaaaccctacctcttctcagggttctatccctcattagctagaatttctaagatagtccaaatctcggtgcaggaattagaccacagaaagcaagtaaaaaatggggtggttggaataccgagaaagtgtttggaggcaaaagcaagaatcttggcaggtaaaggcgagggggccccgttcatagatattctcgcacttgtgattntcaggggagtctttnttccgaatgtggatgggttggtggacctagcagcgatcga

SEQ ID NO: 101513 - DNA, 298 bp, Glycine max
  unsure (1)..(298): unsure at all n locations
tatgctaaatatttcacatgttacttaatgatatgagttatgttactacctatgaattgacatggtggtgntaattgtattaatacatattgaagtgaaataagaatcactagaaatagggatggaacatataacatgcttacatattaccaattatttgctgagaatgtatgtatacatgaatttgatgatgccaaagaagaatcanataagactgttacatttgcttcaagattaatacaagattgtttcaacaaacaaagccttgcgtcaagatttcttcaagatcaagtcttgt

SEQ ID NO: 101514 - DNA, 395 bp, Glycine max
  unsure (1)..(395): unsure at all n locations
agcttcaatggtttagtgaggattgagatgtttctttangaagcaagtggagttggatatttccattggaaagtacaatgataaagttctttgtgatgttgttcctatggaggtcatccacttactcatggggaaaccatgacaatttgataagagggataatcatgatggtttcaccaacaagatctctttcacgcatcaaggcaaaaagatagtgctcaaaccattgagtccacaaaaagtgtgtgaggataaaagaaaaatgaaagagaaaattcttcaagaaaagagagaaaaagaaaaagagagtcaaacacttgagagttcanaaagtcaggacaaaaagagggaaacatgagaggaaaaagatgagtgaaacacttgaagtgagggag

SEQ ID NO: 101515 - DNA, 419 bp, Glycine max
  unsure (1)..(419): unsure at all n locations
tgtgctatggcacacgaaaggcattgtggcttattgcgctattggcgctaaacccatgcatagaatacaaaatggcaatggggcttagcgtaaggaggtgtgctaagcccgtaaatggggaaataataaggcaaaagggctcaatgtataactggcacgctaagcccatgcaacaaaaaatgaaaagacactatagcttagcccacagcagacgctaaacccatgcatgataacaaaaagacactgngatgtaaaatgacacgtgggcttaacatgcaactagaactaagcccaaatacanaagatgaacaataaaattagtgtgctcgcttcgcgtgtacaggcactaagtgcaatatgccagcttagcgaagtcatctatgacaacccagatactcatgtggacccagaaatgcatg

SEQ ID NO: 101516 - DNA, 376 bp, Glycine max
  unsure (1)..(376): unsure at all n locations
gatttaatccttctattatttctaggatactggactggaacttggatttgaaggtgtcaaaaaaaaattcaccatgccttgaggttctagccatttattttgttcatcacttaattgtagttgcttcattaaagtattggtactctttatcattatcctacattacaacttccttgcatgtacctttggtatttattntattcacacagttaactttggtttatttatttttcaatatagatgtattggctatatggtgaaatcaagtttacaagtgcaatttaaacttgatttaaaaaagaatcataacctaagtaggtagaaatagaagaaatgtgtcattcccttccagttcatagatgttaatcatgaatga

SEQ ID NO: 101517 - DNA, 461 bp, Glycine max
  unsure (1)..(461): unsure at all n locations
tcctcggtgccattcctgcgaaggcaaacatatggaaagtttgtttactaaaaatattacaatcattacaaacaagggccaaacaacacttctcatggcacgagtgtcaacatgcactttataaaataatcatattggggtcgtgctattntatgacacatacgtatttgcacacataaaaaaaaatttgtatgaagcgatttacgacacctatccatgtacatattttttgacaaaccttttcatgctacatcctatatatatacacacattnttttttggaaggcttcttttgttacctactcacaaatacacatantttgaagaacactnttacgctacccatccaacactttgtaaggcacttcatgctatatatattcatattatgcaaggcattttattcaacattttgcaaggcatttccatgctatatatattcacatatatacataaccgtg

SEQ ID NO: 101518 - DNA, 409 bp, Glycine max
  unsure (1)..(409): unsure at all n locations
ctcatacccatccctcaagataacgcgggccactatcaaggaggcaccaaatagacgcggntgcaccggaggagcctccaataagcattattcacaatntctaatgcttcaaaagatgtttccattgactcttttgcttccacatagggtgaagaggatggacaactcactagtatatcttcttcccttgacactataaccagttgtccttccaccacaaactttaatttctggtgcaacgttgatgggaccaccccaacagaatggatccaaggccaacctaccaggaaactctaggcggggtttatgtccattacctggaaagttatctggcacgtgtgtggcccaatttgaatcgggagatcgatctctcctctcacatcatgccggctaccgtcaaaagccctta

SEQ ID NO: 101519 - DNA, 371 bp, Glycine max
  unsure (1)..(371): unsure at all n locations
gctggcgaatatatcactcctgcatttatctctagcatgctttctttctttctntacccactcctcacggttgagtgtttaaggaaaaacaccataactaaacgcaccacaaggcatccctatcgcaccagatccagatctaaaatgatgggtgatcaagaggagacacatgaacagatgaaagccgacatgtctgctctgaaagaacagatggcctccatgatggaggccatgttatgaatgaggcagctcatggagaataacgcggccaccgctgccgctgtcagttcggctgccgaagaagacccaactctcttggcaactacgcaccatccttcctcatacatagtatgatggggaagggacacact

SEQ ID NO: 101520 - DNA, 454 bp, Glycine max
gctatgatgcaaatatatacaatagacctcttttatcttatcagcaaaatcaaccacagcaaaacaattatgacctctccagcaacagatacaaccctggatggaggaatcaccctaacctcagatggtccagccctcagcaacaacaacagcagcctgctccttccttccaaaatgctgctggcccaagcagaccatacattcctccaccaatccaacaacagcaacaacctcagaaacaaccaacagttgaggcccctccacaaccttccctcgaagaacttgtgaggcaaatgactatgcagaacatgcagtttcagcaagagaccagagcctccattcagagcttaaccaatcagatgggacaattggctacccagaattctgacaagttgccttctcaagctgtccaaaatcccaaaaatgtcagtgccatttcattgatgttgggaaa

SEQ ID NO: 101521 - DNA, 441 bp, Glycine max
  unsure (1)..(441): unsure at all n locations
tatggatttaattcactcctattcttgaataacatgaatatgaatatggtctagctatagagtaatcaaacaagaacccactatgattagtttcaagattctataaattagaaaacaaatgtatttttcaaaagaaaattaccaaatgattaaaattgtagatgagtaaaggaactaagtgattaatattaccaaatgcacataactcctatgcatctcttatgcatctttgatgcacaacatagacaacaggcaatatgactctgcacacaaccagtgaaggaagaaaggaaactaaattggcagcaaggaaaaggataacagtatacccattaccttttctaaggtcagtgcaacgacagcatcattttcaacctgaacagganaagtaattataggaaaatgtcaacgcctattagatgcagtacacgtataagctat

SEQ ID NO: 101522 - DNA, 390 bp, Glycine max
gagaaaagcttagagaaataagccttgactacgtcacacatggattgatgatcatgcacaatggctcctaagtcaatgttagttaagtgggaagtattattttgtttccttcttgagttcgcaacattatggaaaaaaatttgagtttgagtcaccctcacagagatagaagatctttgaatgttgtttccaatattttttctcatgatccgacaactcattcaagtgtcattcatgttgaagtacaagtgtgaagtgaaatttcacatcgagtagaattggaaaagttgagtatcatatatgtgaggaaaaaatctataaacctgagccttaatggttttgattaaagtgtgatgtcaagttttcttatctttctggtgcctatggagt

SEQ ID NO: 101523 - DNA, 474 bp, Glycine max
  unsure (1)..(474): unsure at all n locations
cttgactccacacacgttagaaaattcagtcattntcttcattagtgctttctttctcttcgngaaagccaaatcacgatctctcccatttgggatgggctntaagattaattttgggcgtcccatgttctaaagcatatgcacatatatagaaattgatcaataaagcaaaacttggggtcatacgttggggatagagagatcaaatagacaactagttcatgaattgatcgaatgtttcggataagatgttgttctagaaatttaaaataaaaaataattcaacaaataagaaaatcatcaaggatcaaagaagaatggttcaagtctaatctctcctctcatcaaggattaaagaaatttatagaagaaaaagtaaactgggttttgaataatagcacaaatgaaagaanaaagggaagaaagaaagaaacaattgagatatatgatagataataattttcctaacagctg

SEQ ID NO: 101524 - DNA, 451 bp, Glycine max
  unsure (1)..(451): unsure at all n locations
agctnnttgaataggaagattaacatgtttttttgtcgctagacattngatagggtaacatgatttttgaatgaatatcacactagaagggaaaattaaatagtttgttagataaaattgaaagctttttgaaaaggatatgattttcacaaatacacatgtttaaaagctagactctaaatgtatcatccaattattacaaaaatcaactcattcaaaaccaaatgtggactgttgtccaatgctagtaaaatagtattttcaaaaaggttttcaagttcaaacttgtgtgatagtgtatcaaaatcagcacaagaaaatattaattatataggtttggtgagaagtagaaatacttatgtttatactagttcattcaaatagagttatgtctagtttttctttacaaaccagtaaaggacttcattaatcataactctattacaacaag

SEQ ID NO: 101525 - DNA, 480 bp, Glycine max
  unsure (1)..(480): unsure at all n locations
ctctnttaggacctgaacaagcaatcaactcctctttcatatctatgctatgtgctcgcgactggtccctttcttcccttcgcaacttgagttcattattgctaccccatagagctccgcgaaatttgttccggccatactcttccttgcgagccctcttggtctcttgttcaaaggctcttgcggcaattgcgttctcttcctgtaacccggcgcactccttccgaacgtgtgtagcagccaacttgaacttctccttggcgagtattgcctttcctaactcgcttttgagagcttggacttcttcgtcctcttccggtgcttcaaaattctcttcgctgacgacttttaacttggcgagccaatctaaacctcgtatgcgaaccttcagccattcgtggtacccaccaatgatgccattacgaatgcctctaagctcttgatcctttcttaacgaggtgtccatgtcttatggattct

SEQ ID NO: 101526 - DNA, 439 bp, Glycine max
  unsure (1)..(439): unsure at all n locations
agctntacattagattttagtaatgatctacttttctctattaataaaagaacttaataccattaacctagggaattaaaataacttaatggctgagtgtaactgaaattatggcaaccaaaagtcacccccaacagccatcaagtcagccaccatttggtctcccaaaaggctgatgcctaggttgccaattaggcccttattacaagttgaactcaacctaactaaagcccttttagttgattaaccaaaaacatatttttggtcagccaactntaaaggattgggccattatttagacaaactaaacactctaaaattgagacaaagtggtgacatttagtcctcctccatttgcaccatgatacaactcacaaccttggacttttctccttgaaacttgtgcttgtattcaaatagtatggacaacacttgctga

SEQ ID NO: 101527 - DNA, 378 bp, Glycine max
  unsure (1)..(378): unsure at all n locations
ttacggacctatgaaactaagcctgatttcctttagtagggaatctatccttcctaatattgtatccaacccagtcaccctcattaagaactagctcttttcttcctctattgcctttagttgaatacacctttgtttggttctctattntgttcttaaccctctcatgcaacttctttacaaattctgacctagattccccttctttatgtataaaagaagtatccagtgggaggggaatgaggtctaacggtgttaggggattgaacccatagacaacctcaaaaggggactgcttggtggttctatgaacccccctggtgtaggcaaattctacatgaggaagatactcatcccaagacttatggttgcctttca

SEQ ID NO: 101528 - DNA, 464 bp, Glycine max
actcagcttatatgatatggaagagtatgactttcacgattatctttttcagcagctattcatcttagattttcattatccatcccatgaagtagacatacacaaagccaggttagacatccattgagcaaaagaaaagttgaaacttgatacgcatgaatattctgcataaccagcttcctgtcaaaaacagattccgtgaaaccacatttattgcttacccaccaaacgtaccatataactgtgcaccaaactaccacccacatttctgcttcttttttcaaaactttatgtaaatgctgccgaaatggttcaatcggggttgtatcctcaaattgtccgcaaaaagcgcgaaacacattctgtgaagcattcataatgttcctatttcttagattgtcttagttggtatcaaccaagaatctctctcacacaggcataaacttcttcggacttcattccaa

SEQ ID NO: 101529 - DNA, 408 bp, Glycine max
  unsure (1)..(408): unsure at all n locations
tcagctgacacaaactcccanatctatatgctatccttcctgtttcaaaattcttccctgatattactggaccagttatggaaagggatgtccaatcctttttccaggttttttagccatgtccagcagaaaaatatagcatcctccagctaataagggttacttaacaatatgcagagtttgggatgccctacggcataccttccttcatcgttacttagttttgtcttattttgttctcagctcattagaatgaaaaaagttcctctaaaattctaatttctaaagtgcacgactaagagtgcatcccccattaatttacattcatgtgtattatgaactagtcactctatattaaagtctcaacggtgactatagcctcacttttgcactcgagggcttttcact

SEQ ID NO: 101530 - DNA, 394 bp, Glycine max
tgcatcatgtacgtgaagtgctcagctagctagcttctcttttttattacatattattaatgcaaacaaagtaacttctcgcgatgtttgacctgactaacaacttatcactgacgaaggacatgatggaagcagccagcattattgtggcctatacccacatgaacttgacctcgttctgaggggatctccataatgaacaacactcagctgaattggacattgaatgagtgcaacatcattgcactgtcccatgtgaatctgacattcttcatcttgaggagcttgtgaatcaacttaactcacactaaatttagagtctaatcagggagtggggagaagcaatacctgtactttacatggtttaacagacttaataatatcagcgtgtgac

SEQ ID NO: 101531 - DNA, 467 bp, Glycine max
  unsure (1)..(467): unsure at all n locations
atccttaagcaccgcggctgcagcttactntctagaattactatccattttcatctcatgnggcccaggcacagatgccacaaagaattatcattggacacatagctcccagcttgtgaaatagttgagacacagcatgtcgcagtggacccttgcagaatttacagatttctttgctttgtcacatgcaatgacacagacttcccttttccctctaatttgcataactccaccttcaacccagcaagaaaaaccttttgaatccatggcacccacagagactatatttttcttgagctctggaacatgatcaacctcgattaaggttctaacaatcccatcatgaatcttgatttgtatagaacctatatgatgtgccattattttctcctattttttaaccctttttgcaccattttaaatactgattagtcttaattgtcaaatttattaggcagttttattat

SEQ ID NO: 101532 - DNA, 342 bp, Glycine max
  unsure (1)..(342): unsure at all n locations
ntntgtctcaccttagtaagcatggtaacatatcaaaccgtctagaggttttaccaagtcaaggttaaaggcctatataccaccagcatcaaggaattagggcggttgatggaacctctccaaatgcaagccttccgcaagacttacggaaagatcttagagttgaccatagcagaggtatccataaaagccattgcatcactcacccaatcctacgaccagcctttgagatgctttacgttcggagacttccaattggtaccaaccattgaagaattgaggaaatttagcatgcctctcggggaaaaaaccatcctttcctcgggtgttccccttttggca

SEQ ID NO: 101533 - DNA, 385 bp, Glycine max
agcttccatcaatattaaagactgcttttaattctcgttatggtcactatgagtatctagtcatgccctttggtgtgactaatgctccaggtgtgtttatagaatacatgaatagagtctttcacccttaccttgatagttttgtggtagtattcataaatgatattttggtatactccaagactagagaggaacatgaagaacacttgaggattgtgttgcataccctttgggactgacaactatatgctaagctatccaagtggtgagtttggttagagaaagttagtttcctagggcatgtgatatctcaagggggcataactgtagatccctctaagatagaagtcgctcttgagtgggagagtcctaaatttggttttga

SEQ ID NO: 101534 - DNA, 464 bp, Glycine max
  unsure (1)..(464): unsure at all n locations
tcctccacgttntcctccatacctagaacttcaaaccttctattcttactcaattcttcaccaaatcacgtcccgtaaagcccaatcttcctctttttcactcctctttcacttccaccgatcaaaatccagaaaaacttcatcaaatggcagagccatcaaagaagagaaagggatcatcctccaccgctaccgctgctgcccatcgccgtcacggcccatccggagcacccacaacattgtttaagaataatcttagaccctaaatacctagacgtagagttctttaatgatgaaacgtttgattgctatcaagtgtttcaaaattctggtcttggtgatttcatgtcatttaaatggccatattatcctgaacttgaaaggtcttctactgcaaattaaaattcaggatggtattattatgtctgaggtgcatgatacttctatggtcattgatcagtcac

SEQ ID NO: 101535 - DNA, 438 bp, Glycine max
  unsure (1)..(438): unsure at all n locations
ctgcagctatatcaactgtccctcactatctttacttatttacaagaccnnggaacaagcgaagntagntnntgtgngaagtatatataactatatgttgntcattcgntattttgaaaggcatctttatttgtcttgttgcagtgtgactaattttttgtctttaatttataatttactcaaacattttttacaacgtacatcgatcaattacgtttggcaacgagcataacacttgccaaggttataggcttccttgctgtttctataaacaatttagtcaaaaatcacaattgcaccatgcaaattgcataattaattttgaaggaaactctttctttttttaatatatgacaatatcaagattcatacttaaaacttcaacctattttgtctaagcttgaacccaaataatagttagaatttataaatttatat

SEQ ID NO: 101536 - DNA, 440 bp, Glycine max
  unsure (1)..(440): unsure at all n locations
gataggtcgttcattcttatgatgattatgtttcctatcgatcannattggggcctattgtagtaatgacgtggctaggtcataaattattgctgttacgtggaattattccaatttctgcctcacatttattgtgatgataacaatgcgcaaaacttgggcctgtaagactagtcaactgccatgcaatgtgccaatgggggggccctcggtttatgcttgcaattgtttttatctaacanaaaattgacggaattttgatgggtttatctctccaatacacatgaattttcaacttgccacgtggtcctgatcttcanattggacggtgagatgagtatcgttatggcattgagtttgtttccctcattggaaccaagctaatttgaatagaatccaataagctcaccattgttacttgtgacttctcagacacacct

SEQ ID NO: 101537 - DNA, 381 bp, Glycine max
  unsure (1)..(381): unsure at all n locations
atcctaacaaagataatcatgtcaatnttctaacagcaatattggtaaatgagaattttataacaggtacaggtcaatcttacctgaagaaggtcaacataagaatttccctcggtctcatttgacaggctccttgaccaaatttcaacagttttatcaatatttccagcacatatataacacagagttgcagctaatgtattgccagcccccatgagttttgaagcaagtgtgtcacaaagcatagtccattcatctctctgagcaaactgttaatatgtgataacatgaacgatatgtaatatataataactaaatcatgaaaatttatggctaatatgaagtttcaatttgactataagagaaatctggtctcaacta

SEQ ID NO: 101538 - DNA, 408 bp, Glycine max
cctgacctctggtttatgcaatatgtcagatgggcggataaaacatagtattgatggaataataatcacgttggaataaaagctacatcaagaggtgtaaggacatattgggtgatgcactcaaaaggcaactctgattcttattagacagatgacaacaataatctttcgccttacattctttccaaaagatccaaacctttactaagatttaaattcaagaaacccagcattgaaagtcaaaattctcctcatcaggaggaagagaagatgacaatcaagggccagaggtcaataaggaagagaccttcaccttctaaggagaaagcatctcttaatgagtctgaaggtgtaagtcaatcacatcaagacagtgcgatggatgggataatggatgcaaactggata

SEQ ID NO: 101539 - DNA, 109 bp, Glycine max
gaaacacccgccaacgcagcgcaaacagacggccacgacaccaaaaaaaaagcgcggaaacaacacccccgcaaagacaccaggcccgccaaagaaccaaaaaacacag

SEQ ID NO: 101540 - DNA, 460 bp, Glycine max
cacctataaagaagataatggagttcactctttgtattcagcattatatgatgatacgagcggaacatgagtttgtgatataatgaccctacagtccttgtgaaaaattttgttctgggttaaatatgtttaaggtataaataggtgaatatttttctgggttcttaatagattattgatgttttgaattctctgatatattgaattgtgttttgagtcccaccatccattaagtgataatatgtcaccttataaattgttcttgctaacactatcaacagttgttattgtattacatcatcacttgattgacaatatgaactcaaaacatatatttttatatattatggacccacaacatccaatatatttattagacacccataataaatttcgaccattaccaggacccttaacatattttatccaaactagttccttaaacaaagttattatgagt

SEQ ID NO: 101541 - DNA, 415 bp, Glycine max
  unsure (1)..(415): unsure at all n locations
atgatcggaaaagtaccagtgaatttgtgcttttcatggggaacacaacctttacttagatgtaaaaaaagtagctgatagtcactttttcgacttgtgaggcataatacgtagcaactactttatgtgtctagcatgcagtccggttcaggaagttgttaaaagagttgggcatgacacaaaaagaaccgaccaagatctttgtggataataagtcaaccattgctctagcaaagaatctagtgttccatgatcgaagcaaacatattgatactcattaccactacataaaggagtgcatagcaagaaaggatgtactgcagaatatgtgaagtctcaagaccaagtaaccgacatcttcaccaagtcgcttaagcaagaagactttatcaagntaanaagcttacttggaatg

SEQ ID NO: 101542 - DNA, 483 bp, Glycine max
  unsure (1)..(483): unsure at all n locations
ctcagcttacaattgcgtcttcgaggtgatctgcagacaccctggaatgagtcatgtccaccattattgtgtaatgaaagcaccaatgttacacttgttttcgaggcccaagtatcctccaaaacggagagagagaaagatgagaaacagtgtatttttcattgcctcccaatgagttattacaatgtatttatatggctaaggaatatggctcaacggcctaacagaatattattcttacaacgaataacagaatccagaatattntagaaggtataatagaatgacatgtttttcacgctatagcaacttgcatggctaattatccacttcgtacgtagtctttcaaataggggggcatcgccttctttctcttgngcctgatttcacttattccctgctgctcctttgctaatggcacacccttagtgttcttcgtaacagctcgaatttgctgctagttatattaccaagatagtattc

SEQ ID NO: 101543 - DNA, 399 bp, Glycine max
  unsure (1)..(399): unsure at all n locations
gcttcgtcgcagatccctcatgtaaggctttgttttatttctacttcaatcaagntctaaagcagcaatatattttccaatgccaacgtcacctaactatgcatacaaatggttgattagaccaaaagcatacaaacattatgcattgaaggaagcattgaacaaagaatacataatcaatttgatattaggtatttacatcagttgttcattagaaatccccaactagggtgttcagctagccattacaaagaaaccctaacaataaatgagattaaaagcagagaatgatagttccttacagaaaaagggggatttctcctcctcttctcagcatctcacactcactcgctactaaataatctctctcaaatgacaaaatctatgcttcaatgcaca

SEQ ID NO: 101544 - DNA, 482 bp, Glycine max
ggtcttcgccagtgaaaggattgatgtgggtccgaatataggcaaatttgatcatcctactaggacgactgagaaaactgtggcaaatgaagagggtgagaaagagggagaaacccatgctgtgactgccattcctatacgaccaagtttcccaccaacccaacaatgtcattactcagccaataacaaacctcctccttacccaccacccagttatccacaaaggtcatccctaaatcaaccacaaagcttgtctaccacacaaccaatgctaaacaccacctttggcaccaaccaaaacaccaaccaagaaatgaattttgcagcgaaaagcctgtaggattcaccccaaattccggcgtcatatgctaacttgctcccatatctacttgataatgcaatggtagccataacccctgctatgatccctcaaacccccatttttctgaggatatgactcgaacgccacatgtgcatatcgt

SEQ ID NO: 101545 - DNA, 245 bp, Glycine max
tctaatctttatgctgacaatggtaaatgggacacggttgcccaagtcagaaaaatgatgagacagaatgggctcatagtagatcctggatgcagctgggtggaagtcaagggtacagtgcatgcttttctcagcagtgataactgtcaccctcaaataaaggaaatcaatgcacttctggagcggttgtataagaagatgaacgaagctggtgttgaacggccataaagcagtcatatggacat

SEQ ID NO: 101546 - DNA, 433 bp, Glycine max
  unsure (1)..(433): unsure at all n locations
actggatacaccctctttatttatttttaacacaccgcacaaccaaggaaaaaacagncagnttttttacggaaattgaaatcacatcgtatacataaaaccatttccgtgccttgtcacaataatgccctntgacaaaggaaaatcatattatgcctaagcttactatcacgtctaacttgcaaagttgcaatgttatgaatntaaccatagttcctacaaattacaagaaagaaaaaaagaagtatattctctgatggaagtagatatttaaataaattacataacagtaagttgcataatccttttttctgacaataattagaatattggtgaagttacagatccaggtctttaagttaagatatgactaaaaaagtccaatttgaatatagcaacaacaaaaaaataccacggtaatatgatatacatt

SEQ ID NO: 101547 - DNA, 359 bp, Glycine max
actaagctgttcaagatcctcagacgtataagaggggcctattttctgtaaagactttcaagagggttctgaagatatctcttgatgaaaactataacctgcatcctattgagtattaccattcccacttgtgcaccatggggtttgttacctggtgggagaaatattattccacccgttcagtgtggagacactactttcatgatctccagacttgagagtgagtttacacaaccaacggtcgagaatatctgctcaaaccttcaagctcgaggtattaaattacttttgaagttttaaattgatatcgtattttgccgtttctaatattcttactttcaggcgaaacaatcatgacg

SEQ ID NO: 101548 - DNA, 380 bp, Glycine max
  unsure (1)..(380): unsure at all n locations
agcttgttaaagaactgaggaanaatcttgaataatcttgtacgcacatcgttcacgtgtatgatatccactccacaaggtttgaagtagaggagaacttcaaccttataacgcaacgtggcggacaaaagtgggcagttaacttgaatggtcatcattgtcaatgcggaaggtattctacgcttcactgtccatgttcacacattattgcagcttgtggttacgtgagcatgaactactaccaatatatagatgttgtttatacaaacaagcacatcttaaaagcttactccgcacaatggtggcctcttgggaatgaagcggctattcctccttctgatgacgcatggacacttatccctgacccaactacaattcgt

SEQ ID NO: 101549 - DNA, 446 bp, Glycine max
  unsure (1)..(446): unsure at all n locations
tgccttaatcatttccaaatattcatgttaattangacgcatcaacaagaatcaagccaaggctattgtgcaagcaatcaatggggcaaaacacaccaaatgattataatgatggatggctcaaattctcacaaaggtaaaatcatcactttcaaattgagctttcaaaactatcatgacatgtagagaagaatcaaggatttcaagtcacaaaatgtcaagaacttttattttcaaaacaattacccatttcttgaacatatcctataattcaaagaanaacatgcaaagtcgtacgtgcacacaaaattgacccataatattaaactgaagatccgacgaaactaacaacattaacaaattaacacaactaacaaattaacaaaaccaacagaactagcataaccaaagaacactcctcctccgctccatacttaaacaacaca

SEQ ID NO: 101550 - DNA, 473 bp, Glycine max
  unsure (1)..(473): unsure at all n locations
tcagctttctcggagccatnttctgcgaagacaaacattngtaaagtttgtttacaagataatgcttattttaacgcacaaacgacatgctaatctttccgatttagaacaaacttgtgcacacatttccttaatgtagaacatttatgaacatgcgtatgagtaaaatatcaacatacaaggatattcaaaatattctagttaccacacatatatatttttttgaaaagaatacatatacatatgcccaatatattgtgtcaaaattacacatgatcatatcccaggcatttcgctaccacaaactacctacgcatatttgaagtattaacatacaaattgttgttgtttcattcacattatttatacatatatgtacattgnggagccaatctcacgtcatgcacacacttgcattngaaaagggaattttcatgccatctatatacactcgaggggcaattcacatcata

SEQ ID NO: 101551 - DNA, 322 bp, Glycine max
  unsure (1)..(322): unsure at all n locations
agcttatgctcttcggtgggcatcttctattgttttttatctttgcccccagggagtaacttttgagacaaattgtttacaccttattcaagcatatagctcgggggatagggggaggaaatctattccactgcatagttgaagatgctagaacatcaagtttaaatactgagcaccgcttgtattaagaaaaccatgataagtataacatcaagttttatgttatctgcaaagggcataacacaaccctcctccttaatccggccttcaaacctgctatgaaaagacactggtcgagttgtatgtttnntttttttttttt

SEQ ID NO: 101552 - DNA, 418 bp, Glycine max
  unsure (1)..(418): unsure at all n locations
tcctgagcaagcggcgggagtctcactgttctatgattatatgaaatccaacctttttgaggcttttagtgggcaagaaccatccatggtttagttcgaatagtagctgactctgcaacaatgctaacaatatctgaagatacttttctctttgccctataaggcttaaaatctggaaataaaggagcccttataacattgacccgtagtcaaatcagcgacatttgaaccaaaattgacaattcagaanaagaaaggtgctaaaaagtaataatcgagtcatgttctttagatgaagaaagttaacaactctaaatattctacagcagtacctgaatcctcatcttgattcaatgaaacgttcttcttgggcaagctaagttcttgcccaaatcactcgtatgagtcaccaaaacat

SEQ ID NO: 101553 - DNA, 433 bp, Glycine max
  unsure (1)..(433): unsure at all n locations
agcttgggttcaggttggttcatccattacttatgggaggacatcgatgagctagtccaatagaaaggctcatatgtattaacctcattaacccgtgctttcgctctacttaaattggggtacaagtttcaaattcacattggcacaagtagctttcggtatgatcattgaagggggggacaagcttctggcctaggaagtggacatgattcatatccatgatgtggatctgaggatatgtgatgtcttttctagaggatggaaattggagaatctttatacaaatataactactgaggttagggatagtattcttggtatgagtgttgttattcacccaagcatccttgacacgtgggtctagtcagatgaccttatnggttagtattctgcacatactanttacaattggctnttgaagcaagtagagttg

SEQ ID NO: 101554 - DNA, 323 bp, Glycine max
  unsure (1)..(323): unsure at all n locations
tctaggttagtgtaccagatgactgttgtctcatnccaactatcttgaaagaaatgcatcaataacttctcgtccctagaatatgcacccatctatcgacagtacatttgtaggtgattcttaagacaagttgtccctctgtacctatcgaagtcaggtaccttgaacttcggagggatgacgacgttcgacacttagcacaggttggtcatgtctgcgaacggataatcgctgaatccttcaacagccctcaatctctcttcgatgagagcgagtgtccctttacttcgctgccgggggaggccctcccacggacaaaaaca

SEQ ID NO: 101555 - DNA, 418 bp, Glycine max
  unsure (1)..(418): unsure at all n locations
agcttgaaatgaggaagaggggtttggttttatttctacttctattcgcngaccacagagtggtacctggagatatgtcgcgggggtcaggagaccttggggacgtcaggtggggtgctatttcccaaaaccaagcttgaccaatcccgacccaacccgggcataatcagtcagtgagaacctgggatgtacctaagcaggcgagctcctggccgtcaacagataaaaggaactaagaccacatagcaaggaggcttgtgtggtggctggccacctgttaaaccttgttgatatatgggaagtggcctctggtaatcgattaccaaaggtgggtaatcgattacaaggcttaaaagtgaacacaggaagctaacatggcctctggtaatcgattaccaaagcgtgttatctattacca

SEQ ID NO: 101556 - DNA, 458 bp, Glycine max
  unsure (1)..(458): unsure at all n locations
tagtcaggtcaaaccacagtaagaatcagagtgtgaatgctctaaaactctatttatggagaaagtatccttaaaccttactaaaccaaaatgatgctatatcatataatcattaaaaaaatttataaactcccaccaaaggacactgaagcaatgtgatcttaacacccatataagtaatgtgctcatgatataacacacatgtgatgagaaccacacaaggaacatggacattgaagcaatacaagaaattggtggaccaatgacaatggggcatgctaagaaaggaaaggaagccttgaaccaaatgatgacaactctcactgaagcatgttcacatctagaacgattaaagaccaagttggcaactacatatagcaacttgaggaataaagatgatggactaattnggatgatcacgcataaagatataagatctagttctattttataagcat

SEQ ID NO: 101557 - DNA, 387 bp, Glycine max
  unsure (1)..(387): unsure at all n locations
tggaagggtatcctgcccatagatagtaaggatcgaaccttgggcaaatggtccccaaattgggaaagaccgtataaaataattcagatctattcgaatggtgcttatgaattagaggagctaacccctcagaaacgtactttgagcataaatggtaagtatttgaaaaaatataaaccaacactgctcgaagttaaaataagcatagaataagagaaatacgggaaacataaaaatggcgataacagtaaattgccacgaaagggcatgtgtcaatattacatcgaaaagtagaatcgaaatacagaattcgaaataaagaaatcataagttctactaagtcatgaccaaatcctcatacagctntttcaaggtggtcatctcttt

SEQ ID NO: 101558 - DNA, 423 bp, Glycine max
agctttaagtatttggagaataattaactactttttttatctatgagcatgaccaagctgatgtatccaagtttctcatatgtctgacttaccattcaaatatttaatttgtacgcacctattgcgttgttgtttgcatcgtcatcaagatattcggtgtttggacatatattgatcatcatcacatgtatgaaaagttttcatcaacttttgatgctaaattttgttaccaatgcttttctacattggtgtctatgatttatgaccaatgctttatataacaagtttgttcatcatgagtgaaccttagaattcccgttgagattgaatataatgattcttgcgaacagttcgcattaatcgttgtattgaatcttgaattttccggttggacacgttgtgaagagtcatattcttatgata

SEQ ID NO: 101559 - DNA, 408 bp, Glycine max
  unsure (1)..(408): unsure at all n locations
ttgagcatcaagaagatataattcaaaggatgagcctcgagttctttctcctagcaacctngtatggcgagaccaaggtgaagccagaaaagatccccgagcaggaaagcttggtcccaactgggaaggcccattcatggtcatagcaagcctagacaatggagcctacaatctataagaactagatggtaaaacaattctaagaacatgaaatgctacccatctaaagttctatttcagttgacctactggaagaccgggtgttgtactctattcccttctcaagtctattgtcccaaaagagaaaaatcagtgtttgggcttgagaagtttaacgaagcatgtctggggaacgaagggaatttgttcttaattgactacattgaataaagttacctctctctagtt

SEQ ID NO: 101560 - DNA, 446 bp, Glycine max
tgattacttttctaatggaactgtattatatttacttgatgcttattctaagaacacttcaaatgctaatgctgtgcgtggagtttttgtagccagtgcgttatataaagggtggacggagatagtgctcataaacaatttagacatcattgatacttggcatttggatggatacagcttctttgttgtcgggtaagtgtaacatacaaatactgcattaagtctattttaatgcaagtggttgttaagtaaattgcttttcttaacatgtgtcactatacaacctgatcatgtaaaacttatacaagtaaggcaacacatcaagtattacaaaattttctatagatatattgacatattattatgatcttgaattctttgtcagctcagcatcattatattttgttggatatgaaactttctggctgtaaataaatgtttatgac

SEQ ID NO: 101561 - DNA, 448 bp, Glycine max
actctggatctttcttataatcagttgtcagggacaattcctatatccattggaaattgtagtaacttacagaatctgtatgtggaaaggaatcaattacagggagttattcctgagagtctaaataatctcaaaaatcttcaagagttatatctcaattataataaccttggatgtactgttcaattgggatctggatattgcaaaaagttgtctattttgagtatttcttacaataactctagtgtgggtataccatcaagcttggtgaaatgtagtggtctaatagagatttatgcttcacggaataacttagttggcactataccatcaaccttcggcctcctgcccaacctttctatgatattcattccggagaacctattgtcacggataatacctccacacaattgtaattgcaatcactgaaagagttgagttgaattca

SEQ ID NO: 101562 - DNA, 249 bp, Glycine max
  unsure (1)..(249): unsure at all n locations
gggggggaccaaaaangcccgcaccccccacaggaggggcccgcgccacacacagagaggaaaacagccccccgccaaccggacgaggacaaaaggggcaaaacaaagaggggcggcatggaacagggaagtaaccgggagggaccacgaaaaagaaccaaaaagggggggcaaggcggggaaatcgccagagcccaagggaggcccaggctctaaaaggacgacgaacaacagcacgcaaaaaccaag

SEQ ID NO: 101563 - DNA, 188 bp, Glycine max
gaataaattcaaacccgaagtatattgtcaataactcaatccggttatgacgttatgatgtattaaccttactagaactatctgaaccgttaatgtggaaggcatccatacctttctctcaaggttcaatgcctcctgaagtggatcttacagattgcaaaatacaatatgctcgattttctgaagag

SEQ ID NO: 101564 - DNA, 410 bp, Glycine max
  unsure (1)..(410): unsure at all n locations
gttccagttgatggaccgccaaatcataagtttgtgttgtgaaattctcagtatgttctttaccttctgagaaaatctaaactcttctcaactccaagccgtccaacatgaactatcaagggcttctcaggttcaccattgctgtatgacacaagattaaaaataaattgaaaccccattaaatatcaaaccttgggcacatgaaaatggcaaatggtctgcacctcagccttaatcgcatttcatgggacttgaatcgtggatggaaacttttagaatcgacacccttgttccaaagacaaatcttgttcgctggacatcaacaggagaattgagttagacaaaaaattgctgcattgacaatgtagnntgtagattacatntatgtttatgttatcttgtattaataa

SEQ ID NO: 101565 - DNA, 460 bp, Glycine max
  unsure (1)..(460): unsure at all n locations
ttgtggtgtngagaagaaatcacatgtttgccatctttcttattggggagaatgtgaatgtctgtatacatgatcttgatgatgncaaaagaagaatcaatctatgctcattttgcttcaagattaatacaagattgtgtctacaaataaagccttgattcaagatttcttcataatcaagccttgccttacaatgaatcgtttcaagtcattcaacgcacatgttatctattaccaatacatgttatcgattaccaatggtttgaaagtgtgtaatcgattacacatcatatgtaatcaattaccagagactctgaacactgtgagttcaaattttaaatgagaggtcacaactgttcaatataaacaattgtgtaatcgattacactaattctgtaatcggatcaccatagaagaatatcatggaatattcgctaacagtctcattcttttcttatat

SEQ ID NO: 101566 - DNA, 181 bp, Glycine max
ccctagcaactgagaagctaaaattgaccacctacaatgtcacaaacaaaaatggaccgacaaatgaaagctccatatacccaacaacatctatgaggactccatgtggtggcaagatctaaagatggcatgcaagaagaagaccagcacaccaaatctagaaagagtctagatgactaca

SEQ ID NO: 101567 - DNA, 321 bp, Glycine max
tcacaaaatcacatttcacaccttcacatgaatcacatattcaaagaaacaaatctcaaatgcaacacaacatctgacacgcacacaactcattattcatcatcatgtaacaagtcacaatgagcattacataaacggtgtgtaacaaatacactaagacttaatcttatatgcaaggtggtaccatgttagtgaaaaacctcatcggacgcctaggaggtcatgacaagacaaaccatactctggtatgggcgctcggcctcgataaagtatcgggaggccattcaggggctcaatattgtgcgagaatggctcaatcat

SEQ ID NO: 101568 - DNA, 393 bp, Glycine max
  unsure (1)..(393): unsure at all n locations
tctagagaaagctacatgaagttgcctcagtgaaattgcttctcagccttcgataactgttggatcttctcgaaatttggtatgcaacttcacaagacactnttccatgatctgaccatngggatctttgagaagatgtctggagtgttctagaagcctgttaatgaagcttctagaggaagcctcttaatgaagcttctagagaaagctacatgaagatgtctcggtaaaaacgctgcccagccttcgttaaccgttggatcttctctaaatatggtcttcaacttcacaagacatttttccataatctgaccgttgggatctttgagaagatgtctggagtgtgctaaaagcttccgttcccagagcatatcttatttaagcatttcagtc

SEQ ID NO: 101569 - DNA, 412 bp, Glycine max
  unsure (1)..(412): unsure at all n locations
ttcaagaaaaatgccaaactcccccaaaaagtttgatttcaagcttaaataggtgggttggtccgtgctcgcgggcttaacgcaaatctgaatcgcttatcgcgcataagtggattgtggcttagcgtgcttctttcgcttagcggatgagttgaagcagtgtgcttgatgacctagagtggtgcgttcagcgaacctaacagctcatcttcttctggattcttcgtcgcgcttagccactgagtgtcgcgcttagcgaatgctcgctaagccagcagaatggcttagcgagaaggtgaaaacaacactnttgccaatttgcctaattaacctgaaattgagagaaattgattattaaacacacaaaacaaaagtataaattatatattacctatatttaacaaaaagtact

SEQ ID NO: 101570 - DNA, 428 bp, Glycine max
  unsure (1)..(428): unsure at all n locations
gcttatggtaaaatctgggacctagctctggtataagtctccttagagtccattgccttcctcgcccagtattatgatcagccgttgaggtgcttcacctntggggactttcaactataacctatggtagaagaatttgaagagatcctatgatgccctctagggggaaggaaaccatacctctttttagggttctatccctcattagctagaatttccaagatagtccatatctcggcgcaggaattataccacaggaagcaagtcgaaaatggggtggttggaataccgagaaaatatctggaggcataagcaagaatctcggcatgtaaaggcgagtgggccccgtccatagatattctcgcactgttgatctttggaggagttctctttccacatgtggatgggttggtggacctggtattgat

SEQ ID NO: 101571 - DNA, 285 bp, Glycine max
aagactggaaagcgggttctaatgacttctctgccgcttccacataaagcataaaggatgggaagctcaccaagatgtcttccttccctgatacgatgaccagatgcccttccactatgaatttcaacttttggtggagtggtgagggaacaactcctaatgagtggatccacgggcgccccaacagacagctgtagggagggttaatatccattatttggaaagtaacttgacaggtgtgagggcctatctgtactgggagatcgatctctcccctaacctctc

SEQ ID NO: 101572 - DNA, 427 bp, Glycine max
  unsure (1)..(427): unsure at all n locations
gctttaaaataagcataattattaaattattnttaagtgatttacagaaatttctgatgtgagggtgggaagtctaaattcccttgaagagagtatatatatatatatatatatatatatatatatatatatatagatcgtnataaacaaagatttatgacaaataaatattttttttatctttacactcataattattctctcattctctttctttcaaaattgagaaggaacagatatttaagaaggacatataactattctttctttctttctacagattcatttcaacagaaaagataattgttccatccttntctttgaccttcatcacttctgtgctgatacacacaaaatgaagggtcaaatatggatcatntctacttacgntgagtttttattgagaaacctttattatgtgtttaag

SEQ ID NO: 101573 - DNA, 450 bp, Glycine max
  unsure (1)..(450): unsure at all n locations
agcttgcacattgctactngatagaagaagacttagatggtaaaccttggttcttcgatatcaaatggtacatcatagacaaggaatccccacgggaggcctttaacaacgacaagagaatgttgcgaaggttggcagccagctttttcctaagtaggaatatcctgtacaagaggaaccatgatatggttttgcttcgatgtgtggatgccaaaaaggcggagcaaatgctagtagaagtgcatgagggatcctttggaacacatgccaacaacatgccatgaccctgaagattctgagagcagggtattacttgctcactatggaaaacgattgttgcatccatgtgaggaagtgccacaagtgccaggcctttgccgataatgtcaatgctctacccatacctttgaacgtcttggcagggccttggtcattctctatgtggggtat

SEQ ID NO: 101574 - DNA, 376 bp, Glycine max
  unsure (1)..(376): unsure at all n locations
ggctcgtcttgctgatatttatcatgcagacctttctgattatgaccgaggaacaattagggatcaacttgaaacttatgtgcttcaagtgagaagaaatgcttctttttccacttgtgaagatgttcaaagtttggctatgaagatggttcaaactgagaaacatttggtatttccattggnttataaacttattgagctagctttgatattgccggtgtcgacagcatccgttgaaagagctttttcagcaatgaagaatatcaagtctatnttgcgccataagatcaacgatgtgtggttcaatgacttgatggtatgttacaccgagcgggagataattcagtcacttgatgatattgatatattcgaacat

SEQ ID NO: 101575 - DNA, 228 bp, Glycine max
  unsure (1)..(228): unsure at all n locations
agcttgtaatatgtctagtcaactatangttcngnttttggtggcctgtggaagatgattgggttttttactgcattgtataatgaatgatcgaggccgtacccgaatcaaataaacattaaaaatacagtatttaagaagtgatcctaggtcgtctcccaacgagcaatggtcaaccaaatgttcataacagatagtaataaaacagtaacgaattggggggggggg

SEQ ID NO: 101576 - DNA, 486 bp, Glycine max
  unsure (1)..(486): unsure at all n locations
cttcaactagcttaccaatatatagataatgcattctgcaatctgtttatatatcctcccaaacgtcaaattctccgcctatatattcaacctttccatcactggcacgtggagtgaatcttcctccatggtgcaatactaaagttatattgtcattcattctacacaatcagaaaccgcaaacatggtcagatattatgaaataaaaaaacctacctcaaaaagcgcgaagacattgacattgtcaaaaaccgcgaagacacaatcaaaaaccaaaaacattgtcatctataaaaacagagcatcataaacgaaaataatanacgatcataaacctccctacgaagcgcgaagacaatgccacagatgaaacccctcgaacatgtaaaaccccaaatcaaaccaccaaaacaatgcaaacgaattgaatgaaatcaccaacctgacaataagcgcgaaccctcaatcacgagaatgggagggaag

SEQ ID NO: 101577 - DNA, 361 bp, Glycine max
ctgcagctatccctgtttactgacatagttttttatcttattctaggacactgattaatcgaaattaggatttgattattttaaactataaacagtctactgtattcacttaacatttgtatctaaattgtgatcaactatatataagaatatacatgagtgtgaacatgtactgatacacaaaagggtatggtgtagaaataaccatgtgactcaatcatgtttatgatcgagttgacaatcttcttggacgaaagttataaatcaaacgcatttgtctgaatgtgatgtgacagtcactgatctttatcaatttccatatctttcaatcaataacaaataatatatttgaagagactca

SEQ ID NO: 101578 - DNA, 230 bp, Glycine max
gactaccctgtgtacttgagacatttctttctgatgttcttaacgcgagacttgccctttgtctcacgaggcttatctgagctcctcgctagatctctttcgggaacagatttgcttagctaatactggagaataagtagagccactaatgccgaacccttgctccctcacttttcccctattaatagagaatttgggatgagcatggcactcagctcgccatccgagtc

SEQ ID NO: 101579 - DNA, 381 bp, Glycine max
ttgtactatttcacattgatttatttggtccctctagaactataagtttgggcggttattactatggcttatttgtagtagatgattactcaaggctcaaatggactgtgtatttgaaaaccataagtgaagcttttgatgcttttcacaaaatttccgagatgattcaaaatgaaaaaggtctcaacatttgttcacttataaatgatcatcgaggagaatttcaaaatgagtcttttgaaaacttttgggagaaaataaaattcatcacaatttttctaccccaagaacacctcaacagaatggtgttgtagaaaggaaaaatagatctattgtataaggtgcaagcacccttataaatgaaacaaagttacctaagta

SEQ ID NO: 101580 - DNA, 471 bp, Glycine max
  unsure (1)..(471): unsure at all n locations
ccacttgggaatcgnggaggcatggttgttcttaactaggtgtggcttgagggaactcctcttctattgcagccacctccttctcggacaccattacagcactggtgaaacactggctaatacgggcgggccataccctattcacctcgaaatcttgacgacacgttgctcttctcggcattccgggttcataccctaatccatacgtgtatggatttcccttgatatcgaccatgtcggcattcccgaggcagtactagcctagacccattccgggctcaaatccgttcctgagcataacacgcgccaccattattgccgctttggagagagaagggagcgactgacttggttccacagaggcgcagctcaccacctctaaggattggaaagccgtacaaatgattcttccgcacttctacgtacggcgcggaggatgggcacttacatcatatcctcttacccgaccta

SEQ ID NO: 101581 - DNA, 454 bp, Glycine max
  unsure (1)..(454): unsure at all n locations
gcttagatgaaagaagtagaagagagacattgttctctttagttatgggtacaacacaacctatgttaatgaaacactagattggacaattccttctttgtgcatgattggacactttaccagattacagaagattggacaaccaatatagaagatgagagtactggaccacacgaccaaggttgtcctccaccctgcctctctcgtctatcatctaaaaataaaaaatctccaccttggttcaatgtcatttttgaattacaattaactcattttatttctatcaatctacattaaatagattcagacaatgtatgaactngcttcctggaataggcttcatgaacatatcagccatattntccctcgtattaacttcttggactctgaacctcttctcataatagatgaagtggtttctaatgtcaatgtgcttcgtcctctcatgatggac

SEQ ID NO: 101582 - DNA, 453 bp, Glycine max
  unsure (1)..(453): unsure at all n locations
tgtacgttaagtgacagtgattggactggagatgaagatgatcggtattagtactagtggattgtggttttcatgggggaacacaaccttcacttggatgtcaaaaaattagtcgatagtcactctttcaacttgtgaggcagaatacatagcaactacttcatacatttgtcatgcagtctggcttaggaatatgttaanaaagttgggcatgtcacaagaatagccgaccaagatctttgttgatagtaagtcagccattgttcttgcaaagacntccagtgtccatgatcgaagcaaacatattgatacatgttaccactacataagggagtgcatagcaagaaaggatgtacatgcagaatatgtgaagtctcaagaccaagtagctgacatcttcaccaagctgctcgagtaagaagacttaatcaagttaagaagcttacttggaat

SEQ ID NO: 101583 - DNA, 388 bp, Glycine max
agcttatccttatggccagcctcttgtattcttctctcgtgccaccccggaagagtggagccaagcccatacttttgaagggccactcccaccttatgaagactattccgggcaagacaatggggaaggagatacccatcttggccccctgctccacctcaaagatccgtccccgcatgaaccaaccgaacatagtccgtcataccccggcctcacccacacccgtaaaagaatctgttccctttgcagaacataagggaaagattgaggcgcttgaagagaggttgagagcaggctatggcctctgttattacccattctcagatataatggatttatgtctcgtgcccaacatcgtgatccctccccaagtcaatgtaccggactt

SEQ ID NO: 101584 - DNA, 453 bp, Glycine max
gcacttgataatggagaacacatgaatatcactacgctatgacattcatggtgctccgaacaaaggtggagaatggatgattgccttgagggtcctctcttatgcaatcatgaagcacagctccgaactctgaagtggagcacacatgaacagccctaatcacatcattcatgtgtgctcctgaaaggatgagaatggaagattgccttgagggtcctctctaatgcaatcattgaacacaactccaaacttgaaaatggaggacacatgaatgacaacacaattctatcatggtgcttccaaatatggtgagaatagaggattgcctgagggtactctcttatgtcatatggacacaactcctacttctaagatgaggcacatgatcagcctaacaatacatcatgagctccgtaaagataaatgaagatgcttaaggctttttagcaacat

SEQ ID NO: 101585 - DNA, 418 bp, Glycine max
  unsure (1)..(418): unsure at all n locations
tgcatatgacatatatgctctttctttatggggagtgttaaaagatatgattagatctttaagtaaatatggaaatagggaataacataatcttaccttaattacactaggggttacttaccttaatngtatcattattctcattataaataaaggcttagtgtggtcatccaagacacaattcatgaaattctataactctcaaggatggtgttaattgctatgctaggaacatgggtattaacggcgtgcctaagtcttactatgagatgttgagtggagtactaatgtggcttggttcccccctctctttcttgttttttatctatttcatttaagatgaaaaaaataatctttaatatgtaaaaagctaccctgagaacaagttaacgaagaagatgccagttcagatggatca

SEQ ID NO: 101586 - DNA, 404 bp, Glycine max
  unsure (1)..(404): unsure at all n locations
actcagcttaagaaagctaaattggaaaatattaaatatcttgttagatctttatctnaattatttcaaaaatattntatatatagtattaaataagaaaatacaaattttatcaaagaaaaaagaaaagataaatctataattttaaaaatatataagatattttgttcataaattagaggattaataataaaaagttgtgatgaaatatttacaattattaatctaaatgtatgaattctaataattctttctctggatcttatgctaaccagcgtgtcttttggtgggttggacgagttgaaaggaaaattctaaacaaaaaggatgtttaaaaccctattcaacgattaatgagagagagaatagaagtatgctaagtaatatcatctcatataaagaga

SEQ ID NO: 101587 - DNA, 430 bp, Glycine max
  unsure (1)..(430): unsure at all n locations
tgcagcttctcaggaagcctcttaatgaattttctattgttagctacatgaagntgcctgagtaaaaacgctgcctagcctatgttaaccgttggatcttctcgaaatttggtttacagtttcacaagacacatttccacgatctaaccgttgggatctttgagaagatgtctgtaatgtgcgcgacgtttccgttcctgagaccattgctcacttgtgcgttttgagccttgtagtccaagtagcttaggaaaaacgccatttcttctcctttatttcttctaaaaccatctccaacatttcaagatttttctccatcacccacaaccaccattatccaccacaccgagaggaacccttcaatcgaagcgaaatcttccaacttggcttgtggtttcggtagagaacgaaaccctaatctgacctttca

SEQ ID NO: 101588 - DNA, 436 bp, Glycine max
ctcagctcatggggtcggtcttgagcttaatgggatttctttctgaattcttcggaagcaaagagaacaggataggggaggctccatccacaagggaataagccatggaagaaggagcttcaccaccaagaatgtgccttggataagaagcttgataaagatgctttaatggatgacaagaaacagagaatgggggagcatgaaattgaaggaattaacgatggagaaaagtggagatttgaagtgtgtctcataagagtttcatacatcaaagttacaacaagtgttacacatgcttctatttatagactaggtagcttccttgagaagttttcttgagaagacttccttgagaagattctgtgagaaaactttcttgagaagctagagcgtatcttcacacactccttctaatagctaagcttacctccttgag

SEQ ID NO: 101589 - DNA, 432 bp, Glycine max
  unsure (1)..(432): unsure at all n locations
tgcaagctgcttctacagaaggtcctttgatgtttattgttataagcggaattcgcttcttggtgtaaacactgaacacanaggagaaaagtcctttgtggttcattgctttgtaagggattttacaaggttagtgaaaatgctcacatagaatatgcttgaggactggatgtatgcacacgttatggccaaaccagtataaatccggttttgcattctctctttccttaatctcttttactttctattgtgtttatatttctctaagcctacttctccttattttttattcaaggaacttacaattaaagaaataattgaatctagtgaatatctaagaaagggaaaattttccattaagaatattcaacgaaatctttattcacacccccattcttaatatttttatgccacttgtctaacagtatttac

SEQ ID NO: 101590 - DNA, 489 bp, Glycine max
  unsure (1)..(489): unsure at all n locations
ctagctaacgggagtcctgacgaggagaagaagatagaagttataggtgatcaaggccaagtatttgactaggccaccatgaaccgttccttcttcgaacccaaacaatcgatccaacatcacaatcgactagacctaacccaaacactccatctccctcactctacctttcactttagctctttttcgcttccacaaattatctcttgatntctttagctctttcaatattaatagatggatgtgatgccttagctgccgacgaagaaggacgatgaacaaacgaagataagtgtgatgtgggttagggcacatgattccatttagatttgggaaatttcagttttaggggttgcaatactgactgtgcttaattaaaagcctggaatctttagaagcactatgagctaacctcaaatccatcaccgtaacgatgtcacgcctaccattctaaanacttaattccattccacaactaccatatatagg

SEQ ID NO: 101591 - DNA, 457 bp, Glycine max
gcttggtttgggcaatagcaccccacttgttgttcccaaggtctcttgacccccgcgacatatcttctggtaccactctgtggtcaacgaataaaagcaggaagtttcacccttctacacttcctcatctcaagcttgtaggattatggggtacccatcacatgtggtactaggtggcggtcgggcgatggtgcacaacaagtttttccacatccacaaatcgcgcataaacccaccatcccctgttgcccacctccaactgagctcacgtactcccacgtagcccatatcctcgtttctctcaacaccgggtccccatcaatcctcccaagcttccccaacatccaagtaatacaacattaaaacagcacaaactatcacagccaagataatagggcaaaggcagaaaactctgcccaaaaaagcaaccaaaatcacaactttttctcacttaaag

SEQ ID NO: 101592 - DNA, 463 bp, Glycine max
aagtggtagcaacgcctatgtcgagtctcttttgttctaccccgcttattcagtgttgcattgatggaaacccgagtaatgtttgggcatgggtactaacctggaaggggtttatgtcggcatatcgatggcatggcgagtatggtacagtacaaagagaaccatggaacgtttgggctatgatataaactcacatgtgccgacgtaaagagaagcaccctatataaaagggtcgaatcatggtccatcatcaaagaccgcaagtgggaggaacttccttatgtcatattaatgatagctccatcatcaccggctggatgtgtgaagggcgaatcaccatgatcaatgatgaagtttcttatgagcaatcaaactggtgcggctttgccttctgacttgagttggaaatttgaaatttttaacatccataattctgtgcaacataatgaatttgtgattcaac

SEQ ID NO: 101593 - DNA, 321 bp, Glycine max
cttacccatttctctttttcactacttgtttttatcaaacaaatggtgttttaataataatttggtattatatgttcatattcttccttatgtgtcaaaatccattcctaaggcttccaactttctacttcatttttgttttattccataaaaatacataccactatcttggaaaaatgcttacctattattctcttttaaaaatatttttcttagtgatttatagtattgtcattgttggggggaaacacacacctctttattacgtacaatgatgagaaaatacactataaaagatctccattttgtttaatttgattt

SEQ ID NO: 101594 - DNA, 404 bp, Glycine max
  unsure (1)..(404): unsure at all n locations
taggcctaccatnngctatttgattgaaactattagtgaattttagaatgctaagaaaataagagataagcttaaactacctcacaactacctggacaattacaagtggcatgataatgggaggttgtggattgaatgggataatagtaaaattgatgtgaggcatgttaagtgttctatccaatatgtgcacgtgggtgtgtataactagcagggggagttcaaattctggcttactgcagtgtatgccttaaataagttggatagaacgaaagttctgtggaaagaattggaggctatccataaacatcaacagggtccttggtgtgtgattggtgacttcaacaatgttactaaggctcaagatagaattgaaagaaaagctgtgacagaagtgagtacat

SEQ ID NO: 101595 - DNA, 438 bp, Glycine max
  unsure (1)..(438): unsure at all n locations
agcttgaaactagaccccaccacttgtgatgttgctattatatcatatgncacagctggccatggagaatcaatataatgtttagatgattccatgggtcttcttaacccatcatttgtcttcatatatntattacctgttttgcctccaccaatcttatgaagaacttggtcatggtagttaaactgcctctgacggaaacctctaaacgatctagcattccagtcatttctattttgaaacctcctaatctgtgaataagcatttgaacatgaagcagttcataaattgatatggctacagcattcatgtgagatgaagggagggattggaaaagagatacaaaaacattcttaggcctccattggtttagaaaccaaacggaacacactagtctcactaccaccaggagttgcttgcaatcagcatcaacccatt

SEQ ID NO: 101596 - DNA, 421 bp, Glycine max
  unsure (1)..(421): unsure at all n locations
tgtatattagcaaatcttagactcacaggctcaattattgttttgctaagaatatcataagatgcagaatcctactgtagaaacaaatgatcattcacatgcccctgcagattctaatatttacacccaaccagaagatgtgagttctgattctgcagcaagagaactaagaccaccaataatgggatacttgtaaaattgtgagggtcatctaccctattgcaaaacattggaaatgcataaccaagaaaatagtcatcaaagaatgttgaaaccttattgatgaaatacagagactaaaacttcanggttcagttctaacacccaaactacagatggatgttctaaagcttgaccataggatagatattctcacccatcagtcagggacaactcaagctgcttaggtggttctcatttg

SEQ ID NO: 101597 - DNA, 478 bp, Glycine max
  unsure (1)..(478): unsure at all n locations
tacggacctattaaactcagcttataaacaaatgcctcattattttcaatatgcatgtttattangaagcatcaacaagaatcaagccaaggctattgtgcaagcaatcaatggggcaaaacacaccaaatgattatgatgatggatggctcaaattctcacaaaggtaaactcatcactttcaaattgagctttcaaaactatcatgacatgtagaggagaatcaaggatttcaagtcacaaaatgtcaagaacttttattttcaaaacaattacccatttcttgaacatatttataattcanagaanaacatgcaaagtcgtacatacacacaaaattgacccaaaatattaaactaaaaatccgacgaaactaacaacattaacaaattaacacaactaacanattaacataaccaacantactagcaaaaccaaagaacagtccctccactccctcccatacttaaacaacaca

SEQ ID NO: 101598 - DNA, 391 bp, Glycine max
  unsure (1)..(391): unsure at all n locations
tatctagctntcatcctacaaaagtaaaaatctcaaaagcctgttaaaattcaaggaggtaccctngtgatactacaaagcaacattggatgtgctcttaaggtacttaataatccttctgataataagtaaataggattcctcgggattcgcttgatatcttgcacacaagaaaacactaagcataatatcggattgacttgtagtcaaataaaggagtgaaccaatcatacctttgtacttttccatattgaatttctaaatcaattttgtacaatactctgtttgacataagaaagttccatgcttcatttgctngacttgaagtctaaggaagaaagttaattctcccatcatagacatttcaaattcttcctgcatcgaattggaa

SEQ ID NO: 101599 - DNA, 481 bp, Glycine max
  unsure (1)..(481): unsure at all n locations
tctcgctagacatctcatctactgctcttctaacttatctcaanatcttttttctttcaaaaagggatttataagttgggaaaagacaattcaaccccgtcttcttgtgctatttttgtcacttcaattggcgtcagagcttataattttgggttaagcaatcttcatagtgcaagaggaagatcctagaagaagtgatggctggacaagctctaaccgtgtgtatacctgaagatgcttcaaccaacaagccttcttgctttgatggacaagacttctactacaggaaaggcataatgaatttgttcctagaatctaaagatgttgatctatcagacattatagagattggtccctagaaaccaacaaaaagaaatgagcctaaagatgagatagacaaacctaaatttgaatggacctcagatgagaaagtaagtgttcttttgaactctatagcanagttctttctgtcatatgttat

SEQ ID NO: 101600 - DNA, 384 bp, Glycine max
  unsure (1)..(384): unsure at all n locations
tcctttatcagctatcagctgtgttcataactagtcacaattacgatgttacatntatcaagattcccgcgcttacgatgactccagatcagctagttagaacaccaattcgccatgatgaacagtagtatctaactttgaaagcactacaactatcgttcgggttatgttaatatttagatgtctcgtcattgattaaagaatgtatagtttatgaatagagaatcgaaagacaaaaaatgtgtagttcattctgtggttctaacattcacgagttcctgtctcatttctactatgataaagatccattcattccctgtcgcaggatccaattgcgggatgttncaacttggatgattccatacatgaaggctcacttacaag

SEQ ID NO: 101601 - DNA, 439 bp, Glycine max
  unsure (1)..(439): unsure at all n locations
actcagcttgaagtgcatagtgctaaaggttctggttnntagtactccatattgttgtacaattaactgggtttctacctttgtgatcatttagtttaatgtgctaagttgtttcaagtttggtctttggcaagtgtgtacaaagttagtacctatcactttctatattttttgttgttcagacctcactatgaagactaaaagtttcaagtctttaatatgttagtttttaaatatttttggaggtagatgttgaaggtacttacgtctggccttgtgggagagctcattntcttgaaggctatgtcagtttttagtaaaaggctatgntcagttttaacagtgttactttattgctattgaaaatgttgtctttgagagcggtgatgctcacacaatagttagaaacaaagtatcaataaatcgtgtatggacgaca

SEQ ID NO: 101602 - DNA, 381 bp, Glycine max
  unsure (1)..(381): unsure at all n locations
tcatacctncattacacttcatttgtacctgagcttgcttccctatttttattaattttggtcatgtttatgtgtgaattgaatcttcccctcgaggaccaaaagataaaaaaattgtaaatataagaacctttttatagggatagacaccaaaatctaagaatacatgataattatctatcatccaaacttaactcaggataaaaaaaagtagcacattaaaattttatagggatagaaatgatatattttaccgtattttttttcatgcttgacttaactctcaacatttattgtcaatgataagaaactttgacatatatttgatggagtggcctatggttcaagttgaaaaagtggggaccttgatatggatttggt

SEQ ID NO: 101603 - DNA, 413 bp, Glycine max
  unsure (1)..(413): unsure at all n locations
gaagagataacaatgtagagagtgatcgaagactttcaaatggatttccactgaatttattcatagagagatcgagatatcttaatgatgaaagttttccaaatgatctaggaagagcaccaccaattaagtttttggaaaaatctagctgcacaatatttntaaatgccccaatatgatctgtcagattgcctgaaagtcgtgaactctgaactgcaagtcttgtgagtccatgggaaatacaaggagcaagaatttctaaaagttcattaacctgttggttgagtttgagaatatgataaattatcacccttaagttgcagagattacccaaagaaagtggaatgtttcctttcagttgactatatgacaaatgaagttcaacaagagaagtcaaatacccaaagaagttg

SEQ ID NO: 101604 - DNA, 444 bp, Glycine max
  unsure (1)..(444): unsure at all n locations
gatagaaaagaccaactttttatttaacatgaaattgttactaaaataattacatgaagaagagatgcataccttcactttcagatcaccactagccatcctaaccaaaccacaaagattgtatgaaatggcattggtatcttttattgaagccatatttggcaaaacctgagcgagcaaacaaagtttgaaacaagagctaagcaacaacatttatcattattacaaaataggtagcaaggctaaaatttaagcttcttccaaccatctaacaaattttcaccaacatactaaaagagaaatataatgaactaaaaaatctgctaaaactcttatgatatatttaccatataaatctccacgttcttgaaattgtaatgctccttttgggcctctatggtatagtgcgtggatgtaacctaantaaattaacatagaaataaa

SEQ ID NO: 101605 - DNA, 284 bp, Glycine max
  unsure (1)..(284): unsure at all n locations
cttggaatgaagacctcatacataagtttgttcagtttttggttcagcgagatccaccacaaaaaagatttgatgttgcaggtcatgttacatcttattgttatgacacacctctgatgcaaaaagagtncaatttgtgtattgaattataggaaattgcaacgcctaaaaagggggggtggagtgttcttatcttcccttttaagctacccattggtctttcataaataacttagaaagtttctgtttgggaccgggtccatcttcccattaaattttttgtt

SEQ ID NO: 101606 - DNA, 259 bp, Glycine max
  unsure (1)..(259): unsure at all n locations
atagttttttttttttttgaatttttggtccangcagaggagaactagtttgaattttttgtcatagtttgaatttttttaatatcttttatttggtccaagctcactttgagctatcatactccggtgtcaaggtctttcttcctgcacacttaaaactcaccttgtacctcctttttctttaatattttaaaacccctaaactaacattacttgtatgtctggaaaaattttcatgtgtttttcttttgtagttacc

SEQ ID NO: 101607 - DNA, 436 bp, Glycine max
  unsure (1)..(436): unsure at all n locations
tattactgctttccttttttagactcataagaaatacagggaacttctaagacgttaagtggtattgcaatgtatgcaaaaagaacaggtggaggtttattcaaaatcttaattgttaactaaacaacttgaaagatagtaataagtactactctaaggtagagtgaatattcccatatttaacaattacattgacctacagcatgctgtgaccagcagtcttgcttattgatttcaaatccccttttggcagcttcctcagcttcctccatccgtccaagctccaacaaagganaagcaagcatgccatatatataattntctccttcattgtgaggcagaatctgtaaaactttanagtataaggtactcacttttcatcaataataagaagcaagctactcanacagccatttaatagacanataatataaag

SEQ ID NO: 101608 - DNA, 300 bp, Glycine max
  unsure (1)..(300): unsure at all n locations
atttttgtcttacacctttgtcatctatagacagaaagtctaatgacatgcggagatacccaaggattatccgcacctttttcaactataggcaagtgagcctattaacctagaactattttgtctcacacctttgtcatctagagacggcaagttcgatgacatgcggagatacccaaggattatccgcacctttgtcaactaggggcaagcaagcctgttgaacaccgagactttntttagtctcaccctttttgtgtcgggactcaagagtccggtgacatgcggagacacccaatg

SEQ ID NO: 101609 - DNA, 457 bp, Glycine max
  unsure (1)..(457): unsure at all n locations
acccatnacatgtgggactatgtggttgtcggtcgatggngcanaacaattctccacatccgcaaatcacgtataaaccgaccatcccctgttgcccacctcaactgagctcacgtactcccacatagcccttatcctcgttcctctcaacgcctggtccccatcaatcctttcaagcttccacaacatccaagtaattcaacatccaagcatcatgaactaacacagccaagaaaacagggcagaggcagaaaactccgcccaaaacacaaaccaatatcacagcttttaccatagtaatattctccttgttccaattcgttaaccgttggatcgactcgaaaattttactggaagtctctagcacataaatctacattatgaccgttgggatctgctagaaaacgtncaaaacccaatctgtactactctttccacaaccagcanatacacaaca

SEQ ID NO: 101610 - DNA, 437 bp, Glycine max
  unsure (1)..(437): unsure at all n locations
tgtcttcacaaataatcatcacacagtaganactcttcttgactacccatcatatgtgcccagaccccatacccacgaaaattaaaggagaaagaagtccacccaaacctgaattttcgaagtcccactcgtagccacgcacttcacgactccaaaaatgctctcctttcgcgatttggagcagaaatgatggccaaaggttgaagctttgtgtggagcttcaatggtgaatgaagaagaagaaagctacgtgagagagggagagaaaaggcttctgaatttctttcttttggctgagtgaggagagagaacaactttntggtttttaaatagaaaggtttttctctttttctatntatttattcaagctctgccacatgtccctatttgagtggagcanaagggcccactttccctttttactgtgacccacactc

SEQ ID NO: 101611 - DNA, 330 bp, Glycine max
ttactgtttatgtgcctactagcactcaacctacatcaatgaggtgccactagagctgccatgtctctacaccttcgggcagtattctatgaaagatctgtgccgcctgttgcacatgtcctgttgttgcgtccgagccataaccatgtcaaaaatgctctgagactacccagtgaaggctaccaataggtccttccctgagtggactcaagaacgttccagggtagaggaccaggtaacagctaccccatcacgaggatcttggaaggaatgtatcagaagtatcctatcttttgcgcatgccctcatcttccaccaatacatctttac

SEQ ID NO: 101612 - DNA, 275 bp, Glycine max
  unsure (1)..(275): unsure at all n locations
acctggcaaggatacgacataaataggtattcattttacacaaaagcacaagatgcccaaagtacaatgcagaaacagcgggtcacccctagggctgaatctcaacactttgcaagtgtcaatgacgccaatccctgtgtagattccatcccttnacttgggttcattgatgaaatttgggagcttaattatgtgaaatttatagtatgtgttttcaaatgtaaatgggttaacagcaacaccggtgtgcgcaccgatgatataggatttaccct

SEQ ID NO: 101613 - DNA, 371 bp, Glycine max
  unsure (1)..(371): unsure at all n locations
ggcaaaattggacgagggcaagtgtgatttcgaaaatctgcactattatgcaaaattttgctggtgaaatgtgcagcagaattttggctttgtgcagaanatgatgtgtatttgctggttggggaaagagtagttcagaatgggttctggacaagttctagcagatcccaacagtcaaaatgtagacttatgtactanggacctncagtaaaattttcgagtcgatccaacggtgaacgaattggaacgaagagaatgttactggagtatgtgagtaanggaaagtgtggtattggtttgtggtttgggcagaattttctgccttcgcccatttttcttggttttgatagtgcatgatgtttggatgactg

SEQ ID NO: 101614 - DNA, 112 bp, Glycine max
cttgcctttaacaataatttttccttttccttttcttttcccttttaaatgcctggccacatgccattttgggattggagccaaaaggggcccaccttttatttgactttta

SEQ ID NO: 101615 - DNA, 467 bp, Glycine max
  unsure (1)..(467): unsure at all n locations
ttctaattattaacaaaatgtgtcttctttgatcttaattagttnttggcctcaatcctctatgttttgtacacaatggctagttatatatattaagtttggacgacactctttctaatgtgagcttgtttataaaatttacaagtacttttgatttggtaatttgatgtttatttttctctttnttttatggaacttanattcaactatatatattaaggtagtctcactgaaattataagttggatacattcattatattctttgaatttataagaataagcatgttgtataatttgtaagacacattanaatgaaaacttagttaaaactaagtaaaaagccaatgttatacttattatataaatgcatgtttttaaatntatgtaaaatatataatataaactaaaataaaaaataactagaaagaaaatattaaacggtgaaggaaataatagtattgatga

SEQ ID NO: 101616 - DNA, 350 bp, Glycine max
  unsure (1)..(350): unsure at all n locations
atttggaacacaaaaatgagagctttgctcacaaatgatgagggaaacaagaggagggagaaagattagaatctcttaccaaagctttgagggaagaaacctcaaaaacgcttgtatgaaatttggaagaaaaaaaaaaaatggagtcctttctcttccttgaagaactcgtgcaaatgatggagaacgaagattccaagtttgacttttttgaaaaaatgaagatataagaattaaggctagtgagaaaatcaattggacaacaagaatgacccttgcctatgccatgctcaacgtgcccaaggctaccataaatgggtattttagcttttgaattntttaccagaaat

SEQ ID NO: 101617 - DNA, 420 bp, Glycine max
  unsure (1)..(420): unsure at all n locations
cttatactgttatagtatacgcatacgtatctctagggacagagttaattgttttttattggttgggggggctttttgcccttgaccttgtcttttgcgatctctctctcccactattgaacattgaacaacgataataatataaaagcacgttagtaatgatgcaaatgacagtgacatgatgactntcctactgttcatcatgttacgtgtgtcatgtcactacgcctctgtcgttaaccgtcaagagtacatgaagctagaggtgttcttgttctatggaggaacaaaaataatctaatttaattattgtagttttgttattttatttgattctgaatttattttttttatataaatttgatgactcaattcaatttaatttgattaagattatatcaatgtttaattctttacatt

SEQ ID NO: 101618 - DNA, 355 bp, Glycine max
  unsure (1)..(355): unsure at all n locations
atatatattctttgctaaacctttgactagttttctgttattgcctacttttacgtgcacatcctatatcgtgtggattgtattttatagggatgatttttggaagctaatctgatctaatctgttttttttgcctttntgattaaatattctaacttttgtaggttcagaatttaatagaaagatgcctacagttatatatgaataaagatgaagtggttaaaacactactgactcgggcaaagatagatcctggattcacaactcttggtaggcatcttaaggtctctgtcatgccatttatgtattgcattgtanattgaattaataatagtctactgtatatgctgttcat

SEQ ID NO: 101619 - DNA, 284 bp, Glycine max
  unsure (1)..(284): unsure at all n locations
gacaaaacttgggatcttggtattacttttggaagccatggtttgaaaccccaacaccttgagaacaaagggtgttgtgatgggccaatgaatgttatgaatggaataaagtancagcaaccagattcacaacaagcatgcccaaaccaaaggcccaagaggaagataaccaagccacaatatctctaaatgattctacgtaaccaactccaacaacagtgctgagttggcaggaattcattggcttcataagcatatgctgnctgtcatctatgtttttttct

SEQ ID NO: 101620 - DNA, 422 bp, Glycine max
  unsure (1)..(422): unsure at all n locations
acatgtatntctattctcgatntcattcgctatttatacccccttttgatgtgcttaagccatttatttaaggcatttctcggctaatctaaatataaaataaatttccaccgatcgtttgaattgtatcatccgttaatttcggttaanatgaattccgaccgttcggtcgtgccgtaaccacgttggaaatcaaaatagaggtagaataataatataataataataaaatgctcttttagaaaaataaagcgaagaatcaatcggacgttttctctttgggatttctcattcttaagtgaatggactaataactaaagtgaaattaaggctaaaatcaactcgcctagtcaagctcgttcacaaaaatagggttttgaaagttatcattgtacgttcttaccaagtaaaatggatcattt

SEQ ID NO: 101621 - DNA, 384 bp, Glycine max
ctggtgcatgcaatgatttgattctgctatcaatgcaacgtatttcatgggtctatccatgttggatgccggcaacagctgctctttgtgttataatctcgcagttgatggccagcgaaaaatgaatttattaacagaacacacagtcatattaaactctgatcaggtaccggagaaatgctcatgtgatgcactataatacaaagaactgaaatgaaagatacgaataaatagttactagttactactaattaataaaaattaaactaaataactagttagtgtcccccgttatgagtaacagatggttgacctgttgctattatctacatggattggaatattatgcttgtgagtgagttaacgatcggctttggcagttgc

SEQ ID NO: 101622 - DNA, 255 bp, Glycine max
gatgagtggtggatgcagatcatgctatattgaaggccgacatcattctctttattgaaccccaatcatatttgctaattctggcgcgtacgtaagtggacataacgtacgagaaatgtgaggaggttcttacagcctataatgcctttatttgagaggatattcacatgtttttatttttctgattgatacccctgatttgtggcataaataccccttgttcaaatcaccttcattggattgtgggcggatttg

SEQ ID NO: 101623 - DNA, 417 bp, Glycine max
  unsure (1)..(417): unsure at all n locations
gctagcctgtccgatgcagcagtaatgatggcccgattatgtttttaactgttactaacccgaaatgggtttaggcaaagacaacggcggcataactagcctgataaatgccaaaggaaatcgtgggaagtatgggttaagctataagcccactcangcagatataaagagaagcatcgcgggaaggaagagcggtagtcaaagctcgcggttgagacaagaaagtgaaggaagcccgccctgccacataagtagaagctttataagcgcgggtctgggggacgaaggtcaagtggtcgcgatatacgaagatgatgttccgagtacattggatttggtacgaccatgccctcctgatttccagctgggaaattggcgagtggaggaacgccccgacatttacgcaacgagcataat

SEQ ID NO: 101624 - DNA, 343 bp, Glycine max
  unsure (1)..(343): unsure at all n locations
aacgctaccacgctaacacccctccttacttttcttcttcctcctccctcaccaagaacaacgacaccagttatgaatactacgcacgtagaacgtgcctcccttttgttggatcgagtggcctcagaataattaagaagggggggttgaattaattattcctaaacctttactaattaaaaatttactcttctaaggcttttactatgttgttaagtaaatgaagaacaaaaaagaaacttaaccaaaagtaaaagcgggaattaaaatgcacangcggaaataaaagagttgggaagaagggagacaacacacaagagtttatactgggtcggcaacacct

SEQ ID NO: 101625 - DNA, 416 bp, Glycine max
  unsure (1)..(416): unsure at all n locations
gattagcggntatctagatatcatggaattagaaaaggggtaattaagtcataagagtttaaaatgaagggtattgttgtaaatgactatacaattagtttaaaaatagaattntagtttaattagttggtgactaattaaagtgtctaattatatgatgtagaataattaaaataagttagagttgtaaaactctgaaaaattacaactcagactaaagagaaaagtctatgttgtgttgcatgtatgaatntaatttcagtagttatatgttttcaatcaataaatttttgggctatatatatatatatatatatatatatatatatatatatatatagacacacacacatacacatgtgattagtgaagcttgaaagagaaatnatatngtctaagttagtttaccatctgtg

SEQ ID NO: 101626 - DNA, 411 bp, Glycine max
  unsure (1)..(411): unsure at all n locations
agtttttttgatgattacaaagatgatgaccaaaagcccaagagaatgatttcaagattgagtccacaagtttcaagaatcaagagaagtttgatttcaagattccagaaaagatgaattccagattcaagagaagaaatccagaagacttcccagggaagtattgaaaagttttttcaaaaaacaaacgtagcacaantttgtttttcaaaaggttgattatcagtttcctgtaatcgattaccagtggcaaagtttgatttcaaaagcttttaactgaatttgcaatgttccaattgatttcaaaatggtgtaatcgattacaacatattggtaatcgattacaagtgtatctgaacattgaaattcaaaattaatggtgaagagtcatatcctttcataaaaagcttt

SEQ ID NO: 101627 - DNA, 458 bp, Glycine max
  unsure (1)..(458): unsure at all n locations
ctaactnttgaaggaagttntctcaaagaagcttctatggttattttctcaagaaagcttctcaagtaagctacctagtctataaatagaagcatgtgcaacacttgttgtaactttgatgaatgagagtcttgtgagacacaactcaaagttcaacttctctcctttttcttccttcaatttcgtgctcccccccccccccccctctttctttctctccctctttcttttcctccattgaagcatcctctctaaacttcttatccaaggctcatcttggtggtgaagctccttcttccatggcttattccctaggggatggcacctcctctaacctcttctcctttgtcttccgctgcatctccatggtggaaaatcaccattaaaggacctcattgaagctcaaagattcagccttcaaagaatccccacaagcaagcttccatcagaaggagatc

SEQ ID NO: 101628 - DNA, 371 bp, Glycine max
gcgatggtgcacaacaagtttttcacattcacaatgcgcgcataaacccaccatcccctgtttgccaccttcaactgagctcacgtacttccacgtaacccatattctcgtttctctcaacaccgggtccccatcaatccttccaagctttcacaacattcaagcaaaacaacattcacacagcacaagctatcacagccaagcaaaacaaaagcaaggcagaaaactcttgcaaacaccaaccaaaaatacagcttttccactcaagaccccagaaacaattcttcgatccaattgtaaccgttgatcgactcaaatttactggagtcatagacataagctacttttgaccgtgggactactacaaacat

SEQ ID NO: 101629 - DNA, 461 bp, Glycine max
  unsure (1)..(461): unsure at all n locations
ctacatcanagtataaatgattntatattataagtatatacctattaaaaaattctattcaaaacaataaaataactttacctgaaattttgaaccacttcacttatttttaattagtcaattccaatcttttggagatacgtattttggttaacccttttctttaagatatgcttgatgtaaatgataaaacttattcttgtattgagattgaatttgcttcattgcatattctttcacctcgtcagataaactaaaagcattcttatatcatacgttntcattagaaaaagtaaaaattaaatactatcaagatacattatcaaaccaatttgaagacataactaatattcaaatatataattaaatntaatataattgacataattatatactaaccttcatatgtcgccacatntcatctacatcatccttactatattcacttccaaccataactt

SEQ ID NO: 101630 - DNA, 304 bp, Glycine max
  unsure (1)..(304): unsure at all n locations
agattatgaggatcttccaaaaagcgaacctgatctttgtgtagaatgggaaggttacaacacgtcagcaaaaaccctaaatgaaaaacttttgaaaaaagaagaattaaaggatcagccctcagatgttataaacattgtgaggcgaatgacaccttaaaatctacattgaccacgtttggtagtaaaagtgaaagtcttgacaatctaataagatattatatatgtcttatagacagatctagcaatgtgtatgaaggaataatntatgttcacgatgaaaatattgttgtatgttacgttt

SEQ ID NO: 101631 - DNA, 433 bp, Glycine max
  unsure (1)..(433): unsure at all n locations
tgtaatcgattacacacatactctaatcgattaccagagcatatttttataanatattctcaacagtcacatctttntatttggttcttgaatggctatcaaaggcctatatatatgttacttgagacacgaatttgccaagagtttttcagaacaaaaaggtcttatcctcttaaaaagaaaaatcgttttgtcctcttacaaattccttggccaaaacacttgtgattcaaaaagggaattattgagtgctcaaattgttcaatctatctcttttaagagagatttctttttctcttcttctttattctgaanagggattaagagaccgagggtctcttgtttgaaaggattcaaacacaaaggaaggatggtccttgtgtgtntagaactntgtaaagggaattacaagatagtggaactctcaagcggg

SEQ ID NO: 101632 - DNA, 345 bp, Glycine max
  unsure (1)..(345): unsure at all n locations
accgtggggcgggaagtggacactcaaagcctcatgtctacgatccttgtctactagaccacctagtgctgagagaccaggggtccatgttgatcttgctatctgcgaggccgacgatccccacaggaagatactaacaacatatttgagaattctggagcgtgataaggtggacgtcacgtactacaattggaaggaggtccctactgctgataaggactttatttgagaggatattcagcgatttttcgtttcttatttgatgttctttaattaatagccaaaaaatacattattgtaccaaataaaccttatttgttatagtcaggccgaatnttaaatcct

SEQ ID NO: 101633 - DNA, 490 bp, Glycine max
  unsure (1)..(490): unsure at all n locations
cttagatactaagcttaacaaccatattcatgacgacacacanaagagtggagttgttgtttcgcgtgtttacacatcaagaanaacacactcattcaaggcaatatacgattcanaaggttttcacaacactaatcctcacatcaagagagaaataagctcattaacaacaaacacacaggaagataaaggctcattaaggcattatcaatcaatatcaagactacttgcatcacctaacagcttgccataatgtccaattgcacttcacaaattataaagatagccagtctcataactcatgactcaacggtggatttatggtatagtagacattaaggatacaacacacatcacaagcatcattcagtctcatttaatcatgaaaaggaaaatataattaataattcaagcatgcttaacaaaagcattcataagaaatcacacagagcacacaccagagtatggtnagtacataacgcactggctg

SEQ ID NO: 101634 - DNA, 367 bp, Glycine max
gaagcataccatatctttagatggtatcatttcttttataattgcaccagaaacaaagaaacaatggattttacctaacgagaatataaatattcttctatattataaaagaggttaattttatatctacgttcaaataaaatattttacataaaccattcaagaggaattcaccttatggtactatggataaatctgtttatttcattgatatgtcaggaacctgaaagccagacattccttttttattttatttataatataaattggtcacaatagcctctagcccggagaactaaggctatacgattaccagtgttgaggttatatacagattacagacttcttacattacctcttttttttt

SEQ ID NO: 101635 - DNA, 430 bp, Glycine max
  unsure (1)..(430): unsure at all n locations
gaacattcaaacaatccacagcagcatgccatttatgtcagtcagactcagactggaggaatgtctttccgtctttggggaggtatcccnctgaccctgtcacagagctgcagtgcactcttcctacactgctatacatgtgatgcaaggttaccctatgtatcatccacgaatctctacataacatgtcaccaaaccccaagatcttntttctccctctctcgctntcaacggtcaaaactcgttatgcgcaatccagaaaaatagtatttaacgttattcctaccataatcttttatacctattttttctttatcatatcacttatattttctcttccttctctttgtatcacgtactggaaattattattgccatacttatattatagaaatagctntactctggtcggattacacactgacactcg

SEQ ID NO: 101636 - DNA, 440 bp, Glycine max
  unsure (1)..(440): unsure at all n locations
tgaggcatgcaagctnttttcaagtcaatatatgcaagnttctttcttngcttcagnaccttttcatcaaactgcataaaacataaacggtcaatatgtaagtttctttctttgcttcaatacctttggctgtgttgaccggtgcttgcctgtcctatatttttttaagacattagctatgttgtgtcatgtttaatgtctgtgtcaatgtccacactaaagtatagtcccctgcaaagccaaataaattgaagcatagtgggcctacattacaagccaatggaaatcatccaagggattcaaaaatagcagcagcacaattcatttatgaaatactaataagtgaagattcataaataaataacaccgaattaatctaaattgtgtgtgtgtgcgtgtggggggggggcatggatcattttggaaaaacaagatcatat

SEQ ID NO: 101637 - DNA, 366 bp, Glycine max
  unsure (1)..(366): unsure at all n locations
ccatagatactaagctgagatatgaaggagtaagaccatcagcaccacatctctttgtaatggactttatnggnctcctgagatttcacaagacacaagtgaggatgaaattcatataanacaaagttatctttagcagattgactcacacttaacaattttttcgaaattgaaggaacatgtaactaatttgtaagtttaaatgttatggcatcatcattatgggacacaaaagaagaggaaccagcactagagatacttaaacccttcaccattgcctatgaaaatctgatcaagtccatcaaaatgagtgaattgttaatattttatgattcaccagttacatgaaagctgactccagagtct

SEQ ID NO: 101638 - DNA, 390 bp, Glycine max
  unsure (1)..(390): unsure at all n locations
ttacgaggaaacttattatatcactatgtgtgaagcacactttattactattttttctatttccattatcttaattttccattatagtacaaataaatcagaaactgtgatgcacataaatgtgctaactgatgtttntgtccttcaatctcaattgctgtttgtttatttttttttctggctttctaaatgttctttacgcttctttctttatctggttttattaaccatgctatgctgtactatacgatctaacttataaactggcagtttataaattaagttgtacccttctctatatatttccctattgagttatgaagtgatttttgacttgtttgttttctgaattaaactcattcatagntttgtttttgcatgtcttatact

SEQ ID NO: 101639 - DNA, 456 bp, Glycine max
  unsure (1)..(456): unsure at all n locations
cttctnntttctcttctttctcattcatattaagcgaaatatgcttatttaggggtatgggaattttacgaaagcattatgggtgtcccgaaagccccaaaagccattttttaacaaaacgtgggaggtggttgccacccagctcgcccaggcgagttatgttgctttcaccttaagcaagaaaatactcagaaacctctagaagggcccaaatttgaaaattactatttgtacccctattttactaaatactcccnctttgcccctttnttgttgattcttttttcgtaacattatggaacctcacgaattacataacgatacttgttttctttccgtaatgtcacgaaactttccggattacgcaaccatcccctcttcggcttctggaatgttacgaaactttacggattgcacaataatgntttctttcgactcccgacatgtcgcggaact

SEQ ID NO: 101640 - DNA, 441 bp, Glycine max
  unsure (1)..(441): unsure at all n locations
agctntacgagaaaccataanaactaaggtagtttctaaacaaaaancaattgtgaaacttcgccaagnatccccatggaaaaacctttattcaaacctttcaaagttaatgagaaggctaaacgaaaaattagggaacttagaaaaactaaatccttaattgaaggcgtaggtgataaccatagtgaattacttaacaagattggtagtttacttaaggtcattccagacactccccaagcctcagaaaatacttccaaaatggtaacaagaagtacctcgaaattaattaatgttattaatgaagatagtgaccaaaactcagataacacaactgagataggatcagtgtcggaaaagaatataaatccaattaataccaaacactggaaaacaccctccaaattatattatcaacgttcaactgcccctgaccttcta

SEQ ID NO: 101641 - DNA, 497 bp, Glycine max
  unsure (1)..(497): unsure at all n locations
actaagcttgatccatgaactgatgagtaataatagaaaaaagaatttaatatttcacatatgtgtcattggaaaagcaaaattccattgtcataccttcccttcaacatgcattcatgtaatgtataagttttctcatattccaaagcccaaacttttcttagtttcacagcaagtatagcacctagactgttctagaatctggaagcacctgaagcacaagacattatgcaagataaaacaaaagagaatcaaagaaccgaanattaacttacaataaaaaaaaaaaagaaacataaaatacatattaatacattaatttcctactggggagtattttttcttattctcttagttttagtcatttcatcatcctttaattaaagccatataatttattntcatcatcaaatgaaaaaacattgntttcaaagaacaaaaagaaaagaatcttggactatcaaccaagagaaccttatngataagtaatactaata

SEQ ID NO: 101642 - DNA, 259 bp, Glycine max
gcgtactgcaccctccacagctctctcttgcaccgaaagcccgtactcaccaaccagcttcaactccgcgtcgagacgctccttctcgtacggacgacgcggcttcttgaatgtcttcccatcttgacaacagaacaaaataaaacagatcaatggccgttgtaggggtagtggtttcaaaacggcgtcgtgagatactataacgtggatcgcgttgtggacttacagttcctgtataaggagacgtgctaccatggtg

SEQ ID NO: 101643 - DNA, 407 bp, Glycine max
gacagagagaatgaataaggcataattctttataagtgattaaaatgagttaaaacactttgatcgagtgaccggaagagttagtaaaatatttggtttaaaaaggattcttaagtgtttcaatgactaaaaaaaattatacttatatttgctgtatgtttttaattacattcaataatgtttttaaattacttttgttcttattctgttaatttgttaactaacatcaattgaaatacgtgagtagataaagttgtcttataacttgaagaagatacaactcttgattgagttactatatcgaacacctaactatcaaaaataaatatttcaaagaaaggagttcgaaacacaaatacacaagtaaaacacttgaatttgaaacaaatgatcatattctatcaata

SEQ ID NO: 101644 - DNA, 437 bp, Glycine max
  unsure (1)..(437): unsure at all n locations
taacagtttcaacatgtcactaaagtcctatccaatacacaatattaatgttactttattgttntatcactttttatgcataanaagaaagtaaatgaattaattcaatttcttcacaacattttttatacctatacataaatgagaaagataattaagtaagaaaatagagttttatagaatcttatgttgcacataaaattttaatcagttttttcctaatttttattcttttgtcaatgttttagaaagccaattaaagatataattcaattcacaatgttttacccagtcagtaaaggtcactaagtgaaaaaaagaantttagaaattcaattgttgaagaanttgctcaatgagttgtaactcatttagtgagtggaatcacatctgaagtgtattttggaattctaaagaactcgctcaacgagtatgtc

SEQ ID NO: 101645 - DNA, 394 bp, Glycine max
  unsure (1)..(394): unsure at all n locations
catgactganactgtgactgtcggtattcttgtagtggtagtattgatggtngtgatagtaattctagtcggaagggatataagtcaaatatgtttaaaattaaaaatcaaatttaaaaaggaattattttgtttcgaaagtaaatataaaagttttaaaaaaattaaaagctattttaacttcattttatcaaatttattttgttttaaaaattaccattgaaaaatcaaaaactaaaaatttacatcaattccaaacagatccaatgtattcaagatttgactttttcaaaataaaaaaaaaaagaatgaatagatattttgatcccttatagtcattttataaattagtccatattctattgaaatgtnaaaaataatttctattctatat

SEQ ID NO: 101646 - DNA, 449 bp, Glycine max
actaagcttggggcttaaagttgaagaccactcgccaaatatctcatcttgtattattaggagctcgcaaagggaatctgttgccaaagttctgccagaccctgagaaggtctaccagtttgtccttcatttcaggaagatgttaggacttgaataatgaatgaaactaagcatgcttggttaatggtatgcctcatggcagtgaagggtgcttgatgctgctcttttttctttctttctttctatgacactgtattagaatatgctgttttagtttttagtcaactctcatatgatggcttgaattaaaataaggggaataagaaataatagtgacctctgggtttgcttttcaactatattgggtatcctaatagatcaactatacagggttgaaagatttcacacaaaacaatagtggcagtactagaaatcaaaattccttgctc

SEQ ID NO: 101647 - DNA, 405 bp, Glycine max
  unsure (1)..(405): unsure at all n locations
tcaagccaaggccaaactctcgtgcatgtagaggctttcaattaattatgccaactcctccaaaaaatatgatttcaagcttaaataggtgggttggtccgtgctcgtgtgcttagcgcaaatctaaatcgcttagcacgtataagtggattttggcttagcgcgcttctctcgcttaacggatgagctgaagcggttcgctggatgacttggagcagtgcgctcaacaaacctgacagctcatcttcttctggcttcttcctcgcgcttagccactgagtgtcacgcttagcgaatgctcgctaagccagcatattggcttagcgagaaggtgaaattagcatntttgccaatttttctaattaacctgaaattgagagatattgattatttacacacaaacca

SEQ ID NO: 101648 - DNA, 342 bp, Glycine max
gacaaaaagctcaaaggtcaattcatgataatcaaagaatgagttcaagatgttcaagaatgaatcatgaacacttcaaggttcaagaagaaatttgatttccagaatcaagattcaaggttcaagattttcagaattcagatcaagattcaagactcaagattcaagaatcaagagaagaattaatcaagattagtatgaaaaagttttttcaaaaactgagtagcacatggatttttctcaaaacttgtttaccaaagagtttttactctttggtaatcgattaccagaattttgtaatcgattaccagtagccaaatgtttttgaataagtttttaact

SEQ ID NO: 101649 - DNA, 465 bp, Glycine max
  unsure (1)..(465): unsure at all n locations
ntctccccaattntctataaattgggggagaagtgtagtttatttggttcagccccttaggcacttctctctctctcgaaatagctgaggaaaattagttccgtgaacaaaatccaagccgaggcgcttccgtaacgtttccgtgagtaattacgcaaagattctcgaccgttcttcaagattcatcgttcgttcttcgatttcttcagtcttcaacgggtaagtacctcaaaccaagcttttcaattcattctatgtacccgtggtggtccacattntgtttcatgtatntttattctcgttntcatttactttntatacccccttttgacgtgcttaagccatttatttaagtcatttctcgcttaatctaaaaataaaatatatttccaccgatcgtttgaattgtatcatncgttaatttcggttaaatgaattccgaccgttcggtcgtgccggaccacg

SEQ ID NO: 101650 - DNA, 480 bp, Glycine max
  unsure (1)..(480): unsure at all n locations
cgcccacttcaggcggcacaagatganaacattgattataacttctgtaaaggctatgagncacccttttcacaagcctgaggaaaaccatcctccagggaaggactcaaccaaaaaaatttcaaacataattggaaaagcagcaaattatgctggttccgcacaatctaagaaggttaaatgctaaccatcatgcaactgctaacaaaactggttatatttgataattcttagtcattgaaattcagttgtgttgatgtaatgataattagttttaagatgactataattcaacaactcattcttttccaaacgatttaagctagaagctcattttcttcatccagttatagaaactgcctgtttacttgctaactgctacatatccaatttttattttatgaattaaactattggtattcatatgcatcacctaatggtggcatattggcacattgatagatattatcaatagcatgt

SEQ ID NO: 101651 - DNA, 426 bp, Glycine max
  unsure (1)..(426): unsure at all n locations
agcttatttatcaccaaggaaacacacgcaatgttcagtgttggcctttccttttgtcaatntgtcaactagttaaacaattttacccataattgttagttttgtgtttactaaaaacttactggatgttgtaacatcaaagcacttacaaaattttccttatgatgaaggcatccgccattgggggggcccacatggacaacatagtggctacattaaagatggaaagaaagatatgttaaacgtgaatcaaaagtgaaaggtaaaaatgccaaagaatattagagggaggtgggatcaaacactaatgtttttttcttattcttccctttgaataatttctcttaaaatttggagttagaaggccacctgagtgtactcaataatatgaccctcttcatctcacagtctacaacacaagtagta

SEQ ID NO: 101652 - DNA, 414 bp, Glycine max
agcttgaatgaatataagacacatcttcttcaatcttggtgattcttgactccatctaatggaagtgcatggtcacttgtaattccaaagtgtcaaacctttcaccaacaaaggtttgaagaccatcaaacctgtccaaaatctttgaaagaagagatgaatcttcttcatcatgtccttcttcaccaatatgtcgagcaccctttttcaaccaagagccatcatgctctttttgataaccaaaggatgcaatgactgaagcgcctataaggaaggatctctttgatggaacatagggttcaaaatcaaaagggatgttaaaagtgttaaggaaaagagtgactagatgaggatatggcaaggaactttaatcgaatgccttatgctgcgaatctacaagaagtgccaatcaat

SEQ ID NO: 101653 - DNA, 465 bp, Glycine max
  unsure (1)..(465): unsure at all n locations
tctgggcggcaaccaccttccatttgttaaataatggcattctttgcatcccgggcttccgtaaaattttaacattgggttagcatatttcacttaatattggtgaaagggaagggaaaaaagaggaaaatcaagtccgaaacgctcccgtaaggctttcgtaactttcccgtaaagtacgaaaaggggggtgaacttagtaattagggtgcgctaagaaatcatcctcaagaagcctctaggcggcaagcacctccccatttctcctataaatagggggaggagcctgagtttcaagggtccctgacccctaagttatgcantttagctgttttgggtgaaaagacgtgattccgtgaagaaaattcaagctgaggtgcttccgtaacactntcgagatgtttctgtgagcanatccgcgaagattttccgccgttctttcaccgtcttcgttcattcttcatt

SEQ ID NO: 101654 - DNA, 334 bp, Glycine max
  unsure (1)..(334): unsure at all n locations
aacaaaatagaattagtttccataatgcaactcacacaactcanggtatcctagattttgtacactctaatgtttgggggccagcccaggtaccttcattagaaggagcaaaatatttcataactttcattgatgattggtctangaaagtctggacttatctgttgaaacataaaaatcangcttttaaagtgttcaaacaatggaaattgcttattgagaatcaaactggtaggcatgtgaagctgctcanaactgataatggccttgaatacttaagtgaggaattcaatgaatttttgcaagacaatggaataagaaggcacaaaactgt

SEQ ID NO: 101655 - DNA, 457 bp, Glycine max
agcttgttctggataggaccgacatccttcaatgtctgtctagaatctgcaatagttgaaaatgacatacatatacaagcactgtgcaaattgcaaggtaccaaaaaagagtaaagtagcatagatagaaaaagtgaatgcagaacaatatgttattgcctcattggtttacctttggtcgatttttacccccaggtggtaacaccgcaccaccatcccttcttgttttggcaaaaaggcctttggttactggtgacatcatcaaatctgttgggcttgtatatctgacaaaatgaggaaacacattaagatttaagacctcacatagtcacatcacttacccaattatcaactcatctgcctattttctccttaaaatttcataaaaagagtacgtatatattggtgagtttaatttcaatggtgttaatgtgaaaatttcgacactgtgtaataa

SEQ ID NO: 101656 - DNA, 498 bp, Glycine max
  unsure (1)..(498): unsure at all n locations
tgcttctacagtcactgtctcacatctctgtatacaatatttattctgtatagtcagttacatntattggttaattacctaaccttaattgttttaaaagtcatacaaaatttaactttatgtaacaaaaatatgcatatgactgagacaaggatgccaacagggaatgccaatgtgtatggattcctcgagccacaatccatctaaagatctangcaattgcaatttgaatcagaaagttacattaagaattggatgcagaattcaaaacgtgtacctaggagcctacctgaatgggtaagttaaaatgaacaaatgaatntaaataatgtataatagtataataacctatattggtctccactgcagtgcacattgacaaatggttgtcattttgcctaaggaaaatngtggcatctggttttgttcattgcataatcggccagacaactacctcgaaggaataattaacangtcagtgggtgtttcaatacattt

SEQ ID NO: 101657 - DNA, 401 bp, Glycine max
  unsure (1)..(401): unsure at all n locations
cgaaaattacttttgtgagtgagcaaaagcaagtgagaatactacagnatggggaaagtgtgaagatcgttacgagggtttgaaattgtaaggatttatctcctttttattcattatgctctcttatgtgattatatgattccccatgtttgtggctagataaatcctttaagctaggattgtgatgtagcatgtatctatgaatcgtaactctgtgtattttaattaaattcttgtttattcaatcaattggactattgtgttgaatttttctaatttgggactgatgattcacaaacctaattaattatttgttggtaacccactactcttaattaatngacccacacagtaattgaattcttgtgacattaattttgaacaaccttgttatgagaatt

SEQ ID NO: 101658 - DNA, 449 bp, Glycine max
  unsure (1)..(449): unsure at all n locations
agcttatcctanatgacactccttgtaccacatattttctaactaagtcacttttaaagtcctattgaatgagtacaaagtgacttgcaatagtttgatgagtaactaaacactcctctttctatcaaattttaaaatcatatatatatctaatatgaacttaatgttagttataggatgtgctgagtaccatgtactcatttataaaagttgcaggattcatccatctgaatttggaagggagtacggaatgtatgattgtttataatcattggaggaagtctgcaaaaattggctatggaggaaggacttttgcacaatctcaaaatttgtaagatgaatttgagtttccagatgcaacatctaactatgtcttattttaattagatttgtttgtaatttaagtacattatattatactaatatctgtaaattnttgtttataactc

SEQ ID NO: 101659 - DNA, 424 bp, Glycine max
  unsure (1)..(424): unsure at all n locations
ctaagcttgtagctattcttaatgtttagactcctgtcatttctgtttctcatattctctaacaagattcagggcttgcattcccttaatcctttcatctccttcatattcattcttgaggaaactccagatttcatatgctgatttgatggtcattattctagtgaaaatttcttttgagacaacaacaaataaagaagctcttgccttngactntcttgctttcctctccttttgattntttatctgagccattcgtggattggttggtaaaggaagaactatgtagtcttcctcaactgcttcccagagatcatttgcctccaaatgtgcctccattcttgctgcccagatntgataattatcaccatcaaacacaggtggtgctagtggtgtgtacagtgttttagaatccatctatttg

SEQ ID NO: 101660 - DNA, 439 bp, Glycine max
  unsure (1)..(439): unsure at all n locations
agctngcaggtagaactctcacatacccatgagggatagttggaaacttactggtcaaggttggaaaattcatttttcctgcacgctttacgattatggatataaacgaagatgaagaaataccaattattttgggacaatccatcctcaacacaagaggaaccttgattgatgtcagggaaaggaaattgacttggaggctatgtgatgaggaggaagtatttaagggttttggtactggaaagagctcattctcttccccttcctacaattacaagtcactaacaagatggaagtcactatggctaagcctcacccaagtgtggggaagaaagacccttccaggaacaaaagtctttcaaaagaccttggatggagtaagaacaagggagataacatcaccgttcatgctcttggctttggaatgggtgattatacc

SEQ ID NO: 101661 - DNA, 451 bp, Glycine max
  unsure (1)..(451): unsure at all n locations
tgggatgaatgatacttcactcagccncccttnttatgtttctcatgcagaggtgctcgcccaagcgagctaactctgtactatttttcttttggaaaatctaaataccctattgctgtgcttttcttgattcctaggattgcaaataaactangcatatccaactatgacttaagaaacatgagtgaataaataacaagcagaaatttaaaaggtgctaagctacctcctactagcgtgtctttaacgtcttgagccgggcgtgggatgataatcttttgatcacgggcctagtgcctactcgtacctttgctttggtgtggtatcgaccaaatctttgcttatcctccgactcacaagatgacaaanatgcatatgcatgcatgctcatgattcggcagttcaagtgtaacgaattaagcaaatgtttattattgttcaatttacttaa

SEQ ID NO: 101662 - DNA, 395 bp, Glycine max
agcttctacattcaaagacattttttttgcacaatgaatactttctagaagcccagtaggaatgcaacatatgtcatttggtatgaagataagacatcagtccttacagggacattgacattcaactaatttgtaagaaaatgattgatgtcttcaataatcctaatacaggagaaatactatgaataaagggcaatggttcagttacaacaagagttaggacttgggagagggggagggcaaccctatgatgagatgattttagaagttacaactggttaacttacactttccttggattcatctaataactgtatcactcttctaccaataaagaataatcaattacaacatgcatattattcgtgatgtatgaactataagcccatgacaag

SEQ ID NO: 101663 - DNA, 502 bp, Glycine max
  unsure (1)..(502): unsure at all n locations
acctataaaactaagcttagggttcatgactgggggtctttntgatgcattgatcatgtctttatcaagntaatgctcaactatgtggagttcatgcttaaaatnttttatttgagtaacatttggaaaagtaggggaaatcccattttgatcactgtatattcctcgtgttttctttcttggtccataagtactcttttatttttggcatttggtcatatttcatctagttattaacttactangattgtcagtgacttgagaataatgtgtttggaaatgtcagtgactnttttccttctacaaggtgctggattgctgttnttaataatagttcacttttgatgttgctttatacccagcaatctggaacagaaacaacgtgcttcctggaagctctgtgattacttgcagcatgaaatggccatagcccccagcttgtaccgtggtagggtatgtattattgatgtttggtagacagagtagttatagacaacatgat

SEQ ID NO: 101664 - DNA, 492 bp, Glycine max
  unsure (1)..(492): unsure at all n locations
ctaagctagaaccaaaaaagagtgttcatgaagaaagagatttaagtttgtctttagnnncgcnngcacatatacttacagggaaactctttggtacaatatcagcctcaccatctccctgcataatacttgatgaagattcatcttgcttgctatcagcatcatcatctgcacccaaatatgatgccccaagtcttttcaatgacttgctgccatattcaagtgcagacgaaccactattctgagaaccaatgatggatccatggttcacatatagaaaaccaagatagattgccacaccacaaacggaagcaactaaatgcttcttttgcaatccatcagatcattccctcgtcatttatcagtttacaataatgcaaatccaaatatacctttcactgcctacttataggactttctttttttggtgaaaacctacttatggacataaactgatcaccactcacatcctgtttcacatacatgaaacac

SEQ ID NO: 101665 - DNA, 394 bp, Glycine max
cccacttctcatgggacatataagttggatattttgtaccaaaggcataaagatctatattcttcacaaatagaaagtccttcatcttgcccttccaaaagtgataattagctcaatttagagagattatcttcatttgtgtctccatcattcaagaaaggttactagcattactttaaccaaagagctttgttgtgactctgatggggaatgccatcacaataataaaacaatatgcgagtgaaaaagtattcttcaaaattagcaagaaattgggaggagcaccaattaatacagtagcaaacaaaacctatattaacgcttaagaagcacacaattttttactttgaaaaccccttaagtaagtgtaaaatcagagtctccataccaaaaa

SEQ ID NO: 101666 - DNA, 468 bp, Glycine max
  unsure (1)..(468): unsure at all n locations
tatctaaatggttacttgcaggaggagatntatgtatagcattctgatgngtttcaaatcaaaggagaggaggagaaagtttacaagttgaaaaaggccttatatggtcttaaacaagctcctanggcctggtgcagcaagataaatgaccatcttcaagatcttcgatttgtcaaaactccaagtgaggcaacattatatgtgaagttcgtagatgcaaatttaatcattattggtgtctatgttgatgatttgattgtgataggaagtgatgagaaactcataaaggagtttaaagccgaaatgcttaaagcatttgaaatgacagaccttgacttgatgagtttctttataggaatggaggtgaaacaagatcatgatggaatcttcattcgccaaaagaaatatgcaagggaaatactcaagaagtttcatatggaggactgcanaagcactacatctccaatg

SEQ ID NO: 101667 - DNA, 315 bp, Glycine max
acctgctgaagaacatatacaactttagaaatgctcttaattctctctaattctactactgctaaggccagcgatatagcaataagctgaatctttccaaatgcgtatgcaatgctagcgaatatgcagatcatacgcatttcatctgcgccttgtgcattgactatggcaaagagattgaacttatgcccttttaagagcactcatattgagcgaaattaaccatagcattttattcatgctgaagcattgcgaacgatccatgattgatcatcgacctttctaataggacacttaattgtcttcatacaaaca

SEQ ID NO: 101668 - DNA, 444 bp, Glycine max
  unsure (1)..(444): unsure at all n locations
gctgcagcttaaaaaatgtttatttaacctatnnnctaatataattcaccacgnnggttacagnggaaagggtttaaatctacatattttttaatgtttaaagttaaattcatgaatgtagaagaattaaaacacatttttccttattcttttaagttttaacacactcagtcatctattccaacctgcttccaattctgactttgtcttttaacctccgccattaaagctttctggtctaggcctaaagcagtaaggcacagacctgaaactgaccaaatgagcagaaaaatcacattcatccatacaaaagaagtacttgtagtttttgtccaaaagaatataattaaatcatacaatcctatataaatagttatgattaaaaattactacgcgtttgtcttttaatcttgacttatgtgacttgatcttgtgaaaaagtgt

SEQ ID NO: 101669 - DNA, 404 bp, Glycine max
  unsure (1)..(404): unsure at all n locations
ctcatcttttgaaggctatcccacgcatgctactggctttagtcctctgctttgattatcgcaagagcagggatacagtaaatctcttagaattacattcctcaaaggggcacaaatacatatggtatgcgctacccgggtatgccattggcctggtaactgctttggcagctggtgtcttgacccactcacctcaacctgcacttctttatctggtactaatttatttctatttcttcttgtcataatactggtttcttttatacctctactttctttgacctttattcatcatttattccagaatctctgttcctattatcttatnttatcaagggtttctatgtttgtgtgatcatgaatcatgagcagtgaaagcatcaatacaccctatgaaatgctta

SEQ ID NO: 101670 - DNA, 187 bp, Glycine max
tctcacctcttctactttgtcgttcgctacatctccatggtggagaatcaccattaaaggacctcattgaagctcaaagatccagcctccatagaagccccacaagcaagtttccatcacgaccccatgtgtcgctaagcgggattgtgtgttttatgaaagcagctaagcggaccatgtctcgcta

SEQ ID NO: 101671 - DNA, 414 bp, Glycine max
  unsure (1)..(414): unsure at all n locations
tagagtatgcacacagctaagcactgcaatggatcttttgctttcaaccaccatcgcctcccttggagaggtttatctgcagaatcaaatatgtcttcaaaatgattttcagtgaacaccaagcgaccttcgtgtgatagtttatcaacaccaccagcatatagaattgccaagtgtatcttcagccactgtaggccagactttccaagaaagcgtccctctgcaaattccaatatacctcggcataaatctgaaccaaggtgatttaagtgtgggtgcatgggatatgcacgccctcggaaatcaaggttgtgtgggtagtaaaaaccctcttcatccttcattnttcgtgcaacctgtaccccacattgggtgtgtcaccagacatagaatatgattacaaactaatgtaca

SEQ ID NO: 101672 - DNA, 453 bp, Glycine max
  unsure (1)..(453): unsure at all n locations
agcttcatctgatgttgtatttcggnatcagcttcttttattgaagaacaatatgcacttcttgcattgtaaaattgctttatcgnggtgcaactgttggcattgtgttccttcaacgttaacaagatgttttttggtttcaccatcgactttgtcatatncagctataatttcttttcatccttagtcaatcgcccagcgtatggatgtctaactaaggacttggctaattcatgattgtgaatcccacagatcaacttcaccatccaaccttcccctccatgcactggtttcccacgaagcctgaagggacaaccacatttcctactcctagtgtcttttctaacgaattctntattcctactctngtacgtaccactcctttcacacccaattaagataaataaacttcttcctctgctaccggtctctgtgtcagacctcataatcact

SEQ ID NO: 101673 - DNA, 336 bp, Glycine max
  unsure (1)..(336): unsure at all n locations
atgtcgntgtatgtcgacaacaacaacatcggtcatcataggacccgtctttgtaatgcaagaatacaacgtcagtggctataaaagaatagacgttataaaaaaggattcaacgacgcacatattagacaacccgagaatgttttggtccatttcaacgtcgggttcgcaagacaccgcgntggtttgtttcctgtcaacatcggnggcgggctcaccaccgncgntgtttcgggccatttcaacgtcgggttcgcaagacccagcgttgttttggttcctgtcaacatcggtggcgggctcaccaccgacgttgtttggtagtatgtcaacgtc

SEQ ID NO: 101674 - DNA, 318 bp, Glycine max
ctaactttgctatttcttggttctttggatctaaatcatttggttttcttgaatctttccccttagattttccaggaacctaaatgaaaaagcattgcagccaaaacatttatttagaaaataaataaattaaataaaagaatctaatatataccataaggagtcataccatagagactaaatcaataagggtggttggtcatgcaacaaaagtaccaattgcatcacctattaccatgactcctgcttcttttataggtagtggtagtagtgcatctaacttaatcacatacttaatcaaaactttcacatgattga

SEQ ID NO: 101675 - DNA, 450 bp, Glycine max
  unsure (1)..(450): unsure at all n locations
tatcttcttttgaagattcagatgtaaagcttgaaattgtatatgcagaattaatcngnctaacaaaatgttatttttactacatgctacttacttcttggactagcaaataacagaaatggttttgactttcgatacactaatcacaaaatgactattaattacacattcaaagtaattcctgccaataaaactatctatcttgattgggaaaatcaaccaatatcacattttttgttacaaaatccatttgtgaagccacatagacacgaaaatgaagttggtgaggcaaacctttgcagtattaagcactacactcttgcagtctggtaagatgctcacagaccatgcaggcaagtgatatgaatngccactgaagtttactgttacatcagaattggtgcctacgttagcaaggaaggccgcacatacagatcctgtcttgaaact

SEQ ID NO: 101676 - DNA, 400 bp, Glycine max
tacaaaatcctgcataaccactcacatgccttaaagtacgttaaaatttacagaaggtagagtggggttgatactttattcatgcttcggcggaatcacccaaagcactttagccttggtcaatctaacaatctaagctcttctgatagataattcccttattatttagataaaaaaacaaacccatcagttttagaattgccccaaattgtttacattagctaccaaaatccaaacaatgagaaaaggggggaaaacagctccaatatacgtccaagaccagttaggttaagtcaagaacaaaatccacaactaatgcctaaaaaatagaagaccagtcctgaaatttgattctgaccacatatatcgaaaatagaaaagacagggagtgagagaataa

SEQ ID NO: 101677 - DNA, 401 bp, Glycine max
  unsure (1)..(401): unsure at all n locations
ctgtctcatgaggaatgccttgcgcctagatatcatgaattatctcttcgataatatgtatgtatgtaaatatgttgaataaaataccttgcaaaatatgaatatatatagtaggaaagtgccttgcataatatgaatatatatagcatgaagtgccttacaaaatgcttggatgggtagcataaaagtgtttttcaaaatatgtgtatttgtgagttggtagcaaaagaagccttccaaaaaatgtgtgtatatatataggatgtagcgtgaaaaggtttgtaaaaaaatatgtacatagatgtgtgtcgtaaaatgcctctcanccaaattttatgtgtgcaaatgcatatgtgccatanaatagcacggccccgagaaagctttccacaaagagatct

SEQ ID NO: 101678 - DNA, 457 bp, Glycine max
  unsure (1)..(457): unsure at all n locations
tcaccttctggtcctcctcatagttgttgcatgttataacattctctattntcatctcccactccacgtaggcctccggatcattctttcctttaaatggaggaatgttgagtttaataccatcaattcggttttgtctaggaacaccatcattccctcttctcctcctttcttcttcattatgatctctattctccattngatccaacctctcatggagcgcatcatctcgttgtttcattaacctctccaaatgttgcatcaaagcttgcatttggaattgcgaaagccccactccatcattaggattagtacctgacatctcanacaaacaaatcaaacgtaacaagacaattatagttgttggttgaatacctcacccactcaagtgtatcacacaattatggcttttctctaatgaaacactctntgcctttaccactctaattccccttga

SEQ ID NO: 101679 - DNA, 385 bp, Glycine max
cactatgaaactaagcttaacattgaatatagagcgtctcgaatatcacctgactcatactgacatacaagtaaaaagttattatcgtgggaagatcctcagagcttcggtattcaatttcgagcgtctcgatatattacgggacttaatctgacatacgagttataagataatgtcgttggaataagctctgaggaacaaaattcattttcgagcgcattaatatagtacggtactcaatcagacattcgatcaggaagatttgcgcatggaagtatctcagagctttaaaatatgctcccgatcgtctaaatatataacacgactcaatgtgacatctgaggataaaagtaatgatcggtggaatgctggtatagcattaaca

SEQ ID NO: 101680 - DNA, 242 bp, Glycine max
tttaaaaaagtttaacaataattaaatgaagactcggcgttcaagctattaatagctacctatgcattgcttatagtgtgtaatgtcactctttacacaaaaatcagagttggcatgtagagcatagcaatatgaatgctaatcctacaattctagaaattgtcctgacttgcattatatcaaaactttatataggaccgctgaatttgtgtaatatataggatgctagaaatctatgaaac

SEQ ID NO: 101681 - DNA, 401 bp, Glycine max
  unsure (1)..(401): unsure at all n locations
tagcanacatgcttatctattacttggtgctatttaatatgatcttgatctaattaatttagagtggtgtatttcaatgttcagtatattggttctgttcatatattttacattggaatatttaaatagttatatgtttgttaatgttaaattagacataagtggctgtacatttttgtgtacatatcatatcacgactttngttattgatgtaccaaatgagttgttactttattgtgattttataattatgtgataatttntcaccagtggtaatgttccattctttataacatgatggagaaaaaattgatattntatgtgataaatgagagggtggctgacatgggtgagttagttattggcactgctgagttcagaatgggaacaaaaggcataat

SEQ ID NO: 101682 - DNA, 449 bp, Glycine max
gcatgcaagctctgaacctagggtatagtcatatccattttatcaatgattaatctctttattgatgtttctaagtgaatctttcttcttaactacttaattttcactcacaagacataaatataagacattatttaataattcctgagctagcattaacacgttgataattttcttttttcttttttaaaagaaagcatgttagtaacctaggagctcatataagccagctacctcaacttacaccactagattggtcctaatggatcaatactttcttattatcattatcggatataatttttataatgcaaaattataatataaatccatttattttaattattttcatagaaatatttaaaattatcagtaaaaaaattactattctaattttaagaaaaaacaataatcatttaaaatatgtatagtaaccacttctggaattc

SEQ ID NO: 101683 - DNA, 435 bp, Glycine max
agcttttttgttgtcttccattaagagcaaaccctgctaatcatagaattccaagccacgagatctctcttcttcattaactcaaacaccttgtatgcactttccgtgtcgccacaagcagcatatatatgaagcaaactgttctgaacaaacaccaacgactcaaacccatttcttatctgaaccgaatgtattgcctacccctctctaacattcaaagactttgaaatagccttcaaaagaaaagggtgagtgtgagtatcatgttcaacgcaagaaactaccatttggcgatagaaaagaaatgcagggctcgggttatcgctttcagcgtagcccctgataatggagttccacgtgaacacgttggggttatgaatcacaacgaacacgttgtaagcataagacatgggtgcagagagagacacaattgtg

SEQ ID NO: 101684 - DNA, 472 bp, Glycine max
  unsure (1)..(472): unsure at all n locations
acctttgcagaccaccttgacatgtctatgatgatcattggtgtcatcagngccatggctaatgggatgtcgcaacctctcatgtccctcatttttgggaagatgatcaacgcanttggctccactgatccctcccacattgtccaggaagtttctaaggtataataattaacatgaattaatttggcatgtgccttgcaggtttcttgaatgaagggttctttttgtttccttttgtagcccttgccttattgcatgccatgcccattcggtatttactattccattanaatagatcatgcatgtatgttcgcaaactaacttattttgtgtggcactggcacttcaaatttcaggttgcattgttattggttacgtggctttnggagctggaattacctcttttctacgtaagaatttgtgcttatctatttgttatagactactatattgtgattcagtctttgaagat

SEQ ID NO: 101685 - DNA, 372 bp, Glycine max
  unsure (1)..(372): unsure at all n locations
agcttctacttatgtggcagggcgggctttcttttctttcttgtctccaacgcgagctntgaccactgttcttccttcccgcgatgcttcttttcatgtccgcctgagtgggcttataacctaaaccatacttcccacgatttccttgggtatttatcaggctagttatgccgccgttgtctttgcctaaacccatcccgggttcataaccgttccccaacataactcgggccatcattaccgctgcatcggacagacaaggctgcccaaagagggagtccacggaggagatgctgaccacctcaaaagactggaaagcagtttctaacgattcttctgcggcttccacataaggcatggaggatgggcagc

SEQ ID NO: 101686 - DNA, 448 bp, Glycine max
  unsure (1)..(448): unsure at all n locations
tctgcagttaattcaacctccttctgttatccattgtaatgtttctacttctaaacaggtttgctcattcaacactgctggtccttcatcagcagatacgaagggtatgaaaatatctcattntttttattcttctatntgtaataatattgctcttgatacctggatcatagattcaggtgctagtcatcacatatgtgcctcactgcactggtttcactcttatagtgaaatcaatcccatgattataaaattaccaaatggtaatcatgtcaccactaaatatgcaggcacagttgtgttttcctcttcttttagtatcaccaatgtcctatatgnttcctacctttacagtcaattgatttctgtctctcaattatgtcaccatacaccttatacactcaatttcactgacactatttgttccatacaggagcagaaatcactg

SEQ ID NO: 101687 - DNA, 478 bp, Glycine max
  unsure (1)..(478): unsure at all n locations
ggacttatagtcacctgcggctgcagcttgangattatggggtacccatcacatgttgtttatgtggcagtctggcgatggtgcacaacaaggtttccacatccacaatgcgcgcataaacccaccatcccctggtgcccaccttcaacttaactcacgtactcccacgtagcccatatccttgtttctctcaacaccgggtccccatcaatcctcccaagcttccacagcatccaagcaaaacaacattcaaacagcacaagctatcgcagccaagcaaaacagagcaaaggcagaaaactctgctcaacaaatcaaccaaaatcacagtttttctcacttaaagaccacagtaacaattccttcgatccaattcgttaaccggtggatcgactccaaaattttactggaagtctatagtgcataagcctacattggtgaccgtgggatctactagcaacatccagaactcattctg

SEQ ID NO: 101688 - DNA, 392 bp, Glycine max
  unsure (1)..(392): unsure at all n locations
acttaaaattgaacctggaaccaaggagtataacccatcttttggcccttccttccgaagaatggaaaaaagcccttaaaaaagatatgatcttctttgacatccggggcttcatggtgaaacaaataatatggagctccttaagatgcttttaaggatcttcacctgcaagaccatgaaactttggcaacaaatgtattagtccagtcttgagaacatatggaacaccctcatcangatattgaatgcacaagctttcataagtgaaatcaggtgcagccatctccctaagagtcctctcacgaggtggaggttgagccatgttctcagtataaaaattagtagtggaatgctcaaaatcagaatattcagaatcactagcaacagaatac

SEQ ID NO: 101689 - DNA, 301 bp, Glycine max
ccatttgcacaaaaaaaacacagaaaccaagttaaaatagggtttatttgaaatgacaagctgaaaaataaaactgaaattcagaatgggcgcttagcacgacaaatgcgcttgctaccttatgaaaaattactcaagtgcttagcgcgacagccacgcgcttaacgagttgacacagataagaattttctacagaattggcttagcgagtaggctcgctaagcccaattccacaaaagaaaccgaattacgcttagcgcggctagacacgcttagcgcgacaacactattggacataaat

SEQ ID NO: 101690 - DNA, 417 bp, Glycine max
  unsure (1)..(417): unsure at all n locations
agcnnaacctcttgctctacagncttagattgggagccactccaatctttgtgttcggactctcagccacttatgatagccaccgatgatcccattactgcttcccctaagctctctgtcctttcttcatgccgcatcccatgccttgcgaactcctnggaggacctttgcattggggtcactgaaaccccgtgtaatgaaaggcgtgatgctntcgtctaatggcgctcctctcatggggtagccaagctgtcttatggcgaggacgggattataattaatacaaccccatgttcccatccagggaacatttggacatccttcgcatgaagatacaatcctgattcttccttccttctagcgagggaaccaattaacagacgcccctccacgctagccaagagttggtcccaattc

SEQ ID NO: 101691 - DNA, 429 bp, Glycine max
  unsure (1)..(429): unsure at all n locations
ctgcagcttgccaccataaacggaacgagatactttttgcagcacaatttcttgtgttataatnnangancagcgggcaatcaattaaaatagagatttttaacttcataagaaattctctaactttagaaacgtttcttcttactcctacatgatgatataggatgcacatgtgaaatgatagagactaagatgcgacacataatacaacaatcaatacaaatatcactcaagagagttgggcatgtagaaaacaagacttcttctagcttcaagatcaggtcttcgtgttgctcccattatctctaacagtgtggtgaacgtatatcgggaaaaanttactctcattttcataagcaaattaacggagtgttcatttataaaacattggaatttatgcagtttataatagtgatattgtcgcgacaa

SEQ ID NO: 101692 - DNA, 214 bp, Glycine max
agagaccagtgtggatcatgcgcgcccacatgaccactcttactcaaatataaatgacgttggtacttaataacagttctgtccacagatcgtaatgcctatcttcccctgcagatgtatcttttggaatgtgtcggcatgacatatgtaagtatgcacatggttcaattgatgtatgatgtcatctattgtttgcagggatcgcgcccacaag

SEQ ID NO: 101693 - DNA, 438 bp, Glycine max
gcttattattactcagagcttgatatggcaatcttttttatagctcattaagtagtttcatcttaaaggaacaagaggtaaatgcagtcaacttcaatgaatctactaccagatgaaaaggcaaaatgagactaagatatctgatggagtcaaactaagaattaatggaatcaaatatatgctttacgacacatagaaacataaccacaagtatcatcaatttgttttagttgtatcaacagaatatttagatgataattttagctttggaatctcaatcaagtttgaaaagtagaatacactttgcatttgagaaggcactcaaaactaggaaaaaagcatgcaaaatcttgagacttactttgcgcagcatctttgatccttctgataaattctttctttttattaacacctctcagcttcacctgcatcatctgt

SEQ ID NO: 101694 - DNA, 412 bp, Glycine max
  unsure (1)..(412): unsure at all n locations
aaactcgtanaatcatagaaggggatagaataatttaatctaattaacgcncgacagaattatgaactaataacgtctcggtctgcttcttacgttcgttaataaaaaactaactgtgaaactttatatccttccctacaataattcatagtatgttgcaaccgtcaggtttaatcatttgtgatcctcatatcatagacactttntgcttgacattaatgaatatgctattattactacaatgatataaaccaccctctaaattagtaaaagctcaaaagataaactactttatttaaccatcattgacgtgctaactgtttttgtaaagtaactatttaatatgtaataaaaatatgctaattataataacatattccttaatgtaattattaaaaattaaagatcaata

SEQ ID NO: 101695 - DNA, 450 bp, Glycine max
  unsure (1)..(450): unsure at all n locations
agctgggctcacgagaatggcaggatgcttcggcgggctttccttatcctgaacaataagataatcggaaagaagacctcattgaagacgtaaacaacaaaaaaagatctgatttctaaaagaatgagtactaacaaataataatagtatctgactttcttttttatagtttggcacaactatatcagntatattatattttgcctcttattttggtagaaaaatctatattcaaagttcaaacacaccagcttctttctttttgttggaaaattcactagacaccatagaacacatattgcccatgttaattgttagggttgccaacaaatcaagtgcaatcgcaactagaacaataaatacttatattaactgctttgaatgttcatctaagcaagcatatgcataatgggcacattngttaaaatntctcatatttccaattccaac

SEQ ID NO: 101696 - DNA, 305 bp, Glycine max
  unsure (1)..(305): unsure at all n locations
ccttacataagccgagtcaaagccctcaacaagctgctcgactcatttccacccctaatcgtgacccacgcttgcatgaagtcgatagatcatctaacgacaccttttccactaatgggacattcttattatcatggataattgtgattngactatttgtttacggtcatgaatatctaatttgaaatgattataatatatatatttcttaacacactattgtcacgtcaataatgttagtcagtgaatagttaatatgaagatcanaattcctaattaaagaagtatgcacttataatttgacc

SEQ ID NO: 101697 - DNA, 473 bp, Glycine max
  unsure (1)..(473): unsure at all n locations
tcagctcctcaaccaccaccgtaacctactgcattttatcattcctctccccaacgccaagccccacgcgccctccttcctacaacgcccnctctccctctccgacctccacttcacgcgccgactcggctccggcgacatgagcgccgtctacttggcggtgcccaaggaaagcgctggagccggcggcgcggtgttcgcggcgaatgtgatggagaaggaggacttggcgaggaggaacaaggaaggcagagcgaggacagagagggaaattctggaaatgttggatcatcctttcttgcccacgctctacgccttcatacacgcgcctaagtggctctgtttcttgacgcacgtctgccccggcggtgacctgcacgtcctccgtcagcgcttacccaacaaacgcttcctcgatatcgccgtcaggtgcgcacgccgttagattcttcgatcaaacattgctttctttc

SEQ ID NO: 101698 - DNA, 434 bp, Glycine max
  unsure (1)..(434): unsure at all n locations
caagcttgaagaagttggtcttttacatgcctatttcacttgagtgacattngnattgaagggtgnattgtgtgttgcatcttagtctctatcttttcatatgtgtatcatgcatcatcatgtagtagtaaaaagaaaggttctaaagttagaaaatttcttcattgtttaaaactcttttttttaatcgattacaagcatgatcataatcgattacaagctaatcgtaatcgattacacagttcatattaaacaatgattggttttttaggagtctctattttaattgattaccaagagatcgtaatcgattacttttctcttaaaagtgtttcagaagtgatcaagaacactttaatcgattacatcaagaatctaatcaattacattgntctttgaaagtttccagaatttgggaagaacactttaatcga

SEQ ID NO: 101699 - DNA, 458 bp, Glycine max
  unsure (1)..(458): unsure at all n locations
ntacttctctcanaacaagctactagcctcacccatatccttttttcttgttgtataccttaccttccaaattatgaacagaatgtggtttgttagtttcactgaaatccttccacattttcacttatggctgtgctgaaacactcgtgaaaggaggcggagaatgggaggatattataaagaaatcctcacttaagacacatctttaaccactttttaaattttttttctctgatatgaggctatgggctactgaaaatcagactgtatccctaattaaatgactgactattgtaataaaaacaaaaaatacgaaaatgaagattgaactaganaaataataaataaaaatgagttagtgtttggttgaatagactattttgttaaattttcttgctgaaaatattaagccttttatttatttataaagatctngatcaatactatgggttaatttg

SEQ ID NO: 101700 - DNA, 362 bp, Glycine max
  unsure (1)..(362): unsure at all n locations
ggcgggcgatggggcacaacaagtttttcacatncacaatgcgcgcataaacccaccaatccctggtggccaccctcaactgaactcacgtacctccacgtagcccatattctcgtttctcttcacccggggtcccaatcatccttccaaactttcacaacattcaatcaaaacaacattcaaacagcacaagctatcacagcccagcaaaacagagcaaaggcagaaaactctgctcaacacatcaaccaaaatcacagcttttctctcttaaggaccacagtaacaattccttcgatccaaattcgtaaccgttggatcgnactcaaaatttactggaagtctatagtgcataagcctac

SEQ ID NO: 101701 - DNA, 442 bp, Glycine max
  unsure (1)..(442): unsure at all n locations
ntccctctntgaacaaatacccctcagccaaatagtatccattttgttctcttttcccacaactcttgtaaatgggagagaaatgttcatctaaagcatacaaatctctaatgttatcaaatcctaaaatttgagctcctagtgagcaaaacaatgtgtgtctcctagagagggcatcagctaccacatttgtttttccctttttgtatttgataacatatggaaattgctctaggtactctacccattntgcattgcctttgtttaacttgctntgcactctaatgaacttaagtgattgatgatcactatgaatgacaaattccttggaaacaaggtaatgttcccaagttcttagtgctcttattaaggcataaagctctttatcatangtggngtagttaagggtcgcaccatgaagttnttcactaaaataagcaat

SEQ ID NO: 101702 - DNA, 353 bp, Glycine max
  unsure (1)..(353): unsure at all n locations
ttggatatcatgggatataatcaatcacttctttttctataagtgtacagaagtggacaagaacactttagtccgattactttgagtatctaatcaaatacagtggtcttggacccgttccagtttttgaaaagacactttaatcgatttaaaagataatctaatcgattactttattgaattatttgaatgaggtaggatcacttgccgatattagttaaagaaagaagagaagaaaagtgcttataaacaatgactcacaacttttaatatttgattatgaagatctttttgtgatatgtgaagtgtgatactttnttgaggttaagaagacacctcattcagtcaagcca

SEQ ID NO: 101703 - DNA, 469 bp, Glycine max
  unsure (1)..(469): unsure at all n locations
atacaagaatgaagctctgataccacttgtatatatgtcgcctcagatatcttaagaaggggggttgaattaagatattccaaactacttccccaattaaaaatctatttcactttntattcaagttataaattcccttaacaatgaagttcttaaatattgattcaaataaaacaacttgaatatgaatatgaagcaataataaacaaaggagattaagggaagagaaagtgcaaactcagatttatactggttcggccacacccttgtgcctacgtccagtccccaagcaacccgcttgagagttccactatcttgtaaattccttttacaagttctaaacacacaaggataatccttcctttgtgtttagaattcctttacaacaagagacccacggtctcttaatcccttagagaattaggagaagaagaagaatgaatctctctagaaagagatagaatttaca

SEQ ID NO: 101704 - DNA, 152 bp, Glycine max
  unsure (1)..(152): unsure at all n locations
aatgacatttaagctaggattaactcactttaacctctanatactactaaatccagattggcctttcaactctcaaaaattcacttcgtttccactcataacaccatattctcaccttctaaccctagggtaattctacccttcatctctaa

SEQ ID NO: 101705 - DNA, 402 bp, Glycine max
  unsure (1)..(402): unsure at all n locations
aggatcattgtcaaggtccaacgccttataatgatcacctcttaaggtaaaaaagaatcacttgataagcaagaactacgtangtctgatttcctcatcgcaattgtggatacgtaagagcaaaagccctgcttttgtcgaccaccccaagagatcgttaatggtccaatgccttaatgtttctctcctctcanaaaaacaagagatcgttaatggtccaagctcatgcttttataaaaaggttcatcaagtcaagttgatatatgaaagtaaccgtcttgcanaataggtgcataagatgaatcgagtcacatcactgcttcgtctactgccaaacatatataagattggtgatgtccttgttacttncagnttcaccttgacaaagatgtcatggaccat

SEQ ID NO: 101706 - DNA, 374 bp, Glycine max
  unsure (1)..(374): unsure at all n locations
tactaagcctgaggattcacccagactacggagttatatgctactcgttacatattactcgaaangcagtggagccataatccctgtaagctcctcatcccccattttttgacgaatgactcaacgaacatgtcatatccgggagggccctgggcattcaatgacactgtttaccctcagcgtaagtgcaaagctaatgtgcgggctgctgaattagagaaatcgcggtaatctgacattgcatagatgcccacaggggcaattaacagctgtagtgatgctctatgactcatcggatttcagtcgaccattgtttgttgtcaacacctgcctctgatgtgactccaaaccgtgatcaagatactcattgccat

SEQ ID NO: 101707 - DNA, 429 bp, Glycine max
  unsure (1)..(429): unsure at all n locations
agcttctatccaaatggacttaccttgaattattctcttgatagccctnttgagccttgtttccctttccttggtttgaagctcactacaagccttaagtgaaaaaccatgatattaccatatccttaaggaattttggagctttggaattgttttgggaataaatgtggggggtttttgtttcattggacaacttgttttggtggctatgcttcatgatgtattttgggccatacttgatgtacattgtatattggttaaatgttggacatgctgaatgaaatgttgtttctcaaaggctaaagagtaaaaaaaaaaaaaaaaaaattcaaaaaaaaaaaaaagaaaagcaataaagttgagtgaataagatcttaaatggcacaagaatgatgaaactcttggctctactcttcatgttaaatttta

SEQ ID NO: 101708 - DNA, 464 bp, Glycine max
  unsure (1)..(464): unsure at all n locations
tcagaccaaagcaacacanaaatctatgtgtccaataccctttttttaaggatttcaaggtttgataagtgaaattgagaatgaggtaaatttggagcaaactctcacttcacacaagtctatatcatcaatctaaacttgctcaaactggttttacgacgaanattctaccgaatcannaatttgacttctcaacacccaatttaccctagaaatggctctggccctcactttggtcattngttnttctctctagtacagcccaagctttctcataagtcctaaatgacatttcaagctaggattaacccactttaacctctatttaccactgaatccagatttagccttccaactctcaaatactcactctttttccactcataacaccatgttctcaccttctaactctaggttaactctacccttcatctctaacagtnttccataagcaatttcagcac

SEQ ID NO: 101709 - DNA, 490 bp, Glycine max
  unsure (1)..(490): unsure at all n locations
actaagctgccgcacggagttccgacatgctcttggtggggatgtattatgttagtttaagtggacgtttccattgggaaatacaatgataaggtactttgtgatgttgttcctatggaggccagtcacttacttttggggagaccatggcaatttgataaaagagccaatcatgacggttacaccaacaagatctctttcattacttttggtgttgcataaaaaatgtacaatgtaggtcggctagggttttttgtgcgagctcaaccgacattntgtttcggccgaaactggcatgttcccatttattntggccaggaaaacattagcccacctcggcaaaaaaatatttgctatccgacttcatgcatatttcattcagggaatgaactgaaaactcaatagccgacatcggtcgtgaaataaccacgactgatacattcaccgacattgcgcaattttttttataaactctcgcttgcagataatg

SEQ ID NO: 101710 - DNA, 387 bp, Glycine max
  unsure (1)..(387): unsure at all n locations
caccaccaatgttgctgggtgcacctagaaaagacccaactgcaatgggagagggtggactaagatgaaagaacgggcctgaatagcccgatttcttttcgcaaggagagaaacttataagaaaaaacttggtagcagatgaaaaaaaaattgatgaattggaaatccatttatgaaaatgattaatattgctagattgtccaacgacatttgcctttnttaacgaaaatacaccatgccattgcttgaaggtacaaggttcatggcctttaagccttatagttcaccaatggatcttggaattaaagctcatgtctctgaacgagatcctttatctaacatctctgcttgaagaggatcatttggcacatcatatatcttactatt

SEQ ID NO: 101711 - DNA, 483 bp, Glycine max
  unsure (1)..(483): unsure at all n locations
aactagctgtctgattttctcagttttacagctntgacattttttggtcttatntaactgnncttgggcttggcggccacgctcaacatagtactttcgacacctactgtacgttgatttcaccaatgctgttatgggaatgttgcgacaatcctttataaccttattgatacattctgaaaggctcgttgtcatgtggccatatcgacgtccttccctatcgtaagccatcgtccatttttcctttgagatgcgatctatccatgttgctatggctggactcagttcacgaaattnttctaaatttngatcaaaaatgtgcttgcatggagtgtaggctgcataaaattagttatgaataacatatttaagtataaatgaaagtaaaataaacgtgaccatcaaatatgaaatcttactcaatttctttcacatttctttttgttgtcattattgaatattcgattgaagtgcttgctatgt

SEQ ID NO: 101712 - DNA, 365 bp, Glycine max
  unsure (1)..(365): unsure at all n locations
tcctaatctcaaacactgacttaggactctctctactcatcactgtgacaccctctacccctcacatatatactaaataggaataaaaaaattcacatattaattaaaagtatttttaaaaccatcttttttaaacaagtctttcaaacgggaaaaaggctcacattcattttcttctacatcatattcaaacctgnccaaataaataataaagtattctcgactcaacaaggtcgtctaagcttcatacaattaatatagaacctatatcctaatgtcacatcctatcaaagcgttgtgttcccgtgtcctctagcatgaggttcttcatagtcatccacctattcatctgctcccccgaacac

SEQ ID NO: 101713 - DNA, 490 bp, Glycine max
  unsure (1)..(490): unsure at all n locations
ctcagctaacttatcaattatcttcataattcccctcgctcaagcacgtaatattatttgcttagtgaggcatgncaaaggttctagagtttgattctgacatggcttgcttaagcacatagtatgcaacacttaagcgagaagagcttgggttcttcaataactnttcctgctaaaactccacaaaaacatcaaaaaagtcctaaaaaaacctaaaattctagagttccaatgtgattattcaaaattcaccccaatcttaaggtaaaacaaggctccatgtattagaaatgttccataatcacctacaatcatatgtaaaattaaagtatatttgacgattaccaactatcaaagtatttgtcatttattaatagtactaattattacaaattatacttaaaatgcacgatgttataaagacaaatctctacnaaaaatatacatattagaagaagtaataaattttttaattcctaactcaaatctc

SEQ ID NO: 101714 - DNA, 452 bp, Glycine max
catgcaagcttgaatgctctattaatggagttgacagttattcttagactgatcaacacatgcacagtggccaaggatgcatgggagatcctgaaaaccactcatgaaggaacctccaaagtgaagatgtccagattgcaactattggctacaaaattcgaaaatctgaagatgaaggaggaagagtgtattcatgacttccacatgaacattcttgaaattgccaatgcttgcactgccttgggagaaaggatgacagatgaaaagctggtgagaaagatcctcagatctttgcctaagagatttgacatgaaagtcactgcaatagaggaggcccaagacatttgcaacatgagagtagatgaactcattggttccctttaaacctttgagctaggactctcggataggactgaatagaagagcaagaatctggcgttcgtgtcaatgat

SEQ ID NO: 101715 - DNA, 469 bp, Glycine max
  unsure (1)..(469): unsure at all n locations
ctcaagcttctttgctgganaattccttccctggnaggaggggaggnttgatttaatgtttggtgttcggnattggatgagnggcaggcgggctttgtggctgatttangggtggccctttgggatgacttaatgttcttggttgataggagggggggtaatgagaaaggctgatattgactgagtattgatattgttgagctggtgaggacattggccatgtaggaatgacagtcgcagcatgggttcctccctcattcttactctctccatttgccccacgcttcttatttatcaaagcaagattatcaaagttgcctcttttcagacccacttcgatccttttgacggcgaatactaaatcggcaaagcttaaaggcgtgtcacccaccatcttcttatagtagaacacttgtaatgtgcctactatcattgtcatcttcctctctatcattgagggcgctacttg

SEQ ID NO: 101716 - DNA, 213 bp, Glycine max
cttctacgtttaaacgttgaccgcttgagccaataatctcctgaacaccatctgcatgttcagagttctaaggattttaatttcgttatagcgagcccctctcatgctataccgccactctattttatggaccttgcgggcacctgatccttataaaaggaggccaaggaaactacggagaaccttacagtgttcaatttcggcgagggagga

SEQ ID NO: 101717 - DNA, 315 bp, Glycine max
tttttattcatggctaggtgggttaccaggttaacccagacatctagtttaccctcaagcttcttaatctcaccttgatgaatttgggctacttcatgcattcctctaatgacaatagcatcacttctggcactaaattggtgggagtttgaagccatcttctcgattaaatttctggcttcagcaggggtcatgtctccagggctccaccactggcagcatctatcatacttctctccatgttgctgagtccttcataaaaatattgagaagaagctgctctgaaatctggtgtgagggcaactggcacataat

SEQ ID NO: 101718 - DNA, 380 bp, Glycine max
  unsure (1)..(380): unsure at all n locations
ggagattgatcctaaataggttgccattgcgagataaacttcttcagcgcaacatcatcactaatgcaactgatgctntctgtccgcagtgtaatacgacgcaagagacaaggacacatgtgatcctctcctgctcaaaaatatctcaactctggatggattggtacagacaagaaaatgtccaacaactttgccaaactcgatggagactcacctttggtagcacatgttcccaacaagttcaatctaggaggcaagattgagaagcttgatctggacaagaatagcatggtgtatatggcgtgcgaggaacaaaaagaattttgaagcatggatttggatactataaaaatcaaggaagaagtcaccctctgcacgtg

SEQ ID NO: 101719 - DNA, 345 bp, Glycine max
gaatgcctctaacagcaccttttgtcaatgattatcttcatgcctcttaagtgcagatgtccaaatctttgatgccatattatgacttcatcttctttggaggatagacatgtggaggagtaactggtttgttgatgtgtccatacgtaacagttgccctttgatctgctgcccttcattagaacttcactcttctcatttgtcaccaagcattctgactttgtgaagtttacattgaatccttcatcacacaactgactgatgctgatcaagtttgcagtcagtcccttcaccagcagtactttggttagactaggaaggccatcatggactagcttttccatt

SEQ ID NO: 101720 - DNA, 461 bp, Glycine max
tgtatggtcgctcagatcttgactagatataactttctgaatataatgagtggatcccatatatctactccaaagttagtgcgaatcaaatcacttctgcgttttatctctagcatacattcattattctttacctactgctcacattagggttgttttaggtaaaacaccataactaaacgcgccacaaggaatccctatcgcaccagatccaaatctataacgatgggtgaccaagaggagacacaggaacagatgaaagctgacatgtcggctttgaaagaacaaatggcttctatgatggaggccatgctaggaatgaggcaactgatggagaataacgtggccatcgctgccgctgtcagttcggctgtcgaagcagacccaactctcctagctaccatgcatcatgcttccccaaatgcagtatgacgaaagaagagacacaggggcacaacagc

SEQ ID NO: 101721 - DNA, 293 bp, Glycine max
aaaatgtcccaaaaaaacgaggctgatcgacgcaaatgagcttttattgacacacacaaatccatgttgggttcgccattcatgtatgaacggttgcaaaccagaaactgaacaacagctaatgagcaagaatgttctatcagcttcctgataaaaaatctgcccttaaaaggtagtaataacataaacacataagagatgcacaagctagtattttcgtctttttttaaatagttatcgaaagttcaagtcctgtggagtactggatattaacatggacagggagggaatta

SEQ ID NO: 101722 - DNA, 425 bp, Glycine max
  unsure (1)..(425): unsure at all n locations
tttcgcaagacatatggaaggatctggganctggttattatttatagtctctgnngaagccatggcatccctcactcagtattatgatcagccgctaaggtgcttcacgtttggggacttttagttagtaccgaccgtggaagaatatgaagacatcttgggatgtcctctatgaggaagaaagccatatctcttttctatgttatacccctccatggcgcaaataagcacagcgcaagaattggaccgagtaaaacaaaatagaaatggggtagtcggaataccgatgaaggacttggaggagaaagtgaatgctttggcggatcaaggcgaatgggcttcattcattgatgtcatatagctattggtgttcagagtcgtcctttttccacatgtggatgggctagnggatctaacagtgatcg

SEQ ID NO: 101723 - DNA, 283 bp, Glycine max
caccccatatgccatgtcttttatttggtcccatgactcctatctgatgttcctgcatcaccaataatttaaatgcccaactaatggttccatgcatattcttatgtctatataaatattcatgggccgcagcattggggaccaacacaaatcattcacatcataaagtgtttgaaattcaaaattctcaacaactctcttcaaccattctcttcttaaatcaatacaacaatgggatttcgttacctggcatcagaaaggcatcaaaagcggcggacgcacc

SEQ ID NO: 101724 - DNA, 465 bp, Glycine max
  unsure (1)..(465): unsure at all n locations
tcagatgcactngtgagagattcccntggtgtgtgtataattttagatattatgatgaacaaggctcctctagaataggtactgcactttcctgtaagatttttctttgcctttctacgttgtttcttctgcaagtagcttcaatctctaagtcaaaatcaactaaatcacctgcagaagatctacggtgcatacaaaacactagcaagaatagtggttaaccaattcaagagaaaaaacaaattctgcactaactaaatattcacaaaaacaaataattaaagagtaaagaattaatgcctacaattgagctagacttcccaaatggaaagaagttccctggcaatggcaccaaaaacttgttccacccctatactacttgttattatggatgcgaaatcttattggcaagtgtaccgagtcgtgcaagtagtaacanaacggtaagaacccgagtatcgaact

SEQ ID NO: 101725 - DNA, 419 bp, Glycine max
  unsure (1)..(419): unsure at all n locations
cttactgcagtgggggaccgagcacnggttctcaacatcagcgcttcatgcaccacgatcaacacccttgcgcgagaccatgtggcctaggtgtttcacctgttgatgggcagaatagcatcacgacaattgtaccacatgttgattatacgatataacccaagaagctcgctctaagcgagcggcatgagcatcgaatgacacgctatggatcaagatatcatgatcatagtacatggaccatgcgacagatagatggctggnaaatcagattcattgccggctataaagactacgcgagacatcacacaccaccatagggcttacaccttgaattcttagtgcccatggcgcgtgagaaatgccgtgacatcaatgcccagcgaatgcatgtgatataagtggtggccatgcaacaa

SEQ ID NO: 101726 - DNA, 424 bp, Glycine max
  unsure (1)..(424): unsure at all n locations
agcttttagtattcacacacacacagagacacatactttctcacatncaaacacacacacaagcctaaaacgcagaagctgtccaaagctaattagtagtatggattgccttaaggatagtctttggtggtactccatttttttttcttcttaagctgaacttgatctagtaccccactaattagtttttagataatcattaataaaactggttttgtttatgttggttagaacattttaaattgtgtactagcaagtcattttcaattgtaacattatctaagtccactaaaaaacataactcgtctggtagctagagttttgtcgattaaattgagtaacatggctcgaatttcctcgtacatgctagaaaattcttagcctgcatcataaacacaagtcactctgtactctattctataca

SEQ ID NO: 101727 - DNA, 466 bp, Glycine max
  unsure (1)..(466): unsure at all n locations
tctcaacgacttgcatgctcaccaacgtgaagatgctgtcaattctctcgcttatgaagctgagatgaggctccgtgaccctgtctatggctgtgtaggagtcatatcgctcctccaacaccaacttcgccagcttcaaatggacctctattgtgcaaaatccgagctctcgaggtaccaaaacttgagcacgaccaccaatttgagttctcaagcttctgagtccacagccacgacctaccaccatcatcaaaacacgtctggtggtggtggatttanccgtgaccatcactatcattatcatcaccaccaccagttctttcctatggaccagcaccaacaacaacaggtggtgacaagcttctatgcatgcaacagctacgatgcaagcctcttggctatgaacatatctgccatcttatggcaactcaatcaactgaacatcagagtgccgccggaggggcga

SEQ ID NO: 101728 - DNA, 320 bp, Glycine max
  unsure (1)..(320): unsure at all n locations
atgagaggaagtgtgattttcgaaatctgcacttatgcaaaatttttgctggtgaaatgtgcagcagaattttgcacaagtgcagagaaaatgcttgtgtgtggttggctgtggaaagtctactgcagaatgagttctggatgtttgccagtagatcccaacggtccaaatgtaggcttatgcactatagactcccagtaaaatnttggagtcgatccaacggttaatgaattggatcgaaggaattgttactgtggtctttaagtgagaaaagctgtgatattggttgatgtgttgagcagagttttctgcctttgttc

SEQ ID NO: 101729 - DNA, 380 bp, Glycine max
  unsure (1)..(380): unsure at all n locations
accaaagagggggagagatgttgaagttctggtttatctttgtggggttcatccccaaggcttaagtgaaaatcatttcatgcctttcatttgaattgctcgatgatcaagaaagttaaaaagggtcctctgtttgagaggataaggtgttagctttatctacactactattgaagataaggctggtgttcttgtacttgctaatcgctttcacggaagcaactttcactaatggtcggnatgatttaactaaaaacttagcgtctcaattgaacttggaaagagaaggcacgtgatcttgatgtgaaattcaatacaagtggtgccttaacatgagcgcgtgcaaatccgacacgtggatccatcacttactacatttg

SEQ ID NO: 101730 - DNA, 487 bp, Glycine max
  unsure (1)..(487): unsure at all n locations
gcttcacatatctngcattgctccatagcttaccttcacgccatcatctattctatctttgtaacaaccaggcgaccattattctccttcaaacttctatattcaagtttaaggttcccacctttaagatccatgtgcattcaggcctncacctccaagtttcaaactttcacattctttttcaaaagctttaaacttccaactttaagcaccgcatttaagcttcaagccttatgaaagttatttttagatgctgacaacgatatttctagatggcctaaatataaaacatatttataataattttattatttttgtctgtggagacaaaactactatttgtgatatattataaaataaattacattacaatcattctaaatcaaattataatatcaaaagtaatatatttaaaattaattatccaatgaaaaataagaataatatttaacaataaaaattattcttcataatatattaaaaacta

SEQ ID NO: 101731 - DNA, 444 bp, Glycine max
  unsure (1)..(444): unsure at all n locations
tattcataggtctccttcaatcaagtatctattgnctctattctgacatatttcctctcttaatcttgcatataaagagtgtggccgttggggcattaaatgcacatacttcttcatgttgagaaaccattcttcatcattggcatattgaacactacaacaagaaaccacttccttttacgttagagtaagtctgtgcagcatagcttttcttttgatggtgattaagggatttcagaacttgacttcatttattcttcataggatttcgacatatcctagtagaatttctctacaaaatagatctccgacacagtgtattagatgaagtcttaaatgtcatctttaatgtcatatcagatcatgattctatcttgctataatctgaaacacccgacacataagacgaaacttttaacctttgtatttattntcatctaatca

SEQ ID NO: 101732 - DNA, 416 bp, Glycine max
cacacatctatcaacatcactagaggaaaaaccatcactaagcaaagtctaattaaacttttcatgcccattgttttgtgcttgtttcaaacgatatggagatttaaaaagtttcacactttgttttcttgattagtgaatttcagctatggttcaacccactaatccaagatcaaatccaaaattctccactaagtgtgcttaggtttcatgaggcatgtaaagcatgaaggacatgcacaaagtgtggcaatggggtgtcacaagcaaatgctcacctcccccttatgctggtccaaaatttaattggattgaacttctcccaattaaattaaatttctctcccaacacacacatcaaatagtgcacttaatgcatgtgaaattacaaaactacccttaatacaacaactagtc

SEQ ID NO: 101733 - DNA, 427 bp, Glycine max
  unsure (1)..(427): unsure at all n locations
ncaagcttgtaccataaanatgatgcacatgctttatttactgacacagcaatgcttatccaatacaatacaataccttcgaagatttaacttctattccatcaccgtggcattcatctgcatcagaccttcctgcattatattgtgcatgtttgaattattttatttccgagataatttttctaaaagaaaaagcaaccattctcttacaggtaagctgcagaaagaatgcacaaaattttattagtctggttaagacaatcaccttccacccttgtagtagtttgctcattgccttcatttctcgagcttgattcttcatcagaatttcgtgattgaaacttctccttagcccatgctattgcctcatcaatgtctgctgttccacaactttcctctctgagattggagttgacctctatgacat

SEQ ID NO: 101734 - DNA, 334 bp, Glycine max
  unsure (1)..(334): unsure at all n locations
acctagaatctcaagcttatgatgatgaatcaagttgatccaagttgttntgttgtttacaaagatgatgacaaagaagcgcccagaatgatttcaagattgagtctaaaagttcaagatcaagactaattntaagtttcatgagaagaaatcaagaagattcaagaatcaagagaagtttgaattccagattcctgagaagaaatcaagaggacttcacacgggaagtattgaagagattntttataataacaaacatagcacaacattgtttgtcaaaagagttgttctcatgaatttctaagttaccagagtttttactctttggtaatcg

SEQ ID NO: 101735 - DNA, 418 bp, Glycine max
  unsure (1)..(418): unsure at all n locations
ttagagaggttgtgtggcgagctttgtctgtgttgtgtgttatatttgtgaaggacggngtaacgatggattggccacttgagatagtgggggaaatgttgatctttgtgtgatgtgttgatgagtttatgttgtttagttgactgtagtttagtaccattgatagaggagcccacacaaacatgtaaaggacaatccaatggggaaattcgtttatgagtcaatcttcagagattggatgactacacagagtagtacctgagggatggatcgttgacttgctgtttcttgagggtatgacactgagnttgtggtagcgttttcacagtgccaacttggcaatcttgacaaatgtgagacataactggttggtgagagcctaccattgtacaatggtgagggtgtactcccaacaatc

SEQ ID NO: 101736 - DNA, 352 bp, Glycine max
gacttggttcgatataaaaatatctagatttgatctcttgcttaacttattttataacttaaccgctttttctctccctttattggacttcatcttgaataatttttaagttattaaaccggagacattttaatgctggatgaagaatgtaaaaataggaagacaatattattgatctgcgaaatgcaagtaattatcattctctaaataaaattacaatttactaagcgattaaaatatgtacactattattattatgatgatgatgatgatgatcattcatactatctttcttatctaaatattttttgtgattgtgattaacacatacactcacttacatgctttcatg

SEQ ID NO: 101737 - DNA, 468 bp, Glycine max
  unsure (1)..(468): unsure at all n locations
tctgcggcgtgtgaagacactcgcgccgcgcgtggtgacgcttgtggatcatgatgccaacgccaacacggcgccgttcgtggctcgagtaaccgagttgtgcgcgtattacggcgcgctgttcgactcgctcgagtcgacgatggcacgggagaacttgaagcgagtcatgatcgatgagggactgagtcggaatgtggtgaactcggtggcgtgcgaatgaagggaccgcgtggaacggtgcgatgtgtttgggaagtggcgcgcgcgtatgagcatggctgggttcatgttgaagccactgagtcagcgagtcgctgattcgatcaaagcgcgactcggtggcgctgggaaccgagtcgctggtaaagtagagaacggtgggatttgctntggctggatgggaagaactctcaccgtcgcatctgcttggtgttaactacttaactcaactttttactctcttta

SEQ ID NO: 101738 - DNA, 339 bp, Glycine max
tgttagtgataaatcttggaagaaataccatatactcgctatagaaatacgtacttaagaaagtgtacattacaagttttgccaatttatgggattatatgtttcctccatgctaaatatgataactgggccacacgaatgtatatttttcgtagtcagatttaactatcacctctcaagagtttgtgtagcccttacaacaaattttgtagttaatgagaatggaatttttggcttcttgcccaaaattattggtttcagcatgattttgacacatttctagtaattcataagaatgcgcgtatcaagaatccagatcattgtgacattgggccaaca

SEQ ID NO: 101739 - DNA, 428 bp, Glycine max
  unsure (1)..(428): unsure at all n locations
gtgcttgcgagtaaagatgcgagttttgttnttgtgtattgccgatacgagatagatgagttgtatcatggtgattaatctctgtcatatctaccatgacagacactcatgtgtggactgcttggccgattcgacttatgatttggacacgaaatttgtgaattttgagcaacctctcacttatttgctagtgttactcttacgtgagtgtggagatttatgctggaccattgtgcctattactaacttattatattaaacaacacatagtgatgatctacagtaactattattgagaatgtattgattgacacactaacagcttatcacactctgatatttgtttagaaagtgacgaaacaaaacttttaaaatctaatgtattaacttagacacaattcatactgggatccaaagaataaattcta

SEQ ID NO: 101740 - DNA, 278 bp, Glycine max
  unsure (1)..(278): unsure at all n locations
cttggtttacttggtaaacttgggttcagtatataagcgtcttggtgtaaatggtttgtgtggggtatggacaggtttgtaaactaaactattaataaggcagatcacgtgaataatggtgtttgaagacagatagacaacgtgtcagtcttcctagcacgttcctgatgttataaaggattttctctacctaacaatgctcatgtgttctatgttatctnctgaaatgctaaaccccgatgtcttgtgcatgtttagcctagtcttactcaagtatc

SEQ ID NO: 101741 - DNA, 408 bp, Glycine max
  unsure (1)..(408): unsure at all n locations
atcctgactcaccatanaccttgacctatggttataatgtcaatccttacccttggaagcaaaaaagaatagaagggaaatttccaatcaaagaaaagagaaggaaaatttccaatgaaagaggaaaaaagaaaagaatggaaattcccaatcaaagagtgggagaaagaaaaagaaaagaaagaaaatttccaaccaaagaatgggagaaagtaaaaagggaaggaagctcctggtcaaagaaaccagagaggtctttggaccagataatatctgaacagtacagaattgtcaccaaatgaacaaaaaggaatgaaaggaaaccacgacctaaaatggtcttctccctttaattaccaaccaaaatcccgtgcgctagcgacccttttttctcgccccgcactaaaa

SEQ ID NO: 101742 - DNA, 311 bp, Glycine max
tcactggataacatggtctgtcggctatgaatcatgatgcatcttgggccctacttgatgtacatcctatactgggtaaatgttggacatgctcaatgatatgctcttctttggaagctacgaatcatgaaaacatgctcgtaatgaaaaagatgacattaacgttgaacgaattatatcttaattggcaaagaatgaatagactcctgggactactctttaatgataaatattatctttaatgctatgtatattttctcatccttccatataggcacttatttcccattgctctttattctttgggatta

SEQ ID NO: 101743 - DNA, 423 bp, Glycine max
  unsure (1)..(423): unsure at all n locations
gacactatgatactcagcttnactactagaaggccagcactggcatactattgcttagcttataacacgtaattaactaagcgcatctaatatttgcccctccacaatcccttcatattcaataggcgacctatgagctctgatccgtgctagcagccaactatgtttatcctggactagactacaaacgtgggaaaaagcggaggtatcactatctataagagacatgatggcaatgaatccaagggcttgagactaggcaccacatatgtggaattgcaaagaattagagttactgccttgaagctggatccagaatattggaagaatgtacttgaatagatttgaattccatgtataattggagtttaaaaatgggattctaaattattcatttgattggctgtactgaaccaggtacca

SEQ ID NO: 101744 - DNA, 377 bp, Glycine max
  unsure (1)..(377): unsure at all n locations
ccttaacattgacagatgtanttgttccttggaacttgatagagcaggacaagataactggagtgctagacatagtgtgcagggttctaagttttattatgatgcttgttaaattaagctaagtttaacaagagacatttgcgaacaaagcttagtttaaattagttcanactcacgagacatcggtgttagtatttttgtcctcagcatagaacacaagaataatttcaaatagagaaaaatcctaattgcatcaagtatctcggtggaaggacccaacgctnttacttatttgttttcacactcaattgttcacgtttactggttctttgattacaataaaatataccttngttttcaattcataatacttaatt

SEQ ID NO: 101745 - DNA, 319 bp, Glycine max
  unsure (1)..(319): unsure at all n locations
ngaactgaggaagtgtggaagggtgagacttcctacttttattctttgaccacagagtggtacctggagatatgtggcggtggtcaggagaccttggggacgtcaggtggggtgctattgcccaaaaccaagcttgaccaatcccgacccaacccggacatagtcagtcagtgagaacctgtgatgtacctaaacaggcgagctcctggcaggcaaccgattaaaaaacaaagaccacacagccaggaggcttgtgtggtggctggccagctgtgaatcttgagtgatatatgggatatggcctctggaaatcgattac

SEQ ID NO: 101746 - DNA, 461 bp, Glycine max
  unsure (1)..(461): unsure at all n locations
agcttcanacgaataaactgaattcttggctctctcaatgacttgntattatatctaanagttgatcatttgagctgacagattcagtaatgatctcctaggacaacacttattcacaaatgaaatgacaattaatctctacgtttagtcctctcacgaaatactgggttagaggcaatgtgaagagcggcttgattgcacaatatagcttcattacttgaacttcacaacttcgactcttgaagtttgatccaaacaagttcacaagtatccagccagagccagggccaaggccaaatactctgcttcagcactggagtgagcatcaacactttgtttcttgcttttccaagaaaaaacatttcctccaattcatacatgttgaatatttaagtatttctctatgtttggtagcttagttggttagctttattcagaaggcagcagtgtattgtcactgt

SEQ ID NO: 101747 - DNA, 379 bp, Glycine max
gttatcattggtggaaaacccggatgcagatctttatagaagccatagatctaaagatatgggaagccgattgaattgattcctttattcctacaatggtagacagaaatgcacctatataaaaaaaaactagagaagaaagaagatgatgatgaaagaagaaagaagaagattcctctttagccccaaaatgctaagtgcgatcaacttgggcacatgagattcaattgtcctgtgtttaaaagaagaatggaatactcccgcgagacgaatttctaagagaagaacgaacttattggatatatcacttgggaagataatgtcataaattattcaagtgattcagagaagacaatcataagtttgggtatcatgatga

SEQ ID NO: 101748 - DNA, 403 bp, Glycine max
  unsure (1)..(403): unsure at all n locations
acatattacacaaaagcattgatgattagantaatatccctatatgcctcagcttgtttgtacaaagacccaacacntttacctactgtttgcaatcttatttactcgcacttttactggttttagcctagacttagtttattctgttctataccatcaattatcaatgtttctttcaacaatgccttatttatgaacttaaccctgtctaatactagttccttgagttcaatactcaaaatcatccatttgaattttaaatacttgacgatccagtgagctttcccgacgaatggatttcccttgaacatatttgtataaaggaaaaattggaccaaaaagtaactataggggaaatccaacatgtctcacgtcaatactatttctaatagtgatatttctt

SEQ ID NO: 101749 - DNA, 65 bp, Glycine max
gatatgcctgggtaaggttccatagttcatttgacatcttaatcatgtttgcgttttataaattt

SEQ ID NO: 101750 - DNA, 453 bp, Glycine max
  unsure (1)..(453): unsure at all n locations
ctgcagcttacttgcgagatatccaggaatttacctttatgtgacttattcataaatcttcctaaggtatcttttgcattattcaatagcaaacatttacgaccaaatatatgaaaatgtgagatggttggttttcttgccttgaacaattcatatggagttttctttaagatgggtcttattaaacgccctatttaaaatgtagcatgcagttgttacggcttcagcccaaaaatatattggaagaggtgtatcatttaataaagttctagctatctcttccagagatctatttttcctttcaacaacaccattttgttgaagggttcttggtgcagaaaaattatgctcaattccatgcttatcacaaaataagtcaaattctttattgtcaaactcacccncatgatcacttctaatagatataatcatgagagtttcttattttgatga

SEQ ID NO: 101751 - DNA, 418 bp, Glycine max
ttaacatgaaattgttactaaaataattacatgaagaagagatgcataccttcactttcagatcaccactagccatcctaaccaaaccacaaagattgtatgaaatggcattggtatcttttattgaagccatatttggcaaaacctgagcgagcaaacaaagtttgaaacaagagctaagcaacaacatttatcattattacaaaataggtagcaagtctaaatttcaagcttcttccaaccatctaacaaattttcaccaacatactaaaagagaaatataatgaactaaaaaatctgctaaaacttttatgatatatttaccatataattctccagcttcttgaaattgtaatgctccttttgggcctctatggtatagtgcgtggatgtaacctaataaatttaacatagaaat

SEQ ID NO: 101752 - DNA, 162 bp, Glycine max
aatgaagacctcaaacataatttatgttagttttgtgttagcgagatccaccaaaaaaaagatttgagtttgcagttcatgttacatcttattgttaggacaaacctctgatcataagagtcaaaattggtaattgaattagaggaatttgcaaggcctaag

SEQ ID NO: 101753 - DNA, 390 bp, Glycine max
acccaacagaatatatttgaaaatgacactagtcttcttgggtcctccactttcaaaatactattaaaaaatatgtgcacccaactgaagtacttgattgtgccaatctcaatatctcatgtgtagtgtgtggtaggctggtcatagttttttttttttttttttgaatttttggtccaggcagagtagaactagtttgaattttttggtcatagttcgaatttttttaatatcttttatttggtccaagctcactttgagctatcatactccggtgtcaaggtctttcttcctgcacacttaaaactcaccttgtacctcctttttcttttaatattttcaaaacccctaaactaacattacttgtatgtctgaaaaattttcatgtgt

SEQ ID NO: 101754 - DNA, 266 bp, Glycine max
  unsure (1)..(266): unsure at all n locations
tgattgacaatgctttgctaaacattaagaaatttttatttctgatgattaatgaatctcttatgttttatcactataaatcccattgaaatanagaaatgtgagtgccttaacattcctttaataattgtgatgataggtgaggaagctagaaacttcatttgtatgtttctggtctagaagagggttggatccacttagccagaagttattgtcagatccaaagccatgtgtcaaagagccatatcattgacaagactaatatc

SEQ ID NO: 101755 - DNA, 444 bp, Glycine max
atcttaagcaccgcggctgcagcttgcttttccatctccattataggcctggaatgataccggcagtgaatcgttaccagaaacaattttcaaatctgcttttcgaaagggttttgaaatttgaattctgaaagctgtaatcgattaccattggtgtgtaatcaattaccagtaacgaaactcctaaaattaaatttgaaaaatcatgacccttcaaaatataactatgtaatcgatcatcagaaacttgtaatcgattaccagcgaagaatttcaaaaaaagcttgttgaaaagacacatctcttcaaaccattttgaaaaggcacgaagggcctatatatatgtgtgtctgacttcgaaaagcaagagagagatattctaagagaacttaaatttcatatgctctctcaacaacactggggcaaacacttgcaaatctattg

SEQ ID NO: 101756 - DNA, 377 bp, Glycine max
  unsure (1)..(377): unsure at all n locations
tatacgaaactcaagctntctaaaagaagggncttgctgagttatgatttggtatgtcttctctggntgaagngaaggggtatttgactcatgttgcgctgggttataaagattttatgagattaaagcattcctttggcgatgctaaccctttggtgctgcttgaggagaaaaatgccactttgaagtgttagatttcatcttaaaaccaattggcattaagtgaagttacccaacagatatataagccgcactccaaggattgaggcagccgatgtgggacttgggtatttcccaatacacccccttcacgtccagcacttattgggtttggtgcgtgaaccacaaatggtgggtactcgtcgcagcggaagtga

SEQ ID NO: 101757 - DNA, 434 bp, Glycine max
  unsure (1)..(434): unsure at all n locations
tcaatcatttcatatatgaatgggaattatgacgcatcaacaagaatcaagccaaggctattgtgcaagcaatcaaatgtggcaaaaacacaccaaatgattatgatgatggatggctcaaaattctcacaaaggtaaactcatcacttntcaaattgagcctttcaaaactatcatgacatgtagagaagaatcaaggatntcaagtcacanaatgtcaagaacttttattttcataacaattacccatttcttgaacatatcctataattcaaagaaaaacatgcagattcgagcgtgcacactanattgacccanaatattaaactaaaaatccgacgaaactaacaacattaacanaataacacanctaacgaaattactaaaccaacaaaactagcaaaaccaaagaacactcccctccccccatactt

SEQ ID NO: 101758 - DNA, 446 bp, Glycine max
  unsure (1)..(446): unsure at all n locations
cttacaaataattatcacacagcagatttctatcaagactagggagcatatctccccagaccccatacccacgaaaattaatggagaaagaagtccacccaaacctgaattttcgaagtcccactcgtagccacgcacttcacgactccaaaaatgctctcctttcgcgatttggagcagaaatgatggccaaaggttgaagctttgtgtggagcttcaatggtgaatgaagaagaagaaagctacgtgagagagggagagaaaaggcttctgaatttctttcttttggctgagtgaggagagagaacaactttatggtttttaaatacaaagggaggtctctttctctattatnntattcaagctctgccacatgtccctatttgagtggagcaaaagggcccactttcccttttactgtgacccacactcagccagaatagtga

SEQ ID NO: 101759 - DNA, 90 bp, Glycine max
  unsure (1)..(90): unsure at all n locations
atgtgcgaggatgagaatctttttattnganaatgattgtcatgggtcaaagacactggtaaccgaataccagaagagcgtaatcgacta

SEQ ID NO: 101760 - DNA, 281 bp, Glycine max
taaaacaaatgccttatatttcaaaatgatgtgataagaacataacaaaataagccaaggtattgtgcagtataatgggcaaacacacaagatatgagatggaggtcaattttacaagtaactatcctttaaatgagctttcaaacttatgacatgtaaggaaaacaagatcaatacaaagtcagagcttttttttaacataccatttgacattcttattaagaaaatgaattgcatcccaaatgcctaattaactgaaccccaactacacatacaatacc

SEQ ID NO: 101761 - DNA, 449 bp, Glycine max
  unsure (1)..(449): unsure at all n locations
gcaaacagtgtacaaacagaanaggaataggaataaaattggctacaacatcaatgcacatccaagcgtcagaagaacttcaaaagcatatgtcctgaagacagagaacagtcacacagataaaagattctggaaacaaaatcttcatttgaacacctggtgtgctgaattcaacttgtcatccaagtcccaagctaagaaacagaatanacaatttactttgtgggaggtggccaagataggttcaaattntacttgttaatacaaaagcanacacacatttcctagtctttagattatacacatcagaaataaaattcagaataaaggggaattgcctttcaaccataaggggtcatgatgtagtaccaatanacacggtcatcatcatcaattagtgaatgcacaacttcctcttncagcagtggtgaacctganagaatgccaca

SEQ ID NO: 101762 - DNA, 446 bp, Glycine max
  unsure (1)..(446): unsure at all n locations
ctggttgggtcatataaatgtcttcctctatatccccatgcaagaatgcagttttgacatctaactgctccaagtgaagattctctgcagctactatgctcagaataattctgatggtagtcatctttacaactggagagaagatctctatgaaatcaattccttgtttctgttgaaaccctttcaccacaagtctcgccttgtatcttcttctatcgtcagattcttcctttagcctatagacccacctattctgtaacgctttctttccttctgngcaattagntaaagaccacgtcttattcttctgaagggatgttatctcatctttcatcgctagctcccactcaatagngtcattcccctgtgtagcctcactgaaacattctggctcaccagcatcagttaacaacacataatgcaatgaaggggaatacctatctggt

SEQ ID NO: 101763 - DNA, 372 bp, Glycine max
  unsure (1)..(372): unsure at all n locations
tttggcttccgctgcatctccatggtggaaaatcaccattaaaggaccccattgaagctcaaagatcaagcctccatagaagccccacaagcaagcttccatcaagtggtaatcagagcacaagagcttcaagtaggtgcaccttaaacctccattaattttttttctttaccttctcttccattgttggttcttcatttttctccatgtatctcctcacatgtcttgttctaaatgttattaacatgattcgttagagtttccaccgattaaacttgctatagaagttagatttgattntttattcaaatttcttgttcttgttcttgaaccatgaattgtgttgagtttaaggtccttcgagttttgtct

SEQ ID NO: 101764 - DNA, 378 bp, Glycine max
  unsure (1)..(378): unsure at all n locations
tgattaatatcctagcatgaaatggagagggattaaaaatcttgtttattaagcccgacaaaaagcctatnttggcttcttccctctttcctagttttacataaaacataccaccatcacatatgaatggataatacctcctattggaataaaacataaccattgatcacaataataagagcccccaaaatagaatgttaatatattgaatggggtgatgtatttctttttcattgttcaagaggaaattgctaaatacacccccaacccttactttttttaagttctttttacaaaacaaccctaaagttccttcaatcaatctacctcattctagatttcagtttctggtgagggtaattttagaaaacaaaaagt

SEQ ID NO: 101765 - DNA, 413 bp, Glycine max
  unsure (1)..(413): unsure at all n locations
tacaaccttcttgttatcgattacacagttgtttctaagacaatgactgatntattcaggagtctctactttaattggttaccatgtgatataatcgattatttctccttctttgagtagttcagaagtgaaaagaacactntaattgattactttgagtatctaatcgattacattgttcttgagttgttttcaggtgtttggaataacactttntcaattaaaaagatagtctaattgattacttcattgaattaatcgattaccttgtagatttaatcgattacaggcagttgtaactattttctctataaataactaactggggttctcttcaaaacaatctcaaaaataacacaataagcctctaaatgagctaagatcaagtattgttattagttaaagaaaaaaga

SEQ ID NO: 101766 - DNA, 452 bp, Glycine max
  unsure (1)..(452): unsure at all n locations
acatctccctatttntcaagcaaattcttcttgatatcatcaaaatcttcgtgatttacattctccccctttttgatgatgacaaccacctgtaggttaggagcaacaacaaagaaaatatctatttgcatatagtttactcccccttggttttacaatgattgcttatatgagacaattgaagatttcatatttttcatatataaaaagttgtctcataaaacaatagataatttttcttactattttatcttttatctttctctccccctttgtcaacatcaaaaacaaatcatgaatagagaggagaaagatgttaccacttgttgcaatgtatgagaatcaagtgataccaaaagggcataaaacaatcattcaatattaatcaagcaaaaacaagtacaataacacatcaatcaaacacaatcaaatacaatcaatcatcaaatatt

SEQ ID NO: 101767 - DNA, 451 bp, Glycine max
ctaattaagtttcccactcaaattcttatatataaatattgcacccacaagtatgaataccaactctaatttcattacaccctctaagacttaattaactgtcagagtatttttaagtataacacctaatgtcgtgctctcccatctgaaaccaaaatttgtgttgaatcttcatcgcgataatgatttgtgattcttctatacaacatttggatcgactaattacttcaacgtagattccaaaagaatgtcaagtgattgatactaggaagggaaatctgcttctcaataatgggtttcattccaagctacttcatgagtaagcccttggtgtatgtgaaaagaaaataatgaaaaagatacgatctgctaaaatgttaagggtgctgtatagaaaaacgatatagaaagtggtaaaagaaagatttgtaaggacatctttaaatgaaag

SEQ ID NO: 101768 - DNA, 326 bp, Glycine max
cacaatatattttaagggggtgtgattttgtcaatctattacgtgtgacttgtgcagccaaaggatattactacatagaatccccaccccgtggccccccaagatgtgaacatgagaatggctacctggcagaaagaggtgaaaaaaaccttggagtcctttcatttgaagcagtaaacaggaggtctttcaggtgggacacacttaggtatgctacaaatgcatatactcgtggcctgagtgtctatgataaggtgagggtgcaagctccttgctgcaccaaatctatctttccgggtatatattttatccccacgacgaacatg

SEQ ID NO: 101769 - DNA, 283 bp, Glycine max
tttttaactcgggtcccataacctattatcgtagcattcaacaatacatccctccaccgaaccggaatcatatgaatctacacatggattccatgatttcattgaattatacacgttgaacaatgatccatactgtttttatacgaaaaggattaccaagattcctatagctagggttctaaaatcttgtacccatgcatatataggcagtaaagcaacagaaaaaaacaaaaggggattggatgttatattagtattactgaatacctttggtggatcccat

SEQ ID NO: 101770 - DNA, 427 bp, Glycine max
  unsure (1)..(427): unsure at all n locations
tgttgaatatgatactgggcttactantgattgattttgtgtatgtaagagtagatattggncattaatggttcatccaactagtgttcttcgnttaattatctgctgattttctggttgtcttatgctggtggnttaaattgttcaaaatgtgatttcgtgtttattgctcaagtttgactgacagctaagtctttgcgggaaagcaatatttggctgagcttgctgactgactgaggttaaataggaatgcgtaacacgcaggactagttagtttaataggaatgcgtaacaagtaacaactatttttcccttgtgaacgaaaatcttatcgcttcaaataaattgcttttttttttataataaaaaaaacattatactgtaattcattatgccgttcatatactagtctcttatgtaatgaaac

SEQ ID NO: 101771 - DNA, 357 bp, Glycine max
  unsure (1)..(357): unsure at all n locations
tattctcggtttgcttactttttataccccctgttgacgtgcttaagccattttacttaattcgtttctcgcttaaactaaaaaataaaataaatttccaccgaacgtttgaatcgtattatccattaacttcggttaaaataaattccgaccgttcggtcgtgccgtaaccacgttggaaatcaaaaagaggtaaaaaataatataataatcaaaaagacatcttttaagtaaaataaagcggaaaatcaatcggaccgtttctctttgggatttctcattcttaatcgnatggattaataactaaagtgaaactaaaggctanaatcaattcgcctagtcaagctcgtccacaaa

SEQ ID NO: 101772 - DNA, 442 bp, Glycine max
  unsure (1)..(442): unsure at all n locations
ccctctgccgattagttntcgccggcttattgattgaggtgggtctataaataggcacaattgattttcctgctctgatgaatgagaaaactgcggcaaatggagagaatcagaaggatgcaggaacccatgctataattgtcgttcctacatggccaaatcccccaacaattcaacaatatcattactcccaatgttagcccttctcattacccaccacccaatcatccacaaaggccatccctaaatcagccacaaagcctgcctgtcgcacatccgtttccaaacaccacccttaacacaaaccaaaacaccaaccagagaaggaattttccagcgaatagacctgtataattcaccccaattccggtgtcctatgctaacttgctcccatatctacttgataattcaatggtagccataaccccaaccaaggttcctc

SEQ ID NO: 101773 - DNA, 272 bp, Glycine max
atattaataacagtcacatcacattattaggatatagactggctgacataagcctataatgctggtactgagaaaacaaatttgccaagagtatttctgctcgcttttgtgcttattctccactgacagacaaaaattgatatctttacacagtgcatttatcatacacatattgtattaagacatgaatattgattgctcagagtgaggaagggatcagatattaaagagaaaaatattgctcttactcatgattcatgaatagtactact

SEQ ID NO: 101774 - DNA, 294 bp, Glycine max
  unsure (1)..(294): unsure at all n locations
taacattcatatcgagcgtctcaatatattacgggacttaatcagacattatgagaaaaatttattatcgtttgaacttgcttagagcttcgataatcaatttcgagcgtctcgatatattaccggactcagncagtcaaccgagtaaaaagttattgtcgcttgaatctgctcagagcttcggtatttaatttcgagcgtctcgatatattcncggactcattctgaccttctatgcaataattcttattgcttgaacttgcttagagcttctataatcaatttcgagcgtct

SEQ ID NO: 101775 - DNA, 417 bp, Glycine max
  unsure (1)..(417): unsure at all n locations
agcttgagaacatagttgcaaccattggtttatatgggccacattngcccattcctagctatcatgacatcagaagtccactcttgaagaaggaagttgaatatactgaaaatttgatgaaaggccatagggagcaatgggtcaagtatggttgtactattatgtccgatgcatggactgatcggaaacaaagatgcatcattaattttttgaataactctcaagctggtaccattgttttgaagtctattgatggctctgantttgaaagacaggtgaaaagctttttgagttgcttgatgccattgtggaggaagttggagaagagaatgttgttcaagttgtaaccgataatgggagcaactatgttttagcgggtaagttgttggaggagaaaaggaaacatatttattggac

SEQ ID NO: 101776 - DNA, 432 bp, Glycine max
  unsure (1)..(432): unsure at all n locations
cctggtacaaaaggaacaacttatggtaagatactataatatgctatagttacataataatatcagntacatataaatttttgcattgcatcactgcatgggagaatttataattgcattatacagttgtacattcttccaataataaagaaaatgataaaacccagactccaaatacatggcagcaggcttgagatagctcccaattcctaaataatactttcaaccattttttctggctaaactntagtaggtctagatcccaattcanatgtccaactcttcactctantttattatcactaatngataaatgggaccacatcctaataactttattcgtgcggctttgtttgtcgcaaggacagatattacaaatagaacacaatccataacctaaagagtacatcatagagacccactttgagtcca

SEQ ID NO: 101777 - DNA, 396 bp, Glycine max
tatgacccttccagcaacagatacaacccctgatggaggaatcaccctaacctcagatggtccagccctcagcaacaacaacaacagtctgctcctttctttcaaaatgctgctggcccaagcagaccatacattccttcaccaatccaacaacagcaacaaccccagaaacagccaacagttgaggcccctccacaaccttccctcgaagaacttgtgaggcaaatgactatgcagaacatgcagtttcagcaagagaccagagcctccattcagagcttaaccaatcagatgggacaattagctacccaattgaatcaacaacagtcccagaattctgacaagctgccttctcaagctatccaaaatcccaaaaatgtcagtgccatttcattg

SEQ ID NO: 101778 - DNA, 360 bp, Glycine max
  unsure (1)..(360): unsure at all n locations
ttttcgtccgcagaatacgccctcatctttcagccatacattcgaaaaaacccctttggacatgtcgtctctttgtattatcaaaatcggtacttcgaacttgggagggatgacaatgtcatgtactatgcatagatccactaaatctgagaacgggtagttgccgaggccctctaccgctattagcctctcttcaagtgaatcaatattttccttatctttggcacagggaatggattcttttacgggtgcgggtatagacgggacatggcagactatgttgggttggggcaattcatgagggggcggatctttgaggggaagcacagggcctanatgggcatttccttcatcatcttc

SEQ ID NO: 101779 - DNA, 226 bp, Glycine max
  unsure (1)..(226): unsure at all n locations
gtacatgattaccgttgaaaagaaattgcatggaagaatatgttaaggtagtcaatcatcttttaactttattcaattggaagtaatatttggggttttattaacatgtttctatttttttttcaagtcacatgaagaggccaaatganttcaatcaaagtcattcctaattgggatgaatattgtgacctatgtgccaaaactactggactccgagccaaaaatg

SEQ ID NO: 101780 - DNA, 388 bp, Glycine max
  unsure (1)..(388): unsure at all n locations
tacattttgatttgtcagctcattaagattacctttcctcttagtagaanaaagcttaatcccatctttgttttagacgacacaccttctctcttaaaggaaaaatcatgtccattgtcacataattggcttatgctaagcatattgtgtttgagcccttcaacgaaaagaacattatctattagggatgaatgcttattntacctactccaactatctttcctttctgattttcgttgaaagtgattgttctaccatgcataagggtcagacattggaatatacacctttctcctgtcatatgctatgagcatccacgttcacgtaccatgcctagagtgtctntctttttggtgaggatatctgcaataagaattatttttctttt

SEQ ID NO: 101781 - DNA, 423 bp, Glycine max
  unsure (1)..(423): unsure at all n locations
agtgttccctggcgaatttatcttagtangtctcatgagaggcaaatttgattttcctgctttgatgaatangaagcctggggaagatggagagaataagaaggagggagaaacccatgctatgactgcccttcctacatggccaaatttctcaccagctcaacaatatcaatactcaaccaatatcagcccttctcattaagccaagaacacataatcatccacaaaggccacccctaaatcagccacaaaacccgcctgccgcacatccgataccaaacaccacccttaacacgaaccaaagcactaaccagggaaggaatttttcagaaaagaagcatgtagaattcaccccaatttcggtgttgtatgctaacttactcccatatctagtcaataatgtaatggtagccataatcccag

SEQ ID NO: 101782 - DNA, 423 bp, Glycine max
  unsure (1)..(423): unsure at all n locations
actcatcttacccacatttagtaatgatccactaacctagaattattatatcttaatgccactatcctanggaattaaaagaacttaatggctgagtgtaactganattgtggcaaccaaaagtcacccccaacagccatcaagccagccaccatttggtctcccaaaaggctgatgcctaagttgccaattgggcccttattacaacttgaactaaaccaaactaaagcccttttattttattaacccaaaacatatttttgctcagccaactttacaaggattgggccattatttagacaaactaaacactctataattgagacaaagtggtgccatttagtcctcctctatttgggccatgatacaactcacaaccttggacttttctccttgaaacttgggcttgtgttcaaatagtat

SEQ ID NO: 101783 - DNA, 409 bp, Glycine max
  unsure (1)..(409): unsure at all n locations
ctctattaaatctataaactgcttggagcaccagtagagattactagtgataaagatcctggtattgggagtgggttgatccgaattgagagtggcatccgataataaaaaaaaagtttttgtttgcgattctacaggctccgctcacgtgcgtgtgttgctgggttctcttgatcaaaggaacactaacttctatacttcatttgacctattttattttttctgggtagtaataagtaatgttgcatgatttttagtaaccgtgtattctgtttgcactataacagagaatcaaccatgatttctgtagatggatccacaggggtcttgaaattccctgcaattgctttaacattttactgtccaacaggnggggctttgatggaaacttgcttgtggggcttctatg

SEQ ID NO: 101784 - DNA, 461 bp, Glycine max
tgtgcctcttcacgtccggaatatgaatgtagcatatagattcaaagacccttatgtgctttgttgatggattcttcccgttccaagcttcaattggagtcttgtcttttacagacttaattggacatctattgagtatgtaaatagcagtgtagactgcttcagcccaaaatgtgttaggtagtcccttctccttgagcatcgatctaaccatttccataattgtgcgattctttctctcggacactccattttgttgaggagaatatgcgaatgtaagttgtcgctcaatgccttcatcctcacaaaatctttcaaactcgcgagaggtgactctttgtcgcgacacttttagacttttatccgtgttctctttaattttacaagggccttgactttttgaataccccaagacttctgattttaatttagaaatggaccatgtattctagagaagcatc

SEQ ID NO: 101785 - DNA, 454 bp, Glycine max
  unsure (1)..(454): unsure at all n locations
gctggttaactttatattttttatgatatatgcaccttttatcatngccgtgcttttcattgatggtcctaagttccatcacttgaatttctggtatgctgtgtatcctggtgctgcagcatgcattctgcttagtttggtggtaaggaatctactatacccattacatagcatacatgtctccaaaaataagttactcattgcatgtttgctaattggaagacccctactgttttttcagcaagagatggttgtatactcgaagaaaaatttcaaattttgaccactgctctgcacattgatacatctcttctgctggctcttctaatttaatttgctgaaggaccaagaagaacattctttgatcagaatcatcattggtagtagagagcatcacccaacccaaaaatgaatagtccttgatnnttcttcatttagcaaggtcaaaaatgga

SEQ ID NO: 101786 - DNA, 296 bp, Glycine max
  unsure (1)..(296): unsure at all n locations
gttcagatgcttctgtaatctattaccaatagtctngaggtcgatcacaccattntgaaatcaattggaaccgtgcaaattctgttgaaaacattttgaaatcaaactttgcactggtatcgttataggaaacggtaatcgattaccagagagtaaaaactctggtaacttggaaaattttgagaaaactcttttgaaaaacaaaaangngcnanngnggggttttgaaaaannntttcaatacttttcttgtgaagtcttcttgaatntttcncntgggacttgaattcatcttt

SEQ ID NO: 101787 - DNA, 384 bp, Glycine max
tagagaggaagcttcatggaggatataagagagagaaagtggggaggcggaaggaattgaacgggaaaaaagaggaagagaagtggaactttgaagtgtttctcacaaaactctcattcatcacaggtacaactagtgttacactagcttccttgagaaacttccctgagaagctttcttgaaagctagagcttagctgcacacacccttctaatagctaagctcacctccctgagaagcttccttgagaaacttccttgagaagctaaagcttagcaacacacacccctctaatagccaagctcacctccctgagaatctttctggagaaactttcttgagagactaaagcttagcaacacacccctttaatagctaagctta

SEQ ID NO: 101788 - DNA, 450 bp, Glycine max
  unsure (1)..(450): unsure at all n locations
gctttcttggtaaccctacctttttattcctatttttcttcactcggnctaactcttgggtcgagatcttgaccacttttgctactcttgccatggaaggaatgaataggcaatttaatccctaagattgtaaccagtttgcatattagtccctgacttaaattttaattcanaatagtccctaactntacctctattatgcaaataagtccctactgttaaaatctaatttcctccgttagtcaaatgtctatttggcaaacctcagtccatgtaagcatcccaatgttgcaagtttgagtccaagtcatcaatcctatgtggcaaggactgaattgaaaaattaggttaaaaagaaatcaaaaatgaagtanacgcattttccctttcactgtcttactggcttganaggtttttaagcaatttgcttttcccttccctgcattctct

SEQ ID NO: 101789 - DNA, 367 bp, Glycine max
aatttgtcaactagttaaacaatgttacccataattgttaagtttggggttactaaaaacttactggatgttgtaacatcaaagcacttacaaaattttccttatgatgaaagcatccgccattgggggggcccacatggacaacatagtggctacattaaagatggaaagaaagatatgttaaacgtgaatcaaaagtgaaaggtaaaaatgccaaagaatattagagggaggtgggatcaaacactaatggtttttttcttattcttccctctgaataatctcttttaaaatttggagttagaaggccacctgagtgtactaataatatgaccctcttatctacagtttcaacacagtagtagaa

SEQ ID NO: 101790 - DNA, 417 bp, Glycine max
  unsure (1)..(417): unsure at all n locations
acacataatctattttagagatggacatttattgnagctgnggaaatcactgcaactgtaatattggtgatcgcaaacttcacgtgatgtccacatttcaaaatcatatatatgtataactcttttatattaggctgatactttgaatctttagctttagaaaatcattaattcgattgaaacgtaccttggatgcatgcggagcgagataaaaaaaaaaaatgcatatatatgggttgctctcatctcaagtgaagtcaattatgtttgcnattaattgtcaacttaagaagaattgaatacgtgtatgccttagaatatttttatttatcagaaacgattatnaggacattgtggtttgcatgataatatgacgacatcatactgaatattgtttgatatataaaagacaaatat

SEQ ID NO: 101791 - DNA, 455 bp, Glycine max
  unsure (1)..(455): unsure at all n locations
cataggaatgtattattctcaagttcactttttaatgtttgaaacaaacaaccttaagggttaaaatgccactcctgtacatgatgattgcttcactgtcctattgtcaattattacactaccatccctggtcctgctttagagcagccatcagtaccttgagcaaaggctctgacagatcagtaaaataaataatttctaaaagattttgaggattaatggatggagaaccattgaatggcaatggaaacttatgatggtgtcatgatgtgcacatatagaggaatgtagatctcaagatgctcaagactgtacattgaaaaaatgtgatctttaacgactatggtaagtgagaccacanattttatagagagacagatcatagactaatatttcttatcacaagttctggcaaagaacaatagtgtgtcactcagaacaacctacctgcacca

SEQ ID NO: 101792 - DNA, 390 bp, Glycine max
  unsure (1)..(390): unsure at all n locations
catgatatatgtcagggtttggtttggttcacggatcaaagggatgtcccacattatttccatgacacaaatgcaacaatgatgatttggaaattttatgcaaaactagtcatgcatacacctatgtggacactcaagtgtcgaaatttttttggtcatgtgatgctagggctcatgattcattttctttactttagtcaacccagtgtttccaaaatatgttcttttatcaatttgtgcattcatccgagtccattttgggcgttcgggaaaactttcacagcattcacccttcaagtgtatacacatttccttttaaaaactggttatgatcaatgaattttttcaaagagaagcttgaagttattccctttcacaagcatgtntttt

SEQ ID NO: 101793 - DNA, 405 bp, Glycine max
  unsure (1)..(405): unsure at all n locations
tttcagcgtcttatatattacgggactttatctgacatcctaataaaaagttattgtgggttgaatctgcttagagcttctgctctcaatttggagcgtctcgatatattacgggactcaatcagacatccaaggtaaaagttaatgtcgtttgaatttatacgaggttccaatttcaatttggagcatcgcgatatattacgggattctattggagaaacgagaaaaaagntattgtcgtttgtatttgatacgagcttccgctttcaaatgggagcgnntngatatattacggtactcaatcggacattcgaataaaaagttattgtcctttgaattttgttagagcttctgttttcaatttggagcgtcttgatttttacgggactcaatcagacatcccag

SEQ ID NO: 101794 - DNA, 251 bp, Glycine max
aagccctatagttgggcctaggctttagagtttttccttttgttaaggctttgtgtcttttgtttttgaatttataatacaaggatcttgcttcatctgttcgtggtctctacccattctcatttatttgcatgtttacttctttttctgaaacggcagatccgatgacgagtcccccgaaggtactaatacctgggacccgtctatcgacttcgagcaagagatgaattaaacggaagatgaaggagatg

SEQ ID NO: 101795 - DNA, 338 bp, Glycine max
gtgcctgtatattgatgcgcctgaatcggacattcgagttataagttattaccatttgaatctctcgagagcttcctatggttaattttgagcgtctcgatatattatacgcctgaatcgaacctcagtgtgaaaagttatgaccatttgaatttcttgagagcatccgatgatcattttcgagcgtctctatatgtgatgcaccttaatcggacctccgtgtgaaaagttatgaccatttgaatttctcgagagcttccgttgttcaataatgagcgtctcgacatattatgcgcccgaatcggacatccgtgggaaaagctatgaccatttgaatt

SEQ ID NO: 101796 - DNA, 331 bp, Glycine max
  unsure (1)..(331): unsure at all n locations
ctttacttatantgaattttttattgtatgccacatattaacaatagttggacaagagggctcataatttataagagagcggggggggttgactaaatagggctctactgctattggagtgntattttatatatcctaaatatgacgatagatgcacaggggtgaatttattggaattgctaactctctattttactgaaactattcccttacctttgtcacgacattttacatgtactaacataacttgattatataattgatggtttgattaatgtgaatcagtctcctcacacatggctattcttgttgatataaaattagctagata

SEQ ID NO: 101797 - DNA, 336 bp, Glycine max
  unsure (1)..(336): unsure at all n locations
gaaaagagggaaattccccaatccaagagtgggagaaagccaaaagaaaagaaaggaaaatttccaatcaaagaatgggagaaagtataaaaggaagaagaagaatgaaagaaagctcctgatcaatgatcgaaagaaaccagaagaaatgtgcagagaggtctttggaccaaacaatatctgaacagtacagaattgtcaccaaatgaacgaaaaaagaaggaaagggaaccacgacctanaatagtcttctccctttgattaccaaccaaaatcccgtgcgctagcgacttttttttctcgccccgcactanaaaanaaaaaaaaaaaaaaaaa

SEQ ID NO: 101798 - DNA, 396 bp, Glycine max
  unsure (1)..(396): unsure at all n locations
taaattatgtagagtttccccttagatgtacagatgatagaaacttagtgaagtcacgaacaagatcacggtgaccctcaacttagtgaagcctacactattagaaattacactctcaacatcggttatttaggacattctacatcagttctaaaaccgatgttaaaagtgccggtgttgaatgtatcatcgttaagatcggttntgaaaaatcgatgttaacataaatacaataacattggttttctaaatacccaatgttgaacacaatgaactacaacaaaaaaagtgtatgcgtgatgaacagtgacatctgttntgtagtgaaaccgatgttaatgttatatattgacatcggttctatagcagaaccaatgttaattgaatatataaaca

SEQ ID NO: 101799 - DNA, 252 bp, Glycine max
gaagagaaatataaaagaataaatagagagaaaagagaagaagaataagatgagagaataaagagaaagaggtaaaagtaagaaagaaaaatatggcaagacaaaagaagtaaaaaaggaaaatatggtaaaaataaataaaaaaaatataaataaagaataaaaataagagaaaaaaaagaaagagaaaagtaagagaaaaaaaaaaatgaaaaggggaaaataagagagaaaaaaaattgggaagaaaaa

SEQ ID NO: 101800 - DNA, 466 bp, Glycine max
  unsure (1)..(466): unsure at all n locations
ctcctttcaccaggattgttattccaatttcattatgcagatcacaaccttttaatatctctgtaacattgactctatccttgccaataaagaanaaacatatgtcaaggaatatattcttttcctcacaatctaaatcatcatagcttattctaagtttctcttgtacttggtcattgggaattttccttagttttgccaacacactttcccattcttcttttgtcctctcacataagtaagatccaaggacttcaagagctagtggtagtcctccacagtaagcaactatgtccattgagagtttaatcaagtcttctcttggatgtgcttgtctaaaagcatgccaactgaaaagctcaagggactcattntcgtccatttcctttattctacanacatggactctgtgatagggttaagtacattaagtaggcgtacatctcttgtngtaatgatgaacaca

SEQ ID NO: 101801 - DNA, 346 bp, Glycine max
aacacaggtcataccagtatattaccatacttgactagtttggtcagcttcagaagaagcattcaaaatcatatatttgtcattcactcaaactcaggacattttaaatttatcagtagtaatcattacctggcaagaagatctgaacacaatacctcaaatttagtcactgtgagggtttgtatatatgaatatgcttggggggccatctgctggtacagttatgaatgcctaactggaaacataagcattaagtagcatatgcagcctactaacaggcctctctccaattcggaaccttaaagctaagggactggtgatcccggacaacactttcttctactgg

SEQ ID NO: 101802 - DNA, 475 bp, Glycine max
  unsure (1)..(475): unsure at all n locations
cacaagttcaatcacaagaatcgcgatttccatcanaattatgttgctntntactactgcagaaatgcaacctctagcaaaaatgtggctttttactactgcagaagtcgaggatattttgtaaagaatattaatgctccaacccaatctaattaagatcaacagtatgcggtatacattgtcacatgctttaacctgcaataacatgatagcacagntagatttaagtatatatttattggtattttcggagacaaaatacataatcggttatatcaactgcatccaatcaaacgattatagattgctttaacctgcaataacatgaagtatatttcctttccttactataagtttatggggactctcaaaccatcatgagcaagctccaccggaattccttccctagtacaataatagcaagagtcatttctatcattntcttanatctacaacatattatatgagtaaaaga

SEQ ID NO: 101803 - DNA, 483 bp, Glycine max
  unsure (1)..(483): unsure at all n locations
atccttaagcaccgatgctgcagctataccctttagcttgatgcaaattttgaagaaagngataggcattgctttgctgtgcactctagcattggctgcaatgaggccaaacatgtctgaagtagtagtcctacttagtagcaatgacttacttgagcatatgagaccttccatgcctatcattattgagtcgaatttaaggccccaaagagatatctcttcttcaactgcttcctctacgactaatgcaactatctccaattcaatagtacccgctcgatgattaaatatatgatgtataaattattttgttttgccagttcattattaaggatgattattggtaaatcttacttatttttaatagcaaaatatattgctgactttttctcattttggaccattagactaatctaacagtctacactattgcaaaaaagacaaacaacgacaatggtaaacaacatacatgcaacacatatt

SEQ ID NO: 101804 - DNA, 348 bp, Glycine max
  unsure (1)..(348): unsure at all n locations
aggactagtggatttgtgtttttcatggggaatacgaccttcacttggatggcaaaaaagcagcccataatcactctttcgacttgtgaggcagaatatgtaanagctacttcatgcatttgtcatgcaatctaactcaggaaatntgtaaaaagagttgggcaggtcacaagaagagccaaccaagatctttgtgcataataagtcaaccattgctttagtaaagaaattagtgttccatgatcaaagcaaacatattgatactcgttaccactacaaaagggagtgcatagcaagaaaggatgtgcatgcagaatatgtgaagtcttaagaccaaatagctgacat

SEQ ID NO: 101805 - DNA, 323 bp, Glycine max
  unsure (1)..(323): unsure at all n locations
cgacaataacttttttgctcgatgtctgatngagtcccgnaatctatcgagacgctcgaaattgaattctgaagctcagagctaattcaaacgacaataactttttactcggatgtctgattgagtcccgtgatacatcgagacgctagaaattgaatgttgaagctttcagcaaattcaaacgacaataactcttttactcaaatgtctgtatgagtcccgtaatatatctagacactcgaaattgaattctgaacctcagagctattcaaacgacaattactttttactccgaaggctgattgagtccggaatatatcgag

SEQ ID NO: 101806 - DNA, 380 bp, Glycine max
  unsure (1)..(380): unsure at all n locations
actaccttggattcacttcagcgtnttatatattacgggactctttcatacatccgactaanaagttaatgtcggttgaattacctcggaggctcaaaattcacattcgaacgtctcaatagattacgggactcaatcagacatccgagcaaaaagntattgtcgcttgaattagctcagagcttcaaaattcaatttcgatcgtctcgatatattacgggtctcaatcaaacatctgagtaaaaaagttattgtcgtttgaatttgctgagagcttcaactttcaatttcaagcgtctcgatatattacaggacctcatcagacatccgaggtaaaaagtatcgtcgcttgatattggtcggagcttcaacattcaatt

SEQ ID NO: 101807 - DNA, 468 bp, Glycine max
  unsure (1)..(468): unsure at all n locations
gcttctctcgaaatcctggattttgaagatagntggcatttctgatgttccacacacctcgtgactgcacaccacaaaatcgtccactactcactactagaattgtctcttaggtgcgaatttcctgcggtttttgatctgtagccaattactttgtagataactttttcatgtgaatctaaaatatgcaagaaatttcatgcgaaaaaatctgcaaaaaaaaaaataggaaacctcttgtggatttttttattcgcaagtatgttttctgcgagttttaaattcgcaagagagtccgcatgaaattcctgcgaattnntgttttacaggaaaattacatgaacttcttttgtttacatatnagttaacaaatacaagttcattgaccatggtcctctgatatatatcatacatgtacaagacattcacataatcacataccanaactgtaatcccccgtgattcacc

SEQ ID NO: 101808 - DNA, 446 bp, Glycine max
  unsure (1)..(446): unsure at all n locations
agctngngtggtgtttttatgccagcggngtttatattggggccgaagatcctggctcgtgcttccaccactccttgattcattgctacactcaacatgttcttcaaactaccactagccatcttctttgaagttgttatctgtgtatgtgttcgcagagatggaggccacggcgttaatgaattcgtttatgggtaatcacaatttgacccctctaaatgcatatttttcgactaatcactaatgccctcggaattttttaaccatatgtaatcttaaaagaaatgattcattcacaatttagtcccttaaataaaataaattaaaaaaaaaatctccaaaattgtaatgttattcattttactccttccataagtaaggtctatttcacttgagagaaatactaatgnanaacattgactgattacgtctcataagtgtgttac

SEQ ID NO: 101809 - DNA, 388 bp, Glycine max
aacaccacctaaaattgagatatctaaccgacacacaaaaaatggagaagacataagatagatgcataactatgaaatggataatgaacaaatagaacaccatccaaagtgaaatacaattcaagctgataataaatatacatcaagtgctatgatagttagtgatccaaaccaaaacaaaggtaggtaaaatagttttcaccgaatcacatgattatgttcccatgactctgacttttctgtcaatgtggttcaaattagtaatgcttcaatctataagaactgaattagctccccaacaattatgattcttgctttttgtatttaaaagcacaaaattttatggataattagactttgcattgtaaactacccaacttgtttcaat

SEQ ID NO: 101810 - DNA, 400 bp, Glycine max
aatataataacactagtggagagtccatgtgatgtatgggtcgaaatttcacggtaagtgacataaatactattaatcagggtgcttgttgtatataacataaaagattattttgtaaaataattgattatgttggaaacattttgaaattatttaaattatataaaaaaaacataggaaaaaaattcaaaaatattgtgggtttgcaagaataaatttatatatctatgtatatgctacattccctattcaacttctttgcatcagtgttatgacaaaatagcaaaacaaaataaagaaatagagggttaaataactaaatggagaggacaaaagaatatgattgagttaagtatgtaacaaagttgttaatatagttgaatttaatgtgatggtaatg

SEQ ID NO: 101811 - DNA, 404 bp, Glycine max
  unsure (1)..(404): unsure at all n locations
tgagcatagaaatggattcttgtttgcaaacacacaagtcaaaccacaggagcaatgcaatgaaattacaacaaggagagggattgtggttggttttaaagatgatagtgaaaaacaaaatgatgaagaagttgaaaaagaatgtgagaacaaatgatgaactggtgaccatgaagaagtggaagagaaagtggtaagtgaagaagagaagtagaagttaaagaaaaaggcatgtgataaagggaaagttgtagctgaacatccaccagttcagcatcttccctatccacatgctccctcanagaaagagaacgaaaggcanaacacgtatttggttagtcttctttgagcgattgcnattaatattactttctctaaagcatnggaacagatgtcaacctatg

SEQ ID NO: 101812 - DNA, 402 bp, Glycine max
gaacaggcagctttttctccggcaaaaccacctccgaagcccgatccggaggtcgatgatccgctttatctgatgacattgatcatcccagagcttttcttgaggccttatcaagttatatgggatgccaccgtgttcggggtctttaatccagaattccccctctacataaagcacgaatacctctctgaaatcgcacacggtggtcaatgtctcagcatatcactgttacagttatggattttgtaagtctttatataaaaggcttttaattacctaagttatggctttcaatgcataaataattaactttgacttaacataaacaggcatctcactgaaacatgtatgcgagtggggaattctgatatctatggattcctcgagccacagtccatttag

SEQ ID NO: 101813 - DNA, 461 bp, Glycine max
  unsure (1)..(461): unsure at all n locations
atactaagcttacgaaaagcaggcctagcatatttcttatttccagattgtgtattctatctatagacctccaatctttaatggagagggataccactactgtgaaaccccagtgcaaatttttatcgaagcaatatatcttaatatctgggaagccatctaaatagggccttatatacccaccacagtagaaagagattgagtagatggtagttcatcaagcgaaagcccaactatagaaaaacctaaagaaacanggnctgaagatgatttatttgattactctacaacttagaagccnaaaacataattacgtttgccctgggaatggatgaatatctcacggtttcacacngnaacagggctaaggaaatgtgggacactcttctattatctcatgaccgaactacagacgttaaaagatctgggagaaaggcattaactcatgaagatgaaatatt

SEQ ID NO: 101814 - DNA, 390 bp, Glycine max
  unsure (1)..(390): unsure at all n locations
tgtcaaaacggaagaaaagaaaccaacattgtcgaaatttttatgaaagccaaganacaagaaatgaattaaaagtctcggatttggaaacttacccgtcgaagaacgaagaacggatgaagaacggtgaataacggaggaaaaccttcacggatttgcttacggaaacatctcgaaagcgttacggaagcacctcggcttggattttcttcacggaaacaatttttttcacccaaaacagctganatacatcaccagggggatctgggacccttagaacaacccccttcagcctatttataggaaaaacggggaggaggttgtcacccagctcgcccaggcaagctgggtggcttcttcagaaaagcatccagcttcaaaatactctga

SEQ ID NO: 101815 - DNA, 307 bp, Glycine max
gatatatgtttgcaccttgtcgtggacaagttgcgagtcactgtagcaactgagtttccttgcttcaactttttttgctagctttaggcctactataagcacctcatattcagcctggttgtttaatgccatgaaactaaattttagggcttgctctaaaagtaacattgtagggcccttcaaggatgatatctgccctgcttcccttcacgttggaagctccatccacgtagaggttccagcagtttggggtggttagtcattgtaacaaactctgtaggaagtcttcataaactgggtcttcatg

SEQ ID NO: 101816 - DNA, 453 bp, Glycine max
  unsure (1)..(453): unsure at all n locations
ctgcagctatgcacgaaatgtattatgaattttatgccgaaaaacttctttcctagtaccatgcttangtccatgtcaattaatttgtttggtggtgggtggtttttttttagaaatgggtttatgatcccaacatggttggctcatggtgcctaacacatgcaactaaaaaatgtagtgtgaagnttcatgcttcttttttgtttntgntttgagaggaaaatgcaaggctcatgcatgagcaaacatgaaaacaaaaggtatgtagtttgtagaacaaaaatatgttgaacgcatatgcatgatgatgcaatgactcatgcaaaatgtgaggctggaatatgataacggacanatgcaggaacgatatgttcattatgatgttatgaagagatgcttatgcgatgcatgatatgaattgcatttacggacatgagagcccggaaaatattt

SEQ ID NO: 101817 - DNA, 429 bp, Glycine max
  unsure (1)..(429): unsure at all n locations
ctggtatcgattaccagaatttttactcttggtttacaggtttgaaaaaatccatgtgctactccagttttgaaaaatgtttcatacttatcttgattaagtcttctcttgattcttgaatcttgaaatcaaatntcctcttgaaccttgaaatgttcttgattcaatcttgaacatcttgaactcattctttgattcttgagatcatcatctttgttatcatgaagtgttcttaacctttgagctntttgtcatcacctttgttatcattaaaacttctttgaatcaatcttgattcatcatgaagcttgcttctacaggttgtagttgttgcactagttactagtgcccctatcacagtcaaatcttgcattattntattgggtgtatttcgtgggtgagtaataagtgatatattagaattatgac

SEQ ID NO: 101818 - DNA, 397 bp, Glycine max
  unsure (1)..(397): unsure at all n locations
atgctgctcctgacctctggatgcctaatttttcctgcgactcacaagtgtgatgtttacagcttttggaatgctgttatttgaaatccttggcatgagaagaaaccttgacgttgaactttgtgatagccacgagtggtctccagtgtgtggttggaaaagatttgaggctggagaacttgaggagttgataatanctcgtgggatagaagagaaaaatgtggagatagcacacagaatggttaatgtaactctattgtgtgtcagtacacgccacatttaatgcctataatgatggatgtggagaacatgttggaaggttctggtgaagtttcacaacctgtgattccgtttcccacttgattgatttacttcaccactggtcgggtcagcatac

SEQ ID NO: 101819 - DNA, 444 bp, Glycine max
  unsure (1)..(444): unsure at all n locations
caaaacctatcaaaaaaaagatgttttatggctaattattaggtctagtgctaagaaaaaaaaaaaaactttgatattacggcacgaaaagagaggtgtcataagtatcaagaagaaaagtgttgctagaggaataaaggctaaaaaataaattagcctaggcaggaaataagtgaaaatttttctaaggatgcatgctctcttataatcctaagtttttgaaatcccagaaaaaccataatttcttgtttagtcaggccctgttatgagccaataaaagtccttagtgatccaccaagtgtaagtaagaataactttaactgagatgaagtgcaaatntgtgaatcttaatgcaggtcgtaaatttcaacattcacctaaacacttggctcatagagaaacactaccttggaggaaagagtgcaagccaacttgataattttc

SEQ ID NO: 101820 - DNA, 381 bp, Glycine max
  unsure (1)..(381): unsure at all n locations
tttcgtccgcagaatacgcccccatctttcggctatacatccgaaaatgccccttcggacatgtcgtccctttgtacttatcaaagtatggtactttgaacttgggaggaatgacgatattgggtacgagacataaatccgctaagtccgagaatgggtaattgccaaggccctcgactgctcttaatatctcttcaagcgcctcaatctttcccttatcttccgcgaaaggaacatattcttttacgggtatgggtgaggccgggatatggcggactatgttcggctggggtagttcatgtggggatggatcnttgaggtggagcanggggccaagatgggtatctccttccncatcgtcttgcccgggatagtcttcat

SEQ ID NO: 101821 - DNA, 414 bp, Glycine max
  unsure (1)..(414): unsure at all n locations
tgcgtaaccgctcttggtgctcagaanatcccanaaacttatccctcttatnacttgctattnntgaattcttagttcctgaatgtacaacccttcaaattgtgctcgttcccctctttcttttctacaaaaaagaaaatcaaatgctgtgaaaacatgtggtggggttttgtttaataatgttatacttttgccttccaaaaaaaacttatcactaatcctcttttcattaatccaattttgtatgttattgtataaaagatcatgggttctccacctgcctccactactcctcctcctcctccttcttctcctccttctcctcctcgtcctcctcctacttcggacgcatctgcttcgacgtctgccatgaagcggacacgcanagcctcacgcctacgatcgttgtccact

SEQ ID NO: 101822 - DNA, 460 bp, Glycine max
  unsure (1)..(460): unsure at all n locations
catgcaagctttncagcggatgtatgcaatggcattgttatagcactgcaaggctttttgttctatcagactgcgtttgttctctatggccctatgatgccaaggggttgtaagcttagggaaaacagtgtcatgtgtcattctattgatagcgaggttcggggcgaattgcttgctaacattcaactctctgttgctgtccttgtggtccttgtgggaactgcggcatcatatggctttgctgcttcaagatatgggaattctgaagttaagaacttgcatgcaattcaggctgaattagatcaagactgaagtagtgttgctattttttgtggtgatagtgaaaatgttgtggcagcatanaagttcttataaaacatgcttgttgacactgaagtgcaaaggttcatgcatgtatgatcaatgaaaattgaaattaccccttcctcatacatttttg

SEQ ID NO: 101823 - DNA, 272 bp, Glycine max
  unsure (1)..(272): unsure at all n locations
aagcttanccgccttatgtcatctgtacctttttttgttaacagttgtcttctccctcacaataggcaagaaagcaccctggacttgtgttgcatttgcaagctcctcgggagtagaatcaccagcctacaataaaacaacagtttcacatgacacacaaacatctttcatttcgaccttcatcagaaatgaaaatgcctaccacaatcaaaatagataatggaacatctgaattaccttaaccttgtgtgcccgncttgggaacacaacca

SEQ ID NO: 101824 - DNA, 322 bp, Glycine max
  unsure (1)..(322): unsure at all n locations
gcttcaacattatatccacttccaggggctgtactacttcacatggacttgatggggcctatgcaagttgaaagccctggaggaaagaggtatgcctatgttgttgtggatgaattctccagaattacctgggtcaactttatcagagaaaaatcagacacctttgaagtattcaaggagttgagtctaagactccaaagagatnaagactgtgtcatcaagagaatcaggagtgaccatggcagagagtttgaaaacagcaagtttactgaatactgcacatctgaaggcatcactcatgagttctctgcagccattacac

SEQ ID NO: 101825 - DNA, 386 bp, Glycine max
  unsure (1)..(386): unsure at all n locations
tgatcatcatggcttntgataaatgcannaaaaaaaaaaaaaaactaggnnngcaaatgaagaggggtgagaaaatgagggagaaaagcccatnggctgtgactacnnncattcctanntatggccgaagtttcccaaccacacccaacatatgtctattactttcataccaataacaacccattctccttacctcaccacccagttatccataaaggccatccctaaatcaaaccacaaaacccacctaccaatgctaaacaccacctttagcacaaaccaaaacacccgccaagaaatgagttttgcagcgaaaaaaaacctgtaggattcacccaaatttccgtgtcctatgctgacttgctcccatatccactcgataatgc

SEQ ID NO: 101826 - DNA, 337 bp, Glycine max
  unsure (1)..(337): unsure at all n locations
acgagtggagttgagaatgtctcagatgaaatagtattgaagctcaaatcaaaattcaaatcactacacagaatactcagaatgctcaaagccagaagataggatgcacactatgcctaactaactataaaggtctattatttcggacaaagagtgtaatacctgattgcccaacatgcactatatgcganatatgtattttaacaaccctacaggggtaaactcacatctcaaaatataaaaactgagattatgagaccctaaatctgaaagaaccaaaattcaacaaatcaagctactatgaaactactagaaagttaaaaatagacatatctga

SEQ ID NO: 101827 - DNA, 378 bp, Glycine max
  unsure (1)..(378): unsure at all n locations
aacacacacacatttttctaatcgatcactctcatgggtttccattctccccctttggttttgaaattatgcttctcttaaaattaagttgaatactcatgtgagttcttgatttaatccctatttctctccccctttggcatcacaaaaaatccaaagtgcgtgaacaaattaaagcatgcaaatacaactaagcatccacacaacattcatgaaaaatataaaccaaatcatgaagcaagaaccatgatgcaagaaccacgaatagatgaaatataaaatccacatagtncaataacataattaatatttgttcaacataccagacaaataaagaaatagtgaattgttcaaatatcataataatatagcccaata

SEQ ID NO: 101828 - DNA, 452 bp, Glycine max
  unsure (1)..(452): unsure at all n locations
atactntaatggaggatatgaaagagagaaggttggagcatganattgaaggaataaaagagggaaagaagtggaactttgaagtgtatctcataatactttcattcatcanagttacaacaagtgttacacatgcttctatttatagactaggtagcttccttgagaagctttcttaagaaaacttccttgagaagctttcttaagaaaacttccttgagaagcttctttgagaaaacttccttgagaagctagagtttagctacacacacccatctaaaaactaagctcacctccttgagaagcttccttgagaagctagagcttagctacacacacccatctaanaactaagctcacctccttgagaaagcttcttgagaagctagagctcggctacacacccctataatagctaagctcaccctcattgacaanaaacatgaataata

SEQ ID NO: 101829 - DNA, 442 bp, Glycine max
  unsure (1)..(442): unsure at all n locations
agctttgaggaatagtntcagccgnttcatgttattcatctctggtttttcttttttgggctttaattgngcattaatcatacacgtggttggtgaaacaacatatataatggtcaacatccctcatgatgagtaccccatacacataattgtaggcttccacagcattacaatcaaactatgtgacatctaatttagaaaagttaaacaataataaattgaagactcggcgtttcaggctattagtagctacctatgcattgcttatagtgtgttaatgtcactctttacacanaagtcagagttggcatgtagagcatagcaatatgaatgctaatcctacaattctagaaattgtcctgacttgcattatatcaaaactttataaaggaccgtgaatttgttgaatatataggatgctagaaatctatgaaactactta

SEQ ID NO: 101830 - DNA, 403 bp, Glycine max
  unsure (1)..(403): unsure at all n locations
actaacctagcaaaatgcttatctatacttgtgctattaatatgtcttgactttttaattagagcgggtatttaatggcagtatattggtctgttcatatatttacattgaatatttaaatagttatatgttgtattgtaaatagacataagtggctgacattttgtgtacatatcatatacgactttgttattgatgtaccaatgagtgtacttattggatttataatatggaaatttttaccgtggaatgtccattctttatacatgaggaaaaaattgatatttatgtgataatggagggggctgacatgggtgagtattattgcactgctagtcatatggaacaaaggataattgtctgctagcgtagaactagagtaccactgngagcctaacactct

SEQ ID NO: 101831 - DNA, 239 bp, Glycine max
gagtgatagggataatcataaaaaaaggtattagtctaaattagggaggcttttaaactttactgtaaaaaaattagtatagtgtgatataaggctatattgatgaaatattaaaataagtgaaacccgtctcttgactataaaacttacaaatagtttatttggcacttcttacttttgtatagttgaaggcaaccttagctgtactggaaacctagattcgctcattgcatatgctc

SEQ ID NO: 101832 - DNA, 373 bp, Glycine max
cgcgagcgttgaccactgttcttcttcccgcgatgctcttttccatgtacgactgagtgggcttatagcctataacatacttgccacgatttgcttgggtatatatcaggctacgtatgcccgcgttgtctttgcctaaacccatcccgggtacataacccgttccacaacataactcgggccatcattaccgctgcatcggacagacaaggctgcccatagagggagtccacggaggagatgctgaccacctcaaaagactggaaagcagttgctaacgattcttctgcggcttccacataaggcatggaggatgggcagcttaccaagatatcttcctcgcctgacacgatgaccaagtgcccctccacta

SEQ ID NO: 101833 - DNA, 356 bp, Glycine max
  unsure (1)..(356): unsure at all n locations
acaggattgctcattccacactgctggtccttcatcagcagatactaagggtatgaaaatatctcattttctttattcttctatacgaataatattgctcttgatacctggatcatagattcgagcgctcgtcatcacatatgtgcctcactgcactaggttcactcttatagcgaaatcaatcccatgattagtaaattaccatatggtaatcatgtcaccactaaatatgcacgcacagatgtgttttcctcttcttttagtatcaccaatngcctatatgtgcctaccttatcagcaatttgatttctgtctctaaattatgcccccatacaccctattacactcatttcact

SEQ ID NO: 101834 - DNA, 395 bp, Glycine max
tttcacatgcacaatgcgcgcataaacccaccaatccctggtggccacctacaacttagctcacgtactcccacgtagcccatatccttcgttctctcaacaccgggtccccatcaatccttccaagcttccacagcatgcaagcaaaacaacattcaaacagcacaagctatcgcagccaagcaaaacagagcaaaggcagaaaactctgctcaacaaatcaaccaaaatcacagtttttctcacttaaagaccacagtaacaattccttcgatccaattcgttaaccggtggatcgaactccaaaatttactggaagtctatagtgcataagcctacattgtgaccgttgggatctactagcaacatccagaactcattctgtactactcttt

SEQ ID NO: 101835 - DNA, 284 bp, Glycine max
  unsure (1)..(284): unsure at all n locations
atgatcttcttggacatcanggggcttcatggtgaaacaaataatatggagctccttaagatgcttttaaggatcttcacctgcaagaccatgaaactttggcaacaaatgtattagtccagtcttgagaacatatggaacaccctcatcaggatattgaatgcacaagctttcataagtgaaatcaggtgcagccatctccctaagagtcctctcacgaggtggaagttgagccatgttctcacgtataaaattagtagtggaatgctcaaaatcagaatatt

SEQ ID NO: 101836 - DNA, 473 bp, Glycine max
agtcacctgcggctgcagcttcatcaatttgatgtgggaaaattgaatgaccaagctcttacaagctagaatcatctaccccatttctgacagccagtgggtgagcccagtccaaggtagttctaaagaagacagggcctcacagtgattaagaataagagggatgagcttatccccacaagagtgcagaacagctggagagtctgcattgattataggaggctgaaccaggtaaccaagaaagatcattttcccctgccattcattgatcaaatgtttgagcgcttggtagggaagtctcattactgttttcttaatggtttttctggttatttacaaattcatattgctcccgaggatagagaaaataccatattcacctgtccctatggcacttttgcctataggaggatgccctttggtctatgcaacgcccttggtacctttcagcggtatatggcttagcatttcag

SEQ ID NO: 101837 - DNA, 465 bp, Glycine max
tgctaactatgttggcaaacttattactgttgttttgacatacaagtgttcttgttacaaatcttctacactgggagtgatcacctgcagtcctcttgaacccttaccacccactctgtcatcatgccgagactcaagaagcccaacagctttagccttctctaagtattctaaacaaaatttaatggcttcttctgcaatgtacctctcaacaatagatgcttctggacgatatagattctttgtatacccttttaagatcttcatgtatcgctcaaccgagtacatccaccgtagataaacaagaccacaacatttgatttctctgaccagatgcacaatcaagtgaatcatgatgtcaaagaaagcagggggaaaatacatctctcactggcacagtataattgcgggctcatttttcaactcatcaaacattactgggataatgactttgtacatatagca

SEQ ID NO: 101838 - DNA, 411 bp, Glycine max
ataacaaaagaactatgtttattgaagaatctatccttgttgcctttgatgagactaaccctataaggccaagaaaggaaactcttgatgatattacagattctttataagacatgcatattcatgaggaaaagcacaaaggcaaaggaaatggaaatgatgaagaactttcaattgatgaaactaaaacaagtatagatcttccaagagagtggagaacttcaagataccatcctcttgataatatcatcaatgacatatcaaaaagggtaacgactagacactctgtcaaagatgcatgcaataatatggtttttgttcctctaattgaacctagaaatttaaaagaagtcataattgatgaacactggattatttctatgcaagaagagttaaatcaatttgaaagaa

SEQ ID NO: 101839 - DNA, 351 bp, Glycine max
ttcaaaactgtttcaaaggatcacttgatccaaactgctgctaagtccctacaaagatccaattgaaagaataaacaatatgtggacccaattatagtgtttaaactataggaacctatttaagaataccctacacataaaggggcttgcagattaatttaactactaatatattcttcagctcccgcctatatgtgaacaccttgccaacagattatttgttcaggttttaattaaaatcacatatacgtagaaggagaatcaactactaatatatttacctcaacactattctggccaatccatgttcctataagacaatctttttattctctccagatatgatactga

SEQ ID NO: 101840 - DNA, 342 bp, Glycine max
  unsure (1)..(342): unsure at all n locations
tcttggttcaacctgttatacaaaagccatgttgtttcttagaattctaagcctagagagcggagaaacacccttagagatntttccaactatattgtctaaggagagatctttttgagttctccactctttaggaagtactttatgaattgttgtgaagatctactttctttgctcaatttcttcaccgttgatggcgtcttcaagaaaaaaaatttcctaacatcccgtatcttcttctaaagaattttcttaaacaaagagttagtttcatcacaaaccacatcggccttggcatcaaattttccaagggagtctttaccgtttgttaaaatgaaacac

SEQ ID NO: 101841 - DNA, 377 bp, Glycine max
  unsure (1)..(377): unsure at all n locations
catgaataanatatttntacctgncgccagactctatgaggggaggctgctctattgaccaccacacacacctttgcccttntgggcaacaanntgaagcaattgaacaacctgaagcttatgctgcaaacatctacaatagacctcctcaacctcagcagcaaaatcagtcacaacaaaacaattatgacctctccagcaacaggtacaatcccgggtggaggaatcattccaaccttagatggtcgaatccttcacaacaacagcaacaacaacaatagccttattttcaaaatgctgctggcccaagcagacatacgttcctccaccaattcagcagcaacaacaacaacaacaaccccagaaacaacaaacag

SEQ ID NO: 101842 - DNA, 256 bp, Glycine max
  unsure (1)..(256): unsure at all n locations
acctaacacacagcttgaaaatcgactaaaagtagcaccaggagtagttttctcttgtgccgaacttattcgaaattcctagtacttcatgaaaatgaatctaattcctgtcaaatngagacaggtgtgattgcgagtttcaataattaactcttatcggccgatgcaaacttattgttgctacttaaataagatgccttgccaacagggttggagaaaaacagtagttttacgattggacacgccggatccacgt

SEQ ID NO: 101843 - DNA, 452 bp, Glycine max
  unsure (1)..(452): unsure at all n locations
gggtttgaggtacttacccgttgtagactgaagaacgatgtagatcgaatgtataacgtcgaagaacagtcgaaaaccttcgcgaaatcactcacggaaacgttacggaagcacctcggcttggattttcttcacggaaacaattttcctaagcaaatttgaaagagagagaagtgcctaaggggctgaacccttttctacttcacttctccccctatttatagaaaattgggggagaagctggccacccagctcacccaggcgagcaaggttgcttcctccagaagcaacagccttctggaggaatcttctggagggtccaagtgggcttgggtgctattttgcaccccattttactanatacaccccacttgcnnnttttgtgattcttttttgtaaagtacgganactacggatttcgcacgatacttgtttctttttcgtacgtacgg

SEQ ID NO: 101844 - DNA, 443 bp, Glycine max
  unsure (1)..(443): unsure at all n locations
cttttgtttatttaatgggaccctttattttatttcaaaaatgaagtcttatctagtcaatgtctaagagaccatacacgtctcctatcgatatctaattatgtgggccagtaatgttatcatatgctgacaataaccgagaagcccatgaatctcttcggcggtggagtatgtgtctgacatcaccttggcctnggctaacaatcggggaagttcttgactcctgttcaaggtaagagcaaaccgatccatccacatggctgcctcttggtgtacagagtatatcacccttcctctagccttttntttcgcatatacttgagcatactcaatccgcgattctatgctcgnggggccgaggatagacctaactctttttcgtacttggcgatgatagctaacatgttggtttctgtatcgcataaacgctgatacaagcttct

SEQ ID NO: 101845 - DNA, 397 bp, Glycine max
  unsure (1)..(397): unsure at all n locations
tcaagctttcaacaaatgtcttcacaaataattatctcacagcagatctctattcagatacccatcatatctccccaaaaccgcatacccacgaaatttaagagagaaagaagtccacccatacctgaatattcgaagtcgcactcgtagccacgcactctacgaccccgaaaatgctctcctttcacgatttggggcgcaaatgagcaccaaaggttgaagctttgtgtggagcttcaatggagaatgaagaaaaatagaatggtcacgtgagggagagagagggctgtctganatttctgttttgctgagtgaggagagagagaagctctttggtcttaactaaaaagtatgctacttttctattattgtattctagctctgccacatgtcccta

SEQ ID NO: 101846 - DNA, 387 bp, Glycine max
  unsure (1)..(387): unsure at all n locations
agcttgcatatttttaagcactngttatccttatttcctaaccaaanagtcttacatgaacaaaaaatgagcgggagtaagcctttatactaaaggtcgactttcgcattattttgtattaaatacaagacaggattcaaggacttcaaaacccaaactctcaacttataagttttgtgcagcttgagctcccacaatcataagcttaattatcctatattgttcgtatatctcttgattggtgtgaactccttgaaaaaaatatgagtcggattagtgcgctgttttcgcattattgtgtnttaaagagaggacatgattcagggacttcacactccanactctcaacgtataagtgttgtgctgcttgagcacccacagtcataa

SEQ ID NO: 101847 - DNA, 307 bp, Glycine max
tttgttagttgggctatacgagacatcttggcaacaaagtcaggttagccataactcgcatgtgctttttcttccatgccatatgtagcaaagttgttgatccagtcaagtttgatgaacttgaaaatgatgccgcaattatactgagccagttggagatgtattttctccctgctttctttgacatcatgagtcacttgattgtgcatctagtcaaagaaatcaaatgatgtggtcctgtgtatttgctgtggacgctcctggttgagcgattcatgaagatcctaaaaggtatacaaagattcta

SEQ ID NO: 101848 - DNA, 207 bp, Glycine max
  unsure (1)..(207): unsure at all n locations
acaaaacagtatagatcaactacttatggacacagcgggcaaaattgaagatataccttttatagtttcaaantgagggatacctttggaaaattaaatattcttttttctcttgagcaaaaattcatattatttattccattaagtatttttgttgaagacaggaaacacaggattaatgtgatatatctataaatttaagtgatt

SEQ ID NO: 101849 - DNA, 343 bp, Glycine max
accagttcacaaaacttgaacacaattgtgtagaaagaaactatataaaggaactagttctatgggagcagcaaaaaatgcatagaggttttataatggctcatcccaactctcgggatatgtctagatctccttcaaaacttgaagggtttcactaatcaaaactttgattacaaccaattattgtttatgccacttctggctacaacaagtactttctaatcactctgagagtggttacacattaagctcaaatactatggaaactctctaacttagcagagctaaggttcactccatgtgctcaagttctttcgtcaactaaactatagcaatacaacac

SEQ ID NO: 101850 - DNA, 444 bp, Glycine max
  unsure (1)..(444): unsure at all n locations
ccttagtaaagctaagcactaacaaatccttcatataaatactgtgatcgataatttctcactgattngatggtgaaggtaggtagtacacaaattgttgaatctctcctagtactcttataatgtctttctaggttgttgccttataccacaaatcttcttccggatggatgttgttgtggatgcacggaagaatttctctaaaaatcttcttttcatatatgcttaagtgtagatagggtcttgttgaaggtacaactaatccttatccacaccatagagagagaatgaaaatgaattcatcttcacataatcctcttgaatgtcatgtggtcacatggtggaacacactacatgaaatgccttaaagtgcttgtgtggatcttcaccttgcagtccatgaaactttantagcaaatggattagtccatactttatctcata

SEQ ID NO: 101851 - DNA, 321 bp, Glycine max
  unsure (1)..(321): unsure at all n locations
tgattaatggtctctgtgcttaatttacgtttatgcttaattatcagttncgatcatgcttaatggacatgtgagagagattaattggtgtatgtgttgcttaatcacataatgacaaccttatgttaattttcacttagttgattactttcgggctggattaagtggttgaactgattagggataaattctcgtaacctatgataagagacatgctttngaatcaaagggaaacaacatgttttaatcctgtntatttcttactcaaggttgcttgctgttaaattacaaaaacatacagacctcctcccccccccactc

SEQ ID NO: 101852 - DNA, 234 bp, Glycine max
  unsure (1)..(234): unsure at all n locations
tggcatatacaaatgacttcaagnttcaaccacatatgaggctactgtcttttctcttgcaacttctcttaaaagtttatctccaaggcatagaatgatcgtacttctggctctatcaatcatctttgatttctcttttgagcttagagattcatacatccttttctcttctttaagagcttctgcacagtcatgttgaatcaagattgcttccatcttaattcttcataaccc

SEQ ID NO: 101853 - DNA, 382 bp, Glycine max
  unsure (1)..(382): unsure at all n locations
accacatagtctggcgacaggtgcagatttttttattcatggctaagtgggttaccaggttaaccaagacatctagtttaccttcaagcttcttagtctcacctgaagaatttgtggctacttcatgcattcctctaatgacaatagcatcactcttggcactaaattgttgggagtttgaagccatcttctcgattaaatttctggcttcagcaggggtcatgtctccaagggctccaccactggcagcatctatcatacttctctccatgtngctgagtccctcataaaaatattggagaagaagctgctctgaaatcttgtggtgagggcaactggcacataattcnttaatctctcccagtatcatataggctctctc

SEQ ID NO: 101854 - DNA, 410 bp, Glycine max
  unsure (1)..(410): unsure at all n locations
tgaagcacttcagctgggttgggatctattataccgccaattgttgtgacttttatgnggagattgatcctaaatatgttgccattgcgagataaacttcttcagcgcaacatcatcactaatgccactgatgctttctgtccgcagtgtaatacgacgcaagagacaaagacacatgtgatcctcttctgctcaaaaatatctcaactctggatggattggtacagacaagaaaatgtccaacaactttgccaaactcgatggagactcacctttggtagcacatgttcccaacaagttcaatctatgaggcaagattgagagctttgatctggacaagattaccatggtgtatatggcgtgcgaggaacaaaaagaatttgaagcatggatttggatactataaaatc

SEQ ID NO: 101855 - DNA, 356 bp, Glycine max
  unsure (1)..(356): unsure at all n locations
cggcgagctcagctcgcttattcgagctagggtgctttctccgccttctggagaacttactggaaggcccaaatgggcctggttgctatttgaccccctgtgtactaaatacacccccttgcctttttttgatgattctttttccttaacgttacagaaaccttatgaatacgtaacgatactcgttttctttccgtaatgttacataaccttatggattgcgtaatcatccccttttttgccttccggaatgttacggaaatttacggattgcgcactaacactttcttttaacttccggcatgtcacggaacttcacggattgtgctacaatgctntcttttgacttccagcat

SEQ ID NO: 101856 - DNA, 327 bp, Glycine max
  unsure (1)..(327): unsure at all n locations
catggacctctccatcaggagggcgctacttgagctaccaaatatctccacctttgggtgtattcttaaagatgcatgctccttcttacacatgttttgtagcgacatgctatgcggagctatatcagagatgtactaatactgcctaatgaaggccaccattatgtccttcctagaatggacccgggaaagtgctagaatagnagaccaggggatgggtgccccaataagactgtcttggaagaaatgcatcaacgagttctcatctttcgcgtacgcccccatcttccgacagaacatattcatgtgattcttgcggcaagtcgt

SEQ ID NO: 101857 - DNA, 341 bp, Glycine max
  unsure (1)..(341): unsure at all n locations
agcttctgtatctatatcaaatgaaggtgttactcatgttatctaccatcacttgntacgttgattcttaagaaagtcctctaagacaacaccccatatgccatgtctctcatttggtcccatgactcctatctgatgtccctgcatcaccaataaattaagtgcccaactaatggttccatgcatatccttatgtctatataaatattcatggccgcaagcattgaggaccaacacaaatcattcacatcataaagtgtttgaaattcaaaattctcaacacttctcttcaccattctcttctcagatcaatacaacaatgggaattcgtttacctggca

SEQ ID NO: 101858 - DNA, 403 bp, Glycine max
  unsure (1)..(403): unsure at all n locations
ncagatgcactagtgagagattccttttgttgtgtggaattatatatatgatttgatgaacaaagctcctctagaataggtactggcacttcctgaaagatatttcnttgcctctctaacgtgtttcttctgcaagtagcttcaatctctaagtcaaaatcaactaaatcacctgctgaagatctactgtgcatacaaaacactaaccagaatagtggttgaccaattcaagagaaaaaacaaaatctgcactaactaaatattcacaaaaacaaataatttaagaagtaagaattaatgcctcaattgagctagactcccaatggaaagaagtncctggcatggcccaaactcgttcaccacatactacttgtatttagatgcgaatctattgcagtgtcca

SEQ ID NO: 101859 - DNA, 457 bp, Glycine max
cttgagaagtagtcgattgcttttctctcatagccattcatgtgttgtgatattataatgaagttccaacatgataatcctgttgttgtgggtgatgcccgaaacacttgaataccctttacgatagctccacacttgcagtacatgtcaataattattgtgagaacaacgacattcaactcaaaattcccctttttacataatcatgaacccactccccatgttgaagtgcacctaagtgagcataaacacttaacaaactcatcactgtaaattcactaggctgaacccttcgtctctgcatcttgcggaaaagctccaatgcctccataagctctttattccttacatatccactaatcatagaattctaagttactttagttcttgtatgcatgttatcacacaacctcctagatgtatcaaccttcccacacttatcaagccccatgatcat

SEQ ID NO: 101860 - DNA, 184 bp, Glycine max
attacaaagaatggcctctaattgagcgcattagatgcacatacttgtttagacaaatgtgtgattagtataggaaaaaaatgcgtgagttgcgccttatataagtattcattcctacatggctatctgctaaagcgtttgaccgacccttctaacatatttcatatatatgcagcccgcccat

SEQ ID NO: 101861 - DNA, 337 bp, Glycine max
  unsure (1)..(337): unsure at all n locations
gacctatgaaactcagcttcatcagcggtggcagagcacagactcangccgttcttttaacctacttgatgttttgctgtccttctctccattgccgattcttcattattatccatggatgatgctcacatgctttgtgctcacatgtgttaacatgaatctttatagtgggcaccgattacacttgctgtaaaagccacagttgattctctatggctcacagatcttgttcttgttcttgaaccatgagttatagtgaccacagggtcctctgagtggtgtcttgttatttttcgggctcggacctatccataacattcttacaaaaatatttttg

SEQ ID NO: 101862 - DNA, 416 bp, Glycine max
  unsure (1)..(416): unsure at all n locations
agctntangatcataactatttctctctttttctctcaactgntcttcattcttcttcctttnttcacctctgttcctttttcttgcacaaatttcgtggcttttccactggtgatgatcatggaaggctaaacacttaatcaatctaaggattcactccaagaaaggcttgaattgagttctggtttagtatttataatctgtgtgaatgttcatctttttcttcaatcctatttttgattttcatgattatgaatatgaataggattgaaaaagaattaggtttgagattcctttcctaatttgtgatctcaatgaatntagggattaatttaattgaccttactctaatgacattgattgagccttcacaacttgattattctttgcaaaactgtgaataattgatttgcatt

SEQ ID NO: 101863 - DNA, 435 bp, Glycine max
  unsure (1)..(435): unsure at all n locations
taaagagttaagtctggctaaaataatcgattaccttatatatttaatcaattacagatgggtataactattctctctataaataaccagcttatgttcacatttatacataaatagatcattagagaatactcaatacatcttgaaaataacttcttagtctcagaatgagcaagattntgtgttgtcattagtgaataagagaagagaagcaacgtgctttatagtaactcacaacttcttaattgtttggctatgaagatattttctttgaagtaagttgtgtcttttgagtagaagaagatcaccttctcaatccaacaaggtttttgtgaaaagattggtcagggtgtatctctcttacttggttcttcttgtgcgtggtttctacacaatcttttgttttatgcatgaattgctacaacatngtataat

SEQ ID NO: 101864 - DNA, 354 bp, Glycine max
  unsure (1)..(354): unsure at all n locations
tatgcattatgaatcgctggtgcttatccacaatactaacaaattgaccaacctggcgtggggtgcaagcgagttgacttttnttatcacggcaagaaagttgactgtgtggcctatatttaacaataagaaattaaactttgctttctatctcaagatttaatccttagtctgaactctcggagaagtgcttggaagaaataaacaacttcatcacttgcgggtagtatctgttactattttaagggaatagaaagttagttattgaacgatgaatgatagttggatttaggatggagatgtagttggaaatattaattagaagtagtaaatgattttataatcgggtagctc

SEQ ID NO: 101865 - DNA, 354 bp, Glycine max
  unsure (1)..(354): unsure at all n locations
actcaagctggcctcanagaggtccaggaaggacaaggctgccgaatgatctagttccgccccggagtacgacagtcaccgctntatgagcgttgtacaccagcagcgcttcgaagccatcaagggatggtcgtttctccgggagcggcgcgtccagctcanggacgacgagtatactgattttcatgaggaaatanggcgccggcggtgggcaccactgggtactcctatggccaagtttgatccagaaatagtccttgaattttatgccaatgcttggccaacagaggagggcgtgcgtgacatgagatcctgngttaggggtcagtggatccccgtcgatgccgacgctat

SEQ ID NO: 101866 - DNA, 311 bp, Glycine max
ccacagtactgctgaatccccccacaatgtttgacataatcggttatcaatgaactccttttttgtctcttggatacaaatcatatcaatatgttctttcttgatcattcttcttattgcgccccactttactctcctccctaatcccctaacgttataggagataatattcatggaatatgtcttacttctcccagcctctgggcctcctttttatctctttcctccatgtcttttattttcctgattatcaccccttgttctgtgtcactagttacccccatttcttgagccatgttccatatgactac

SEQ ID NO: 101867 - DNA, 413 bp, Glycine max
  unsure (1)..(413): unsure at all n locations
ngaaagagcccggtttgtcaaagagaagttcatatccatggtcatcaaagtctgaagagagtatgatgaactaatggacgtcaatatggccaccgatgaagccttggaatgagaaaccaagaaggcccgaaaggaagaacactaccaaaacaagttttgaggggctttatatggcagcaatagtaagctcaaactccgaagaggtgaaaggaatcatcacgggtcanaggcatgatctggaaggacgagctaaaggcttgccttaagtcgaaaagaaatttgtcccaacagttaagcgagactgaagggattatgtgggccatcatcgataagtgcanagagaagctaaatctagcagcgactcacgagcaaaggctagaggatgagtacgccacgatatcagcagaaaggga

SEQ ID NO: 101868 - DNA, 420 bp, Glycine max
  unsure (1)..(420): unsure at all n locations
tcgaccaatattcgatttatctttangagttagagtaggagtatcatgttacagttgtgttcaaattatgtaattctgatttcaggcttgggttcctatcaagactgcagcaagtctgatctggaacctagtgcttgatatcaatatttgtaagcttagtacctctggtactcatntaatactacttatacttttgctgagcaaaaaaaaaactaaacagtagcttacactaggagctagatctagatcctaactaactcaagcttgtcataacagaatgacaactgataaataattatgctgagtcagaatgctggctcagcttatactctatttaaatggggtctgttaacacaaatgtccaatcctcaatatgttntaggaaaaccccttanaagtgcacacattacattagatagg

SEQ ID NO: 101869 - DNA, 430 bp, Glycine max
  unsure (1)..(430): unsure at all n locations
tgcacaagcacatgtaccttaatggagcagcttagatcactttattgagggacctcaatatcattntttatttgttggcaacatatttgtatttgttaagagttgtgatgagatataaactcgacttgtacatgtgattctggatgctttttattnttgttatccgtatgaatggaagataatgtgtggaggtttataataatttatatactcttactcaattaagtgacttaaactcccttaatgatgatagattttgttgaacatatactagtttaatatataatgttcaatattttatttcatttatcacctaatacttttttgaaattttnttccctttctatttattcatatgaactttccagtatcaaatataattatttttttaattcgtatattaatttaaattcataaacataaagataat

SEQ ID NO: 101870 - DNA, 372 bp, Glycine max
  unsure (1)..(372): unsure at all n locations
atatgtcgcgggggtcaaaagaacttggggacgtcaggtggggtgctatttgccaaaaccaagcttgacccatcccgacccaacccangcatagtcagtcagtgagaacctgtgatgtacctaaacaggcgagctcctggcagttaaccgataaaagaacaaagaccacaaagcaaggaggcttgtgtggtggctggccaactgtgaatcttgagtgatatatgggatatggcctctggtaatcgattaccaagggtaggtaatcgattacaaggcttaaaaacgagatcaggaaactaagagggcttctggtaatcgattacaaaggggcataatcgattaccaggcttataaatgggactggaatgtgga

SEQ ID NO: 101871 - DNA, 387 bp, Glycine max
  unsure (1)..(387): unsure at all n locations
tactcttcagntgctttattcaagaaaacattgcctatggttagggatgggccacaaatgaagaaatcagagctgccactgaagttgcttatgcagcaaaattcattgatagatttccacatgtgagttcgcactttcatattttgaaatttccattgttctgcctttgcaacaatattaatttcaaatttcacaatacgaagactactacagcatcaggaaccaggaaaagtgaactgtttgtggctgatgtcaacacccagttgaagaacaaaaacatcactactgatatcaaataattattcaacagggaggataatagacaatgctaagattcttgctttggagtttagtgattcaaattttcaattggtgatgcattagtga

SEQ ID NO: 101872 - DNA, 390 bp, Glycine max
  unsure (1)..(390): unsure at all n locations
cttcttcaccaacaactcattgatgacatgcgtgtgtcttccctgcaaccacaattagcaaacatcaccattaaaagaaattatatatggaacccgcaacctttattcaacagtacacaaaccacttaaccaaaaacaaccttcaaataaccttaacctaacaaagtttgtaagtcactaaccaatctctttcttcatgaaacttgaagtcgggaagttggagcgatgaagtcgacctcgtccagttcaatggaagaaggggtagggctacaatgtcaaagagcagaagttcaatgttgaatgtcaaagaaaggaccaagcagaaaggtgaacaaacatgcgctagggttcanagaaaggagcaagcaaaaaggtcatgaacaaacacat

SEQ ID NO: 101873 - DNA, 385 bp, Glycine max
  unsure (1)..(385): unsure at all n locations
catcatcataaggtggaatgcattcgctatcttcaaaagcttcctcatctatatagcttaccctatntactgttgatacatccaaaaggtagtggttactggtcacccttggcactatcagcatcatcttattcatacacttcgatttgtaccctttccttttacacaacctttntatggaaaacaaaatggagtaaagagggtgaactctctctccttttgcttcataaaagtaagtgtaaaagggaagtgtagaaaccaaagtgtaagagtaacatttgtgtaacatcatagtcaatcccaatcaaccaaagaagtggaaggcctaccatataagtatgaatttccgcaatctgcctcatgtttggattcttcatttacagaa

SEQ ID NO: 101874 - DNA, 377 bp, Glycine max
cttcacccagcatcagctcgtagctcagttggggctcccttatcgggcgatgttcccattgtaggtcatggttggcaacagccacgaattggaatgcaccgccatttccttcaacaggttcttcagcattgtccttctttatgggcctatcatgaccgcatacaagctccaattaattgcccttgcactatgttcaactgctaaaccgagtgcaatttgtcggaatcgaccgtgggatcccggcattacttgggtagccatggtttgaagcgtatcaccttgagggcaaggtgaatttccaagggtcgtggaatgatacgagcaagcttataattccagaaaacagaggaagcaccatcagcaaaggtgcagagaga

SEQ ID NO: 101875 - DNA, 393 bp, Glycine max
  unsure (1)..(393): unsure at all n locations
gaaactattttgggaaataaattatattatgatgatggagaatggcttcttcatcctctanaccctaaatctctctatttcccccgaactaagctctctttgctgctcaaaactcgttctctacctactctctactggntctcctttgaaactcagccaacttcagtgttttaaagactattggacttttcagcttttgatggctcgctcagctagcatgtctcgctgagctcgagttagtgaattttcgtttagcgagcatgattctttgttgtcaaggttatggaaaaggatttataggccaatctatgttctcacccattaaaaaaaaacaagactaanatatgttcgtgatctttaataaatatccaaattttgtatttgtttctaata

SEQ ID NO: 101876 - DNA, 390 bp, Glycine max
  unsure (1)..(390): unsure at all n locations
acaccctttttgtgggattctactgaacagcccatgtaattattttcatacctaattgattgtgtttcttatgttcaatacttctttcaatgcttaatttttgtatgctcttggtctaatcaaccatttgtgtacctagttaggtgaatttaacattggaaaatgtattgttgccttaaaacttgaatgaagcagaattgaaacttaatcttacaagagggatctgcggattaagttttaagtttaagtatggtgttataataatggttgttggtctaagtctaaacgaacaagagggatctgaggacaaagcttangctaaattagtctaaactttcataaactatttaagctaagtctagtccaacaagagggatctgaggatgaagc

SEQ ID NO: 101877 - DNA, 336 bp, Glycine max
  unsure (1)..(336): unsure at all n locations
gctacttgagctgtgtctaatcttacattatggatctacggatgaaactcaatttaagntaatctaaacctaagagggcttgcccaatcaggtgtagtcctaaattgaggatctgcggatgaagcttgatattcagcctgacagggattgagggtttataatttatgctacaacatataacacaagagcatgattgatttgagagaaagaccaaacatatttgttggaaagaccaaacatatctacctacagctgtcattttatttaccttgcattttatagtttttagcatacaagtttaggttaaattctgtttgaaattattacttatacata

SEQ ID NO: 101878 - DNA, 350 bp, Glycine max
  unsure (1)..(350): unsure at all n locations
cgctgagatcctcttgaagactagattcaanntaagcaggttacgaaagtttagcctaatntagcctaagcttcngccgcaaatccctcttgtaagactaggcctagactaaacaacattattgtaagagcataattaanaccaaaacttaatctgcagatccctcttgtaagattaagtttcgatcctgcttcaatcaagttctaagggcaacagacatttcccaatgctaaagtcacctaactatgcacacaaatggataatcagaccaaaagcatacaaacattaagcattggaggaagcatngaacacacgaaaacataatcaatagatattaggtatttacatcg

SEQ ID NO: 101879 - DNA, 324 bp, Glycine max
  unsure (1)..(324): unsure at all n locations
agctttcaaattcatagcaatcatataacttattataaagngangaaagaatttgattgctgcccatcattattacaacaacagaggtgtaaattatctattacctttcactgcatttaaaaatatctggttgttgaggtcctgaacgagatgancaataaaagatgtataagattttgaaggaggtgtaaacgaactttattagaacaaataattaaaaaataaaaaaaaaattgaagactaaaaactcaacccagatgtgaattttttttatctgtaggaatcgaagacaatgtcaggggttaacaataactcacgcaccct

SEQ ID NO: 101880 - DNA, 465 bp, Glycine max
  unsure (1)..(465): unsure at all n locations
tctaagcttaagaagtgtggggagcttttttgtttgagcttattatttcgaaagacggggtcacgatggattggccacttgagatagcgggggaaatgttgatctttgtgtgatgtgtcgatgagtttatgttgtttagttgactgtagtttattaccattgatagaggagcccacacaaacatgtaaaggacaatccaatggggaaattcgtttatgagtcaatcttcagagattggatgactacacagagtagtacctgagggatggatcgttgacttgctgtttcttgagggtatgacactgagnttgtggtagcgtttccacagtgccaacttggcaatcttgacanatgtgagacataactggttggtgagagcctaccatttgacaatggtgagggtgtacttccaacaatcatccaacttanatttgtaagaccattgagttctagaagttctagtgg

SEQ ID NO: 101881 - DNA, 465 bp, Glycine max
  unsure (1)..(465): unsure at all n locations
tgacattggatgttatccatcaattgccccaattcttgcattctggcaacctctatgctttntaatttgacgtgatagaaccttttcttaaacaagggagcttgattcgatcccttgtttgctagaatgaaaatttttgtttgatcaataattcaacaccctatcatggaggaaatatgatgaatgcatgaaggaatgcttattatatgcatgacacaaatgcattntacagacatgagagcctggaagatcacctcttcttacccacaaggcattgagcatcatggttcatttacagtcattagcatggtgccccatgcatgcatttaagaaggtgatgcggaccttncgacttcctgtgacaaaatgatgagaacaatgaaatacatgagtgacgatgcaatacagatatacatgcatgagagcacgtggttgatagcacanaacagaaacatactagatgag

SEQ ID NO: 101882 - DNA, 449 bp, Glycine max
  unsure (1)..(449): unsure at all n locations
agctnggcatacttgaggccatattatgattatatagatgatgcatatatactgatggggaggtgggtcctgcctgatccttaagtctcattcaagtccttggtgccgccgttggtaattaatgtatattaacgagtcactcaagtattgatggtgaagggaacaagtgtcggaacaccgtgcagatgcctttcactgctaatgaagcttaaaatactactaggttttaatttttgaagggagttgcttaattggtatacacttacgattactttgttctttatagtcagaagcaagattacattttaaggataacggctgttatgtggatcctaattnttttactggtcaatgatatccatttcaattttcttgaaacgaacacgatntcccgggctgaaaatatttgtgtatacttgaaaaaaaggaaattacaaaaactagagtga

SEQ ID NO: 101883 - DNA, 472 bp, Glycine max
  unsure (1)..(472): unsure at all n locations
accttagaaactcagctgcaaatctatannnaanggctttatagttcctctgttaatgcatcacgttntggtaaaaaaaaaaaaaaatntaactcattctttgccccctcccctagctcttttactttttgtcattgatctcaaggaccaggttttcaatgaggttatatataattttacatgggacaatgtcatgacagtgagtaagaaggaattgcanattcatttccttattatatttaattntctaatttcatgattttttcctacttgtaacaccaatatcaaattctctgggattcttgctcttccatgctttatggngggattaacataaccattttttgagtaattagtatttttctgtacgattttatggtgacaataacactttttggttcatgactgacattgggaagcagctgcgggatacaatcaaatctttttgctgtgtgcanggaattctgatctc

SEQ ID NO: 101884 - DNA, 347 bp, Glycine max
aaatacattatactcgctatagagatacttacttaacgaagtgtacattacaagtattggattttatgggattatatgtttgctacatgctaattatgatagctggcccacacgaatgtatttttttcgtattaaatatacctatcacctgtcatgagtttgtgtagcccttacaacaatatttgtagttaatgaagatgaatttttggcttctgtcctcaaaattcttgtctccagcatgattttgacacatttgtagtgatacataagaatgcgcgtatcaagatatcagatcattgtgacattggtccagcatctttataagaaatatggagtagggtggaata

SEQ ID NO: 101885 - DNA, 280 bp, Glycine max
agagttctatcatggtgattcatctctgtcctatctaccatgacagaaacatatgtgtggactctttggccgatttgacttatgatttggagaggaatatagtgattgttgagcaacctctcacttatttgcacgagttactcttaactgattgaggagatttatgctggaccatagtgcctatcactaacttattatgttaaacaacacatagtgatgatcgttagtaattatattgagaatgaatgactttacaacttaacagttaatcactccctca

SEQ ID NO: 101886 - DNA, 415 bp, Glycine max
caaaactaatgatgctgatgacttactcaacaattcacaaataagttaatctaactatatgcaacgattaatgaaaataaaaagagttgggttgcctcccagtaagtgctcgtttaacgtcattagcttgatgcatattacctcatgtgtctggagtaagcttggctctggccattagaaccatctcattcttaagttcctcaacctctaaacagacatttcggtcaagtaagtgcttttttgcatcaaacagatcaaacttgatcttctgattatctatgcacatttccagtttaccctttcctatatccaccacacaaccgacagttaacatgaaggaacgacctaaaatcaaggaaattttagcatcctcttcaatattcatcacaacaaaatctgcagggaaagtaaaatg

SEQ ID NO: 101887 - DNA, 427 bp, Glycine max
  unsure (1)..(427): unsure at all n locations
atggaggtacattatgtggtataagatctcaccatctataactggggtgntacaaggaccaccaccaccaccatcaatgtctctgccaccatcattgnncctgccaccaccatnattattaacaataccacctctgtcattgccaccacaaccactaccaaagtcattgcaaccaccaccacaccgccatcaccaatatcgctacctccaccaccccaccatcgacattgctaccacccccactatcgctgccaccacctaaagtgacaaattaccaaaaagaggagttgaattgnggttttgaaaactttntgttcctttgaaataaaaggtttatgatgatattttagaattaaaaactattttgaactcagaatagaaattcaagttgttcagaatgcacaaatatttgcatactggttcacct

SEQ ID NO: 101888 - DNA, 360 bp, Glycine max
atattgagaagggaacgcaagtatcatcttggctaccctcttgccaggacactactcacatatttatcctttttgctgggggtgggtcgaaagtgatttctgacgctacaagttcccattattgtttattttttgggtaggcatatctggagaggttcgaatttaaacttgcataatctggtaagtttttgactgatatgttgctgagacatttatatcctatttggcaagatcttgaccgcggggagaaaattgagcttttggtggataaaacagagaaccttcgctctcaggtccattgtttgctactattgcatgttaagatctttaatgactctgtacacgcagagtatatattat

SEQ ID NO: 101889 - DNA, 393 bp, Glycine max
taaattactagaatgccacaaactggatacattttcttagttttatacacgtaattaactaattgcatctaattttttgccctccacaatcccttcatattcaataatcgacctatgagctctgatccgtgctagcagccaactatgtttttcctggactagactacaaaggtgggaaaaagtggaagtatcactatctataatagacatgaaggcaatgaatcaaagtgcttgagataaggcaccaataatttggaattgcaaagaattagagttactgccttgaagctggatccagaatattggaagaatgtacttgaatagatgtgaattccatgtataattcggagttaaaaatggagtctaaatatatcatttgatttggtgtactga

SEQ ID NO: 101890 - DNA, 445 bp, Glycine max
  unsure (1)..(445): unsure at all n locations
tcttgcgatagatgttatccatatctaataacatgcattgggaattataaatataccttataaaagataagacaggctaattntaattatagaactagattttaaactcatgtaatgcatggattcatttaaaatatatatatttttatttgtatttagcatttggtaaggatgtatctcgagcccgagtcctttgagatacatcatcttgatagttgacaggtcataagtatttgatgtctctaccccatatagagaacatgactcactacacatagtcacatgnnnaaacagatattcttgccatgttgcctctatagnaggtccccacgtgagggactcaactaacttcaacttcattctggatctaaactagatctggaatcattagagatctaaagactctctctctctaactntcaactcaatatggctagagatctat

SEQ ID NO: 101891 - DNA, 382 bp, Glycine max
  unsure (1)..(382): unsure at all n locations
atggtcgttgaatagatcccattggatccttggattgcatttaccaaagtattccagattggaacctctttctgcttcattttgatagtagaagttgtaactctgggttccccttgagtaattttctaaagaatagctgctgtgaaattgaatctcctgattttgattgaattatgattagctttagagctagcatgatatgccatgaattctacaaacgcactctcaagatcaggggctctnntcctttcatattgattgtaaggatctaactcctgactccacccagaattattcgtggaatacagataaaaattgtccttgtaatgctcccttcgacaaaagtcacaatttatttgtggaatagagataataatctccg

SEQ ID NO: 101892 - DNA, 128 bp, Glycine max
tggggggaaacttgaatccacttatattgcattgaattgtgacctattggagcaaattaataatatgatagcgaattacagttatgggtcaccccactaatcttataacaagtccaagagtctgcact

SEQ ID NO: 101893 - DNA, 390 bp, Glycine max
gaagaacgttctacatacaaattgtctgatcagttactcaagatgatgcatgatgcagaaaagatatgatgtggactataatgcaacatgcactataacagcccatactgattacatttaagagagttgtgcatgtatcagacaaagcatcttcaagcttttgtccaagcttcaagctttagtcctcatgtcgtctatgttgctccccctgtctctaacaaagataacattaggcaccacatcattcttagccaaaccaaatcccgaggagaagctggacatatacctcttgggctccaatgaaatagagagtgcggtgcgcagttaagagcatggagaagttcaaaaaccaatctatttaatgactagagtcctacacgagactgagac

SEQ ID NO: 101894 - DNA, 349 bp, Glycine max
tgttcttccccaaatctggaaaactctcacaacaatgtaatcgactacaatcttgaactcatcgattcaaatgttcttaatcacttctagaaacacattcaaggatgatgtaatcaattactatatcctcataatacattaaaccaaagacccaagaaaatagacatggtctcaatatgaattttgtaatcaattatgaatatgtggtaatcaattaaatgagagctatgatctctatgcaaataaccaaagacttacgtaatcaattatagataataataatcgactaaaccagagagttgtataaaacaaaagatgtttcttaccttatatcatgccctaatttcgt

SEQ ID NO: 101895 - DNA, 448 bp, Glycine max
  unsure (1)..(448): unsure at all n locations
cctggatcttcttcatcaatggagtcctttgcttcttgaagatcatgttagcataattgagaaggaacaaagatgattggagacgccacttcaaggagaagatgagtgaagaagaagctcaccaccatatgaagccctggaaaagaacttgaaaggtagagaaaatgaatggagggagagggagagaatgggcacganattttgtgcctcanatgaggtctgaactttgaagtgtgattctcaaatgatcaaagttgaaaaatgcacacacatggcctctatttatagcctaagtgtcacacgaaattggagggaaatttgaatttctattcaaatttcactcgaatttgaaattgaatttatggagccaaaanttcactaattatgattagtgaattttagctatggttcagcccactaatccaagatcaagtccaagattcttcac

SEQ ID NO: 101896 - DNA, 319 bp, Glycine max
attctccatgtagcaactaacaatatccaatcgcataaagaatatcgggccttgtgcatgccacctcactgcaaatattccaactaagctcttaaagaagggaggatctattctttcttctttctcatgctttgatagcttgattccacattacattggtgtgttgataggattagagacatccatcttgaacttcttaatcacttccttagcatgaccttctcgagtgatgaaaatgtctttatcttcttactttagctcaatgccaagggaagaagacatggaccaatgtcaatcatttcaaactctttcataattt

SEQ ID NO: 101897 - DNA, 452 bp, Glycine max
  unsure (1)..(452): unsure at all n locations
gccttattccttcgccatgaatctgctggccaacnnnngnccactttgatgttgacttaccacaacaaactagagggctgtgtcattgtcaatttacattgctgatgttgtgttgtgcatgggttgttttaaaccggaagcttctttttatcactggatggcacttgtcaatagtctgtagttatcatttataatatgattagtctggggaataccaagggtatangttaatggaacaatgctgaaaatgaaatatgaatctttgaatttagctacctttaagtgtggaaacttcaaagttcatagaagggggaaggacaataaagaaacataactttttgtttatattagattgcaaacatataatttgaataattggctttgttncttgcttttgaagatcttttttgcatgagtcctttcatctttcaatgtcaatcttaatagtattt

SEQ ID NO: 101898 - DNA, 330 bp, Glycine max
taaataataatttgtggggaatttgtattctgttgatggtggttattacccccccctccccttttcctttacgtgcaaatttagtgataattttgactttgtatctgtagacaaaaatctgctttgggggttattctctctctatatatactactgtagatgtcacgcatgtagctaaaagaatcggatctagtcttgagaagtgaataaacaagtatacaattttggatagtttattggttcttattattatgacatgctcgctccaaataacatactgtgattgcgtattaagacaaaccatgatttgattcatggatatcattaatc

SEQ ID NO: 101899 - DNA, 358 bp, Glycine max
  unsure (1)..(358): unsure at all n locations
agggtaaaataaattggtcaaaatgtatgaatctaccacggagacaactattcgccaggttgggtcaaagtcggaaaagatatatccacattccacggtaaaaaaagtctttgtctgtgttacagaaaaatggcttttaatttatgtttaaaattaaactgtgcatcttattaaaaaatgtttttatcacaaaataattctaagaaatggaatgcacagggcttttgtgtctaagaaagaaaaagattataatcaatttatacttgcaatatatttctaagtaagactttnttttataggaaagagaatttgtcaattttagatgtnttagctttcttctttttatcttanactgatg

SEQ ID NO: 101900 - DNA, 290 bp, Glycine max
  unsure (1)..(290): unsure at all n locations
ttattaagagatatttaacaatgtacaaaaaaattaaattaacattaaatgattaatctagcaaactaaaatacctcatcaaaatcaaactacaattttattttaatttttttataaattacaatttatttattcataaataaagatttaattatattataaatatttattttaatactcttatatcttcataaanaatgtagaanatgttttttagtttttttacttgaaatcactacatctagcagactanaatatatggtcaaaatcaaaggacaatcttttttatt

SEQ ID NO: 101901 - DNA, 395 bp, Glycine max
tctattctcccattaccaaaaagaatttgtcaaggactaaccgcctgaattctttttgcgtctctcttctcccttttccaaaagaacaaaggactaactgcctgaattcttttgtgtctcccttctcccttgtcaaagaattcaaaacgacacagtctgagaattcttttgattcttcccattcccttatacaaaagtattcaaaggactaaccgcctaagaattcttttgtatccccattcacaaagtatcaaaggtttaacagcctgagatctttgtcttaacacattggagggtacatcctttgtggtacaagtagagggtacatctacttgggtttgactaagaacaagagagggtacatctcttgtggatcagttctagtggagggtaca

SEQ ID NO: 101902 - DNA, 231 bp, Glycine max
  unsure (1)..(231): unsure at all n locations
aatctaagagaactattttatctactcaanaggtacaccctctatatttgcatagaaggtgttttttctaaggactgaaagaactcgtctgagatgtcctaagagatcaattatgctcctactatacactaaaatattatcaaaataaacaactacaaatctacctatgaaatcccttaagacatgatgcataatcttcataaaggtgcttggcgcattagttgagccaaa

SEQ ID NO: 101903 - DNA, 448 bp, Glycine max
  unsure (1)..(448): unsure at all n locations
actaagcttcgaagacagtgatgaggacaagccctattgcagagctttattagctttgttagncgaagagaagttcaagtccatagccatcaaagtttgaaaagagtatgatgaactacaggacgtcaatatggccaccgctgaagccttggaatgagaaaccaacaaggcccgaaaggaagaacacgaccaaaacaagttttgaggcgctttatagggcagcaatagtgagctcaaactctgaataggtgaaaggaatcatcatgggtcaaaggcatgatctanaaggacgagctaaggcttaccttaggtcgaaaagaaatttgtcccaacagttaagcgagactgaagggaatatgtgggccgtcatcgatgagtgcaaagagaagcttaatctagcggcgactcacgagcaaaggctagaggatgagtacgccaagatatcaac

SEQ ID NO: 101904 - DNA, 353 bp, Glycine max
  unsure (1)..(353): unsure at all n locations
cttgtttgcgtcttgttgcgttcttgtttgtgtctttgttttgttcttgttcttgtccgccttttgttattgctcttgtttcttgtgtcttttagactttgcgtcaaaaaaaatctgtttgagttctgtttcaagttaaaaaaaaaagttgcagaaattctgaacaaaaaaaacgaagaaaaaaacagaaaagacagtgggtgtttgatctttgaacacgaaattgaggaagttagaggctctttttgtttggcaagtctgttattcaaatctttnttttctatttggtatcttatctattatcttaattggtatcttccttggctatnnttattgtatcccaaattgatatg

SEQ ID NO: 101905 - DNA, 433 bp, Glycine max
  unsure (1)..(433): unsure at all n locations
gtggatcaaagcaatagagcttccaatangtgcttcttatacctccattaattttctgctttaccttctcctctanttttgtttcttcatttttttctctccatttccacacatgtcttctgttgaatgttgttaacatgattatttagaatntccaccgattaaactttctatagaagctagattntattntctatggntcanatttcttgttcttgttcttgaaccatgaattgtgttgggtttaggttcctttgattnntgtcttgctctttttatggctganacctaaaccataaaattctaacaaaaacattaaagtagaagaaaaactcaaaaatctagagtgatatgttcactcattgtagttttgtcatagaagtcatgtctagttatgaaacttgtcacataagattccttatgttgtctgaat

SEQ ID NO: 101906 - DNA, 357 bp, Glycine max
  unsure (1)..(357): unsure at all n locations
tgcgagttaaagtggaagccgctctgagaacttgagatgagtttatgagtgattgtgagatctacacgtgaggagacatcctcaccacttgtgtttttgtagnctttcatcttgctcttctctttggcttaaaggaggtttctggactatggaaagctaaatcctctattggatgttccttgtaggtacctgatgtaaatatatttctatctatgtaatgatgttttgtgtgttctctgtattatctgcttttcattccagtgtgctnttaccatgatcactacatgcatgctttgtagggtcattcaataggggaactggtctgattttnagtccttggagtacgggactaaatgt

SEQ ID NO: 101907 - DNA, 440 bp, Glycine max
ggttctagcccaacctcgggtttcaactggtgccttggcatattcagctggtatcctcttcacattgaccatcactgtctgtccaatttccttgtgtagtgcttcgatgatcttcatgtccactgggttcccagatgcatctctcacatagaacacattgaggcctttctcccctacagttgacacacctgccctactaactgttaagccattctctcttagaatccttgtcacttcagatagcaaccccactctgtcctttgcacaaagctcaagactcacaccctgtgtccaccaccatccacaaaatcaatgctaacaacatgatgatgatgatgataacaattgcatgcataaatgtcagataggaatagtgacttatgaagcacgaactctgacacatacatcagtcaccagacatgacacaaacacttatacat

SEQ ID NO: 101908 - DNA, 453 bp, Glycine max
  unsure (1)..(453): unsure at all n locations
ctcaagctgggggatcaattattagggggcaanagcttgtgacatcacattatcttcttcttctggggctgtgtaatttccatttgacattacaacagaatgtacttggctttgaaacttagctagccatcgtgattttccaataaattttctcctgcattttactaagcttatccgagagtatttgaaaatcttcttgaacactcttacccaatggccagaaaaattacataaatagaagaaataaaaaaggcttaattttcttaaaatattgctccaaaattcccttccactgtacccgaatgctaatctgaacctgtagggtgccaagttggaaactttttccctgaaaaatgatggggttatcagaattaaaggagctactgcttcttcagtggcacccagaatctgaaaaacagcaacatgttctgtatcgaaagatggtaatgcctc

SEQ ID NO: 101909 - DNA, 445 bp, Glycine max
  unsure (1)..(445): unsure at all n locations
ctttaatggaagtcaagagcatgatattgcgcctataccgntgtctggtgagcaggtatatcagcgggttcaacacctgaatactgtatttgggaagacccaaaagaaggataaaagtcagagttgcatatggaagaagaggtccattttctttgatcttccgtactggtgtgatcttgacgttagacattgtattgatgttatgcatgtggagaaaaatgtttgtgacagtgtgattgggacactccttaacattcaaggcaagacgaaggatggcttgaatacccgtcaagatctagctgatatgggtatacgatcacagttgcatccaaggtctgatgggaagaaaatttacttgcccccagcctaccatactttgtccaagaaggagaagataagtttttgtcagtgtcttcgtcgggtgaaggttccacaaggatactct

SEQ ID NO: 101910 - DNA, 430 bp, Glycine max
acgctcaaatatactcaattgaactcttcaagatcaacgacccaacaggtaatctcgctggacctaatccagaccctcttccacaatctccaaagcggggtccacttgagaccttaaataataaaagccatggcaccaccatgagaactcttgctgccattgcaggatcagtttccggattccttttgctctcctttattgctatcctcatcaaacgcaggaagaatgtcgctgtcaatgaaagttcaaataaaaaagagggaacttctcgggacaatggctcactatctgtaccaacgggcctctgccgccacttctcaatcaaagaaatgagaactgccaccaacaactttgatgaactcttcgtggttggcgtgggaggcttctgcaatgtgtacaaaggccacatcgacaatggttcaactacagt

SEQ ID NO: 101911 - DNA, 434 bp, Glycine max
  unsure (1)..(434): unsure at all n locations
gaaaagtatattaattacactttaaaattttaaaacataaatttgagagaaaaaatagaaaattaaacatccaagcatatgaaaagggaataataggtctaaaacaactcacaatttgtcacataaaatacagttaaaacatatgtaattaatttataatcaactagactgaaataaacaagaatacaaggaagaaaattattattgttatttagatattttattatgaaaaaaaatccattttctaattaaaaatagataaaataatattcatgataattttattagtttatatcaccttccttttaaatcaaggttcacaaaacanaaccagaggtacgtaaaacacaaatggtgaccacaaagaggcangacacattgtaagtagcagataagaattttttagccgcgataaaaatagtggtgagtaatat

SEQ ID NO: 101912 - DNA, 391 bp, Glycine max
  unsure (1)..(391): unsure at all n locations
ctggggaaaaatcaatgacccttcccaaactattaagctggtaatccgcggttggtttgcaccggaatgcttccagggtgtctggaattggcgggaggaaagcttaaaggagtgcttaataaatntattaggcttgccagagatcaatgtggagaaaagtagattgttggcatttgaagattacattcttagaagacgtattaaggctatccaggtcgctcttagaacactaattcccagtgagcgacgactctgtgatagcgtcttcgaggggttctcttctctggctgatctttgtttcactgatatttgtcggggaaccttaatgtcatgagttacctcattggtttggccgatcagacctcgaagcataatggagcgggaacatctt

SEQ ID NO: 101913 - DNA, 271 bp, Glycine max
ccaccaaacccaacattgttattactcagccaataacaaacctccttcttacctcaccacccagttattcacagaggccattcctaaatcaaccacaaagtctgtctaccgcacttccaatgacgaagaccacctttagcacaaaccaaaaaaaaacaccaacaaaaaggaattttgcagcaaaaagctcgtagggttcacaccaaattcccgtggcatatgtaaacttgatcctatatctacttgataattcaatggtagccataaccct

SEQ ID NO: 101914 - DNA, 415 bp, Glycine max
  unsure (1)..(415): unsure at all n locations
aatggattttcttcctatttattaactattcctaacagaagatacttattacactgccaaataacccttaagtggaagaaggtggaaccatttacaccagttttatacaccaaaattaattctattcattgactaatagccgcgccacactttcggtgactctacttgccccacccaatccctcatttacttcccattgctcttaactctattttcctttgatgatcaacgncaaaggtactaatcctcgatttctaatcaggtcattcttgatcccaaatattaagacttataagtctttgaaggagagaactttgattggtatcaagtctatcaaaattctaaattaatcgattagggatggtgttatctttcaaaatgccatactatcctgagttagcccgtgtcttttata

SEQ ID NO: 101915 - DNA, 323 bp, Glycine max
  unsure (1)..(323): unsure at all n locations
cttcaatggaggaaaaaaaagagagagggggaggggggagcacgaaattgaaggaggaaaagagggagagaagttgaactttgaagtgtgtctcacaagactcttattcatcaaagttacaacaagtgttacacatgcttctatttatagcttaggtagctctcttgagaaactctcttaagagcttccatgagaagctttcttgagaaacttccttgagaagcttctttgagaagcttccttgagaagctagaccttagctacacacactccctctataactaagctcacctntttgagaagcttctagagaactagagctt

SEQ ID NO: 101916 - DNA, 429 bp, Glycine max
agagatgaactcattgggttcctttacacctttgagctatgacttttggattggactgataagaagagccgagcctggcgctcgtgttctatgatgaatgagaagacaatgactatgacttggatactgatgaaggtttgactaacgcagttgggtttcttggaaaacagttttacttattgcttgtcagaatggacaggaggcagaaaccatatgttcggaacattcctttttacatcaggaaaggtagtgaataccataataagttatatgaaaagcccagtcacagccattgaatctaatgttatgggtgtgaaggctatggacacattaaagctgaatgtccacccatctaagaacagaggaaagacttttgatgttgtctgatgatcagaagtgacaataagtgattttaccagatgtgatgcc

SEQ ID NO: 101917 - DNA, 439 bp, Glycine max
  unsure (1)..(439): unsure at all n locations
gaatggtcgagcccgacaagngcattgtatngcgcatgtagtataaaacgggaagaaccgagtatcgaactctcggggaacttgtgttccttggtaaagctatattcagagaaaaggtgtcatgtatgaagagatatgtgtggactatgaacaagtatgttaactaactattaataaggaaaatcacatgagtaatgatgtgtaaagacaagtagacaacgtggtggncttcctattaggtgcctgatgttataaggatattctctacttaagaatgctcatgtgttctatggtgtctcctaaaatgctaaacctcgatccctcgtgatagtctagcctaatcctgatcaagcattatcctcaaattcctctttgtggactaaactcgactagaactgcattaagacaaacatacaaacaactatgttaccataccctg

SEQ ID NO: 101918 - DNA, 279 bp, Glycine max
atttccattgacccatttagatttgaacagacgtactttaaattcaccataatcaaatatccaaatgcctccacgactccatattaagtagcttgtctaaatggggtaattgttaaaagcaatacacgagtgatgtgatttaacatccaaacagaccctgctgtttagaaatactttattatcctgtgatttgtgtgtaagaaaatgattgaatcattcctctttcagatggacataaaaattggatgacagttataattttaacgtttcaagactata

SEQ ID NO: 101919 - DNA, 435 bp, Glycine max
  unsure (1)..(435): unsure at all n locations
atacgggagacgangaagctgctatgatagggttttatgagaccatgcgacagaattngtactggtttagtagggaggattggtgacatttgtgacattgagagtgtaacaaccctatacacaatgactttgacaataaaagattcactcttactccttataaaactctcgaaattgggttaatttttgaaaatacttaatattttttcttgtaaatacaagtgtgtcctataaatatcaattataaaagggcttaacaaatctcaagggttccatttagggaattaacataacacacatctaatatcatatctaaaccctaagttggtccccactaatataaagcataaataaatgcctaagggttagatcttgcccctaaacccaccactgagttcatttaacccttaaggacatgcctttcaaaactacata

SEQ ID NO: 101920 - DNA, 343 bp, Glycine max
  unsure (1)..(343): unsure at all n locations
ctcttgcaacagtgtgtacgatcttntgannttatggcaacgctgacttacttggttgagcaagggatcaagctcccttcaagctttttatttttagtagatgaagatgaatctgtggccatcttatggactcttctaaggacaatagcatcatttcttgcactgaattgttgggagttggaagccatcttctcaatcaaaatcctagcctcagcaggggtcatatcaccaagagctctaccattggaagcatcaatcatactcctctccatgttgctaagtccctcatanaaatatgaagaagaagttgctaaataatctggtggtgagggctgctcgcaca

SEQ ID NO: 101921 - DNA, 426 bp, Glycine max
  unsure (1)..(426): unsure at all n locations
catacacattggtctatatattttaattatgagaaanngatttccagcagctcataacctttgtaaggtagaaaatacctttgtgtggtttttacttttaatattatgcatcatgatgatgaagtccctacattatatgcacttatcatatattttttgtatcattctgattttcaatcaatttcactctattaggtttcttaattctgtttgttctcttgggcacaaaaacaaggaaaaaaaaagctagtaataagatattgaaattcaaaaacaactacatatgggtggaagtctgtgaaattcaaggacttgcacgccttgttagagtttatttcactctgaatatttgnggcagnggttagtttggggtttgattttggtccatgtttgtggagtcatattgtggngcaggttgacttgttg

SEQ ID NO: 101922 - DNA, 399 bp, Glycine max
cgctactactagtggaggcacttcaatttgcttgccagaccttaaggtgatgacactcacattttttggattcgcacagcttgtgaaggaaatttgtcagaattttgggactaagcttggttcaactgagtagccatcatccccatctgatttgttagactctgaatggaggctcttgtctcttgctgaaattgcatattctagatggtcatttgcctcactaactcctccaaggaaggttgagaaggggcctcagctgcttgttgtctgctgctgcattggaggaggaacatatgcttgcttggaccaacaacattctggaaaggagggataggctgttgttattgtggaggactcgcccatctcagaattggatgattcttcaacctacatatatct

SEQ ID NO: 101923 - DNA, 461 bp, Glycine max
  unsure (1)..(461): unsure at all n locations
ggtctctctaagaaaacgagttgatgcattatgaagaatattttntctaattatatctatgttctnngngtnctagttctgaagcgctaaagtacctaaacctcgatccctcataagtttagactagtttaacccaagcttcatcctcagatccctcttgttggacaaggcttaacttaaacaacattatcatcacagcacaataagaaaactaaaaccccacaatccatccctggtaatgcagttatttagccctgcttctatcatgttctaaggcaacaatatattcccaatgctaaagtcacctaatagtacacacaagtgggtgatcatgccaagagtatgcagtaattaagcattgaaaaaagcattgaacacacaaaacacaattaattagatatgaaaagtaattacatcaactgttcattagaaatccccaactagggtttttagccagccat

SEQ ID NO: 101924 - DNA, 372 bp, Glycine max
  unsure (1)..(372): unsure at all n locations
gcaatcaatggggcaaaacacaccaaatgattataatgatggatggctcanattctcacaaagtaaaatcatcactttcaaattgagctttcaaaactatcatgacatgtagagaagaatcaaggatttcaagtcacaaaatgtcaagaacttttattttcaaaacaattacccatttcttgaacatatcctatatttcaaagaaaaacatgcaaagtcgtacgtgcacacaaaattgacccaaaatattaaactgaaaatccgacgaaactaacaacattaacaattaacacaactaacaaattaacaaaaccaacaaaactagcaaaaccaaagaacactcccccncnncccccccatactaaacacaca

SEQ ID NO: 101925 - DNA, 437 bp, Glycine max
  unsure (1)..(437): unsure at all n locations
agaatctaagctgaagttctgaacttattngaagntatttctaaagttttatgtcataccctaatgtcgttcggggaccatngttngatggcattgtaaccttgtntgaccgcttcgaggtacttggcacccttggttgcacaatacgtgaagttttgagacatgccggaaatcaaaaggaagcattgttacgcaatccgtgaaatttcgtaacatgccgaaaatcaaaaggaagtattgttacgcaatccgtgagttttcgtaacattccgaaagctaaaaaaggagttattacatgacccgtaaagttccataaccttacggaaagaaaacaagtattgttacgaaattcgtaaagnttcgtaacgttatggaaaaagatcaccaaaaaagcaaggggggtgtanttagtaaaaaaggtgtgcaaatagcaacta

SEQ ID NO: 101926 - DNA, 432 bp, Glycine max
  unsure (1)..(432): unsure at all n locations
catggtctataaaaatcctattcctgttcaatgatttcttttttcctttttcaacatacactcgtcccttatacaaaaaatttctttatataccctcattgctcacacacaagaatttcttttcaaacattatttatatataaatacgacatttgttcacaacccctctttctttntctattcttggtattatcatgatttttgttcgttttattttaggacaacgttcctaaaggaaaactctacaaggttccggaacaaacattatcgacaaataacgaagtaacattaacgtaatagtccaaacaaaatgtatgcacaaaacanaagacaatcgaanaaacaaaacaaacgttagtccctcaagttataaaaataaacaatacgaatagataaagaggagattgtatcttctcatcatgcgggcctctt

SEQ ID NO: 101927 - DNA, 443 bp, Glycine max
  unsure (1)..(443): unsure at all n locations
ntacattcactgctaagttcctcacttgtgtattcatattaattatataaaaaaatatatntagggcataaaattctccttaggtacttgtataggagtgaaacaaaaagatataatgaattgaacttctctcatgagacaaaatcaatggatgcgccttattttttgggaagttagatgagagagcttctacaaaaatcaagtgtatcaaatgattntaatttatggaaattcatctcttttcctataagtggtcatacataattntatccaaacatgacttaatggcaaacacactaaatgtgaaccaagtataagcttaaattttttagaaattaaaagatttcttacaacatttagtgatttaaaatttttaactcaaacatagtaaaagaaataacaaaaattgactaaaaaaaaagaaagcaagtactaatagtaat

SEQ ID NO: 101928 - DNA, 397 bp, Glycine max
gggggaacacaccccatgattataatgatggatgggctcaattctcacaaacgcccaaccactcactttccaattgagctttctaaactcatcttgactgtagagaaaaatcaaggatttcaagccacaaaaaggcaaaactttattttaaaagaaaaacccacttcttgaacatatcctattatttaaagaaaaacattccaagtcgttcgtgcgcacaaaattgacctccaatattaaactgagaatccgacgaaactacaacatttacaacttacacatcttacaaattaactaaaccaacaaaactagctaaaccaaagaacactctccctcccatacttaaacataacattgttctcattgttgcgcattaaaagattaaaacaattaaatc

SEQ ID NO: 101929 - DNA, 449 bp, Glycine max
  unsure (1)..(449): unsure at all n locations
ctaagcttgaaaacacttttatttaaatcacttgtcctaacctttgtttattcaattaggaattcccttcctaatattctagtgatcatcttgatgttgtgacttgtaatcttgaagtattgtcttgaattttaatcttgaaaagcccatttgcatcaattgcaacacatcatcatgatcatcatcaaaacatcaaagccaattgcatctacacatgtgtcctccaccttcgagattggagctatgtttcacgattgcctaagtgcggaccctcaaggcaatccgccattctccctttttttttcggagacccatgaatgttattgcctagcgctattcatgtgccctccaccttcgaggttggagctatgtttcatgattgcctaagtgcggaccctcaaggcaatcctccattctcccccttttttggagccncatgaatgtcactg

SEQ ID NO: 101930 - DNA, 338 bp, Glycine max
  unsure (1)..(338): unsure at all n locations
aatagncagaacttttgacacggatgttcgagccgggcgccttatatttagacaggctcggacctgcacaacgcaagcccttgacaaattaaactggcaaaaactttcgcacggaaactcttagggaattcatatggtcatcacctctcacacacatgtccgatacaaggttataccatatcgatacgcgcgagagtaaacatcggaaactctctagcaaatcaaatggtcataacgtcgcacacggattgccgagaaagcgcataccatgtcaaaggctcgaaacttacaacggaagctcttgacaaattcatatggtcataacgcttcacacggat

SEQ ID NO: 101931 - DNA, 327 bp, Glycine max
  unsure (1)..(327): unsure at all n locations
ctttgagttgtgtctcacaagatctttaanttataaagttgcaacaagtgttacacatgttttttctctagactagatagcttccttgagaagctttcttgagagaactttcttgagaagcttctttgagaaaacttccttgagaagctagagcttagctacacacacncctctaataactaagctcatctccttgagaagctttcttgaaaagattcctaaagaagctagagcttagctacacacacctctctaatagctaagctcacctccttgagatgagaagcagaacttagctacacaccccctataatagctaagctcacc

SEQ ID NO: 101932 - DNA, 387 bp, Glycine max
  unsure (1)..(387): unsure at all n locations
tcttcctctcttattttctctatttcatcttgacttatttcttccactctttttttttttattttctctcttgcntttctttccacaacttaagggatctcaactcatctaatatcttatacaaggggtccttatgagtagaaccctcaccattaacactagatgaagaatgaagactcatgttggttcctaagttgtggttctttcttgttgggggtttgaaaacaaaaggttaaagaaactatggttgaaactagccaaaataaaaactaaaagaggtgtgaaagataaggtaaaaactaattggtaaaaggcaagctatctatgcagtttgacaaaggaaggtaaatgaactaagctattaaagtaagcaagaaattaaagtgt

SEQ ID NO: 101933 - DNA, 383 bp, Glycine max
  unsure (1)..(383): unsure at all n locations
aaattgccaatagcatataaattactggtgccataattaatggtccactagacctttcgcctcgtatttttattctggtaattaaccaccttcggctcacaagttgactccctttgtttgttttgtaatttaataccgaggcttgctttcttttccctatataattagctgcctatgcttattccacaaacaaagccatcactttccatttactctgatagagatatatgcccattagtaccatgctatgcctagctatcttattatatgagctnngnggtcatttaatttggtccatatcacactttcccctgaaataaaacgcaccatcaagatcttcattctccacaaatcacccaaaagcataaaaccgcactgtttat

SEQ ID NO: 101934 - DNA, 413 bp, Glycine max
  unsure (1)..(413): unsure at all n locations
gattatatttgatttatagaatgaatgatttcaatgctgatatgatatatttattttagatagaaataaaagcttggattaacataagaaaagatgaagagtaaaacaacaactcanaaaagaaaaattatgaatggttcaattttattaattgtatcttgaaacaataatgtattatgatgtaagactttgtaacatttatgccaattataagaataatataataaatttatctaagtgtagagtttcaagtcaaaagataaggtgtatgcacatggtgtattgattttatgtcactaaggtttaagtgacttaaatataaagtggaagattgcaatttgctagatgaaccttagttgaattgatgcattgaaagttatttttgtttcaactttcaagagagcttatttatt

SEQ ID NO: 101935 - DNA, 335 bp, Glycine max
tatgcctatgatgctagggatgatttctccggatctacctgggtcaactttataaagagagacatcacctttgaagtatctaaagaattgagtctaacacttcaaagagaatttgactgtgtcatcaagagaattatgagtgaccatggcgaagaatttgaaaacagctggttcactgaatgctgcacatgtgaaggcatcactcatgagtgctctgcatccattacaccacaacataatggcatagttgaaaggaaaaacatgactatgcaagaggctgctgtggcgtgcttcatgcacaagaacttccctataatctctgggctgtagccatg

SEQ ID NO: 101936 - DNA, 395 bp, Glycine max
gcttattgctagcgagcgctcgcttatcgcgtgaagacctagtgcttagcgctaggagtgcgcttaacgagtgaaccaactgataattgtctgagttctgtatctggtcaccatttccgcaaacttataaccctctctttcgatattaaacaagctggaaacacacaggcacaaacaactacgactctaaatgctagcaaaacaaaattcaaaatgacggggttgccctaccacaagcactcgtttgatgtcattagcttgacgcatcgttctgttatcccagatcaatcttggatgtctccttcagaaccttcttattcaattacttcacctgtgagcgtacatcctggatcaacaatgctcttgcttcattaaatagaacaaagctgatttgt

SEQ ID NO: 101937 - DNA, 307 bp, Glycine max
ttagggtaatgttacaagatcacactggcaacatgaatgaacattttatagccatggtggacgtgccaaatgctggcatatatgggcatttttccttttgaacttttaaccagaaatggctaaagtatacttaagcaaaaatggtaaaaattgtttttgctaaaattagtaaatcttatcctaatcttctagattagtgtgctaacctcccttgggacgtgtactcagagtgaaccttgccaaagtccactccgacatagacaaagtacattgcgacacaatgcatattgtaattctcgcacaaatg

SEQ ID NO: 101938 - DNA, 381 bp, Glycine max
  unsure (1)..(381): unsure at all n locations
tgtatctgaattttctaatagagcactcttcgagggctgttgactttatcaagattggcttaacgttttctacaagttgttactcttctagattgtcttttgaccaaacacgacacagtctataaatagcaagagcgttttgttctgcgatatgtcaatacaatatagattcatngctcttcgatcgttgaatacttttgcaatcatttcattacaatcctttacaagccttgaatctctttgaattacttcttcttctttgtaccataagctctatgaacgtttctaggtttccaaaccttgaaaactagtgctattcatctgttcattcccttctcccgttgccaaaaagaattcacccaggactaaccgcctgaaatc

SEQ ID NO: 101939 - DNA, 340 bp, Glycine max
  unsure (1)..(340): unsure at all n locations
tgagcaaattcaaacgaccaataagtttttactcgtatgttcgattgagtcccttaatatatcgaacgctcgaaattgaagaccgaagctctgagaaaattcaaacgacaataactttntactcggatgtctgattgagtcccgtantatatcgagacgctcggacttgaatgccgaagctctgagcaaattcaaacgacaataacttttttactcggatgtttgattgagtcctgtaatatatcgagaccctcggacttgaatgccttagctctgagcaaattcaacgacaataacgttttactcggatgtctgactgagacccgaaatatattgagac

SEQ ID NO: 101940 - DNA, 402 bp, Glycine max
gctccaacattcaatatcgagcgttccgatatattacgggactgattcatacatccgtgtaaaaagttattggcgcgtgaagttgctcagagcttcaacattcaatatcgagcgcttcgatatattacgggactgaatcagacatcagagtaaaacgttgttgtcgtctgaattatctccgagcttcgggattccaattcgagcgtctcgatatattacgggactcaatcagacatccgagtaaaaaggtactgtcggttgaatttgctcaaagctttgataatctatttcgagcgtctcgaaatatattacgcctctcagccagaccaccgattaaaaagttattgcggttcgattgtgctagacccttggtatttaattcgggcgcgtcttgttttttac

SEQ ID NO: 101941 - DNA, 429 bp, Glycine max
  unsure (1)..(429): unsure at all n locations
gcaaacgcaagatgttagctacatgttgtaataacaaaggcagggatacaatcacggtggattctacgtttccagcagggtccttcacttgtctttcacaaagtatgcatttatcccaagagaagaataaaatttaacctgaacagatagatgaagttaggcataagacagatatcaaggaaagtagcttataccacagtctcacggctactatttcactcaagcacaagtgttaaatctattcattaataacaactagcaagagaaccaatctttaaatntcatcttatgcataaagtcagaaatgtataaatagaatcagaaggactctctcaggtttgtagtgaggctttggctacaaaatacatcgcgttttctaggatcgaacggctagattctancagagcacacatcttgacttatccaatg

SEQ ID NO: 101942 - DNA, 409 bp, Glycine max
  unsure (1)..(409): unsure at all n locations
aatactaagctngatttgtgagttgagtttagccttagttttactntggntttttttcaattcattcaaggaaacttccaaagaaaaacgtccgattgattcttttgattattttattcaaagaatattttgttattttattattatttttcccttttcgatttaactgagattaaaacgtgaatgatcggttggattttattttaatagtgattaaacgagattaccactcaaatgatcgggttgaaatcattttatcatttattaggtgagaaaacggcttaaataaacggttaaagcacattaaaaggaggtactgaaaacaaacgaaatgaaaataaaagtacgtaaaacaagtggggaccactaagggtgcatagaattaattgaaagattcgatttcgggaac

SEQ ID NO: 101943 - DNA, 199 bp, Glycine max
  unsure (1)..(199): unsure at all n locations
actcggatgactgattgagtcccttngtataacgagagactataaattgattgctgtacctctccaccgaaatttacgaccataactattatctgggatggttgagtgactaccgtcataacttgagaagcacgtaatggaatgaagtaacatctgatctcgatttaaactacaattaccttgtactcttatgggtgat

SEQ ID NO: 101944 - DNA, 400 bp, Glycine max
  unsure (1)..(400): unsure at all n locations
cttctgaaacattgagatttttagctattgggccaaagctaaatgtctccacataaaagggatatgatantacaatttttccttctacacaaagtcacaggatgataagggtacactgcaaaatagtgggataaatatggatgttggttccttacacttttgtagtgcaccagataacaaccccattcacgcatccacaccttactttggagtcattgaagaaatctgggagcttgattatagtaaattcagagtactcatttttaagtgtaagtggattaatggaaatatcacgtgcgacaaaatgaaataggatntactttggtagaccttgataagggtcgttataaggatgagcctttatcatggtaaacaaaaaaatagtttttatgtaaatatt

SEQ ID NO: 101945 - DNA, 442 bp, Glycine max
  unsure (1)..(442): unsure at all n locations
taccatgagacccatgcaaatcagataatgttgtcgttcgaattcaatttatttaatacaaacaaaaatcatcgatgaaaatccattaaaacgatgtgatttttttaactattataataattaaagtctttttcttctcggtagaactctgaagtatttttgtaagttcctctttaaagatatgttctataagaactaaaaacttattgcatgttgngaattaaaatgattttaaaagtacttttacttgaaaagtaagaagttgtttttcttcttattttatacattggaatgtatagtttttttatttattgaaattcacatttataacttttaatcaagcgcaccttagtacgtgtttaaataacaattacggtaaacatacaaaaagacttacttttgttttgatcatcttggaaagtggaaaatttaagtaaacttg

SEQ ID NO: 101946 - DNA, 389 bp, Glycine max
  unsure (1)..(389): unsure at all n locations
agcttcccttttctattacgagcgtctcgatatactacgggacacaagccgacatttgagcaccagctactatcgtttgaatttgcgcagagcttctgtgttcaattacgagcgtcttgatatattacgggactcaatcggacatccgagtaaaaagttatcgtcattcgattattctcagagcttcagttntcaatttcgagcatctcgatatactacgggacacaatcggacatccgagtcaaacgttattgtcgtttgaatttgctcacagattctggttcaattgcgagcgtntngatagtctacgggacacaatcagacatccgagtcaaaagtattggcggttgaatttgtcaaagctntgtttaattacagcggctcgattt

SEQ ID NO: 101947 - DNA, 441 bp, Glycine max
cttgagaaaaaatctaacgacaataactttaactcggatgtcttatcgagccctgtaatatatcgagacgctcgtaattgaaaacggaagctctaagaaaagtcaaacgacaataacttttaactcggatgtccgattgagccctttaatatatcgagacgctcgaaattgaaaacggaagctctaagaaaagtcaaacgacaataacttttgactcggatgtccgactgtgtcccgtaagatatcgagacgctcgtaattgaaaacggaagctctgagaaaaatctaacgacaataacttttaactcggatgtctaatcgagccctgtaatatatcgagacgctcaaaattgaaaacggaagctctaagaaaagtcaaacgacaataacttttaactcggatgtccgattgagccccgtaatatatcgagacgctcgaaa

SEQ ID NO: 101948 - DNA, 458 bp, Glycine max
  unsure (1)..(458): unsure at all n locations
ccataaaactcagcttgatgattggtcttaccgacaaggttcttatgggttttttataggcacaccngancatcatgctttgattaatgcttacaaaaagctacggccaatgaacagggtgagaatattggagaagcccatgctgtgactgccattcctatgcaagccaagtttcccaccaacccaacaatgtcattacttgacctataacaaaccttctccttacccaccgcccagttatccacaaaggcaatccctaaatcaaccacaaagcctacctaccgcacttccaatgacaaacaccacctttagcataaaccaaaacaccaaccaaaaaatgaattttgcaacgagaaagcctgtagaattcaccccaattccagtgtcctatgctgacttgctcccatatctacttgataattcaatggtagccataaccctagccaaggttcatcaac

SEQ ID NO: 101949 - DNA, 245 bp, Glycine max
  unsure (1)..(245): unsure at all n locations
ccccccccttttcatctatgtttaattgttaaatgttttcaccttggngggagcatcccgccggctgctgacagacaaanggttttgtttnaaaaaangtttcnntttttttatccccatacacgccctgcctcatgttcctatttgattggatgcaaacggcctcctttttctttttagactgtgatccatactctatcacaaaagttgaaaaaatctgtcctttgaaacgcttaatatctgcc

SEQ ID NO: 101950 - DNA, 433 bp, Glycine max
  unsure (1)..(433): unsure at all n locations
ctatgaatactcagctgtccccaatttctattttcgggggagaagtgaagtattatacggttcagccccttaggcacttctctctctttcggatatgcttangaaaattgtttntgtgaagaaaattcaagccgaggcgcttccgtgacgtttccgtgagtgatttngngaagggtgtcgaccgctcttcgacgatcttcatcgctcttcagtcttcaacgggtaagtacctcataccaagcttttcaattcattctatgtacccgtggtgcgccacacttggcttcatgtatatttagtctcgctttcatttactttttatacccccttttgacgtgcttaagccacttatttaagtcatttgtcgcttaacctaaaaataaaataaatttccaccgctcatttgaattgtatcatccgttcactctggttg

SEQ ID NO: 101951 - DNA, 395 bp, Glycine max
  unsure (1)..(395): unsure at all n locations
atcaagggagcttcattacctagattatttacatgtacttccaaggtgtatttgttatttacatcacacaccctccttggctaaatttacatacatgcatactcaaagcatttcggggtaccaaaaattgcacatgcgctcatcttggtatttctaatacctatacatataaaaacttcatgatgaatcttgactacctacgcaataaggtgctacatttcatgcttttttttcttcaagtttttgctacctaaagccacatgcaaattcaagcatattttcctttgctgactaaaattgattcaaattagaaggtatatatntttttgaatatgtttcttccataacatgcacacattatattatttttgtgagacatttgctaccaaaattat

SEQ ID NO: 101952 - DNA, 462 bp, Glycine max
tacggacctatgaaactaagcttatataagtgatacgctcgaaattaaacatcggaaactctctagaaattcaaatggccataacttttcacacggatgtccgattcgggcgcataatatgtcgagaggctcgaaattgaacaacggaagctcttgagaaattcaaatggtcataactgaaattctgataccaatgccagatgtcgtaccggatgtcacgacatcacgcttcagaacatgcagattatatttgacagtatgaacagattaaacaagtaaataacacaagagaattgttaacccagttcggtgcaacgtcacctacatctgggggctaccaagccagggaggaaatccactaaaatagtgttagttcgaagatctaacagccactgtttacaaccttctcacctaaccactacccgtgcaatctctacctaagagccactcttagatatgaga

SEQ ID NO: 101953 - DNA, 379 bp, Glycine max
  unsure (1)..(379): unsure at all n locations
tcacggaacgcacggaacgcctcgtggatttttaggaataatttctcacaaatcgaaagagagagaagtgcctaaggggctgaacccttttcttcttcacttcttcccctatttatagcaaaataggggaaaagcttgccgcccagctcgcccaggcgagccaggttgcttcctccagaagcaacagccttctggaggaatcttctagagggccaaagtgggtctgattgctatttgcacctcctttttactaaatgcaccactcctttntattntttgtaattctttttccgtaacgttacgaaactttacgaatttcgtaacgatacttattttccttccacaaggttacaaatccttacggattatggatntactc

SEQ ID NO: 101954 - DNA, 451 bp, Glycine max
  unsure (1)..(451): unsure at all n locations
agctcgcccaggcgagcagggttgcttcctctagaatcaacagccttctggaggaatcttctggagggcccaagtgggcctggttgctatttgcacccccatttttgctaagtacacccccttgcctttnttttgtgattcttttttcgtaaagttacggaaacttacgaatttcgtaacgatacttgttttctttccgtaatgttacggaaccttgtggattacataatcatctcttttttgacttacggaatgttacggaacctcactaattgtgcaacgatgcttccatttgatttccggtgtgtcacggaaccttacggattgtgcatcaatattttcttttgttttctggcacgtcccggaatttcacaaattgcctaatgatgggtgccaagcaccttacaaggaccaaacaaaagtcgcatgtcatcaagcaaaggtccccgga

SEQ ID NO: 101955 - DNA, 322 bp, Glycine max
  unsure (1)..(322): unsure at all n locations
aagtgcatggaagatcttntgaagttccactcacccaacaagcactatgttattatgacaaccaaaaatgggttgatgagttgctagattgtccagtgagatttttggacatattgtgagaaactaaggatgcaatcatgcaaatgaagggaaatgataaaggccttcaatcatcccttacaaggagaaaagttggagacttggtggttgaaagccatgtttcttcatatcggattctccgaagaaanaaaggaaacaatgcacaatatctcttgtttattgaagccactactgaagggtcatatttgggggacttctcttt

SEQ ID NO: 101956 - DNA, 457 bp, Glycine max
  unsure (1)..(457): unsure at all n locations
tgattagaatcctgatggtagccaggtcttatcanaactattattattgaattgatctttctgctgatgtggattacggttcaaaggaatctaattattaacgatactcattttggtgcgcatagtccggtgcatttgtaaaaagcaaatagtataatgtgaattttgaatgtttttaatgaaaagtaacttattgaatcatcggcgctatatctaattgatgtaatgtaataatgagtctgtagtgcatttttgtattgaaaatgtaagcaaattacctgtttgtttgtcgaaagataaaatanatgatgcatacaatgtcgctaattttggcgttgatggtactgcatgtttgtggagttatgtctactagaagtctgaaaccttggaggtttgtgtgcataaatctacaaaattgttccctcaatttttattataaatatatactcagagcata

SEQ ID NO: 101957 - DNA, 423 bp, Glycine max
  unsure (1)..(423): unsure at all n locations
ctggggcaaatgactatggcgacgatgaaggagaagcccgtgctgtgactaccattcctatacaaccagtttcccaccaacccaacaatgtcattactcagccaataacaaaccttctccttacccaccgctcagttatccacgaaggccatccctaaaatcaaccacaaagcctacctaccgctcttccaatgacaaacaccacctttagcgtaaaccaaaacaccaaccaagaaatgaattntgcagcgagaaagccttagaattcaccccaattccagtgtcctatctaacttgctcccatatctacttgataattcaatggtagccataaccncagccaaggttcatcaacctccatttctccgagaatacgacttgaacgcaacgtgtgcttgtcatggagaagccccgggggcgttc

SEQ ID NO: 101958 - DNA, 453 bp, Glycine max
  unsure (1)..(453): unsure at all n locations
tctggtgggacatctngacttgctttccaatctgacattccccacagattctgccttcttctattttcagattgggaatgcctctaacagcacctttgtcaatgattttcttcatgcctcttaagtgccgatgtccaaatctttgatgccatatgttgacttcatcttctttggaggatagacacgtggaggagtaactggtttcttgaggtgtccatangtaacagttgtcctttgatctgctgcccttcattagaacttcactcttctcatttgtcaccaagcattctgactttgtgaagtttacattgaatccttcatcacacaactgactgatgctgatcaagtttgcagtcagtccctttaccagcagtactttgttcagactatgaagtccatcatggactatctttcccattccagtgatctttcctttagagccatctccaaatg

SEQ ID NO: 101959 - DNA, 271 bp, Glycine max
  unsure (1)..(271): unsure at all n locations
tagattctagtttttgtttaatttcctgtcttatgcttgctcattaccttgaattacatcttgacatcgcctaagcttatatgctattatagaatttttagaggaaatataacaatgaataacccaatcttgcaaaggtttntgcaaaaaaaaaaaattaattaattaattcagcttgcttgggggagtgtgtctgacgtaaaaacttaaaaggcggaggcgtgaagccattttgaccgcattctttcttaaactcaaagccacaataagc

SEQ ID NO: 101960 - DNA, 435 bp, Glycine max
tctctatggggcacaatatattatatatggctttatcgagcacgataagaggtcaattacggacgaacaaatgaaatgagtatgccatgacaggttaatataccagtctacaaatgaacaaagactccaacacaagatgaaaaatggcatttttcacctaataatccaacacccttaattgcacttctattcatttacaagttatagccatacgctagcacaaggtatgcagttaacttgaaacttgtgagtcatccacaatagatagagtaataatatgccatagcatacagacaactgccactaaatgaaaaactaacctggtaaagttcattgaaaaattcagctcccaaccttcatactcattaatctaaggtggaagcaagtgatgaaaaacagtgagcatcactcttattccatatgaatgaaccctat

SEQ ID NO: 101961 - DNA, 355 bp, Glycine max
  unsure (1)..(355): unsure at all n locations
gaactttgaagtatgtctcataagactctcattcatcaaagttacaacaagtgttacacatgctttctctatagactacgtagctttcttgagaagactttttgagaaaacttccttgagaagctagagcttagctacacacacccctctcataactaagctcacctccttgagaagcttccttaagaagattcctaaagaagctagagcttagctacacatacctctntaatagctaagctcacctccttgagatgagaagctagagctcacctcacaccccctatatagctaagctcacccccatgacgaaaaacatgaaaatacannaaaatagtcttactacaaagactac

SEQ ID NO: 101962 - DNA, 348 bp, Glycine max
  unsure (1)..(348): unsure at all n locations
atatgtcgcgggggtcaagaaaacctgcggacctcangnggggtgctattggccaaaaccaaactagaccaaatccgacccaacccgggcatagtcggtcagtgaaaaccttgtatgtacctaaacaggcgagcttctggcagtctacagataacaggaacaaagaaccctaagcaaggaggcttgtggtagctggccagctgtgaaactcgattgatatgtgaaatatgggctctggtaatcgattaccaacggtgggtaatcgattacaaggcttaaaaatgaagacagggggctaaaatggtctctggtaatcgatttccaggggatgtaatcgattaccatggc

SEQ ID NO: 101963 - DNA, 415 bp, Glycine max
  unsure (1)..(415): unsure at all n locations
agcgtgcacttcacttgcatgaccattattgtcaatgcggaaagtattctgcactttatatccatgttcacacattattgttgcttgtggttacgtgagcatggattacttgcaatatgtagatgttgtttacataaatgagcacatcttaaaagcttactccgcacaatggtgacctcttggaaatgaagaggaaatttctccttttgaagactcatggacacttatccctgatccaactacaattcgtgtgtaaggtcagccaaaatgaactanganaaccacgcgatggattggctcgaaccatctgaacactgacaacaatgtagtagatgtggaacagaacgacacaataaacgtcaatgtccaatgcaatatgaacgangaacgtgctaaattatcgattatgatttag

SEQ ID NO: 101964 - DNA, 448 bp, Glycine max
taccttaatgtgtgagatacaacgcttgaataaattgtgtgccgagaggaaagaagctgaagattctctaaagaaaaaatggaaaaagattgaagagtttgatgctcgtagatcagaacttgagactatatatacggcactccttaaagcaaacatggtaatgttctgttatttcagtatttcctgtactagtgaaatacaactgtggcatatttacagcttatccttgggaatggtaataccttgtttgaatcctagaataatcactggttttaaacttgaattatccattaatagatttgtctgtgtgggcacattgatgcattcactgtgaattgttatatgcattgactactgagacagtgaatatttgtaggagctttacatatattgctcctactgggcctgatgttattcatttcccttagattacaaaattgatttgaat

SEQ ID NO: 101965 - DNA, 267 bp, Glycine max
  unsure (1)..(267): unsure at all n locations
actttcatnnnnngaaaaanngaccctgacatgattcatctanttaaaattgcctcccaaagctaattggatccacaaaataatcttatcatgacatatacataccatctaattcatgcttgacaaattttgcctgttgagaataaatgcttctaatttggacatgccgatgcaagatcaccacattgggccttttttaacattngtagttagtccagcctttattttcttggtaggtcgaggagaagacactgtggatttctctat

SEQ ID NO: 101966 - DNA, 452 bp, Glycine max
ctcatggtgtcgttgctgcgtttctattgtcgaggttagtattccctatctcccctcctctcataggttaactggtgatggaagcttgcttgtggggcttctatggaggctagatctttgagcttcaatgaggtcctttaatggtgattttccaccataaagatgcagcagaagacaaaagacaagaggtgagaggaggcaccatccactagggaataagccatggaagaaggagcttcaccaccaagatgagtcttggataagaagcttggagaggatgcttcaatggaggaaaagaaagagggagagaaagagagagggggagcaaaaaattgaaggaaaaaaaagggagagaagttgaactttgagttgtgtctcacaagactcgatctcattcatcaaagttagaacaagtgttacacatgcttctatttataaactaggtagctttc

SEQ ID NO: 101967 - DNA, 345 bp, Glycine max
  unsure (1)..(345): unsure at all n locations
ccttactgactagaaactttctgtaagatgcatgtccatttgagaagatcgagttaaaagcattaaccccctttgttacatttaggcatgatgttctcatatttatcaaattcaaaaagaaaatttcctaatttgttttcaaacatcgggaagcgagagaaaatanttgaggtcttgataaactcgatgaaaggttgtgcgaaattgatcccaaacttcttgatattcataaacattgttgggctgatttgcattgggttctgaggcaactatagtttgagtttcatacttcttcatctatgcaaaattgtgtaatcctcatcatctaattcgaacatgttgctt

SEQ ID NO: 101968 - DNA, 370 bp, Glycine max
  unsure (1)..(370): unsure at all n locations
tactacgtctgtgcaccggctacgaccgccattgaatggttggccaactacttcgttgctttcgttagccacgacgtccaaaggaaccttgctacgtcgttttcaggagaggaacattcgtgaatgcatggccgtgacgtcgtgtctgggagaagaacgtcgtggaatgcatggctactacgccgtttcttggaggagaccgccgttgacggcatgggaagctagattaagttttttttctattntaaaaattttaaattataaacgttatttgtataaacgtaaataatatcaactcgaaatttttaaactattattgccaactaataattattatgataagtaaatataaattttgtgctaaaccttt

SEQ ID NO: 101969 - DNA, 392 bp, Glycine max
  unsure (1)..(392): unsure at all n locations
gggtcatcgatattgttgatcctccatctcccattagacgacatgtgaagtggaaaatgatntgtccaaaaaatctagtccaatgacgtctaatgcaataaacgaaattgcatataggattgtaagtaactttcatttgtcagtggtcattttttataataattcttggatcagtaaaccaaatttgtttcatctattgactacagaattctctggaaaagcaaccgtcatagggaatctttattgcccatgggcatcaagatgtatcgcttgtttccattgagcaccaaagcaccctattaatgttcgtgattctagagcaggtgttacgatcaaacaatactttggaccgacttaaggagcttctgcacggttatgttcatggctcccga

SEQ ID NO: 101970 - DNA, 412 bp, Glycine max
  unsure (1)..(412): unsure at all n locations
acacctctgtttctctacctttcatcacaaaccctggttgttgagtgacaaaaacttcttcttctagagagccattaagaaatgcagattttacanttcattggtatacttcccagcaattgtagctagccattgctattacaagtctcactgtttccaacctagcaacaggggcaaaatacttatcataatccaaaccttgcttctgtagaaatccctttgcaacaagtctggctatgaactttgttacttctcctctaggattcaacttagttttgtagacccattttactgttatggctttctttcctgttggtagctctgtgagactccatgtctggtttctctcaatagacctcagctcttcttccattgcttcaacccaatgtgagtgcttcaaagcttcttccac

SEQ ID NO: 101971 - DNA, 137 bp, Glycine max
agtcaagaccatgatttaatcctacgcataaaagacgaatgtcctaataccaaaagataactaacgagcggaagataatatcctaaagagcatagccaaatatccggcgtataaggaaaagagaattattaactaaa

SEQ ID NO: 101972 - DNA, 446 bp, Glycine max
ggcttctacacgttatgcatcttcagatttatgacctcagtttattctactcaagcctgtctccattctaagttgtcataaaaaccagtcttaatagacatcacacttaattagtaaaaaaaagaatgctgacaaacgaatcatatgtttcttataattaggaccaaaaaaatattgtctgttattcttatatatacgaccggaaatggtatttgacttctgcgttcggacaatattaatatgttatttttgcataaaatatatttagagatccctacaaaaatttaaaagtattgaattcattttcgcaaaatatttgtattaatttggtcattctaaaaataaaacatatttttgttggtcctcaataataacttcgttagacggtaatctaacgtagctaacaaacttacacatgtaatttgattactaaggaattaaacaat

SEQ ID NO: 101973 - DNA, 282 bp, Glycine max
  unsure (1)..(282): unsure at all n locations
tttatcctattacctatggatgggnngaaagngnnnngacgctaaccattttttnttngtacgctatctggaggggtttgaatttaaacttctcataagtttttttactgataagctgctatgacatttatatcctatttggcaggttgttgaccgtggggcaaaagttgagcttttgatagataaaacagagaacattcacttccaggtccattgtttgtcactattgcatatttttaatgattatgtcaatgcacagtattaaattttgagagatagaat

SEQ ID NO: 101974 - DNA, 312 bp, Glycine max
tgtcttccgctgcatctccatggtggaaaatcaccattaaaggaccccattgaagtcaaagatccagcctccatagaagctccacaagcaagcttccatcacaactgatatggcttcctgaagtaacataacttcgtcatacgtaacacatcttcacaacacaaaacattgtgaagtaggttgcttcataaatagaaagtgaaggaatagttgctagtgcgttagtgttttgtctaaagttagactgcataataacttcagtctttcattctgatgttcacatcaaaacttctcatggataggttcaatttt

SEQ ID NO: 101975 - DNA, 439 bp, Glycine max
  unsure (1)..(439): unsure at all n locations
tctgtgagaanacttncttgagaagctagagcttagctacattcacccctgtaataactaagctcacctccttgagaagcttccttgagaagattcctaaagaagctagagcttagctacacacaccccctataatagctaagctcacatccttgagatgagaagctggaacttagctacacaccccctataatagctaagctcacccccatgacaaagaacatgataatacagaaaaaaagtccttactacaaagactactcaaaatgccccgaaataccaggctaaagccctatactactagaatggccaaaatacaaggcccaagcgaaggaaaaacctattatgatatttacaaagataagcaggctcatacttagcccatgggctcaaaatctaccctaaggctcatgagaaccctagggccttcccttggatc

SEQ ID NO: 101976 - DNA, 169 bp, Glycine max
  unsure (1)..(169): unsure at all n locations
aaaggttaacctaatttatccttanntttcccatggatccctcatgtaagactatgcttaaaataaataaaattattggaacaacataattaaaaccaatacttattncgcatattgttgatgtaaggctaagattaatcctgtttaatcaatactaaagcaatactat

SEQ ID NO: 101977 - DNA, 399 bp, Glycine max
  unsure (1)..(399): unsure at all n locations
atctttcttcatctggtcctacgtctctacccattctcaatccattgcatgtttactgtcttatttctgaaacggcagatacgatgacgagtcccccgaaggtactaatacctgtgacccgcctatcaacttttagcaagaaacgaatcacacggaagatgaagggaacgaggatgtgagactttccctataattagaaaggatagtcgcccatgaggaccaagaaatggggcctcatnaagaagaaacagaacaagtagaattgggaattggcagtggaaaaagggaagtaaagataggcacaggtattaccgcacctatccatggagaattaataaccctgctgagagactaccaagacatctttgcttggttgtaccaagatatgcctggtttgag

SEQ ID NO: 101978 - DNA, 372 bp, Glycine max
  unsure (1)..(372): unsure at all n locations
ttccgctgccattcatcttncaagaagaaaaggaatnnattgacgaaaaagatcctaggcctacaagctncatggagcttacatcacattgtcacaacctaccctttggcgggagggcgacgcgagactcacgggtgcgtcttctaaggaaggaaaatgcgcggagtcgccaccaacgtttatttgaggaaaacgttagaaaaaccgaaaaggggtctacgaatgtagaggataaaaggttcgggagttgtttacgtgcggngaaggtattatcaccccatgcatctgnnnnccggacacacaacctctaatcaaatgtgccaaaatatgactacaatattntnnttattttccttttttatgtttcttaac

SEQ ID NO: 101979 - DNA, 456 bp, Glycine max
  unsure (1)..(456): unsure at all n locations
gctatgctggaaatgtattatgannatgagatgcccgaagattcaccatttcctatttaaccatgccttaaggaccatggtcaattattttggttttaagtgaaacgggtttatgatccccacattggtgggtcggggtgcctaacacatgaaactaagaatgaggttcacgcttccccttttttttgtttttgttttgtagaggaaaacgcaaggatgagcaaacatgaaaacaaatggtacgcagttttgcagatcaaaaagtttgttgaacgcatatgcatgatgatgccatgactcatgcaaaaaatgtgaggctggaatatgataacggacaaatgcaggatatgtccattatgatgttatgaagcgatgcttatgcgatgcatgatatgaatgcattttacggacacgagagcccgaaaaattatctcttcttacttgcgcatttggggg

SEQ ID NO: 101980 - DNA, 307 bp, Glycine max
gacttgaaaaaaaaggttttaaaaagacttttaattaatatttgaactttttttgcccttactctatacgtgaggggtagaggtggtccatgtagaacaataactaaaatccttacaccctattgccacatcacgtagtcgcactttgtgcatgtccttcatgctttacatgcgtgatgacacctaagctcacatactggagaatctcggacttgatcttggattagtgggctgaaccatagctaaaatgtactcttcataactaagcgaaatttggctgcaaaatttggctccacaaatttcattt

SEQ ID NO: 101981 - DNA, 195 bp, Glycine max
ttcgtttaaaagattataaaagtgattctatttagatagcagttatgatacctagcattgggtctttatttagacagtagttaaatctgtttgtaatctgtacaatagtatttgtatttatgatcgcgctggacattgataaaaaaattattcttgtactatgcttttcctccttgtttaattctctaaacacat

SEQ ID NO: 101982 - DNA, 330 bp, Glycine max
  unsure (1)..(330): unsure at all n locations
atcccgtgggtatggcttttggaaggggggaaaagaagtttttgaatgcaaaaacgtnccccttccctcatccttatattttggtgcaggggtggctcgcccaggcgagctaacctgcattttttttttttgaggggaacattaaccatgtcccctccttcctcatggattagcgccttgcctaacttgaacttacttaagatagaattaggcgttgattacttatttttaaaacaaacaaatagtaaaagaatactgcgaatacaaaggataccgggctgcttgcaacgacgtatttttgttgtttaacgcggggaaggggcgacgatc

SEQ ID NO: 101983 - DNA, 448 bp, Glycine max
  unsure (1)..(448): unsure at all n locations
attctctacgccatnttcatcgctgccgcatgttaaatgacggtttttgttcttatgacagcaatgtaaagatgtagggtatgataatagcaacgcaaatngaaatagaatatgtatattgttatttcattgatcctttgcatgatatatataatacatgtacaagaatgttctataccaattctaaggcatgacagacgtgatccataatcagnggcatctgatttattctatgcattataaggtaaataaatatagaatcaaggtaacatatgaaagtaaatatatacacagcatatttgcaatcatgtagaagatatttcctaatactccccctcaagttggtgagtgaatatcgtgaagtcccaacttgttgcgcaatgtcacaaattgatcttttcccaaagcttttgtaaacacatctgctagctagaaatttgttggcaca

SEQ ID NO: 101984 - DNA, 325 bp, Glycine max
gatggtgatgaaagtgatgatattcatggagatgatccaattataggattggacatgcttctttgaaaacaccgcgctttttttaattatttaaatgcttctaatttgaacacttatgcattgttgtcaaactctaaagtcaactcgtagactcttacgagtttacacgagtccactccgagaccacgagtctgctccgagtctgctaaaaaaggagttttgcttccgagtcaactcacgggactgaagtaaacaattaaacttcgtagagtctacgagctgaatctatagttgacaaccatgataatgagtagaagagaaactt

SEQ ID NO: 101985 - DNA, 374 bp, Glycine max
  unsure (1)..(374): unsure at all n locations
atgggagtactaagtacttattacctatatttttctaaagtaattactacactacaaaataaccataaagggaaggagttagatacaattttcacagatttcttacacaaaagttagtcgtattcatcgactaacatatacttgggagggtgagctccatgccaaaaccctgcctcactaaagcaacctaagggtctctcctagtagggtatcttcccaagtatctcccttacattntgacttcaaatggcatgtctagtggtgagaactacttcccaagaagtttagtgacttttcagtgtatatgagatggattgttgttgatggtaaaatttggatctttgagaccaagtatctcccttaaggaatccatg

SEQ ID NO: 101986 - DNA, 312 bp, Glycine max
  unsure (1)..(312): unsure at all n locations
gtgcttccaccatgccctgttgaacaagaagagctctcatcttcaatcgccacagaccaaaatcattttgccctatgaattttcaacctcatacttggccgagcccatttcttgaatcgaactcaaaaaatcgttccacgttcaccgcaccaatttgttgtgccaagatcagattctacttcacaaaagaatgagtttcttgtctgaacacgaatangaaaccgcccccccccccatganccnnantgccaacattacagaaccactttattaatatctgccgtttatctggtacaaaaactttttatatct

SEQ ID NO: 101987 - DNA, 446 bp, Glycine max
  unsure (1)..(446): unsure at all n locations
ctaagctccttcaactgcacaaggcgnntattttttcttcttatgtcanggntnagcattagnngaaaatgttgactaaatttcgacagcatttcgcattggtctccaagtacacaacatgacatctgtgaaattaatttctcgataatcaagtatgcactcaaagaacaacttgaaatgcattgtaccgaaatttcatcaaattaatcaaaataattataaccttaacgaatgaatctaacataaaaataccagtctgcctaaactgtccaaacggacaattaaagacttaatacaatgactaatgcgaattgtccgttagaattattgcattcagtctcaaacgggaatcttaggtgcactcatcatgaagacaattcgtatagcatatattagttggcattaatggaagtgaacaagttaaaataataattgtgtgctacatt

SEQ ID NO: 101988 - DNA, 141 bp, Glycine max
aatgatgctaagcccggctcgtatttcctttccttatgatcctttgccccaacaatccattcttatactgagactcatacctctctcctttatattttatcaaccatggttttcaaactacagatcaagagagttattagc

SEQ ID NO: 101989 - DNA, 444 bp, Glycine max
taatcgattacaaccttgttggtctttgtaatcgatttaggaaattgtaatcgactaccagaacataagcaaggctttttctcttataaaaaactatgtctatgtctaaacttcatctaactatactaatcaaccataatcacaagcattcaattcaatcaagcacaatcaagcatatttaattacacacactatctaactcatccaagcaatcaacaatcacaaacaaatctatctagttaaattaacaattaactaactatacacaataagttctatttctattaagactatttaaacaaagataatgaagaacaaatatctacatgacaaataacaactaatataaatagtaataacacacaagaaactagactcaaaggcaatcctcttaatcataaggaggataaaaaacttattagagttacctattgtctagatcat

SEQ ID NO: 101990 - DNA, 371 bp, Glycine max
  unsure (1)..(371): unsure at all n locations
tttcttcctctattgcctttagttaaatacaccttgtttggttctctatttggttcttaaccctcttatgcacttctttacaaactctgacctagattccccttctttatgtataaaagaagtgtctagtgggaggggaatgaggtctaacgagttaggggattgaacccatagacatcctcaaaaggggactgcttggtggttctatgaacccccctgttgtaggcaaattctacatgaggaagatactcatcccaagacttatggttgcctttcagatgaacccttaaagggtggataaagacctattcactacctttgtttgcccatcagttngtggatgacaagtggtagagaaaagaagttaattc

SEQ ID NO: 101991 - DNA, 431 bp, Glycine max
  unsure (1)..(431): unsure at all n locations
ggcctanagaggtccaggaaggacaatgtctgtcaaggaactatttccgctccggagtacgacagtcaccgctttatgagcgctgtacaccagcagcgcttcgaagccatcaagggatggtcgtttcttcgggagcgacgcgttcagctcaaggacgacgagtatactgattttcaggaggaaatanggcgccggcggtgggcaccactggttactcctatggccaagtttgatccataaatagtccttgagtcttatgccaatgcttggccaacagaggagggcgtgcgtgacatgaggtcctgggttaggggtcagtggatcccgttcgatgtccacgctatcagccagctcctgggatatccgatggtgttggaagaaggccaggaatgcgattatggccagaggaggaaccggtctgattggttcga

SEQ ID NO: 101992 - DNA, 170 bp, Glycine max
  unsure (1)..(170): unsure at all n locations
gagtatcttgatatactatntncccacatcggatattcttgtcataagttatgaccattccacctctcgagagcttctgttgttcaatttcaagcgtgtcgatatattatgtcatttaatcacacatccgagtgaaatagtatgactagctcgatttttcttgagagctt

SEQ ID NO: 101993 - DNA, 367 bp, Glycine max
gacggagatttatctatatatatgcttgctactggcgtagagaggaacactacagatctggatcatatgaagcgtgttcaggcttacgaaggcaaagtcttaacgcatgaaatagatatcaaggcaacgtggaacgcgtatttccaccacttattaaatgatgcatctggatatcactctagcagactagacacaccataacaagaccggaactatcagtcctatcgtctgattcacaatcaggatatataggaagcgttgaaaagaatgactaatgagaaggctgagcggccagacaacatacctatcgaactgtggaaaactcctagagatagaggtcttgattggctcaccgcactctttcacg

SEQ ID NO: 101994 - DNA, 396 bp, Glycine max
ttagagcctcctttgtttctccatgtcctggggatatttcgagaaataaaggagagctcatcttatcgcacacttcctcatattcattatcagatgaatcatcaactttatgaactttggacgaacttctcaagacttgttctctggatgaagatgccttcttatttttctgactactgagagccagagacttttctcttttggatccatagacctgctgaagttctcgttcatgaaccttgcgggtgttatcaagttccctacacgacatcgagtcgagagtctttatactctcagcgttgttgcatacattctccatttcctagatcaactcctcaaagttggtgatatgatcatatcatataagcctacagaggatctagtcattatatggtt

SEQ ID NO: 101995 - DNA, 429 bp, Glycine max
  unsure (1)..(429): unsure at all n locations
taaagctcgcgccgctcactatcatgaactccagaagatggttggagcttattatgaacacaagcgaanacttagattgaatgtcgaagaaaggaacaaatttggatcacaaaaacatgctaaagtagatgttattaggatccaatgagtcattgttgatcttgaacaatctagcgcaaaggaaatacaaaaggaggtgaatgtgtccattcatcacattgcagcanaagaacccctccatgagttcactcaagctgagtaatcccatgaagttacttccatccaacaagaggtaatcgtttactctgccagctcccgaaatcccaaagatattcctccaataaactataatgcacccgctgtggcaatcactaaggaatacattcaaaagatgctaaatcaagccatgcaaaagcaaaaagaagaaac

SEQ ID NO: 101996 - DNA, 406 bp, Glycine max
  unsure (1)..(406): unsure at all n locations
tggataggcgtttctgtagattacgcctctccaactccactttgaactcatcggctcagtatgataaatttaacattcctctccataaggatattctggcctagaatgttgcccgtgtatctattccaagcttccaaagatgggaatcgcctagtatcatactgagctcgaggtttggaagctgagctttttcttttcctgggtgccatctgcaataaaaagaacccgtcgatttattaaaccagaagttatcaaaattgagatagaaaataaaaactgaaattggcaacggcgtttagcgagacatagctcgcttagcgtgccttatgaaagacaacacactagcttagcgcaacaggggtgtgcttaaccagttatgacaganaatttttctctgcataattgg

SEQ ID NO: 101997 - DNA, 424 bp, Glycine max
  unsure (1)..(424): unsure at all n locations
ggctctanantacattgattggaggaggttgtatgccatttttngtttaagagtagcatcccttggtaaaactaactttccaaatgtttgccttcgcaggaaatggccccaaggaagctttcctcaaagaggtccaggaaggacaaggcagccgaaggaactagttccgctccggagtatgacagtcaccgctttatgagcgctgtacaccagcagcgcttcgaggccatcaagggatggtcgtttctccaggagcgacgcgtccagctcagggacgacgagtatactgatttccaggaggaaatatggcgccggcggtgggcatcactggttactcccatggccaagtttgatccagaaatagtccttgagttttatgccaatgcttggccaacagaggagggcgtgcgtgacatgagatcct

SEQ ID NO: 101998 - DNA, 377 bp, Glycine max
  unsure (1)..(377): unsure at all n locations
actgcttgacaagaaacttatggaagagaagagcaagcgtggacatgaggaacatncgtgtactgaaaaccaacacttaacatcgacccaccatcctcagttgcaagacacttgaagtggaagatcgcccgcacaaagcggtatggccaaatgacgtctgaagtggcacaagaaattgcagacaaaattgtgagttcatatattttttggttactgtcattgccaaataatggttagctaacctagtcaactttattttattcaaattcaacaattgtatatccatgcaggattattacaggaacaagccacacaggggagttttgttccacatgggcgacaggacatactcaacacggcccttggccgacctgagc

SEQ ID NO: 101999 - DNA, 460 bp, Glycine max
ctcttaagaaaacttccttgagaagcttctttgagaaaactttcttgagaagctagagcttagctacacacacccatctaaaaactaagctcacctccttgagaagagaagctagagcttagctacacacccctataatagctaagctcacccctatgaaaaaatacatgaaaatacaaaaaaaatccctactacaaagactacttaaaatgccctgaaatacaaggctaaaaccctatactactagaatggccaaaatacaaggccccaaagaagaaaaaaaacctattctaatatttacaaagaagagtggacccaaccttggcccatgggctcaaaaatctaccctaaggttcatgagaaccctaaggccttctttatcagctctagcccaatcctcttggagcctcttgctcatggctctggtaactggtcctttcctagggaggattgcatcatt

SEQ ID NO: 102000 - DNA, 367 bp, Glycine max
taggagctcgtggcgtggacacatatacatcttctctaggagacctattactggggctgtgaccatctgtattgtcttcaaaactaacatggtgtaaacaagctgactcagtgtaataagttcttgcatacaactgctataagcaatagtgaccaatagcctatgtacaacttacagttgcccatcggtgtgtgggtgacaacgcggttgacaataacaactttgtgctcagcttgctgcacatagacccccatagatgacttaggaacttatagcccctatcgctaacactgctacttggcaaaccatggagtttcacctgcttcttgataaacagaatctcctgatgggaagcatcatcaccttt

SEQ ID NO: 102001 - DNA, 350 bp, Glycine max
aaacaccattgacagacctcattgtagctcatagaatcacccccgtagaagctacacaagcaagcttccatcatgtaaattgcttatatattctaggcaattccgactcatgaagagatatattattgtcacatgacgtaacataatttgcagaatgaaacatggaaccaccagcaacatcctgttatatgtacaattctaaaactgacatttgttagtgttgttgaaaactttcgatcatagtttcaacatatacgtcatcacaatgtgcatggcgaatattttgcttatactaagaaactacatcattatagagagatgacttcattattttctaactattccttatc

SEQ ID NO: 102002 - DNA, 329 bp, Glycine max
tgacctgaatggaatcgccatgacacggcatgttgatactgtctttgatattccgtcagtgatattgagatgctggaggcaattccgaccggatatactaacatgcttcactttgccaattgttatgacacttggtcgtggatcacctatgatgacctgttttcaaaggtgacctatatcctttctgatggcatacgcatggaccaaaaaagatacgacagaattatgctcgtcgacaattcgccaacttgccttggattctgtttctgatcgtacccttgtgatgttggaaaaaccatctcctttgacgctcattcttcagagaataa

SEQ ID NO: 102003 - DNA, 385 bp, Glycine max
  unsure (1)..(385): unsure at all n locations
cattaggnacgaaccntcattgggaaatgcgtcaaaatgttaacacctaataagctaattaaagttagactcagacctcaaatttgcacaagaaagattcgaaagagatgaaagttttgaagagccaatatgcggccctaccaaaacaagaaaaagttagcatttaccagcagcaatggctattagcttttgtttatctgatctgggtaatatagataggttcaagggtcagcacgattttattacaaaagatttatctattgacaggttatttattttcctataaatgatttaatttatataaaatagttacgcatcatctttcttgctttgcgactttagaatttcatacagggagcagtattgtatgagaaaacatattaca

SEQ ID NO: 102004 - DNA, 429 bp, Glycine max
  unsure (1)..(429): unsure at all n locations
catcttgtgtgttaggtgtatatacaactaaggttttaaggagagaatattttagtaatacacacatatttttagaaaaaaaataggttgaaccanataatttttttatatattctcgagaatttaaaaagaaatttccaactaattttaatagttaaatacatatttgttaaagatactcaaaaatatcattttcatctaatatattgtggaagaattattttcaggaatcctatataaagttctgtgagacaaaaactacctaaaatctggatcaatggacttttatagtggcatgtgtacgtgatgagtactatattaacatcaacatctattaaacaacttataacttaacacaggtgaggatcaattatgaagataagaggatgaagtatgaaaatagaagganacactaattgagatcaaaat

SEQ ID NO: 102005 - DNA, 460 bp, Glycine max
  unsure (1)..(460): unsure at all n locations
gcttaataacaccactagcannnaaaatttcaagcaccacanactctaactntaactcacaaaactcaaacagaagagaagaagagaatgcttatttggtggatattctangtgcaaactgccgtatttaaacgcaaagggaagaggatggcttnccttattacgttcaaaaaaaattaaagcatgttctgaaaccctgaaaatatcaaccatggtcaattttttcttcattatttttgcaaaccctatacttgagccctagcaaaaagtacaaagccatgcatgaacccctatactgaacctaccctcatgcatgttactgttgcactgcacgggttgtatctcgtcagtatcactggcagaaccaatggaccaaggccatcctgcaacctcgactggcggaaccaacttaaagtgatctcaccagtttgactggcgaaaccaagcatgcatggatggg

SEQ ID NO: 102006 - DNA, 385 bp, Glycine max
  unsure (1)..(385): unsure at all n locations
tgctgacattgctgatggaaaactgttatagatgaagggtanaaataanntagggttagaaagngaaacgcgatgttatgactggaaaaaaaaagtgaggctttgagagtttggaaggttaagtctcgaattttgtggtaaatggaggttaaagngagttaatactagcttgaaatgtcatttatgacgtgggagaaagcttggactgtgctagatagaacaacaaatgattaaagtgaacanagagtcttttctatgtgaaaatttgcgtgttgaaaagcaaaattagatccgtggaactttacgtgtaaattaanttgagtaagttagattgatgttatggacattgtgagggagagttagttaaaattatcttttataattt

SEQ ID NO: 102007 - DNA, 360 bp, Glycine max
gcgcgagcgcaaccgaggttgggtttcggccgacataggcatgttcccatgcactcggccaagataacattagcccacatcgaagagaaaaaaaaaaacattaatcaccgatatagatcggaaaatatgctggttgacctccctcacgaaaggtgaccgatcgaggtctaaaaataaaagatataccggatgacgccgatcgagcatttcctaatcgacatcatccaaatattggtcagggattggatataaaatacaatatctgataccagccgttatgtagtcccgactgacattatttagtcgacattgcacagaattttttatcaacgctggccgatcatatatctatacggatga

SEQ ID NO: 102008 - DNA, 293 bp, Glycine max
  unsure (1)..(293): unsure at all n locations
gccaaaagataacaagaaattcccaatcaaagagtgggagaccgcaaaccgaccacataggaaattccctatcaaagaatgggagaaaggtaataaggaagaagaagaaggaaagaaagcttctgatcagggatcgaaggaaaaacagacgaaatgtgcagaaaggtctttggaccggacaatatctgaacaatacagaattgtcaccaaatgaacaaaaaagaaggaagggaaaccacgacctanaatgggcttcttcctttgataccaaccaaaatcccgtgcgctagcca

SEQ ID NO: 102009 - DNA, 451 bp, Glycine max
  unsure (1)..(451): unsure at all n locations
actaagctttaaggacgctctcttaagaaagcttgtttggaagctacttantctatttatagaagcatgtgtaacacttgttgtagctgtgatgaatgaaagtcttatgagatacccttcaaagttccacttctctccctcttttattccttcaatttcgggctccccccctctctctttcttttgcttcattaaagccatctttttaagcttcttatacaaggcaattcttggtggtgaagctccttcttccttggcttattccctagtggatggggcctcccctcttctcgtctcctttgccttccgctgcatctccatggtgaaaaatcaccattgaaggaccttattgaagctcaaagatccagcctccatagaagccccacaagcaagcttccatcatagccgcaattgatgctttcttgcatatcaccatagcatagagagcccg

SEQ ID NO: 102010 - DNA, 288 bp, Glycine max
  unsure (1)..(288): unsure at all n locations
attgaaatagggttggattaagtggtgactattacggacgaattctccataacccaggataagagaatggcttctgaatcagaggaaacaacccgtttttaatattagtagtttcgtattccagtttacttgttctgctctttaattaccaaacaaccaaaccccnccccccaatcgttactgttaccgcaagtatattatgaacatttggtttgtcactgctcgctgggaaacgacctacgatcattcctagttactgcattttcatgtttatttgattcggggacg

SEQ ID NO: 102011 - DNA, 445 bp, Glycine max
  unsure (1)..(445): unsure at all n locations
ttatatctnntctcaaattgatgggcacacttgactatattcatctattatgtncacccaagcatcctaaattgcaaaacatgaccccatttgtttgttttgttggtgttattttccttcgtgtcaaggacaagatgttggactcaatcaaagaacatggtcgtgtgttgatagcaaaaaatgaatattntgttgtcccattcacaaagagactattagacaatagaaaggtcaatttttgttatttatttaaattcatggtgttatggggttagacatgtgactgtctttgtaacaccctgaaatattactaattataaatcgatatttaattgtatttatcgtgttatttgactatatggttgacttgaatgagttgaggtatggcttgaattagtcatgtgtgaattttttntatgtggatgttgagttatgtggagttttg

SEQ ID NO: 102012 - DNA, 393 bp, Glycine max
atggggtaaatttggagcaaactctcacctcacacaagtctataaacttaatctaaacttgctcaactggcttttcacctaaaattccaccgaatcaaaatttgactcctcaacacccaatttaccctagaaatggctcttgccttcactttggtcattcatttttctcctttgcacagccccaagctttcccacagtcctaaatgacatttcaaactaggattaactccctttaacctccaattaccaccaaatccagatttaacctttcaaactctcaaagcatcctcttttccactcatagcactacattctcacattctaaccctagggtagctctacccttcatctctagcagttttccataagcaatttcagcacacaaccatcaca

SEQ ID NO: 102013 - DNA, 440 bp, Glycine max
tctatgaaggctggatctttgagcttcaataaggtccttcaatgtgtgatttcagccatggaattgcagcggaagataaaggagaagaggtgaaagaaggcgtcatccactatagaataagccatggaaggagaagcttcaccaccaagagagtgccttggataagaagcttaaagagcttcaatggaggaagagaatgagagagagagggggggggggggcatgggaattaaaggagattatggagagaagttgaactttgaagtgtgtctcacaagtttcacattcatcaaagttatgacaagtgttacacatgtttctatttatagcctaacacatgggaagcttccttgagaagcaaggaaggtagcttccttgggaagctataggaagaaagcttccttgagaagctagaggggggttactcacacccctccaat

SEQ ID NO: 102014 - DNA, 363 bp, Glycine max
atccgacgctcgtaattgataaccgaagctctgagaaaaatcaaacgacaataacttttactcggcgcccgattgagccttgtaatatatcgaaacgctcgaaattgaaaacgaaacctctaagaaaagaaaaacgacaataacttttgattcggatgtccgattaagtctcgaatatatcgagacgctcgtaattgaaaacaaaagctctgagtcccgtagaatatcgagacgctcgtaattgaaaacggaaactgtaacgaaaatcaaacgacactaagtttactccgacgtcctattgagccttggaaatattcagacgcctgacatgaaaccgaagctttaagatgtaaacgacatact

SEQ ID NO: 102015 - DNA, 432 bp, Glycine max
  unsure (1)..(432): unsure at all n locations
cagcttagatttaattacgagcgtcacgatattttttgtactctattctatattctaatagaaagntattgctctttgactcttcatatgagcttncgttttcaatttctagcgtctccatatattaaagggctcaatcggacatccgagttaaaaattattgtcgtttgattcttgtcagagcttccgttatcaattacgaacggctcgatattctccgggacacaattggatatccgagtcaaaagctagtgtcgtttgtttgtgctcagagcttctgtattaaattactatctgaacgatatattacgggactcaatcggacatccgagttaaaagttcatgtagtttgaatttgcttaaaccttccggtttcttttctagtgtttcgatatatacctaacacaatatgactttatgattaaaacttat

SEQ ID NO: 102016 - DNA, 280 bp, Glycine max
  unsure (1)..(280): unsure at all n locations
acgtactnncacgtccccatatcctcgtttctctcaacaccgggttcccatcaatacttccaagcttccacaacatccaagcaaaacaacattcacacagcacaagctatcacagcctgagcaatgagacgaaaggtgagaaaacctggcaaaacaccaaccacaaatcacagggttttccactcaaagaccccaggaacaatgncttcgatccaatttgttaaccggtggatcgaatcacaaattttctgggagtctatagtgcataagcctacactat

SEQ ID NO: 102017 - DNA, 433 bp, Glycine max
  unsure (1)..(433): unsure at all n locations
tattaagctntatatgtcacttttgacttggattgcttgtaatgtgtattcatgtctgatgctattgcatttaatgattaatttttggttaattcaccattgaaaacaaactattcagcttcttattttattcatttcatatgacaatacttgcttctccgctttcatcaacaacaatctatacttagtaatttactgcagagtgagattttatttacttagttcaagattgcctaacttgagctaatacaacatatccatacaaatgatagtacaaacttctatttatatgacttagttttgtagttcacaatttaaatgcactatgtctcatggtttcaagtcacttgttttgctttattatgctaatgtttggtttagctaccagcaaatcatcgagaatttagttacataacaaaagattgatctaggt

SEQ ID NO: 102018 - DNA, 304 bp, Glycine max
actatggactacctttggtacgattatattttgtgccactgtgagagcaatcgacagagttgtggatatcgttcagattccagcgttattgtgtcgccaagttaatatctattgcacccaatttcaagatccattatacctggctggctcaaaatttaatagaagagccaactccaaatattgtattcatttacgtttaacggcagacaaatctttattgcgacaccaaaactggaaaatatcagcttataaggaccctattgctcctttataggtatatcacttgagtacgattcatagtaga

SEQ ID NO: 102019 - DNA, 438 bp, Glycine max
  unsure (1)..(438): unsure at all n locations
tcaccatgaagcattnctggtgctgccaaagcatgaacttctattcttgcccacttgatcacatcaggatcacctccaaggagcttagagatctgtagtccaatagaaaaaataaaacattaacaatatgaaatgaagtgatgttcaaatacgaagaagtctaagattgtgttatctgaactgaagtgccacatgatattggataagcaaaagatagataagtgtcttgtttggataaacttttccataaaaacttataagaganagaaaaaagaaaataaaataagttaagcttctttcataagctaaaatcaatttatgcgcttaacttctccaaaatctggcatgcatatgctgattntagtttgtgggagaagcacaattntaacttctcgttgtattcttagaagttcttatgaacagatttttccaaatacg

SEQ ID NO: 102020 - DNA, 176 bp, Glycine max
  unsure (1)..(176): unsure at all n locations
tgaggagaagccgataaagtcgcgactaaagtgtgccgtgaacggnttttggattcttatacatgtgcggaaagccttacctgttgattgcttggctggatctgtcaaataatatgacttgaaaagactaaaattcctttccgtttacgccgatttaagaaaagcactgtaaaagg

SEQ ID NO: 102021 - DNA, 269 bp, Glycine max
tgtgtgttatatagaagcactacatgcaagcatctattatacatcaactgggacagggactttgtactatgaatgtattcttgatggatgctgactgattactgatatggggaggcggggttatatgcacaatacatatgtggtcttataaatggctaagaattcttaatggtttttcaatgggacacacgattcgtaggcttatatcttctgtctattatgggatagattcgctctatggaacttataatctactccttttctctttg

SEQ ID NO: 102022 - DNA, 252 bp, Glycine max
  unsure (1)..(252): unsure at all n locations
aaatgtcgactttgtttgatctttcatattggtcgaatctggatgttagacattgtattgatgttatgtatgtagagaaaaatgcttgttatagtgtcattgggacactccttaacattcaaggtaagacgaaagaggtttgaatactcgtcaagatctagctgagatggatatacaagcccagttacatccaaggtttgaaggtaaanaatatacatgcctccatcttgcatactttgtctagaaaggaaa

SEQ ID NO: 102023 - DNA, 433 bp, Glycine max
  unsure (1)..(433): unsure at all n locations
ttcttcggtctttgggttttaatatcgttcatcttaatatattacgcaactggatctgacctttgagtaaaaaattattgtcggttgaatttgctgggaacttatatttttaatttccagcggctcgatatttatcgactaatcgacctccagtaaaaggtatgcctttgaatttgtctgggcctctatttttaatatggagcgtctcaatatattatgggactgtatgggacatccgagaaaaaagttcttgccatttgaattatcaaggggtcttccggttttaattgtgagcgcctcgatatattacgggactcaatcagacatccgagtgaaaagttattgcccttcgaatttgctcggagcttccattnttaattttgagggtctcgatatattgcgggactcagtcagacacccgaataaaaaggta

SEQ ID NO: 102024 - DNA, 184 bp, Glycine max
attactaacacttaggtaattcttggttatggagggaaattcccctaatcttcttaggagagagttgggtttggataatatggtgacttaaacgcattggacctattgaagatatttttgtgcctggggactagccatacgaaatgttcatttttgcatttgaatgtttcaacgagattatgtt

SEQ ID NO: 102025 - DNA, 450 bp, Glycine max
  unsure (1)..(450): unsure at all n locations
tgagatgaggaagtgtngaagggtgaaacttcctgcttttatttttgaccacagagtggnacctggagatatgtcgcggnggtcaggagaccttggggacgtcaagtggggtgctatttgccaaaaccaagcttgaccaatcccgacccaacccgggcataatcggtcagtgagaacctgtgatgtacctaagcaagcgagctccttgcagtccacagataaaaggaaaacaagaccacaaagcaaggaggcttgtggtggctggccagctgtgaattttgtgtaatatgtggatggtggcctctggtaatcgattaccaagggggggtaatcgattacaaggcttaaaattgaggacaggaggctaagatggtctctggtaatcgattaccaaggggtgtaatcgattaccaggcttgaaaacgaagtcaggaaacttatggagcctct

SEQ ID NO: 102026 - DNA, 386 bp, Glycine max
gtacagatttcggattaaggctagctgggttaccaagttaaccaatgcatccagtttgcctcaagcttcttagtctcagatgatgcagtttgagttgtagctacctcatgcactcctctaatgactatagcatcatttctggcgctaaactgctgggagttggaagccatcttctcaattaaattcctggcttcagtaggagtcatgtctccaagggctccaccactggcagcatctatcatacttctctccatattactgaggccttataaaaatattgagaagaagctgctctgatatctgatggtgggggaaactggcacatagtttcttaaatctctctcagtactcatacaagctctctcctactgagtgtctaatacctg

SEQ ID NO: 102027 - DNA, 452 bp, Glycine max
  unsure (1)..(452): unsure at all n locations
gcttcaaagttctcttatactntcttagtgacattgatcaatatttgctcttgcaattttgcaactnntgttcaatttatggaggatatccctttgcaggtaagcaactaaaaattactccccatataaatttccaaaagtcaaaaggatcagagcatatgttcaaagtagtgtcatggacatagattacttgaatgtttctaaaacaaacattngcttatgcttcatatgtttatagtatagntagttcaataaccaatcaaaatttcccatccaagctttgattgagcaatgtcacagtttgcaaagcttagtctgaactctataatcttaattctttggcattcattagataaatttttccaccataaaggagggtaaaagtgcaacaatatgtcataaatatttaaatattaataatatgtagatataaagagcttgtcatatgttta

SEQ ID NO: 102028 - DNA, 328 bp, Glycine max
  unsure (1)..(328): unsure at all n locations
aatgaagactgattactttgtatattattgtcatacatctactgaaaaatgtgtttatctaataatgttgtcgatgatatagtgattataggtaaatgatctanttatattgtccaggctaaagagcacatatgcagcccttttcagaccaaagatctgggatctttgaagtatttacatggtattgaagtggcttaatcaggatatggtgttgggatcttccagaggaagtatgctcttgatatttaaaagaaacgtgttggagaattgtacaccttgttggaaccggtggatctaaatctgaagctcatggctaatcaaagtgaaa

SEQ ID NO: 102029 - DNA, 455 bp, Glycine max
gctagtcttgattagtagagagtagagacccatgtgagagctccttatttctgatgcatttcctaaaatagagatctaagtgcactctttgcctcatttatcatgctatatccaagatcaaataatccttgatggtaaaaatggtttacaattatctaattgacaatatgagtatcaaagtccacatttctgtgtgccttaatatgttatgtctgggtttacatatttttcaaggagttttttattcttggtaagacttatgttcaattccttactgaaagatgctgaaggctctatttattattcaaaagacacaagtttctgctcagctaagtctcaaaataacaatatcatagagtctcaattgccgtagcagtcaaagatactttcattttattttcggaccaaccttcaagatattatgatttaatataagatataattggcatatcatg

SEQ ID NO: 102030 - DNA, 353 bp, Glycine max
tcagcatcaaagccgtgtgctaagtgcgagatcagtgtgctaagcgcagtaggtgccttcagccaggctaactcgagattggcactaagccttaatccacttactcacgctaaacgcgagagtggcgctaagcgcaacgtcacaattttagagcctatttaaagcttgtcttgagcagaattagggtacacttttgacagcttctacagaacagccagggcacagaattccacaacaaccatagtgcctatttggggaaaagagccctagaagcaaagagaaggagcagctttcattgaagcctacgttttgtcatttgagaggattatcgagtagagagtgagtgtgagatg

SEQ ID NO: 102031 - DNA, 441 bp, Glycine max
  unsure (1)..(441): unsure at all n locations
tccttggggccatttcctgcgagaacaatctattataagttatttntacaagataatgcttatcttaacgcanaaaatgtcatgctaatccctctaattntagaacgaactcatgtaacctatttatgcacacgcgtatgtgtggaatatcctactatttaggtcaacatagaggccatccaacacattctaattgccatacatatatatgcatttgaaaagaacatacattctcacgcccaaggcattgtgtcaaaactcacacttaattatatcctaaacatttgctattacaaactaactacacacatttggaatatatatcatacaaattttattgtttctgcatatgggaaagctaattacatcctgcacacacttgcattcaaaagagaattccatgctatcatacatccatttaggaaaataatcattcacact

SEQ ID NO: 102032 - DNA, 397 bp, Glycine max
tttttaagcgaaggcatttgacttgatcccatgttttactaaagtgaacaaaaatcggtgcgactccaactcccacatctatcatgggtggaatggatgaatgcatgaagaaatgcatatgacacagatgcaatttacaaatacgggagcccgggaaattgtctccttcttagatacaacgtcttggggtagcaaagcgcccaacgtatgtattaaagaaggcgacacggaccctctgttggtttgttaaagagaggggatcaagacagaacccgtgcatgatgatatgcgatagacgcaacacgggaatgtacatagtatgacaatattcacaaaatataagcaaaagggtacatgacacttatgcatggcagtgtgaaaaaatggcacgcagcgt

SEQ ID NO: 102033 - DNA, 442 bp, Glycine max
  unsure (1)..(442): unsure at all n locations
taatcttgtctaatagatganaagaaagacttgtaatctcatctcttcgntgtgttnttggttcttttgaggtaagtacaagttgagctttctcttattgcatgaataataatgaaccatgggtagattttatgaccttaagctcatgcttcttgatcttggataaattgtgaatactccaaaacacttggntgtattaattaattgattgagttttgatgtttggatttctcttggatttttcccttttcatgttcttgaaattagggatttagagattagagattgaatatttaattgtatttaaaatcaattaggaacatgtaaagtgtaacacctcaatttatggactttagtcattaataaggtagagatatttttatggcatagcctttatgattaatggttaaaggatacccttangcattattaataataatac

SEQ ID NO: 102034 - DNA, 389 bp, Glycine max
  unsure (1)..(389): unsure at all n locations
ggatggttcaccttgatctctgttgaatagatttctagggtggntcctccattgtctctgctgttgattaattcctagccatgttggaatccagaaaatccttctacattgaaattgttcctgggctaatttcccatgtaattgacttcatgagtggggggttcttcaataggaatgcagcatctagattcatgagatcctccacaaatggtacatcctacaacctgcaaaacagaagcatgtgaagtatgtgcagaatgaatttgagttggcaacttagtgtttcagtcaggtttccaattgcttagacaacaatttttttgtgctaacaatgcatcttgggaggtcaactcanataaactctttntggtgggaatgtgagccctatc

SEQ ID NO: 102035 - DNA, 447 bp, Glycine max
  unsure (1)..(447): unsure at all n locations
tactcagcttaacatcagaccacttccagggtgctggttctacttcacatggactngatggngcctatgcaagttgaaagccttggaggaaagaggtatgcctatgttgttgtggatgatttctccagatttacctgggtctactttatcagagaaaaatcagacacctttgaagtattcaaggagttgagtctaagacttcaaagagaaaaagactgtgtcatcaagagaatcangagtgaccatggcagagagtttgaaaacagcaagtttactgaatactgcacatctgaaggcatcattcatgagttctctgcagccattacaccacaacaaaatggcatagttgaaaggaaaaacaggactttgcaagaggctgctagggtcatgcttcatgccaaagaacttccctataatctctgggctgaagccatgaacacagcatgc

SEQ ID NO: 102036 - DNA, 423 bp, Glycine max
  unsure (1)..(423): unsure at all n locations
cccccccctctcctcctatgtgtatttgttttttgttgtatacctctttnnnggcgcgcatgaagaattgagacttttatatatgtatttttcgaaatcagtcactggtaatcgattaccattaaggcgcactcgattacacatcaatagatgtgactcttcattntgaattttgagaatcttaatgttttaaaacactggtaatcgattactaccttctggtaatcgattaccacagagtaaaactctttggtaatgattttgtgaaaacttcttgcgctactcaatgttttgaaaaacttttttgatacttatcttgattgagtcttctcttgattcttgaatcttggtgttgaatcttgaactaattattcttgaatactgaacttgattcttgaatctttctttgaactttgctaactc

SEQ ID NO: 102037 - DNA, 435 bp, Glycine max
  unsure (1)..(435): unsure at all n locations
cttgcggatttggtcttcgctggcgaaatgttcgtagtgngtctataaagaggcaaatctgatcatcatgctttgataaatgcaaaaaaaactggggcaaatgaagaggatgaaaatgacggagaaacccatgttgtggctgccattcctatatggacaagttttccaccaacctaacaatgtcattactcagcaaataacaacacatctccttacccaccacccagatatccacaaaggccatccctaaattaaaccacaaaacccacctaccacacgaccaatgctaaacaccacctttagcacagaccataacaccaaccaaaaagggagtttgcagcataaagcctgtaggattcaccccagaattctggtgtcatatgctaacttgctcccatatctactcgacaattcaatggttgccataacccttgt

SEQ ID NO: 102038 - DNA, 184 bp, Glycine max
atatattttttctttatttagtcgttatataacatatctatatatttaactttataacgcacacaatggacatcttacccatatattctaccaatttataaaccccgcgggctttctctttttctctttcttaaaaaaatcatcagaatgtcgagcatttccctctaaattaacatgcagatca

SEQ ID NO: 102039 - DNA, 441 bp, Glycine max
  unsure (1)..(441): unsure at all n locations
ngtcagttgtcatctnagattaatcagtactatctatatgtcttactacgngcacaatatccagaaagagtagcgcttgatgttatcatgaggccaaacaagttaaaaaattaaatatatttatcttccaaactcagtgagtcgtatcattgcaagatacggagttttgtgtcatattttggaaccttttacttttccattcatgaatagaacttggatctatcatgatgtctgtgttctacacaatgttgatgagcctaccgtgcgaagttggaatgggtgtaatgttgtagatcaaattctgaagcttgttcctaatgtagaggtatttctaggatgtttcttctgattgcattaacccttccatttcataatatttactgttcacctaatacttctacactctatgttttatggcttatagcaccttctcacaacact

SEQ ID NO: 102040 - DNA, 349 bp, Glycine max
  unsure (1)..(349): unsure at all n locations
accacattaagatatcaaaatatgaacttcttggaaaacttcctcctctaagtaatgatctaactccgctttcatagttgaggttcttgcccttttctttctttcaatgtatctatcctaatcacacaatttactctttccatcactaaccacatgttgtgattcaaaagaacttaaaaaatcgtgatgctttttggcttgatattncgaaccaaatcataacacaagtttcagatccctataacttgtgaaaaaaaatcaatgggataaattgattcaagcaaaactcaagcacttcattttgatcttgatctaagcagtacaactccatgacacatgaaacactcca

SEQ ID NO: 102041 - DNA, 440 bp, Glycine max
  unsure (1)..(440): unsure at all n locations
actaagcttgtgaaataatggaatcctagattccatttgacacaagtcgttcaattctattcttagaaatatgacctaagcgtttgtgccataatgctcctgagtttgtattatcaattctacgcttagtaccacacaattctgcattaaaggatttaccatangaagctacagtatcaagtaaatatagattatcattaaccacgagtgaaccagttccaacaatatatgaattaaaagacatcttgaacacgttgtttccaaatgaacacaaataacccaatttgtccaaataagaaactgaaaccaaatttcatctaaatgacggtacaacaaaagtgtctttcaaatccaaataaaaatcagtacataataataatctaaagtgccatatagcttccacttctaccaatntaccatcttcaacatagaattcatct

SEQ ID NO: 102042 - DNA, 367 bp, Glycine max
atatacaattgtttgttgcttgcttgaatcttgatttcaggtattgtattgtcatcatcaaaaagggggagacgcacccgcaattggctttgatgttttgatgatgatcatgatgatgtgttgcaattgatgcaaatgggcttttcaagattaaaattcaagacaatacttcaagattacaagtcacaacatcaagatgatcactacaatattaggaagggaattcctaattgaattagcaaaggtttggccaagtgatttaaaataaaaagtgtttttcaaagggtttactcttggtgatcgattaccagaggatgtaatcgattaccagtggccaaatacgttttattacagctataaaaaattg

SEQ ID NO: 102043 - DNA, 434 bp, Glycine max
  unsure (1)..(434): unsure at all n locations
ggtagaatggctagacatgatacatgtcagggtttggnttggttcaaggataaaaaggatgtcccacattatttccatgacacaaatgcaaaaatgatgatttggaaactttatgcaaaactggtcatgcatgcacctatgtggacactcaagtgtcaaaattttatggtcatgtgatgctaaggctcangattcatttcctctattttaaatcaacccaatggtttcaaaatatgttcttttatccatttgtgcattcatccgagtccatttcgggcgtccgggacaattttcacagcgttcacccttcaggtgtatacacatttttcttcaaaaattggttatgatcaatgaattttttcaaagaaaaattggaagtcatctcttttcaaaagcatgttggttnttcagctagacaacttatttttcttttt

SEQ ID NO: 102044 - DNA, 250 bp, Glycine max
ttagggtttaaaggagaaagatgatggaaaatattttgtaccttgctaatacccctgtcaccaattcagttagaagatatcaacctatttcataccttgtacatgacggtgctcaaggtggcattgtcgtcagtccggatgtattgtttttgaattattatggccaatagtcacaagagtaggagaaggtatggtcttgtttttcgatcaaaaaatataataagtagagggctttaatggaacaatgtgc

SEQ ID NO: 102045 - DNA, 364 bp, Glycine max
ttcataaatggccacgtcatgaattagacatccatatgtccggcgattgactaaagcctaaaagacacttattgcctatatgacgaagtcgatgtcaaaccaaaaacattctgttattcttgaagagtacaatgccaatagtggacgaccatcacattattatacaatacaagaaatgcattaccgttctttcattagaggaagtgatactaaaatgcaacatctaatgaagcttcttgaaagggatcattatattcattggcacagattaaaggatgaatacgtgggtcgtgatatcttttggtgtcatcctgaagcaatgaaacttgtcaacacatgcaatttggcgtttttgattgacagg

SEQ ID NO: 102046 - DNA, 436 bp, Glycine max
  unsure (1)..(436): unsure at all n locations
agtcaaaaaccttgagaaactaaaagaaaaggaaatgactagtacacatttagttattgatgcataaaaccccagaattcaccacattttgaaccaaaaacaaagaaaatggaaaacaagcctatttgaaatcaacagttttggggattaaacattgcagatataaaatattaaaagcatatatatggacccataaaatattaaaacaagcttattattaattgacactatttacatgtaccctaccgctaataaaatactttctatagaaattaataaagattcaaaattaaaatattgccagatcctcattactaggaggggcataagttacctcttggaggatcaaacatttgcatactaacatttcgactagccttgaggaagaaacagaaacgacacanaacaaattactagtngatgcactggtattgac

SEQ ID NO: 102047 - DNA, 284 bp, Glycine max
  unsure (1)..(284): unsure at all n locations
tacagatctttgattcaaggccagttgggttaccaagttaaccaatgcatccagtttggctccacgctctctactctcagatgatgcagctgagttggtagctacctcatgcactcctctaatgactatggcatcatttctagcgctaaactgctgggagttggaagccatcttctcaattaaattcctggcttcagcaggagttatgtttcctagggctccaccaccggcagcatctatcatacttttntccatattactggagccttcataaaaatattgag

SEQ ID NO: 102048 - DNA, 405 bp, Glycine max
  unsure (1)..(405): unsure at all n locations
aatgaattaatgtgcttgacatgggatatgttatggtatgtcgatataatgtgaattttggtctggtgtcgctgaagcaaaacataagctttatcccccttaatagtcaaccttggatagatagcttaactcaatgcatcaaaatatatgcacactacatgaaaacctggatttaactaccacaatttacccatgattttaaaaacacaatgtaagcataatgttttgnagggttatttaatcgtaggtacttaccaatgggtcatgtcaaaattgtaggtagtttactagtagttttgtataattggggctacttttaattgttttttgcccttgcctttcgtagtgaatatataataatagtaataaaaaacttcaattttcgtttcccctgtgactttcatt

SEQ ID NO: 102049 - DNA, 332 bp, Glycine max
  unsure (1)..(332): unsure at all n locations
ggtatgtacacatttctgttttagttgtatatacaataagtcttttaaggaaaaatatcctagtaataaaacatatttttagaaaaaaaatagtttgaaccacataatttttttaaatattctcgagaatttaaaaagacatatccaactaactttaataggtaaatacatattttttaaagatactcanaaatatccatttcatctaatatttctggaaatattattttcaggaatccgatataaagttctgagaacaaaaactacctaaaattggatcaatgaccttntaatagtggcatgtgtacgtgatcgagtatatattaacatca

SEQ ID NO: 102050 - DNA, 435 bp, Glycine max
  unsure (1)..(435): unsure at all n locations
caataacaccactagcattatatatttcaagcaccacattttcttactgtaactcacaaaactcaaacagaagagaagaagagaatgcttatttggtggatattctaggtgcaaactgccgtatttaaacgcaaagggaagaggatggcttcccttattacgttcaaaaaaaattaaagcatgttctgaaaccctgaaaatatcaaccatggtcaatnttttcttcattatttttgcaaaccctatacttgagccctagcaaaaagtacaaagccatgcatgaacccctatactgaacctaccctcatgcatgttactgttgcactgcacgggttgtatctcgtcagtatcactggcagaaccaatggaccaaggccatcctgcaacctcgactggcggaaccaacttaaagtgatctcaccagtttgactggcg

SEQ ID NO: 102051 - DNA, 239 bp, Glycine max
gcctcccgttatgatcttgattgatgattcctctagacaatatgcgggtgaaatatcagtagatgcgcagatcttgttatagacccctcccattcgtcccaagcttcacgatgagggctgaatccaacacgctccggcgctcctttcttagcgcattttggagaatatctctctaaataccatgctagtgatgcatgttttcctggatgatacgatagttttaatgctacggtgagctc

SEQ ID NO: 102052 - DNA, 206 bp, Glycine max
tgccaatacttaccctctgtagcggaatgaatctaacggagatacttcttctcacacacggtatgatggtacactttccatcacagatatcgcatgtactaaaatacggcaacctcccctatcaaccagtgcgagagtcgctcaaggaaagagggcatgttcccactcaaacaattggatagattcttaaaggtctattactactg

SEQ ID NO: 102053 - DNA, 434 bp, Glycine max
  unsure (1)..(434): unsure at all n locations
tactaagcttgcatagttanccgtttcatgtatagacgtgagcatancgcttatttattttgntgnagccgtatctctgagaaccatacgaagcttctttgttttggtgtggtagaaactttttgttgcaccaacaagcgtgatcgatagagaggcctctaagtgacgcacagaagaaccaactgggagctcactattggtgaggggagtttattataatatttaccgttttgaaaccatagttctggtcagggaacctagctacgagaatatgtgtgtgctcctattgcatgctgattttcctttatagaaaacaacctttttacctaatgggatgcgatataattggtattgatgtgcatgctggatatcacgagngacaatagttttgacgaatgggatgagatatatttattgatggtgaatgaaattat

SEQ ID NO: 102054 - DNA, 314 bp, Glycine max
  unsure (1)..(314): unsure at all n locations
gtgggcctgattgctatttgcacccncctgtttactaaatacacccccttgcctttttttactgattcttttccataatgttacggaaacttacgaattacgtaacgatacttgttttctttccgtaatgttatggaaccttgcggattgcgtaatcacccccttttttgccttccggaatgttacggaactttacggattgcgaactaacacttccttttaacttccggcatgtcacggaacttcacggattgtgctacaatgctttcttttgacttttggcatgtccggaacttcacgaattgcctaacgat

SEQ ID NO: 102055 - DNA, 440 bp, Glycine max
  unsure (1)..(440): unsure at all n locations
ngaagtgaganagtgtggaagagtcagtcttcctactcttatttgttgaccacacagtggtacctggagatatgtcgcgggggtcaggagaccttgcggacgttaggtggggtgctattgcctaaaaccaagcttgaccaatcccgacccaacccgggcatagtcagtcagtgagaacctgtgatgtacctaaacaggcgagctcctggcagtctaccaataaaagaacaaagaccacaaactaaggaggcttgtgtggtggctggccagctatggatcttgagtgatatctggaatatggcttctggtaattgattaccaacggtgtgtaatcgattacaaggcttaaaaatgaagacaattagttgagatggcctctggtaatcgattaccaaggagtgtaaccgattatcaggcttataaatggaaatgggatgttg

SEQ ID NO: 102056 - DNA, 379 bp, Glycine max
ctcaagctggtggaagaatgtggaaaccactgatatattctggacagtgtgtaaccttctttaaccgcacggaagaggacggaaaggagaacatgagtgtccacactcctacaatgtgtggagcatactagagaattaatatccaccctatgataccagtaatctccatcattcattggggatgtggagtaatataaatgagggtcggagtctttattcctaaccatccgagacaaagagtgaattcacttcttttagtaagaacaagcctctttgatagaaaagagtaatatctcggaaaggctctatccctcagcttgagtgagcccccatagaagggagtcaattttgaatcacatccttgtaaccctactatcat

SEQ ID NO: 102057 - DNA, 320 bp, Glycine max
tccgactcccaacacgaatcgaccgggcggtaatttcaacacgacaaggaacttcccttcgagggcttcccggaattcaccccgctcccaatgacgtacgaagatcttctaccatccctcatcgccaatcatttggccgtggtaactcccggaagggtcctcgaaccccctttcccgaagtggtatgaccctaacgcaacttgcaagtaccatgggggtgtgccggcgcattccgacaaataatgctttggccctaaatacacgtccaacattaatggatgccgatggctgctttccaaaaggacagtccatgtgagaac

SEQ ID NO: 102058 - DNA, 252 bp, Glycine max
  unsure (1)..(252): unsure at all n locations
atgatcaatgcnatgctggcacaaattatctcaataaaaccaccactcaagtgaagaccataattgaagatttggcgtctagtgagagaaccgtagaaacaaaccaggcaaatccctcacacggtatgtctgaacttaatgcttacgataaccttctagctcttgaagaaaagatgcaagtgccaatagaagaaatgactaatgcaattcaacaaatttcgcaacaaccccaataaggttcatgtgtggaga

SEQ ID NO: 102059 - DNA, 424 bp, Glycine max
  unsure (1)..(424): unsure at all n locations
ngaagtgatctattctgatgtgtgtggtccttttgaagtgattttcctangaggtaatagttactttgtgtcattcattgatgaatttactagaaaaatgtggatctatctcattaagcagaaaagtgaagtgtttaacatttttaagaagtttaagttgttgagtgaaaaacaaagtgataaggtaatcaatgtgcttagaacagatggaggtggtgagtataactcacatgaatttcaagtattttgtgataaagaggggataattcatgaagtgacatctccctatacacctcagcataatggtgttgctgagagaagaaacataaccattttgaacatggccaggagcatgatgaaagggaagggaatgcctcattatttttggggagaggcaacttctactgctgtgtatattctgaac

SEQ ID NO: 102060 - DNA, 61 bp, Glycine max
atttagtcggtattatacttattacgcgtagtaccacgtgttatgtgcacaaaactcctta

SEQ ID NO: 102061 - DNA, 458 bp, Glycine max
  unsure (1)..(458): unsure at all n locations
agtcacctgangctgcagctttattagcaagatcatacaaagtgttttatctaacccaacggggcctaattatatgggcgatcaaatcccttatgtgtggacaatatattgattaacccgtgaactttctctaaggctgaacacaaccttagcgattggccttatgctttcggctagtaatgcgcgggaaggccttgacttccattaaaggcgaagcgaacctatccatccacatggtcgcttcttgatgcaatgaatcaatcacccttccttttgctttccttctcgcgtatgcttgtgcaaagtcctctactaatgtttggtcatgggtcaaagaatggctttactcttctttgtactgccctattatagctagcatgctttgctccatggcttctagcgttgggcaaactcctatcggacttgagcagcagttacttctctttagacatgcatgt

SEQ ID NO: 102062 - DNA, 152 bp, Glycine max
atcaccgcagctgcagctgctctaattacaggatgttgtattatgtatgagttgttgcattctgtttaagagaatgcccatgtaaactaactttcaatgtgccttcgcagaatggctcagagcttgcctcaaaggccaggaggacaggcacc

SEQ ID NO: 102063 - DNA, 261 bp, Glycine max
  unsure (1)..(261): unsure at all n locations
ctaatttctctacaattgcatcacctctcattatcttgtgaggaagaatgtggcatttacctgnggtgaaaaacaagagcaagcctttgctttgctcagagaccagcttattgaggcacttgctctagctattcctgacttttctaagactatcgagctataatgtgatgccttctggagtgcgagctggagctgtattgntacaatgagggcaccctatgcttattcttgtgaaaaacttcataatgccacccataacta

SEQ ID NO: 102064 - DNA, 443 bp, Glycine max
agcttgtatgagtactgagaaagattaagatattgtgtgcaagctgtcctcaccaccagatttctgagcaactccttcaatatttctatgagggacttatcaacatggagaggagtatgattgatgctgccaatggtggagctcttggtgatatgacccctgttgaggctaggaatttgattgagaagatgacttccaactcccaacaattcattgcaagaaatgatgctattgttcttagaggagtccatgagatggccacgaattcatcttcatctactgaaaataaaaagcttgaaggaaaacttgatgccttggtcacctgtgaactcagctttccatgaataaaaaatctacacctgttgcaagtgtctgtggtctatgttcttatgcagatcaccatacagatctttgtccttccttacagcaatctggagtcaatg

SEQ ID NO: 102065 - DNA, 257 bp, Glycine max
cacacacacgctttttcctagtcgagcactctcataaattcccattctcctccttcgcgtatgaatatatgctcctatgacaactaagctgattactcatgagagttcttgatttaaaccctatttctctccccccttggcatcaagcaaaagccacagtgcgcaacaaaggtgaagcatgcacggaccacgaagcatccatacgatactcatgggacaatttagaccaaatcctgaagcaagaaacatgaagcaag

SEQ ID NO: 102066 - DNA, 378 bp, Glycine max
agcttacaaatacaactcttatttataagtcttatgttcattggatataacggagaatcatacagtacattgaacaagatcacatgattctaaaacactactacttttttttgccacttctttgctatttgttcacgggcttaactgttctcgcgggttgttcatggaggtagggcttaattagatatttatttccttggcatatatttacttttggttgactagatcctgtaacgctgaactaattgatttgttcatggctcgctatgatacttcggttctcttaattctagacgtggtcatattatgtagtacttctttattttatgcttatacattttagtactagggaaaaaatctactatatagtaggaactt

SEQ ID NO: 102067 - DNA, 423 bp, Glycine max
  unsure (1)..(423): unsure at all n locations
agctntatttgcaagagagtntaccgaccgttttttattttattatttttcacgtgacgacctaaaatgatggctggtcacttttattcttgaaagagcacaatattttataggctatgcgtgatcagaaagaaatgactcctaatagagttgtgaactggccatttatgactatatagagaggatttttcttctgaacttaattactgcgaaaaagagaaagaaacgaataagaaaaagaaaaagaaatttcccatggtttttgttatttaaatcattactattaaaccagtcatcatttagggacgccacacagattctcttccatattcttcccactcgctaaacgagctgagtgtcttgcttaactgatgttactcactaagcgcatctgcctcgcctagcgagacaccaccttcttca

SEQ ID NO: 102068 - DNA, 433 bp, Glycine max
  unsure (1)..(433): unsure at all n locations
ngcttgaagagcttcttgagtcttattctgttatgaagaatatgactgacgctatagaaatgtcaaagaactgtatacaggtgttggagctttgtgtcaagtgtaacagtcacatttttgaaggtcagttttattctgcattgaaaactttggatttagttgagaaaagttgcacgcataatattcctgcaaaggctatcanaatgctcatagagagtagaattcctgttataaaattgcacattgagaagaaagtatgcagtgaagttaatgaatggatggtcgagataaggagttctgctaaaaatattgnggaaacagcaattggtcatgctgtgacagttcgtcaaagggacaaggaaatgctataacagcagaggaatgctgaggagcaaagtatttcacgactaggggatctagcttatactttgga

SEQ ID NO: 102069 - DNA, 365 bp, Glycine max
  unsure (1)..(365): unsure at all n locations
gcacctggagatatgtcgcggcggtcaagagaccttgcggacgtcaggtggggtgctattgcccaaaaccaagcttgaccaatcccgacccaacccgggcatagtcggtcagcgagaacctgtgatgtacctaagcacgcgagctcctggcagtcaacagataaaaggaaaacaagaccacatagcaaggaggcttgtggtggctggccacctgtgaatcttgtgtaatatgtgagatatggcctctggtaatcgattaccaagggtgggtaatcgattacaaggcttanaaatgaagacaggcggctaagatggtctctggtaatcgattaccagaggatgtaatcgactaccatgcttgaaaa

SEQ ID NO: 102070 - DNA, 405 bp, Glycine max
  unsure (1)..(405): unsure at all n locations
agcttgccgcccaactcgcccaggttatcattgttgcttcctccaaaagcaacaaccttctggaggaatcttctggagggcccaagtgggcctggttgctatttcacccccctgtttactaaatgcaccccccctctccattnttttgtaattctttttccgtaacggtacgaaactttacgaatttcgtaacgatactttattttcttccgcaaggttacgaatccttaaggattatgtatttactctttcttagctttcgaaaaagatacggaaactcacggattgcgcaaaaacacctctttttgatttccgccacactactgaatttcacgaatcacgcaagcctgcttcctttctattattgagacgtctcgggacttcatnttttgcatgtcatcaagt

SEQ ID NO: 102071 - DNA, 478 bp, Glycine max
  unsure (1)..(478): unsure at all n locations
cgcttaagaagattcctaaagaagctagagcttagctacacacacttctctaatagctaagctcacctncttgagatgagaagctagagcttagctacaccccccctataatagctaagctcacccctatgccaaaaaacatgaaaataccaaaaaagtccttactacaaagactactcaaactgccctaaaatacaaggctaaaaccccatattactagaatggccaaaatacaaggcccaaacgaaggaaaaacctattctaatatttacaaagagaagcagactcatacttagcccatgggcttgaaatctaccctaaggctcatgagaaccctanggccttcccttggatctctggcatagtctacttggagtcttctatccaatgcccttgcggggtaggattgcatcacctaaggccttctcgtgcatctctgtgccaatcttcttggagtcttctatcttatgccattgcg

SEQ ID NO: 102072 - DNA, 443 bp, Glycine max
  unsure (1)..(443): unsure at all n locations
agctngngactctnnggtaattctttaaatttttcacttttaaagnngagactttngaaaaaatcttcagaaacaagtcacttgaagaattgtgacttttggaaatgtatttttcgaaatcagtcactggtaatcgattaccattaaggtgtaatcgattacacatcaacagatatgactcttcattttaaattttgaaaatcaaaacatttagaagctttggtaatcgattacaaaagttaaaaatgtttaaacacaagttgtaactcctgaaatttgaaatcttaacattttaaaacactggtaattgattactaccttctggtaatcgattactagagagtaaaactctctggtaatgattttgtgaaaacttcttgtgctactcaatgttttgaaaaacttttagaacttatctttattgagtcctctcttgttcttga

SEQ ID NO: 102073 - DNA, 506 bp, Glycine max
  unsure (1)..(506): unsure at all n locations
gctcctaaggcacatagatgcacataaaaatacaaaaccacaatgttttcattatgttgnggagtaatttttaaaatcaggattgacccgaccggtttgaccgtgacttggtgggttggatttgctgtcaagtcagtcatgcaattggtctgggatgaccaagtgcaatccaaccaattttgcaattaaatcgacaacccattgattcaagttggatcatgtcccaagagagaaaatgacaaattggctaatgtggcgggcttgttggacaagtggcctcaataccttaagagggggtgaattaagttctaaaaatttcctactaaattttttttgttcccttctaaatgatatatgatagacttagaatgcaggaaaagaagaagtaatcaattcaataatgttcttttaaatgcacaagacaaagtgaactgcaataaaataacctacataagggaatagagaaatgcannactcgattatactggtttggcactctcctgctg

SEQ ID NO: 102074 - DNA, 334 bp, Glycine max
  unsure (1)..(334): unsure at all n locations
agcttataaagcattgattngatactggttctttcatcatgtggctgatgacgttcacaaattaatgatcctttgctaccctgcaatgagacacacacagatacacaaacacacacacatagagacaaacacatgcagacacaaacacaaacaaaaacacacacacacacaactgttgatgtccttgtatgtttgtgtacgtcatgaatgttcttgtatgtcatgaatgttgctatacgtgctgaatgtaatttgctatataaataactgttgttcatgctgagtgaaccgtaaaatcccattcgagactgaatgcaatgattcttgcggatag

SEQ ID NO: 102075 - DNA, 402 bp, Glycine max
  unsure (1)..(402): unsure at all n locations
cctcaggagtgcaaatctggaataagtacacaagttcttcccctcttccagcactacaggggtgtttagaaatgtattaagagtatcttcatcgaatttcactaagtgacctctcaccctcacctgcttaggtgatttatcctccgggtcatagaggttcgcataaaattccttcacaatagcaatgtctatgctactgtcagcaaaatcggtcaacttctcgtcccaatgtcttctctcgagttcctccttgaactcctcacactcggtgtaataaaccaccacattcctctccggtagcagcttncgaggcatcgcaatgtctgtatacctctcccaagcctcttaagatgtgaacctgcatctatcacatttggcctgngtaggtgtcgcaacctaccc

SEQ ID NO: 102076 - DNA, 52 bp, Glycine max
agctgggtgttggatcatagtggcctcgaaaatttaagaagggggggggggg

SEQ ID NO: 102077 - DNA, 451 bp, Glycine max
atgctcggccctcaattgcctaaggtggcaatcgattacaggctcatacagagacgaaggctgtatgtgttcgaacaaataattgatggcctaagtaggtaagtaattattggattacccagagagctcatatatgtgcctcagcttgaaatactcaattacaaaatatcctaattgattatcatgcatgctaaaacatatttttccatatttaaacatgctcaaatgatttttatgaatgatgaatgttcaagaatgcaaatcacatgtacaaacaaccaatcgaacaaatgtaaatgcatatgtacatgattgactactccctaattggctgaagtaagatcagactcacttagaatgctaagttcattacagaggtggaagaacctactcctcgctacacgttagtgaatatatatgcctagatggagatttgatcaacaaactctat

SEQ ID NO: 102078 - DNA, 372 bp, Glycine max
  unsure (1)..(372): unsure at all n locations
agctttatgaacaaactctnttctctctctttctctcaaccaancntcaatcctcttcttttcacttttggtcttcctttttcttgcacaaattgtgaggcttttccactaatgatgatcatggaaggctaaacactccatccattgaaggatccacttccagcaagactaaatttgagttatggtctagtatttttaataagtgggaatggtcaactttctcttcaatcctattttcaaattttcatgattatgaatgggcttaagattgaaaatgaattagtttagggattaatttcctaacttcactttaatcacatattatttagacgtattctcaccctattctttatctaaatgaatttcgggatt

SEQ ID NO: 102079 - DNA, 452 bp, Glycine max
  unsure (1)..(452): unsure at all n locations
taagtcaccgcggctgcagcttctaagtaagttttctcaagaaagcttcttcaatgaagctacctagtctataaatagaaacatgtgtaacacttgttgaactttgatgaatgagagtcttgtgagacacaactcaaagttcaacttctcttccttttcttcccttcaatttcgtgctccccctctctctttggtctccctctttcttttcctccattgaagaatcctctccaagcttcttatccaaggctcatcttggtggtgaagctccttcttgcatggcttattccttagtggatggtgcctcatctcacctcttctcctttgtcttccgctgcatctccatggtggaaaatcaccattaatggacctcattgaagctcanagatccagcctccatagaagccccacaagcaagcttccatcaagtggaatcagagcacaagagctta

SEQ ID NO: 102080 - DNA, 416 bp, Glycine max
  unsure (1)..(416): unsure at all n locations
taagctcacactactaatgactcccacttctggctctacaacacaagctctatattttatgtttgttacaacccaacatttttgtcctaccaggccattattggctcttgataaatcgttattggattgtgtttgaactctaactgttgtaccattttattttgttttagcttaatttctttattaaagcttatgggtatgtgttaagtgtgaacaattgagcaagaaagttgttaaactgagaaaagagctaaaagagaagagaaaagatgaagttcaaagcatcttcaaagaacacagcctgtgttgcacctgcacgtcatgcaattctaacatggtcgtgctgactttntagaaatttctcaataaccatcacgcatatgagcacggtagtgctactgatagcacgacccatg

SEQ ID NO: 102081 - DNA, 385 bp, Glycine max
  unsure (1)..(385): unsure at all n locations
cagctgcagcttgatacataatttctgaatgtgaatgtttttttttacagngtcttttttactaaggggagataagtgaacaaatctatgttactttcgcaaggtatttggattggaatgttgtttggaacattagttcaaaccgtaatgcttattacaatcacatttaaaactgaatgggacaaacacgtaatcgatgttctggtggctctatatatgattgcgaaattaattttccatgtttcagggaattaagctgcttaaattatatatgaatgttgcaggtagagatagctcgaaatcgtgttaacaaatgggctgtgacgacggagaaagaataatcatacagtttatcaagcatatttagctaggcatttgagatttt

SEQ ID NO: 102082 - DNA, 445 bp, Glycine max
  unsure (1)..(445): unsure at all n locations
atgagncaacaccaaaataactgtagcttgagacattgcataacaccatacggcagctctcatgtagtcaatcacgatcaacaacgctgcatagtctggaatgaatctggtgctatgaagagcaataccatgatacatcgctcccattccatgttctctaacaccaaatctaacattgcgctctttgatattattctttaggaaacctccatatgatctcaacgccgtcatgacggaagacgcaagatctgcactgccttcaagactaccaggtaaaaccttaagaacggcatccagactttccttagacaaatctcttgcaacatcagcctgcgtctctggagagtactgccgaagtgcttatgcccaaccactaggaaatctaccagtaataataaccctcaactctacaactctaaacacatggaatggctcgtgtagtcat

SEQ ID NO: 102083 - DNA, 382 bp, Glycine max
  unsure (1)..(382): unsure at all n locations
gcttgcgnagcatgaacaaagtgaggcttaattgagcttagtaagtattttacatatgatttatgataccactagaattggtttgtgtgttcatgatgagcaagggggatnggtttaatcaatgacattgtggatacaaccatgcatggacgttcaagaaagtgaaacatggggtttattaatgacatcattatgtagctacaatatatttgagtcatgtagtgtttaaattatactgtaaaatgatagttggtgagataaatactgcatgtggggacagacaaaattgaaaaatattgtcgttgaatgtagaaatattttagttgctcattcattctatggaataagattcgctagaggtttactgctaatggagctgctc

SEQ ID NO: 102084 - DNA, 218 bp, Glycine max
  unsure (1)..(218): unsure at all n locations
actaagctcgttaattngataatattcaatctcatagtatattagagtaattgttattatttaacctttcactctnttcttgttattacatcgtatctagtagttttcaagtacattaatttatacttgtgatgtttcttttgctcatgaacagtatggcttgcagaagacaatgttgctaaaagatcatatgttataaaccaggtaagtgtggaatc

SEQ ID NO: 102085 - DNA, 436 bp, Glycine max
  unsure (1)..(436): unsure at all n locations
agcttgacctcgatcctccgtgccgcgttctcttcgttatcgtcatcttcttcctccgcgttgggagactgtgttctgcgatcatggtggtcgttggtgttgagtatcccactcattttgagggtggtgttctccctccgtgtcgacattgttgaggtaagtagctcttcgtcttcgattgccagtgtttttatttaatccgtaagcgttttataggtgatccataaaaactggttagcagatatgaagattatggatcaagttgattcgtaagcttgttccggatcaacttgatccggaattagtttatggatcaacatgatccgtaaaatgtttgatggaacttacagatcaagttgacccgtaagatggtngatgacagctccggatcatctttaattttctaaattgggaaatatttaaaacatagtgagtt

SEQ ID NO: 102086 - DNA, 476 bp, Glycine max
  unsure (1)..(476): unsure at all n locations
ntgtgagtgattcttaganatcgatctctagctacaatgaacgattgttctctcttctctcatagctgcggctttgtttggctcttgagcccgggaatgatctttcagttgccggggaagaatgcaccctttcagtttatgaacatgaagaccactgttgcatccatgtttgtgcacactgttatttatggtctgtttctgatgttgctcttcgctgttcttagtatccatctttatatttaagcagcagcaaagggtatttaaagaaaacttatgtgttgctttatcttttaaagtagatcatgtaacaaccttctcttgttgatcaatatgtatgtgctcttttgaattttccacttgatcagtcttctactaaaactttcacgagtaatatgcttgtcgtttattatctaaaagtgtagtgtaattactatgcagtggagtagagagtagtatgaagagcttctcatgatgtc

SEQ ID NO: 102087 - DNA, 431 bp, Glycine max
agctctgctcttatagactcttgagatctagttttgattctgctataagagcataacctttagaaaaaccttagaaaccatttggaaaagatataactctcacaaaaggcttgaaccaattggaagagttacatcttttgattttgttcagaaactatcactggtgatcgattaccaaattagtgtaatcaattaccccaagcctttatgtgaacggatgtgactcttcacaattcaatttgaatttcaacgtttaagaccactgggatcgattaccaaaacattgtaattgattacaacattttgaaaataattggaacgttgtaatatcactctgaaatctttttgataaacacattttgctgttggtaatcgattaccagagagataaaacttcttggtgaacatattattgaaaacacccatgtgct

SEQ ID NO: 102088 - DNA, 189 bp, Glycine max
  unsure (1)..(189): unsure at all n locations
cacgtgctatgcgcatagaagcgtgctaagcgtgtatgtattgttgcaagagacacactnggcgcatgatagctcgctaagcgcacataaactctcgctaagcgcacaaagccgcgccgagcgcagaaatctctatgcatggagtcacttcacattgggcttacaacaagatagcctgctaagcacccc

SEQ ID NO: 102089 - DNA, 431 bp, Glycine max
agcttgcctgtccgatgcagaagtattgattttccgagttatgttggggaacggatacgaacccggaatgggtttatggaaagacaacggcggcatgacttacctgataaatgccaaaggaaatcgtgggaagtatggtttatgctataaacccactcacgcggatataaagagaagcatcgtgggaagaaagagcggtggtcaaagctcgcggttgaagcaagaaagtgaaggaagcccgccctgccacataagtagaagctttataagcgcgggtctgggagacgaaggtcaagtggtcgcgatatacgaagatgatgttccgagtacattggatttggtacgaccatgccctcctgatttccagctgggaatatggcgagtggaggaacgccccggcatttacgcaacgagcataatgtaaaccttta

SEQ ID NO: 102090 - DNA, 485 bp, Glycine max
  unsure (1)..(485): unsure at all n locations
gattatggggtacccatcacacgtggtactaggtgtgtggtggtctatggtgcanaacaattctccacatccacaaatcacgtataaacccaccatcccctgttgcccacctcaactgagctcacgtactcccacatagcccttatcctcgttcctctcaacgccgggtccccatcaatcctcccaatcttccacaacatcaaagtaattcaaaatccaagaatcatgaactaacacagccaagagaatagggcagaggcagataactctgcccaaaacacaaaccaacatcacaacttttcacactcaaataccccagtaatattctcttcgttccaattcgttaaccgttggatcgactcgaagattntactggacgtctctagcacataaatctacattatgaccgttgggatctgctaganaacgtgcagaacctaatctgtactactctttccacagccagcanatacacaacactttct

SEQ ID NO: 102091 - DNA, 429 bp, Glycine max
  unsure (1)..(429): unsure at all n locations
agcttataataaagatgatcttaattattttttctttgnatttaataagcaacattttaaatgatgcacttgattattatcgatggatgtgacattaacatttggcacaacaaatgcaattaaaccaatgatagtatttgcagttacagttcatattagtcaaagagtaatacttccaatagtattggacatttatcacttccctccacatttaatcaagtagtcagtaatgctaaagacataaatagtaatatatacaattgtaaatgcaatttaaaacacgttaaaattcagaattattttttcatgttattagtaatttaataatcatcatatgatttcttaaggcaaagcccacaacatacatttggtgataacagtgacactaaaatntctttagacgttgagaatgttattgactgtgaacct

SEQ ID NO: 102092 - DNA, 401 bp, Glycine max
  unsure (1)..(401): unsure at all n locations
cacatcagaaggcactgaggcttagcgtgttattatttgtttagcccatgcatgaaagatagatagattgtggggcttagcacgagatgatgcgctaagcctatgaatggaagatgaagagacacctttgcgctaagcccatgcataaaaacgaaaagactcagatgatacaagatgacactggggcttagcacgagagtgcgcgctaagcctatgtatgaggtactaataattgcaaaatttgagttaatttgatagtcaattttggttaaaatactgcaatttctttattttactgtttgttttaatgaaatactaaagaaattaatattctgtgcaattttttattagcagaatagacgactttaagggctttagagcanaattgataaacaaactat

SEQ ID NO: 102093 - DNA, 444 bp, Glycine max
agctttaactaactcacacgaacttgacgactttgaccacttctatcctagtaacaattattactatgactaaaacttaagtgtgatttaaaacacaatttcaagcggcctataatccacaagtatggaaactctaatggaaagataataaatattaactatgtaggacttcacacttagcgcaaaacccactttatgttttgatgctcttaaggattgatagtgtcctctatatatgtacggagaaaggggtttgtgaggttattttgtccaatagcggacttcaagttgttttcatgagttagtggcctacttcgtggtcgattttctctaagataaaagctgactttggtttctagagaataggaatgaattgtagctcttttcaaagttttcatcataaaactacactatagttagacaattggtcaagcattctaatat

SEQ ID NO: 102094 - DNA, 484 bp, Glycine max
  unsure (1)..(484): unsure at all n locations
cgcacatcgttcgcgtgtatgatatccactcgacaggttngtagtatatgagaccttcaatcctataacgcaacgtggcggacaaaaatgggtagttaacttgaatgaccattattgtcaatgcggaaggtattctgcgcttcactatccatgttcacacattattgcagcttgtggttacgtgatcatgaactactaccaatatatagatattgtttacaccaatgaacacatcttaaaagcatactccgcacagtggtggcctcttgggaatgaagcggcaattcctccttctgatgtggcatggacactaatccctgacccaactacaattcgtgcgaaaggtcggccaaaatcaacaaggataaggaatgagatggattgggtcgaaccatcttgaccaccgacaaaatgtagtagatgtggagctgaagggcacaatangcgccgatgccaatgcaatctgaccgtgggagtaattcat

SEQ ID NO: 102095 - DNA, 428 bp, Glycine max
  unsure (1)..(428): unsure at all n locations
agctngtatcttggaggtggggattattcttttctcttgatgcaagaaaatttttcacaactagggtcgaagagagaagactgcgctgagatgacatggattgactcaatcctttatttagaggggtatcaaagcccggaagctcagttgaacataatccaaactacaacggattcattcaaggcaaaatcctaatctgtgaggaaccctattcctgaagctggcttataagggttgtggcatatgctttttgaaaaccgtgcacaacgcgcactgttggtgctctttcctttcggggcaataatggatacgatcccagagtccgacattccattccccccagatctggaaaccttgacttggttcaatacactgcgcatcggcttaaacaaaatgatgaaatagctcgaaagcacatcagctgggct

SEQ ID NO: 102096 - DNA, 450 bp, Glycine max
  unsure (1)..(450): unsure at all n locations
cttaagcacctgggctgcagctcattctcaactgaatataggatattattttgcacaaaagagaaagcttccttacaaaatatttcatgcaggcggacctccttctataaattctgacttacaacagcctcctatctgtcttgcattcccacctagagcaattccaaaccaaaagatgaaagaagcggaaaaggagatctttgagaccttcaggaaagtagaggtgaacatacctctgctggatgccatcaagcagattccatgatatgccaagtttctaaaggagctgtgcacccacaaaaggaagttcatgggtaatgaaaggattancatgggtagaaatgtgtcaacattgataggtaaatctattcctcacattctagagaaatgctaggacccatgtancttttgtataccttgcattattgggaacaactaaattgagaatgc

SEQ ID NO: 102097 - DNA, 428 bp, Glycine max
  unsure (1)..(428): unsure at all n locations
tcgacaagcgcatccgatgacactagttgataaaacgggtagaaccgagtatcacactctcggggaacttgtgttacttggtaaagctatattccttgaatatgcgtctagccttaaaagatatgtgtagactatgatcaggtatgtagactagctatctgcatgcaagtcacgtgagtaatgatgtgtcaagacaactagacatcacgttggtgttgctattaggtgcccgattntataaagatcttgtctactcaacaatgctcatgcgttcaatggcgtcttctgacatgctcaaccttggatcctcatgatagtggagcctaatcctgatacacatcgtcctcagatctctatggtgggcatactagaccgaagcgattatgacaacatgctctactatgttttgcacccgatccttatgatat

SEQ ID NO: 102098 - DNA, 434 bp, Glycine max
  unsure (1)..(434): unsure at all n locations
agctntatgatcaaactctnttctctctnnntttctcaactattcttcattcttcttcttttcacttttgttcttcctttttcttgcacaaattntgtggcttttccactagtgatgatcatggaaggctaaacactcaatcaatngaaggatccactccaagcaagactaaaattgagttatggtctagtatttntaataggtgtgaatgttcaactttttcttcaatcctattttcaattttcatgaatatgaatgggcttaagattgaaaatgaattagtttagggattaatttcctaacttcaactttaatcacatattatttagacgatattccaacctaantttttatctaaatgaattttgggattaatttgattgaattaactctaataacattgattgaaccttcacaacttgatcattctctac

SEQ ID NO: 102099 - DNA, 475 bp, Glycine max
  unsure (1)..(475): unsure at all n locations
cacaaaaactcagctcgacttctgtgtctggaacctctcntcctcatgtgtttctacctcatcacctggncaagcacgactntatttctgctttggttggcttgccttgcactagctcgcattttcttttcaatttgagccttcacttgctcatgaagcttcttcacatactcagctttagcctgtgcgtccttatgcttaaacatagcaatggtaggcatagacaacaaatcaagaggagtcaaaggattaaatccatacactatctcaaatggtgaataattagttgtgctatggacaacccgattataagcgacctcaacatgaggcaaacatgctttccaagatgtaagatttttctttaaaacagtcctaagcagtgtgcctaaagtgctattgactacctcagttcgaccatcaatttgtgggtgacaagtagtagaaaacaacaatttagtaccaatcttaccccaca

SEQ ID NO: 102100 - DNA, 437 bp, Glycine max
  unsure (1)..(437): unsure at all n locations
agcttcagcctgatcgctaagcgatagcttattcatggttnagcgttacctattgtcgccaagcacaattccttatgaccataattgaggtccatgatgctaagcgccaatcatggcagctaagcgagattcattgcggcaatttgattgttgtgtttgctccttaataaaattttgttttaccttgagtttaataaaacaatacttatgttttcagtacttgttattttgttttaatccttgataaattaaaaaaatttcttttagtctcaactaataataacaaataaaaaaattatcaatgaacaaatacaaaatttatgaattcatcgagaatcagaaattagtgtcgatgataaaaaataaatattgtttattaggaactcaacgtaaaataataatttattagaaaacaagtccaaaatcaatatttattg

SEQ ID NO: 102101 - DNA, 509 bp, Glycine max
  unsure (1)..(509): unsure at all n locations
agcttctgcagttcagacatcatannaattcaataaattgacatgattctattgtggatattcatagatctgcaattacagagacaatatttaacaatgcttgtattattttaaaacacaaacgcaaaattggatgaaaaccaataagaacaacttcactaatttctccataaaacccaaaaatctattttagttcatcattcagaaagggagaaaggaattatgcatacatgagaagttattaaaatgatacctttggaattcaaaatataaaaaatgatgccaggtgatgtcgccatttcactcttccctgaaaattcaaatataaaaattactttatccgaaaattagttacatattcagtagatgaactacttattaatggaatacaagtaaagaaacataaatatggatacacatagatgttactgcattcaaaattagcatgattaanataaacagcanattcttaataatatntataccanaatcatgcataagctccagtc

SEQ ID NO: 102102 - DNA, 409 bp, Glycine max
  unsure (1)..(409): unsure at all n locations
gaccttaagtcacctgcggcatgcaagcttctngntgggtgaatcaatgggcggagtcattgttttaatattcacttcaaacaacctgctgcatggaatggtgctgctcttattgcacctttgtgcaggggtatctccttgaatttaaactacaactataatttttttattgcttaatccatatgtgtgtacactaaaccagtttttttgaatagcttgcggaggatatgactccacattggttggtgaagcatatgctaattggagtagccaaagttcttcccaaaactaagttagttccacaaaaggaagaggttaaagataatatatttagagatgtgaacaagagaaaactggtgggtgtaccgcattatgcttgaaatatattacagctaaacagaggaaggaa

SEQ ID NO: 102103 - DNA, 432 bp, Glycine max
  unsure (1)..(432): unsure at all n locations
gccttgaantgattgagcgcgtcctgccatggttgattctatcattaactgaacatgaagcacatgtgtgtttgaaaaacatgcaatcgacacgctctatgtctattattgaatctgcttctgaaggaaactatcattttaagaattctnttcatgtcttctatatttgacaatttgtcaatttgttccacctccagcaatagattctgctttagtcacacttttctgtggttgggcttgcacggctcgctaagatggttggtgtttgtcttcaagtgtatcaagttgctgcccggcccagagatttactgatcttgaagagaatactcgtcattcttcctgtacacctgcttctgcattgtctggtagacgctgctcaccattagctgaatcacatgggacccaacaaagatcagccatgagaaacatatc

SEQ ID NO: 102104 - DNA, 427 bp, Glycine max
  unsure (1)..(427): unsure at all n locations
agctnggactatnggatactttcgggtgtcgttctctgtataaacttctaatatttacctgtccttgttcagaaaatattgggctgggcctaatatgctccatcataaagtagggtacacccattggcatttcttgctggggctgccctgaataactttcactttaatggcaactatgatctacattatgatttgtgcagggattcgaacttttatttaataatagcattttcatttttaccccttgccacatttacctatttcataggtaacgatacaatggctttatataagggaagctaaggattctcgtggcaccaaattagtatgattggggattgacatacaaccggtcttatagctattaactatgacatgcctgagtctggagttcttacttgcacaggtaactgcggatccatatatt

SEQ ID NO: 102105 - DNA, 287 bp, Glycine max
  unsure (1)..(287): unsure at all n locations
agaaagcaaggaatggaataatcacggtgtagaaaagagctcgcttngacaaaacattggacaactttgtgtacaacaacatgaacccaacggccatgggaaggttcacccacgttttgagaaagggtataatctccgcactgctccctctggcagttataaccagaacatcctttgtgtctctcagaatcgtgtaattgaacaggatgcagaagaacatcaaaccgagagggatgattttcttcaaggtggtgatctcgattcccaaaagtttgggtttttcggcg

SEQ ID NO: 102106 - DNA, 442 bp, Glycine max
agcttatccttatggcttgcctccggacttcatctccccttgccaccccgaaagatttaagccaagcccctactttcgaggggcagctcctaccttatgacgactatcccgggcaagacgatgaggaaggagatacccatctcggtcccctgctccacctcaaagatccgtccccccatgaactaccccaaccaaacatagtctgccatatcccggcttcacccaaacccgtaaaagaatctgttcccttcctggaagataagggaaagattgaggcgcttgaagagaggttgagagcagtcgagggcctcggcaattacccattctcggatctagcggacttatgtctcgtacccaatattgtcattcctcccacgttcaaagtacccgactttgataagtacaaagggacgacatgtccaatagggcatcttctgatgta

SEQ ID NO: 102107 - DNA, 500 bp, Glycine max
  unsure (1)..(500): unsure at all n locations
actaagcttctagcccaatggacttaccttgaattaattcctatgatagcccttttgttctttgtttccctttccttggtttgaagctcactacaagccttaagtgaaaaaccatgatattaccatatccttaaggaattttggagctttggaattgttttgggaataagtgtggggggtctttgtttcattggacaacttgttttgttggctatgcttcatgatgtattttgggccatacttgatgtacattgtatattggttaaatgttggacatgctgaatgaaatgttgtctctcataggccaaagagtaaaaaacaaaaaaaattcgaaaaataaattcgaaaaaagataaagaaaagcaataaaggtgagtgaataagatcttaaatggcacaagaatgatgaaactcttggctctcctcttcatgtttaattnttatctttacttctctatattttcttaatatttntaatatgcacttattcccctttgctc

SEQ ID NO: 102108 - DNA, 438 bp, Glycine max
  unsure (1)..(438): unsure at all n locations
agctnggttntgggcaatagcaccccacctgtcgttctcaaggtctcctgacccccgcgacatatctccaggtaccactctgtggtcaacgaataaaagcaggaagtttcacccttctacacttcctcatctcaagcttgtaagattatggggtacccatcacatgtggtactaagtggcggtcgggcgatggtgcacaacaagttttccacatccacaaatcgcgcataaacccaccatcccctattgcccacctttaactgagctcacgtactcccacgtagcccatatcctcgtttctctcaacaccgggtccccatcaatcctcccaagctcccccaacatccaggtaaaacaatattcaaacagcacaaactatcacagccaagaaaatagggcaaaggcagaaaactcttgccaaacaccaaccaaatcaca

SEQ ID NO: 102109 - DNA, 305 bp, Glycine max
tggatggcgcctcctctcactgttggatcgagtggcctcacaataattaagaagggggggttgaattaattattcctaaaactttaccaattaaaaattactcttttaaagcttttacttttgttgttaagagaatatggagtagaagagaaacttaacagaaagtaaaagcgaaaattaaatccacaacggaaagcacaacagttatgaagaaagatacatacactccagagtttttatactggttctggaacaacctgtgcctacctccactccccagcgacatgcaggccttcaaatttctt

SEQ ID NO: 102110 - DNA, 435 bp, Glycine max
  unsure (1)..(435): unsure at all n locations
agcttcggctttctaattcctctactttctgattaaagatacacatccttgctatgtatccatgcctctcatgattgatgcacatgttaattaatactatataacctaacaactcttaactaagcaaaaaattgaatcaatatagcaagcaatagagcaantttaactaacaaaaaagtagctatacttaagccaatcaatttccttccagctcaatgagttccaattttgtttccattagttagtaaattatgaaacatccaacaaacattaaaatattcaactaattcactacatgacccanatattctgatgcttagaacggtaaaaaccaaacctgttgctcaaacgccaagtaaagccttctcaactactcctgtagatctctccagaacaacacgaacctacacgcacacccgagcaatcagacaagaa

SEQ ID NO: 102111 - DNA, 484 bp, Glycine max
  unsure (1)..(484): unsure at all n locations
gaccctgttggacttcttcgggtccactgtgtgtctcgtatgcgcganccctgcanacagtagaggatatcagaaatcaattaagcgatgtgcttacttacctatgtcatgatgacgtgaccttgccggggggaacgggcaccctgtaagactacacaggcccgtaaccagagctggaaaccccagggtgctgttggacttctgcgggtccactgagtgtctctgagggtgcgattcctgctcataatatatggtatcagacatcaggtgaaccatatgtatacttacctaggtcacgatggcatgacctcgctggtggaacgggcaccctgtatgactgacagatgcccgtaaccatagctggaacacgcaggccctcgtggacttcgttggctccactgggcgtcttgtgggcgcgatccctgctaacaatagatgacatcagatatcaattgagccatgtgcatacttacctatgttatga

SEQ ID NO: 102112 - DNA, 344 bp, Glycine max
caagctggacaaagaaagtggcatcatgcaattatgtgaaactttactacaagatgcttgcattacctttcactcgcccctagttcttactcaaattagtgtggagttgacaatcacccaaaatgactcttctttcatttttcgatctgcagggtcctttgatgataagatgcaaatgcatgcatgtttatgattgaatgttaaatgtaacaatcaaacatgtgttatcatgttcaattttacttaaacgcttacggcacccgttgaacgagctgaatggctccggatttagcgagcgaaatcgaaagtgtatgttcttaaagacaataaaaagttcaggacac

SEQ ID NO: 102113 - DNA, 458 bp, Glycine max
agagaatgagcatgtgattggaagtatgtctgtatatgttttcagttcgtcaaatggattgtgaaggaatgcattaatcatatcccggtgagagtgtgatcctttacatttgagagaaacaactatcatttagtactgacttttgcttgaatctctgaagtatggactgaatgcatgaaattgaggatgatgaaggccatgtttgattgtgatagccacttatccaaaaagctgaccatgtgcttgaatgaattattgattgattgaacctcgagcctatagtgttatctcttgctaccttgacttatgttgtaggagagcatcatccataggaaacgtggttcatagcacatttgtccctatttcggggagtaattatcaacgtaaatctcgtccacatttgacggaggcactgtgtaagaatcgaaatagtcaaagtaaatagcatacacacacta

SEQ ID NO: 102114 - DNA, 354 bp, Glycine max
  unsure (1)..(354): unsure at all n locations
agcttgtaatatggcatgcgcatattttattttactcantcatatatataccgcttacggcgccatgcttgaggtgtcaactgccctaactgacttaacatcctggaacgattatgcacatgtgcctattagtaaccgttcgcccgtgctgcatgtgccatcagctgacgtaatccaaacatgtttgggcttggagggagtctcgtgggtctatctatgcgagttccagatatgggcgccctgggttcgctgctgagtcatcgtgaagactgagactgctaacaatatgtacctagctataaataacctataacattgttttcaaggctttagaaatttccttatatcttcttc

SEQ ID NO: 102115 - DNA, 323 bp, Glycine max
  unsure (1)..(323): unsure at all n locations
tattcccaggtcttattaaccctcactactcacggctaatttataaagggttaagtgtactctatgtgctgaagttcaagctaggtcttgctttgaaattcttaagtatgtgtgactatacatgaccatctgccgatcatgctacataacctctatttaggaacaatatgtgcttagctccttatgcaataagaataatatttatcagcatgggatacctttgaatagtttaatagacctaacatgcaacattggacacttnactgcattggttgtgcacttaggaggcattacttcacatgagattcgctactaccacatgt

SEQ ID NO: 102116 - DNA, 426 bp, Glycine max
  unsure (1)..(426): unsure at all n locations
agctncgacatttcggatcattcttttcaatttagagattgttcttcttccttcaatcaagcaaaatagaatgggtttgcgcttacctgctgttcgacgggcattgttcacggctagccaagcagcttcaaaatctgtacaagttccaaagggctatcttgcagtgtatgtaggggaaaaacaaaaacgcgttgtggatcccgtatcatacttgaatcagccttattacaagatcttttgtatcaagctgaggaagagttggatatgacatccctcgggtggcttccaattccttgcagtgaagatgtttccaacatataacttctacttgaatgagaccacaaatctactggggagactacatagatattagacttttacactattgcatctttcacttgaaagaataccatttttagtatgaca

SEQ ID NO: 102117 - DNA, 500 bp, Glycine max
  unsure (1)..(500): unsure at all n locations
tcacggattaggttacggggttcgtcgatcctgtgctctttccgtctctgtgacagcgagtggttctgacgcagaggctctgatctgagcaagcagcaaggaacacgctctggctgtcggagatgctgatcttctcgacggaggtcacgcagcactcctgccagctgagctcgccgagatccccaaccacgttctgcagcgccaccgcagcaaacgccgacacgctctcgctcacctttgactgcggcagattcaccagatccagcgactccaccgattgcaccagctctttctgtgcactaaatcgacttacggttntgcaatttctcgaaacgaanacctattcgagaacattctcttggtcttcgaagattcacggagcgagaaacacagatcctagactattaccacaacctatatcttctgattntacctaattagcggtgataaaaagaaaaatctaatcgtatcagcgtgagcgagaacacaaccttacgagc

SEQ ID NO: 102118 - DNA, 308 bp, Glycine max
  unsure (1)..(308): unsure at all n locations
gctttctatattagatatcactctggccttttgcgtgtttaatacacaccacagtcttgttctattattcgaaagtgatataagaatattcgctggttgagatcaagaggaggaataaattntgtgaacttcctctacagtgtgaccctagagctagaggtaatgtgggctcaccctatgtgctaaggctttaatggtttacatgagagtggttgtgtgcaggagaaacatctaaagaacatgcttccttatgccaagataaaacacatgttttgcggtccgcttgagtatcgtgcagtgtatatatg

SEQ ID NO: 102119 - DNA, 277 bp, Glycine max
  unsure (1)..(277): unsure at all n locations
agcttagaacaaaatttttgttcttctctatattgtcanngggctcggcgaccacaatcaacaaagtactttcggcacctactatatgttgacttgaccaacgctgttattggaatgctgccacaatctttcaacaccttattcacacattctgataagttggctgtcatgtgaccatatcgtcgctcagatgtatcagaagccatgctccatttttcctttgagattcgatcaatccatcttgctatggctggacttaattgacgaaattattcta

SEQ ID NO: 102120 - DNA, 439 bp, Glycine max
  unsure (1)..(439): unsure at all n locations
agctnttgtcactccacccatatctggccttttcattaattagacttaacattgctgacaacaacgtcaaggaattcttgcaccccatatacaaaggcttcttagaatcactttgcaatccttcatacataggagcatgtgcttgctaaaaagactcttgtccaaggtcacgaatcatatcctccaagcgatctcccatttctacatcaaacggttcagattgngacccactctgcatttctgtcaattcaccatgccatatccacatcgtgtaattcttcttaatcccatcacacaataaatgctcccgtatgtcgtccggtatttgtcgtcttcagtttaaacaattgatgcaaggacaataatattttccatcttcatttggtcgatctctttttgaagcaaattgcaagaactgctcatcgccttcctcatattc

SEQ ID NO: 102121 - DNA, 424 bp, Glycine max
  unsure (1)..(424): unsure at all n locations
tccatcacttnccaagataaaaagagactttgaagtctaccttatatccaatcatttccttaagccagctctgtgtataagcttcctgttcttctagtgaagacaaaggagatccagttgataccataagttcagtggtaggaagcacactttggccatgaagattttcaactcattacctaatacccataagtgcagtgctacctatactgctttaattaatgtttatttctctggttgtaataaaatgaagaacaaggagtccactttcaaagcatgtactatccaattaatgactattattttatacctcttacggataagatctcccatgttgcctcaatcatcttaacatacaaagntatcaccatcagccattntgtctagaagtcgaattaattttgctgattcattgcattctctt

SEQ ID NO: 102122 - DNA, 356 bp, Glycine max
catgcaagcttcggaagaaagtgatgaggtacaagctttaattgtttagcttgtaagagcccgagtagtcgaagagaagttcatgttcataaccatcacagtctgaaaagagtatgatgaactaagggacgtcaatatggccaccgctgaagccttggaacgagaaaccaagaatgcccgataggaagaacacgtgccaccaaagttttgaggggctctatagggcagcaatagtaagctcaagctccgaagaggtgaaaggaatcatcacgggtcataggcatgatcttgaaggacgagctaaaggcttaccttatgtcgaaaagaaattgttccaacattaagcgagactgaag

SEQ ID NO: 102123 - DNA, 483 bp, Glycine max
  unsure (1)..(483): unsure at all n locations
tatgcctctctctctctctctctctctctcacttgagccttactttatcatattattgttntattctcctacctcatattcttacttgagggtcagagtcctctattttgcaagtccccccttcctatcaatggtatctttctaagccgacgtgtgaagtctgagaccccatttcagccacatctaccctgacgtgtcacggttctggattttggcaagaacatcatttgtgccaatatttaatgggcttaacttctttaactagaatgagcaagtccaatttcaccttggtgtatggatcttaatcttgctatattgtaagaaaaacctgcagctattactgattctagttgcaatgatgagaaagcccattatanagcttgtgaaagatntaacagactcaacctaatggttatgagaatgactggtgcagacaatattaagatagctctccctaagactgataatggctaagagtttatg

SEQ ID NO: 102124 - DNA, 321 bp, Glycine max
  unsure (1)..(321): unsure at all n locations
agctnggattttctttagtaaggaatctattcttccttatatggagccaaacccagncacccttattaagaactagctcttttcttcctctattgcctttagatgaatacacctttgtttggttctctattagggtcttaaccctctcatgcaacttctttacaaactctgacctacattccccttcttatgtataaaagaagtgtctatcgggaggggaatgatgtctaacggtgttaggggattgaaccgattgacaacctcaaaaggggactgcttggtggttttatgaacccccctcgtgtaggctaattctacatg

SEQ ID NO: 102125 - DNA, 485 bp, Glycine max
  unsure (1)..(485): unsure at all n locations
gcactgccggccccagggagaaagatagtgtttatttctatccattattcataactccattctttatttntatttaaaaactagaaagaaatccatttgttattcttatttaaaaactagaaagaaaagaagaagaagaatgcatggattgcactctttgtgcaaccacatgtatctttatcaagaaattcgcacagctgttggaaaggaaacaaaaaaaatctcacttaccattattgaaagaactaatgcagttctgatagtattataaaagcaaagatcttataagagaatgaaatccttttggtgtgctataatatggtcttagaattattcctacatatcacatatatatatatatatatatatatatatatatatatatatatattcttaattaacagtatgagataaagatttgcagaacactacagacacagtaagagtggaaggagattcaacaagatcacgagagttatattcac

SEQ ID NO: 102126 - DNA, 421 bp, Glycine max
agcaagctttgagctagagcgtgatgtctctggtgtatgtgttggacctgtgttgttgcacggtggacacctattgtttactttaatgagacacttcatggtgccactctcaactaccccatatatgataaggagccttatgccttagttagagcccttccaacctggaaacattccctcgtgttcaaggagtttggttatcatagtgatcatgaatcacttaaatacattagaaggccgtgcacgttaacaagaggcatgcaacatggatagagtccctatagcaatttccatatgttatcaaactcacaaagggttacaccattgtggttgcagatgctcttcttatgacacacaccatacttccttctcttgcagctcaaattaaagattcgtaacctaacggatgttgatgtttctg

SEQ ID NO: 102127 - DNA, 519 bp, Glycine max
  unsure (1)..(519): unsure at all n locations
tcaaactaagctgccgccagctcgccagcagcaggttgctttctcagaagctttattcttctggagggcccaagtgggtctggttgctatttacacccacctgtgtactaaatgcacncacctttctatgttgttgcaattctttttccgtaacgatacgaaactttacgaatttggtaaagatacctattttccttccgcaaggctacgaatcctcacggattatgtatttactgtttnttagctttcgaagaagttacagaaacttacggattgcgcataaacacctgtcttcgatttccgccacattatggaatttcacgaattacgcaagcctgcttccttttgacttctgagacgtctcgggacttcatttattgcacgtcatcaagtaataatccccgaacgaaattatggtatgacacatgtcatatgagagtccaatgtatggacaagtgcataacaccaacactctaattattaagtcgcaatgcagcattttgtgtaagagaatgttgg

SEQ ID NO: 102128 - DNA, 444 bp, Glycine max
agcttaagaggtatgacagcgctaagggatgttttccttgatggagaaggtagaaggaatgtttaagaaaggtgctctctcgatatcaccttttgttgcaaaatgattttccttcttaacaatcttcttggaggaatccattatccctttttccttccctctggcctttgatgacaaggccttactatccttcttattactttatttttctagacttttttccttatccctcttatctttcatagctagttgatctttgtccacctgtgaaggtgtttgaggattgcaacgcaaactttgttccaaggtgggtgagggttatctcattaattacgccattatagatgattttcatatcatattgccctggcctacctaagaaaaggtatcctggctccataagaactacaccacaaatcacttcatccttatatgtttcaatgg

SEQ ID NO: 102129 - DNA, 376 bp, Glycine max
  unsure (1)..(376): unsure at all n locations
ctccctaagtcagcgctgcacgcttagcgagttcatgccttctgggtttctcgtgagtatctataaaaatgtctgatgaactcactaagcccacctcgcacgcttagcaagttcataagtatatgtgttcgtgttcttcgtacttaagtgttcatcatcattaatagagctgggaatctcccaaactctgctgcttgctaagtgccaatacgcgctaagcgagcatcttgatactttgtttatgtacttgggcttaacgctggttgcatgctaagcccacatttcgtnttaactatctgggcgtactcttgctcttttgtgcaagagcttagcgccagcttcacgctcagcccaagtgtcttttcgtatgtcaata

SEQ ID NO: 102130 - DNA, 424 bp, Glycine max
  unsure (1)..(424): unsure at all n locations
agcttacccncactattacccacaaccacccatcatacttatcaatgttaagaaaatgacatcggcagaaatgcagntgagaagagaaaggggcctatgctttacttgtgatgacaagttttcccctagccatcgntgtcctaataagccatattttgttccacagtgggaagaagaggatgaacctgcattacaaccagatccaccagacgaggttgagacagctggtgaccctagtttgcaagatcatcatttgtcttataatgctttaaaaggctcatcaagtcttggaacaatgaagtttcaaggatcaataaatggattgggagtgcagattctactagataatggaagttcagataatttcctccagcctagactatctcaatgcctgaagttacctgtagaaccaattcctaatttg

SEQ ID NO: 102131 - DNA, 395 bp, Glycine max
  unsure (1)..(395): unsure at all n locations
tggtttgtgtttaagttttattttgtgtttgaggtttgtgttttggaagacaaactcgaagaaaaagttttgggtttaggtgtatgtttctcttcatagagtttggccaacgaaattgttctgaggagtcatgtacgtgattgtgcaatgacatcccttctgatatcaggttttaatcctcccacaaagcaatccaatagagcttcttgtgtaattccttgtactcgattagctaaagccgtgaactgcacgtaatatgactgaactgaaccaatttgagcgagtntaaacaactgagatctangacattcatacggtgatgggccaaattctgtctctaaggctctgcgtaaagcaatccatgtnttgaatgaattttcacgagtcatcatttg

SEQ ID NO: 102132 - DNA, 336 bp, Glycine max
  unsure (1)..(336): unsure at all n locations
agcttcttgcgtcgccgctcttggttgctatattatcccanaaacaaatccctcttattactagctattttgaattctttagttcctgaatgtacaaccttcatattgttgctcgttcccctctttcttttctgcaaaaaagaaaatcatatgctgtcaaaacatggatgaagtcctaagaaaatcaatatcaaagaaaacatggatgaaatcacaattaaaaagcacaactacctatctttcagagtcctttggttaatttgtcttgtctccttatgtggtggggttttgtttaataatcttatacttttgccttccaaaaaaaacttatcacta

SEQ ID NO: 102133 - DNA, 340 bp, Glycine max
  unsure (1)..(340): unsure at all n locations
angcttgagctaaaatcctgactcattatatttcttgacctagngtgagaatgncaatccttaccctcggaagctaaaaagaatagaagggaacattccaatcaaaaaaaaaaaacaagagaaggaaaattcccaatgaatgagaaaaaagactagaaaggaaattcccaatcaaagagtgggagaaagcaaaaagaaaagaaagaaaattcccaaccaaagaatgggaaaagtaaaaaagaaaagaagaaagcttcccgccaaagaaactagaaaaaatgtgcagaaaggtcttttgaccacacaatatctgatacaatacagattgtcaccacatgaa

SEQ ID NO: 102134 - DNA, 474 bp, Glycine max
  unsure (1)..(474): unsure at all n locations
actcagctcgaggaatatggngtacccatcacatgtggtactaggtgttcatttgttatggtgcacaacaagttttccacatccacaaatcgcgcataaacccaccatccnctgttgcccacctccaactgagctcacgtactcccatgtagcccatatcctcgtttctctaaacaccgggtccccatcaatcctcccaagctttcccaacatccaggtaaatcaacattcaaacagcacanactatcacagccaagaaaatagggcaaaggcagaaaactctgcccaaaactcaaaccaaaatcacagctttttctcacttaaagaccccagtaacatttccttcgttccaattcgttaaccgttggatcgactcacaatttttactggaagtctccagtacataagcctacattctgaccgttgggatctgctagaaaacatncagaactcattctgcactactctttccac

SEQ ID NO: 102135 - DNA, 311 bp, Glycine max
agcttcagactgagaagatgaagagttttctgtttatcacagatctcaacaaaagcacggacaccgacagtgcgttcggttacttaaactacgtacggatataagacccaaggtccggggaggaggttcgggagaagaacaaacctggcggctcgggacagagcagcgagtatggggatccatcacgagacgtggaaggggagcttcagttcatgctgcgttcgaactcaggagatatggctacggcggaaatgcagccactgaaggatgaccctcgggttatttgaaggaaaaaaacccaagctcgggga

SEQ ID NO: 102136 - DNA, 249 bp, Glycine max
agcttgctgacacaaggaagacacatatatgttgtccactttctgcagcgggccaaactgagcaggactatgattatttcatggatcgatgaccactcaattattacgactccctatcctataaaagaaatattttcaacacttgaggctctctaagttatatatgcctaaagggagaatctcctagagattaaaataactattctgagatgttctaaaggagggaaatattatcgactgtacacttaa

SEQ ID NO: 102137 - DNA, 360 bp, Glycine max
acggatgcgcccacactatcttgaatgaattacctcgtcttagcatagcttttcatgactatgataacattaacagagatcttataatgttatatcaacagtgaataccagatgtgacagctctgagaactgtgaagaacctatactccaatacctctgtagagctgattggaaccttgatggtgcatgagtgcgaacattaacaagatgaaggattctgatatggacaatgcttggctctaacaacacaaaacgccaaaacatcttcaacatgctatgaatcttcattcagacctgcagtcataagatgatgcaaagttctttacattgatacaccctctgatgatgagtcaatgatga

SEQ ID NO: 102138 - DNA, 408 bp, Glycine max
  unsure (1)..(408): unsure at all n locations
ctgagaagcatgtgatcctctggcatcatcagaacactcagtttgttctttngtctataatctccncctttgtgaggatgaaaatccctgagatcaagacaagctctatacaagatgatagcacgttcacacagcccttactccccctatcttttggcatgcatgcctaactataatgagtttaattgagttctaacccaagttctagggtctctccccctttggcaacatcaaaaaagaattaagcataacaatcaatatctaaacagagcccaacatataaccaaaatttaatccatacattgtcataaccaaccagaggaaagtcgagaaatataatacaagtgctagattacgataactagagcaacataagccaatacaccggataaacatagactaatatac

SEQ ID NO: 102139 - DNA, 423 bp, Glycine max
agctttgagccaatttttagattataactttttactcggatatcagatggagtcccgcacaataacgagacgctcgaaattgcatgttgcacctcagagcgaaatcaaaccacagtaactctttactcggatgtgtgattgagtcccggaatatattgagacgctcgaaggtgaatgtttaagctttcagtcgattcacccgacaataacttattactcgatgttcgatgagtaccgaatataacgagacgctcgaaattgaatgttgaagctctgatctagttcacacgacaataactctttactcggatgtctgattgagtcccgataatatcgatacgctcgaaatcgaatgttgaatttgaaagccaattcaaacgacaataactttttactcggagtatgatggatcccgtatataac

SEQ ID NO: 102140 - DNA, 288 bp, Glycine max
  unsure (1)..(288): unsure at all n locations
gcttaacattcaatgntgagcgaaccgatatattacggtttctttatttgacatcagagaaaaaagtattgccgcttgaattggatcacagcttcaacagtcaatttcgagcatctcgatatgttacgggactcaatcagacatgctataaaaaagttattgtcgattgaactatctcagacgttcacattcaatttcgagcgtatcgatatgtcacgggactcaatcatacatccgactcagaagtcattgtcgtgtgaattggcaaagaggttcaacattcaattt

SEQ ID NO: 102141 - DNA, 386 bp, Glycine max
agcttctcatggagctacatcacattcgccgtttgaatgctggtcaagcacttgagttatcttggaatgcagcactggaaggcaacaaaatgcgggatgcattacttgaagagaacacaaaggtacatgtctatcagattagataatttagagaccatcacgtactcaaactctaaatagactcttattacttcttcaaccatggctgtgtagattgttgcttgttttgaggcatccaaccacaagatatagctgccgaactctatcattagtctgcatgtagcccatggcattgaaagaccattaaggatctattatgataataactcagcaattcatataaaatacatatattgtctaaccatatgagatacgttaatttgaat

SEQ ID NO: 102142 - DNA, 363 bp, Glycine max
agcttgtggactataccttcgaccgaacacgttcgtgtttctgtctagctcggattcaaggcgggttgcagcaccggcgtcgcttccctaactgtactggaggcggttgcggtggctttatcctctatggttttctggagttttaacatgacctccgagatggaagccatttgatcttttaaggccgatagatcggccttcatctgttcctgcacaccctcttcattatccatttttctggatctagtgttataggggtgccttggtgttttcttagttatgatgaaattcctaaagaaataaacaacggtgagtatgccaccaaaacatgagtatgcaaatggatgatcggagcacttggat

SEQ ID NO: 102143 - DNA, 492 bp, Glycine max
  unsure (1)..(492): unsure at all n locations
catgggaccaactcattntatttcanaagatgtcgtatccattcaaggtctgagagaccatacaagtttcctaacgatttctaattatgtgggccattaagtctatcatatgctgacaatagccgagaagcccatgaatctcttcgggggtggagtaggtgtctgccatcgccttggccttggctaacaagcggngaagttcttgactcccgttcaaggtaagagcaaaccggtccatccacatggttgcctcttggtgtaaagagtcgatcacccttcctctagcctctntttccgcatatacttgagcatactcatccgcgattctatgctcgtgggccgtggctagacctaactcttcttggtacttggcgatgatagctagcatgttggtctccgtctcgcataaatgctgagacaagcttcttttggaccttgaacaagcaattaactcctctttcagaaaccatgtatgtgctcgcgactggtctc

SEQ ID NO: 102144 - DNA, 315 bp, Glycine max
  unsure (1)..(315): unsure at all n locations
agcttcattcnctctaatataaatatctgcttatttttattacagagatcacattcaatccatgcgctgatggaatttccacataatatttcgcttactattatataagccttgactttgagattgnctaaagctatgcacattctattaataatacggaatattattggccaaaaagtcattctcttattgtttattaatctcagaatcagaaatatgccaagactgtaagatcaacaattggttccctatggcttgtctagcgagtggtattggatctacttatagggggtactgaatcaaaacttgttaatt

SEQ ID NO: 102145 - DNA, 429 bp, Glycine max
catgaataatttaaaacatacacaacgcataatgagtgcaacaaacataaatgattcaaaaacatacatagagcataattcgaataaaaccaaatagaagtgcacaccacttagtcatatatgacaaaccataaatatcatgttcagacgtactaagtaccagatacttaacacataaccaatgctcagagaatatataacataatgtcttaaatcattcacagacataatatacgcatgtgtatttaacaagtcatacgtcatcattacatataacaaaacatgtgtctaaggcactggcatctagaagtcctgagactcttctaatggagcagaaggaatctcgagatagtggatatgtgaagatatctgcgagttgagtgttggtatgtatatattctataacacacacacctttttggacatgat

SEQ ID NO: 102146 - DNA, 431 bp, Glycine max
  unsure (1)..(431): unsure at all n locations
agcttagacgaccttgttggagtcgagaatactttattatttatntgtacttgtgngaatatgaaggagaagaaaatgaatgtgagcctttttcccctttgaaagacttgctaaaaaatgttataaaaatacttttaattaagatttgaagtttttttccttattagaatatatgtgaggggtagagggtgttacagggagaaccatagcttaaatgcttacaccctattgtcacattatgtagtcacactttgtgcatgtgcttcatgctctacatgcctcatgacacctaagcccacttagtggagaatcttggacttgatcttggattaatgggctgaaccatatctaaaatgcactaatcataattagtgaaatcttggctccaaaatttggctccacaaagtcaatttcaaaatcaagtgaaaatt

SEQ ID NO: 102147 - DNA, 352 bp, Glycine max
  unsure (1)..(352): unsure at all n locations
gccagaaccttggagcttaggtgcctcatactaaagtacccgccccgcgaagatgctggacatatactcttgtaactgcataatattctatttctcactttttagaataagatctagtagataacttgacctcctatatgttacgagtaagtcagctttaatggattagcctagtcaattagtggttactcttatctttaacgagcaagctcgccttaatattctgttttgccaatatcttgctatctaattagtntattcttgattatccagcgtatcagcgctgataacaacttgaactacaatacacaactgctattcgctctgcatacctactggctctctctctcct

SEQ ID NO: 102148 - DNA, 300 bp, Glycine max
  unsure (1)..(300): unsure at all n locations
agctntatctncatccatctgtaaggtcttttttccttgctgggaatgatgaacatccattcccagcttgcggggggcttttatccatcttaacagaatttagttatagcttagtttgttgtaactaatcttttgctataaccgcttaaccatttctgcttctttcctctcccattgttgaatataaactgcactctctacttcaataaaggctaagctattatttggtcatttaaatgctttcatattttctttttctttatgggtcgctttcttttgttacaacaacaatcatgctta

SEQ ID NO: 102149 - DNA, 416 bp, Glycine max
  unsure (1)..(416): unsure at all n locations
atcgagcactatccggcagaagaccgaagaacggacaaaaaacggacatgaatgactatatatcttcacggaatcacccacggaaacgtctcggaagcgctacggaggcacctcggctaggattntattcacggaaacacgttttttcacccaaaacagctgaaatgcatagcataagggtcagaaaccctctgaaacagttacggaagaattaccgaagcgtagcagacttgattttcttattatttctcttcctcttcacgaatcctaagttaaatatgctgtcccagcgctacgggaatttcacgaaaacactacggaagtcccggatgccattnttcaacaaaatgggggaagaggttgccgccagctctccatgcgagctaactcgccaggagagtagatgcttccctgag

SEQ ID NO: 102150 - DNA, 450 bp, Glycine max
  unsure (1)..(450): unsure at all n locations
agcttgacagacatgctactcttgcacctgttatggttactacccttgacactagacaacacttgtctaggttggggggcttggcaaactaacaaccctcatacttgtccaagctattgttagagatagggggagcaatatgagaaacataagcaacatggaacaacttaaggctaaagcttgaaactcacggaaaagcttgaagaagctttaaaagaagttttggcttttacatgcccaactcctttgagtggcattagtattggttgttaacttgattgttgtatcttagtacatctgatatctatgttgcatttngcatcaccatagagtgactgaagaaaatctttataagttaaaaaaatttcttagacgcaaaaactcactgtgttaataagttacaatgttgtcgtaatcgattacaacacngtgtctaaagcttaaaaagtt

SEQ ID NO: 102151 - DNA, 509 bp, Glycine max
ctcaagcttgagatgaggaagtgttgaagggtgaaacttcctgctcttattgtttacctcatatgtggacctggagatatgtcgcgggggtcaagagaccttgtggacgtcaggtggggtgctattgcccaaaaccaagcttgaccaatcccgacccaacccgggcatagtcggtcagtgagaacctgtgatgtacctaagcaggcgagctcctggcagtcaacagataaaaggaacaaagaccacaaagcaaggaggcttgtggtggctggccagctgtgaaacttgattgatatgtgagatatggtctctggtaatcgattaccaagggtgggtaatcgattacaaggcttaaaaatgaagacagggggctaagatggtctttggtaatcgattaccaggcttgaaaacgaagtcaggaagctaagggagcctctggtaatcgattaccagcctgtgtaatcgattacacagagggatgggtcactggtaatcgattacacgcatgt

SEQ ID NO: 102152 - DNA, 318 bp, Glycine max
tactgcatctagtgcttactttagagttacattcactggtcttatggaattacttcattcatacttcttcatattctgatattgacacctaaattttttctcttcataatgtgaattttttttatgttcagaagacataagtcatagcaccccaaattgatgcatgtgctagttggtggactcaaggacccgatgctattatgcaggtcatcctcattttatcttattaaatttggtactcaaactagtaataattcttaaattcatcactcgagctggtatctttggatctttgtgggcatcatcatgttgcttaat

SEQ ID NO: 102153 - DNA, 339 bp, Glycine max
agcgctacagaaatggaccgagcgcacatgatgtatatagatcttattgaagcttctgatatgcatgagagtatacagggtttacttatgggcacattcatatttggttgattagccaaagagctaggtcatgcctcattgcgttaagactgaaactatacaggttcttattttttcgaacattgactttgggttgttgcaaatattagtggacaaaatgttggttaatagtgcctgtgatgagagtcattaaggatgtacaatctctggtgtgaaaatgggtcaatgtctgtattgctttcagagacggttaatagaagatgaacatctataatgttg

SEQ ID NO: 102154 - DNA, 252 bp, Glycine max
agcttcaacatagaatgttgagcgatttgtttattacgattcttaatcggacatccgagtgaaaagatattgctggttgaatttgcccatagcttcggtattccatttcaagcatctcgaaatttacgggactcaatcagacatccaagcgaaaagttattggcgtacgaatttgctccaatgcttcgataatcaatctcgagctgtttgacatattacgggactcactctgacatccgagttaaaagttat

SEQ ID NO: 102155 - DNA, 120 bp, Glycine max
gagacgctgggactggaataccgaatctctgagataattcgaacgtaaataactgtttactctgatgtgtgatacagtcccgtcatatatctaaacgcttaatatcgaatgttgaagctc

SEQ ID NO: 102156 - DNA, 423 bp, Glycine max
  unsure (1)..(423): unsure at all n locations
agcttgtagaatggctagacatgatacatgttatggttnggtttggttcaaggataaaagggatgccccacattatttccatgacacaaatgcaaaaatgatgatttggaaactttatgcaaaactggtcatgcatgcacctatgcggacactcaagtgtcaaatttttatggtcatgtgatgctagggctcaggattcatttcctctattttaatcaacccaatgtttccaaaatatgttcttttatcaatttgtgcattcatccgagtccatttcgggcgtccggggaaatttcacagcattcacccttcaggtgtagacacattttccaaaaattgattatgatcaatgaattttttcaaagaaagggtggaaatcgtctcttttaaaagcatgttgtgttttcagcttgacacctattt

SEQ ID NO: 102157 - DNA, 475 bp, Glycine max
ccaaaaactccgctccctcgggcttcttgagaagcagatccttattatccttccccatattaactaaggtaacctccttaagaataacacaacaaataatcaaacatcacacataattactaataatatattgatatatatatatatatatatatatatatatatatatatatatatctgggtgtgtctacatctccaccctcctatatatatatacctagaaatataccttaatcaaacaaagatgggtgagcttctctcatataactttctaattcacacatgcgatcttctcctgaggcacgtgcgcagatcaccttgaccaacggaatctctttctctcttatgtgttgtgtgcgcctatccttgatcctcagaggcaatggatcatatgtcaaattctgcgtgactgtcacatcatccaattcaatcacatgggatggatcaccgatatacttatggagttgagacacat

SEQ ID NO: 102158 - DNA, 406 bp, Glycine max
  unsure (1)..(406): unsure at all n locations
agctngtagaatggctagacatgatacatgttatggcttgttttggttcaaggataaaagggatgccccacattattttcatgacacaaatgcaaaaatgatgatttggaaattttatgcaaaactggtcatgcatgcgcctatgcggacgctcaagtgtcaaatttttatggtcatgtgatgctagggctcangattcatttcctctattttaaatcaacccaatgtttccaaaatatgttcttttatcaatttgtgcattcctccaagtccatttcgggcgtccagggaaattttcacagcattcacccttcaggtgtagacacgtgttttttcttcaaaaatcggttatgatcaatgaaaattttttttttcaaagaaaggtggaaatcatctcttttcaaag

SEQ ID NO: 102159 - DNA, 406 bp, Glycine max
tcatgttaaaaacatttatcacaagacatgtgaggagatacatggagaaaaatgaagaaacaacaatggaagagaaggtaaagcaaataaaattaatggaggcttaaggagcacttgcttgaagctcttgtgctctgattaccactcgatggaagcttgcttgtggggcttctatggaagctggatctttgagcttcaatgaggtcctttaatggtgattttacaccatggagatgcagcggaagacaaaggagaagaggtgagagtatgcgtcatccactatggaataagccatggaagaaggagcttcaccaccaagatgagccttggataagaagcttggagaggatgcttcaatggaggaaaagaaagagggagagaaagagagaggacggagcatgaaatt

SEQ ID NO: 102160 - DNA, 399 bp, Glycine max
  unsure (1)..(399): unsure at all n locations
agctttctaagacatgtgtccatattctgtttatngcgattttgaaaataaaaacttttgatctcttgctaagcatgaaaggcacgcttagcgcaattccaacatagagggaatgacattgagcgcccaaaggtgcgctaagctcaattctaatagataagaagtagcgctgggtgcctaaacgtgcactaagcctaattccaacagagaggaagttgcgctgagcacccaaaggtgctgcttaaaccaattccaacagataatatattacgctgagcgcccataggtgcgcttagcccaattcctaccagagaggaagttgcgccgagcgcgccaaggtgcgcttagcccggcctaatgcaaaaggggtgtgctcaacctaaatctttgactaaatgc

SEQ ID NO: 102161 - DNA, 310 bp, Glycine max
  unsure (1)..(310): unsure at all n locations
aagttcttaggaagctacctatgcacacatttattttttgtatcacctgtnggaactctgaggaatgtgaaacatgtgagacacacttcanagtcaaacttctctaccttttattcctttaaattccagcccccacccccgcctctctctgtcattcttttcctccattgaaaattcctctctaagcttcttatacaagggaatatcttggtggtgaaacacctcccttcatggcttattccctagtggatggagccctctcttaacctttgttctttaatcttcactgcatactcatggttgaaaatca

SEQ ID NO: 102162 - DNA, 304 bp, Glycine max
  unsure (1)..(304): unsure at all n locations
agctttttgcaagctttcggtttaatctggtacctagncgnggtagaagtctccacagaggccattgcctccctcgcccagtattatgatcagccgttgaggtgctttacctttggggatttccagctatcacccatggtggaagaatttgaagagatcctaagatgtcctctagggggaaagaaaccatacctcttctcagggttctacccctcattagccaaaatttctaaaatagtccaaatctcggcgcaggaattataccgccaaaagcaagtcgaaaatggggtggttggaataccga

SEQ ID NO: 102163 - DNA, 432 bp, Glycine max
  unsure (1)..(432): unsure at all n locations
ctntgctaaagaattatggcgtttganaatgctcatgcatacgctatgttcatgcatatttgntatcttgtgacagggacaagatcgttntaagcgatggtcaaataccgcgccaaatccaagacggagatgaatcgaggtatgtggtagcatgaccacgatttgttgcgcaatgtcatttcctgctttcaggtactcanggacgggcatgaatggatgctaggcccatgatcaacagatcgctatcccacgtccggctccggacgatcgagaagtgctactgagaggcatcctagtatccttcaaattcctacctattattattgttatttccttaaggtgatgatcgggtgccaaacttaccctaggggtttcaagtaagtgaacaccgacccatagagaacacgtactttcttcgcaaaaaaaatgcac

SEQ ID NO: 102164 - DNA, 282 bp, Glycine max
  unsure (1)..(282): unsure at all n locations
agctntgctgtgtgcacctagcaacactctttcatttcttggctangtctgtgacttacccaacctaatgaggctctctcaattaaggctttttactccttgaactttaaaggcttatggttttagtctctaaactaaaatttgaccggtcttggttccctaaacaattagagactacaactgcttaattttttggtttaataactaaaagtataaaacttatcaaagttcaagttttaaaaacatagataacccttctcctccgtatcaaatgtgttcaat

SEQ ID NO: 102165 - DNA, 434 bp, Glycine max
  unsure (1)..(434): unsure at all n locations
gtgaaaagttttcttttttcgcattgttcttttaacgctcggaagatatcagactaatctcttgaagcctagatattattagaatacgctttgtttttcttaataattgtttttctcatatgtatcatcagaaaatcaaaccctaagaatacttaacaaactcaattatttatcaatattatattttattggtagaaaaggtaataaagtacaatgctgactacacaacttacaactaacactataaaagaatcatggaccttttattatatattcttagaatgaggtcattatgcttttagtgaacatatcatatttgagaatattgatcagatttgtgacaattaatttctgatgaaacaagactgtcttggtcattatacatgagtctctcntctaattcagacaataattttgcacaaaagtggtacatc

SEQ ID NO: 102166 - DNA, 296 bp, Glycine max
  unsure (1)..(296): unsure at all n locations
agcttanaacacacaacaattaagagaaatctgatctttgttacatttgccatggggctatacacatatcaacagacacctagctagctagccattaagcattcaaaggacacctaggcattcaatacaagtgagcacgagttacctcaatcaaaatgagaccctgtcagtacgagtgagcacctcaaacggattgcaaagtgagcaccccacacagatcttacagtgagcacgaagttcccaaacagacctgggtattcaatacaacatgtttaagtaaagaaaaagtcaccaaa

SEQ ID NO: 102167 - DNA, 388 bp, Glycine max
cctggagatatgtgacaggggtcaagagaccttggggacgtcacgtggggtgctattgcccaaaaccaagcttgaccaatcccgacccaacccgggcatagtcggacagtgagaacctgtgatgtacctaaacaggcgagctcctggcagtcaacagataaatggaacaaagaccacaaagcaaggaggcttgtggtggctggccagctgagaatcttgtgtgatatatggattgtggtctctggtaatcgattaccaacggtgggtaatcgatttccagacttgagaatgacgacaggaggctataacgatctctggtaatccgataccacggcgtgtcattgataccacgcttgataactatgtcaagaaactatggaagcatctg

SEQ ID NO: 102168 - DNA, 408 bp, Glycine max
agcttgctctcgatctcatctctcccattcatttttatctgtgcgctctataactccatgctcctatcaatgctcctctacggcatgttcctgaacgcccccattgggaaaagaggttctagtgctgggggcctacggttagggtttgtgagagatgttggatgctccatgcatcgatgagtcttatcgcatgctgttggaagccattctagcacagtgacgacgtctttaatgccgccgctggaagagaatgcaaggatgacctcctttggttccgtgacatcggaaagtttgccatcatcgatttctccatggccgtgatccaagccaaccaagtcgtcgatgaccatttttgatgctaaaccctttcaatgacaagctgtaaagaatggatcactccatttttta

SEQ ID NO: 102169 - DNA, 467 bp, Glycine max
  unsure (1)..(467): unsure at all n locations
ataatcttgataccctntgttactgtattaatggaagtctatgagtccgggggcgacacattagcctattaatatggcggctctgcagcacacaataatgtaatctctctaccttctggagtttggactctatggattatgaaatgtaatctgggatcagaatctctgcacataattattttatttacgattcgcatgagtttatcttaagcttaacattgaatacagaatgacataagttaatctaattctgaaagcttattgcttttattaggatgtctcgaaatccaataaaaatatgccttttatttgatacccaatcttctaccgtacggtttaattcgttgtaagtttggctaattctatggatgcagttattacatcacatgattcttgttaactacgtccctatctttaaaattcatactgagatangatatgccttcaagttacatggtaattctttc

SEQ ID NO: 102170 - DNA, 436 bp, Glycine max
  unsure (1)..(436): unsure at all n locations
agcttggtaatccatcacaggttctcactgacttactatgcccgggttgttttgggattggncaagcttggttttgggcaatatcaccccacctgacgtccccaaggtctcctgaccccccgcgacatatctccaggtaccactttgtggtcaacaaataaaagcaggaagttcacccttctacacttcctcatctcaagcttgtatgattatggggtacccatcacatgtggtactaggtggcggtcgggcgatggtgcacaacaagttttccacatccacaatgcgcgcataaacccaccatcccctgttgcccaccttcaactgagctcacgtactcccacgtagcccatattctcgtttctctcaacaccgggtccccatcaattctcccaagctttcgcaacatcaaagtaatacaacattcacacagcat

SEQ ID NO: 102171 - DNA, 389 bp, Glycine max
  unsure (1)..(389): unsure at all n locations
aatcacttgaatatgaaaacatggtctgtgaaaaaatccatgccgagtgcttcctaacgtttccggggtgatttctcgaagatttcaaccgttcttcaacggtcttcgatcgttcttcatcgttgttctgtcttcaaccggtaagttcccgaaatcgaacttttcaattcattctatgtacccttagtggtcctcatttgttattacgtgcttttattttcatttcatttactttacgtacccccttgtgacgtgctatagtcattagcttaagctgttttcttgcctaatcaaaanataaaattaatttccaccgatcatttgaattggaatatccgttaatatcgattaacatgaaatctgaccgatcagtcatgccgtaaccacgt

SEQ ID NO: 102172 - DNA, 415 bp, Glycine max
  unsure (1)..(415): unsure at all n locations
agcttgcgaatntagtcttcaccagtgaaatgattgttgtgggtccggaaagaggcaagtttagtcatcctgcttggacgaatgagaaaactggggcaagtgaagagggtgagaatgagggagaaacccatgttgtgactgccattcctatacagccaagttccccaccaacctgacaatgtcattactcaaccaataacaaaccttctccttgcccaccaaccaattatccacaaaggccatccctaaatcaaccacaaagcctgtctaccacacaaccaatgctaaacaccacctttagcacgaaccaaaacaccaaccaaaaaggaattttgcagcaaaaagcctgtaggaatcaccccaaattccggtgtcatatgctaaacttgttcttgtatctacttgataattcaat

SEQ ID NO: 102173 - DNA, 291 bp, Glycine max
  unsure (1)..(291): unsure at all n locations
attgagttcaccagtgggagagctagattaatttcaagatctctctcacgaaatccagaagattcacgagaagttgatttcaagattcaagataaggcctctcgaagagtccagattcacgagaagaataattcaagtcttccgggatgaaatcaagaagccacaagtcaagacttcaccagggacgtattgaacacgatttttgacagccaaacctagcacagttctactttacaaaagagttctctcanattttttaagttactagacgtattactcctctgtaatcga

SEQ ID NO: 102174 - DNA, 308 bp, Glycine max
  unsure (1)..(308): unsure at all n locations
gcagcttgatttttcttatcggtttgtttttaagcaangcatccaaacatcctaaagtggtccactgttggttttctttcgctccatgcctcctctggtgtcatatttttcaaagcaaatgtacgacttctatttagaatgtgcacgctccaattatcagctttacgccaaaattcttttgaaatgccactcttagtcaagaggcaccgtaccatgttgagaatggttctatttttcctctctgaaacaccatattagttgtggtgtatatgttgttgacaactccctccagattccatgatttacac

SEQ ID NO: 102175 - DNA, 416 bp, Glycine max
  unsure (1)..(416): unsure at all n locations
gagtgggctgttgatatcaccattttgtgcaaaacggttntccttcttaacaatcttcttggaggaatccttttcctttnttccttccncttggcctttaaagacaaggccttactatccttctttttcttttgcttntctaagttttcttcctcatccctcttatctttcatagttagttgatctctggccacctatgaaggtgtttgaggatgtaatacaaactttgttccaaggtgggtgatggttatctcattggttatgccattatagatgattttcctatcatattgtcatggcctacctatgagaaagtgntctgccttcatatgaactacatcacaaatcacttcattcttatattgttctatggagaangggcatttcacttgttgatcgactatcattctcccttg

SEQ ID NO: 102176 - DNA, 320 bp, Glycine max
  unsure (1)..(320): unsure at all n locations
agcttgagcatcaataggatcgggtattttttctgcaggtaaatgctgcagnggctaagcatggattagagtccaaccttcctgtcatgaattccatactggacatgtactgcaagtgtcattgtgcatctgaggaaaaacaattattctttgaaatgacttattaagataccattccatggaataccttgatagctggatttgaagcattggattccagagagtctctctgcatattttcgtgaatggtatcagaaggttttagtccagattgcttctcatatactaatgcagtaggtgcatgtgctaacttagcagtt

SEQ ID NO: 102177 - DNA, 410 bp, Glycine max
  unsure (1)..(410): unsure at all n locations
gaaagagagactattccaaatacttcttctntctgggtctcgaacataaataatattttctttaaatataaataaatctcacttattcattaaatcatgtaatgaaactatttttaaaatatcttttatataataaaacttaatattttgtatgtttaatatcaaattttaataaaaaataatctaaaaaatatctattttttaattaaaaataacacagtttaataaaattaattaatctttttaataagtacatgaaatatttctttcttcttcttagaatcgagatcagataaataaatactactactatcatggagtagcggcagcttacttatttaaattaagcgtactatataataacttcaatatttcttgctttaatgcaagtttcttgctttcatacttta

SEQ ID NO: 102178 - DNA, 416 bp, Glycine max
  unsure (1)..(416): unsure at all n locations
agcttcatgatgaatcaaaggtgattcatatgtgttttgattataacaatgatgatcacaaaagaagatgacaaaggtgatgacaaaaagctcatagatcaatccaagaacaactcatgtgaatcaagatcaattcaagagttcaagataagaattcagaagaattcaagactcaagacgaaagtttagagtcaagattcaatattcaaggctcaagatctcaagaatcaagagaatgcttaatcaagattagtatgaaaaggttttctcaaaaattgagtagcacatgatntttctcaaaaacatgtttaccaaagagtttttactctctggtaatctattaccagattgttgttatctgataccagtagcataactgttttgaacacagtttctaattcgaatttacaaccgtt

SEQ ID NO: 102179 - DNA, 324 bp, Glycine max
  unsure (1)..(324): unsure at all n locations
aaagatgatgaccaaagtgatgaacagaaagctcaagtgaatcaaagaacatctcaagagaatcaagaacaagtcaagagttcaagaatcaagaagaattcaagactcaaganaaaagcctacaaacaagaatcaagattcaagattcaagatctcaagaatcaagatcaagattcaagactcaggattcaagaataaagaaaggacttaatcaagataagtattaaaaagtttttcaaaactttgaatagcacatgagtttntgacaaaacctttaccaaagagtttttactctatggtaatcgattaccagtagcaaaatga

SEQ ID NO: 102180 - DNA, 429 bp, Glycine max
agcttcaagaatgatgttgataatgctcaaggtatttcaaagatcattcaagatgaattgcatggacgaagaaagcaagatgtcgagccaagcaaagatctcaagataagaattaatatggactcttagaaaagcttttgaaaagcacatatgataggccaagtgagcttctatcttaacaaaaacttttccaagcattttactctctggtaatcaattaccaaaggttgtaatcgattaccaatggccacaaagctttctggaaatgttctcaaagttatttttaaagttttcaaagctgtaatcgatttccaaaactatgatatcgattaccaatgctttaaactggttaaaaatgattctggtagtgtgtaatcgattaccagagctcttgaacgttggacatatgaattttgaataaaattaatt

SEQ ID NO: 102181 - DNA, 322 bp, Glycine max
aatggagaatagagatcataatgaagaacacggacgagaagagggaatgatggcgttcctagacaaaaccgaattgatggtattaaactcaacattcctccatttaaaggaaagaatgatccggaggcctacttggagtgggagatgaaaatagagcatgttttctcatgcaacaactatgaggaggaccacaaggtgaagctcgccgccacggagatttcccactatgctcttgtgtggtggaacaagctacacaaggagagagcaagatatgaagagccaatggttgatacatggactgagatgaaaaagatcatgagga

SEQ ID NO: 102182 - DNA, 416 bp, Glycine max
  unsure (1)..(416): unsure at all n locations
agctttagcanagcttaccgttagattgttatctacccacggcagaggtctccacagaggccattgcctccctcgcccaatattatgaccagcctttgaggtgcttcacctttggggactttcagttatcacccatggtggaagagtttgaagaaatcctgcgatgccctttgggaggaaggaaaccatacctcttctcaggattttatccctctttagctagaaattcttaaatagtccaaatctcgacacatgaattataccgtggaaagctacgtcaaaatggtgtggttggagtaccaaggaaatgtttggaagcaaaagcaagagtcttggcaggtaaaggcgaatgagccccgtgcatggacattccatcagttttgatcttctgggggcgcctcttttccaatgtggat

SEQ ID NO: 102183 - DNA, 437 bp, Glycine max
  unsure (1)..(437): unsure at all n locations
ctataagtgcgggtctgggagacgaaggtcaagngttctcgatatttgtagatgatgttccaagtacttcggatttggtccgaccatgccctcctgatttccagctgggaaattggcgagtggaggaacgccccggcatttacgcaacaagcataatgtaaaccttcacggttttaaaagctctatagttgggcctaggctttagagttttctttatgttaaggctttgtgtcttttgtttttgaatttataatacaaggatctttcttcatctgttcctggtctctacccattctcattcatttgcatgtttacttctttctctgaaacggcagattcgatgacgagtcccccgaagtactaatacctgngacccgtctatcaacttcgagcaagaaatgaaccaaacggaagatgaaggagatgaggatgtggga

SEQ ID NO: 102184 - DNA, 437 bp, Glycine max
  unsure (1)..(437): unsure at all n locations
agctntacgatgtgttgccacatcaattaatgtttacttccatctaatctcaattctctgatcctgtaaaaaaagaaaatctcaattctgtatgatagtttcatttttgagacaactattgtcttgttgtctatgctacctttttcttcaacgtttactattaaaagggcacaagcaaacaaggcacaataggttggcaaaacccaaataagtaagatactatagtaattgatcggtgcttcaagaaaaggacaaaagtacatttttgggaatggataatcatgctcacattcaaaggaactactgatagacatggaaaaaaaaaatcagtacccgtatacacccatctgaatcttctgattttgatgaatatatattaaatggatcggatatgaattcggacacaaggcggatacgggtatgagtataagattatt

SEQ ID NO: 102185 - DNA, 473 bp, Glycine max
  unsure (1)..(473): unsure at all n locations
cgcatcttattacaatattctcttcccaagtctcaactcattaatattaatgggttntcgcttacctggcatcaggaagacatcaattgctgcaaaccaagcatcttccaaatctgtggaggtgccaaagggctaccttgttgtctatgttggagacaaattgaggcggtttgtgagccccgtatcatacttgaaccaaccatcctttcaagaattgttgaatcaagctgaggaagaattcgggtatgaccatccaatggngcggctaacaataccatgcaaggaggatgagttcctaaccgtcacctctcacttgaatgaccctgcaatcatgctaatggatacaccgatagattacatgacgcaatttgtcagaagaggcttctctttattgttacgattttatttctaccaagtctaaactgttcctgatgagaataatgcanacaggacacgattgttcatacttttgc

SEQ ID NO: 102186 - DNA, 373 bp, Glycine max
  unsure (1)..(373): unsure at all n locations
agctnttngctcgcaaattccttgttgcaggtgtgtngttttttttggtttgtgctaaaggtggtcttcgttattggaagtgcggtagacaggctttgtggttgatttacggatggcctttgtggataactgggtggtgggtaaggaggaggtttgttatggctgagtaatgacattgtcgggttggtgggaaacttggccgtataggaatggcactcacagcatgggtttctccctctttctcaccctcttcatttgccccagttttcttagtcgtcctagtgagatgatcaaatttgcccttttttcagactcacatcgatcctttcactggcgaagaccaaatctgtatagcttttgagggtgcgcagcc

SEQ ID NO: 102187 - DNA, 520 bp, Glycine max
  unsure (1)..(520): unsure at all n locations
cactatctaaactcaagctcgccacccagctcgcccaggcgagcaggttgcttcctccagaagcttctttcttctggaggaaggatctggaaggcccaagtgggccagattgctatttgcaccctctttttactaaatgcacccccttccatttttttggtaattctttctccgtaacgttacgaaactttacgaatttcgtaacgatacttattttccttccgcgaggctacgaatccttatggattatgtatttactcttttttagctttcgaagaagttacggaaactcacggattgcgcaaaaacacctctattcgatttccgccacattacggaatttcacggatcgcgcaaggctgcttccttatgatttctgagacgtctcgggacttcatttattgtgcaacaaaggacgccaagtatctcanagcggctaaccaaagggtgcatgtcatcaagtaataatccccggacgaaattagggtatgacagtagcccctctctacttacctctcat

SEQ ID NO: 102188 - DNA, 324 bp, Glycine max
  unsure (1)..(324): unsure at all n locations
agcttgtagggttcaccccanattccgttgtatatgctaaacttgatcccatatctacttgataattcaatggtagccataaccctagccaaggttcatcaacctccatttctccgagaatacgactcgaacacaacgtgtgcttgtcacggagaagccccggggcgttccattgagcattgtanggctctgaagtgtagtgtcgcaacctacccttcggcgggagggcgacgcgagactcgcgggatgcgtgttccacgaaaggaatacgcgcggagtcgccaccaacgtttattttgaggataacgtcngaaaaactggaaa

SEQ ID NO: 102189 - DNA, 477 bp, Glycine max
  unsure (1)..(477): unsure at all n locations
tacccatcacatgtggtactaggtggcggtttggttatggtgcacaacaagttttccacatccacaatgcgcgcataaacccaccatccnctgttgcccacctccaactgagctcacgtactcccacgtagcccatatcctcgtttctctcaacaccgggtccccatcaatcctcccaagcttccccaacatcaaagtaatacaacattcacacagcataagctatcacagccaagtaaaacagggcataggcagaaaactctgctcaaaacaccaaccaaaatcacagcttttctcacttaaagaccccagtaacaattccttcgatccaattcgttaaccgtttgatcgactccaacattttactggaagtctatagtacatatgcctacacgttgaccgttgggatctactagaaaacatccagaactcattctgtactactcttttcacaaccaatcacacacnaagcatttt

SEQ ID NO: 102190 - DNA, 425 bp, Glycine max
agcttgccggcgataagctcgtcgattccgatttctctctcgcgatctgctccaactgggtctcctccatggtggacttcgtgtggcggaagcgccgcgccctcatggagcgctccttgatccttcccgacgagaatttccgcgccaccgtgttccccgtctgatactccgtcaaggccgtggcctccggtggcgtcgaggtcattaaaaaactctccaaggcttactctacctctgcatccaatgcggatgctgaggtagattcccacgcggagaagctggtgggggtatctgatgtgctcactcacctggctcccgtccttgtttcgtcgatggagccggcgtcgatctacgaggttgggatcaatatgttgtatcttgctgatgtgcctggagggaagcctgaatgggcccaaaatcgatca

SEQ ID NO: 102191 - DNA, 489 bp, Glycine max
  unsure (1)..(489): unsure at all n locations
taagctngnacgcacaccnttcgcgtgtatgatatccactcgacaaggtttgaagtatattatatcttcaatcctataacgcaatggggcgaacaaaagtgggcagctaacttgaatgaccattattgtcaatgaggaaggtattttgcgcttcactatccatgttcacacattattgtagcttgtggttacatgagcatgaactactaccaatatataaatgttgtttacactaatgagcacatcttaaaagcatactccgcaaagtggtggcctcttacgaatgaagcggcaattcctccttctgatgaggcatggacactaatccctgacccaactacaattcgtgcgaaaggtcggccaaaatcaacaatgataaggaatgagatggattgtgtcgaaccatctgaccaccgacaaatatgtattatatgtggagcagaagggcacaatatgcgccgatgtccaatgcaatctgatcgtgggagt

SEQ ID NO: 102192 - DNA, 394 bp, Glycine max
gatccttaagtcacctgaggcatgaagctttgaatgagctaagatcacgtgttgttattattttaagaaaatagagaagaaaaggtcttagaaaaagtaactcacacctcctaatcttgactcttggttttcgtgtatggctttacgcattgtattgtttgtgcatgaatcacttaatgcatgctaaaataggtgtttctagatagggcttacagtagcagtcttttaagctcttacttacaaagtgatgcaatcctaccccccaagggcattggatagaaaactccaagaacattgggtctaaaatgcaagagaaggccctatggttctcatgagccttaaggtagatcttgggcacatgaacttactatgaacccacttatatttgtacata

SEQ ID NO: 102193 - DNA, 79 bp, Glycine max
agcttaggtgaaccacgcctaacagtaagcttctctttgtatttgaggggatgcaagtagccgtggctgctgtgacaga

SEQ ID NO: 102194 - DNA, 223 bp, Glycine max
ctcttgagaacctcctggataatattgtaaaaacacgcgagcttagcttcacataaccctatgagacctgaggtgaccgcctgacaaacatcttgaaaatacaaaacaaagagctctgatagctatacatcctaggaactggccaagatacaaagcccatacgaaggagtcacctattgtaaattatacaaacacgatcttggctcatgcttaacccatgggc

SEQ ID NO: 102195 - DNA, 170 bp, Glycine max
  unsure (1)..(170): unsure at all n locations
aactccgctcacagtactaacgacggccgatggtggcgcatgaacagattctctcattttgatagatgcaacgcgacagttattgtgctaacaaaccatcttcgactctcgatgaaacgatatggcgatgcgtaagaactctgactgatctaccatcctattntgaaata

SEQ ID NO: 102196 - DNA, 415 bp, Glycine max
agcttgtattcttaggatcttctttttaatgtattcctttgcttcttggatgaagaatggaagtggaatggagaaggaagagagagaggagacgccacttcaaggagaagatgagtctagaagaagctcaccaccatatgaggccatggataagagcttggaggaagaaggatatgaatgaagggagagggagagaagagcacgaaattttgtgctctaagagagctttgaaatctaaagtttaattttcaaatgatcaaagttgaaaaaatgcacacacatgacctctatttatagcctaagtgtcacacaaaattggagggaaatttgaatttcaattcaaatctcacttgaatttgaaattgaatttggggacccaaactttggagaccaaatttcactaattatgaatagt

SEQ ID NO: 102197 - DNA, 413 bp, Glycine max
cgacacgtgtatgcttctagttgacaaagctggaactttgaatatttatataagcaacacctgtttcaacagcgacacgtgaacacaaatctaaacacacttgctttttaatactggctttcacgctcccctaacttttgtttgtgtttttgctttgccccttctctttcttcagatcttcttccttttcactctcctctctctaaatgctaaattgaaccaaagcttgcaacttggtaaagacaaaatcacttgcaaaaatgaggggtcctttgggtgcaataataggaaggtacccattaagtgagtgttcgaggaaaccgacgaaaccaattgcagtacacatgagaaccttggagaattctaaaatacaaataaaaaatcagaacaataaggatccaccactcacagat

SEQ ID NO: 102198 - DNA, 197 bp, Glycine max
agcttgactaggcgagtagagcctatacatatttccacgttttttatgaaggaatccgcgcgcgaacgagacctcccttgtatataaggcgccatcgatatttctgttgactttactacaatagatcgaccttgaatattatatcatgatttacctgtttttgattaacaacatggttgccacacgacggcacggtc

SEQ ID NO: 102199 - DNA, 366 bp, Glycine max
  unsure (1)..(366): unsure at all n locations
acatgtgtgacgagacggcgtgtttatctatggngcacaacaagttgtccacagaaactgatcgcaccttaacccaccattccctggtgcccacctacaactgagcacacgtactcacacgcgaccatatactgtgctctagaactcggtccacatcaatgcttcaagcttaccgagatgcaagttactcgacttcatacaacacacaccatcacagccattgtaacatggcataggccgaaaactctacccttaacaccaagcgagatcacagtatttgtgacttaacaccacattcacaattacttcgtccgagtcggtaaccgctggaacgactccaaaattatactggaagtctctatacac

SEQ ID NO: 102200 - DNA, 261 bp, Glycine max
cgatttatcatgcacctgaatcggacctcctagtcgaaagttatgaccatctgcattgcttaagagctcccattcgtcaattatgagccgctcgatatattatgcgccacaatccgacctccgacgtgaaagctattaccatttgaattgctcgagaggttctgttgttcaatttcgaccgtctcgatatattatgtgcctgaatcggaaattcgagcgaaaagatatgaccatttgaattgctcaagagcttccattgtt

SEQ ID NO: 102201 - DNA, 427 bp, Glycine max
  unsure (1)..(427): unsure at all n locations
agcttcaagaattaatggcctcatcaaactatttgttccccgaaagcaattcaattaataggcctcccanttttaatggagtgggttaccactattagaaaacccgcatgcaaatcttcatagaggctgtagatttaaacatttgggaagccatagaaatagggccttatattcccaccatggttgctggaaatacaacaatagaaaagcctagggaagattggagtgaggaagaaagaagactagtacaatataacttaaaagccaaaaacataattacatctgccctaggaatggatgaatactttagggtatcaaactgtaaaagtgcataggatatgtgggatacactacaagtaacacatgaaggcacaacaaatgttaaaagatctangataaacacattaactcatgaatatgaactatt

SEQ ID NO: 102202 - DNA, 415 bp, Glycine max
  unsure (1)..(415): unsure at all n locations
cgagatgaggaagtgtanaagggtgaaacttcctgctcttattcgtgatcatagagnggtacctggagatatgtcgcggnggtcaggagaccttgcggacgtcacgtggggtgctattgcccaaaaccaagcttgaccaatcccgacccaacccgggcatagtcagtcagtgagaacctgtgatgtacctaaacaggcgagctcctggcagtacacagataaaacgaacaaagaccacaaagcaaggaggcttgtgtggtggctggccaactgtgaactttgatttatatgtgagatatggcctctggtaatcgattaccaagggtgggtaatcgattacaaggcttaaaaatgaagacaggaggctaagatggtctctggtaatcgattaccaaggggtgtaatcgattaccag

SEQ ID NO: 102203 - DNA, 471 bp, Glycine max
cttaagtcacctgcggcatgcagcttaagggcactaaaccgggtgtattttctcctaatgcctacactccgaagagtccgtcaggacctctccctcctgattcagatccaacccagaaaacactttagcacacaaactctatctatgaactatataaaacacgtgactcctcaattggtctcaaaataatgttatctcatcattcttgtgattaaactcgtcgaatcaccacagtggttcccatcacaatactcgtcacacattagctcgtcactcttaaagggttttacagtcgtgtgaatatatagttcataacatacatcttaatgcacacaatatctcaatgtacatatatattacaagtcaatacatacttaaattatcacatacactcgggctcaatcacaatggtataattccaaaagtagcctgttatcacatctcctgaatatatacctatacctgtgaact

SEQ ID NO: 102204 - DNA, 484 bp, Glycine max
  unsure (1)..(484): unsure at all n locations
tcaaactaagctctaactgacattgaatgttccaatcgacttttatatgatgtaatctattacattatattggtcatcgattaccagcgtatctgaacgttgaaattcaaattcaattgtgaagagtcacatcttttcataaaatgctttgtgtaatcgattacatggttttggtaatcgattatcagtgacaagttttgaataaaaatcaaaagatgtaactcttccaatggttgtcaagtttttctaaaggttataactcttctaatggttttcttgaccagacatgaagagtctataaaagcaagactttgacttgcattttaagaacaacttttacacaacttttcatatattactttacaacctttgaatctctctgaatatcttctcgaacttctctttcttcttcctttgccaaagctttctgagtntctggttctcaactttacagagacaaagcgtgtatncatctttcattctc

SEQ ID NO: 102205 - DNA, 387 bp, Glycine max
tgcaagcttgagccaaaatcctaactcaccataattcttgtattagggtgttaatgtcaatccttaccctcggaagcaaaaaagaagagaaggaaaatttccaatcaaagaaaaaaaagagaaggaaaatttccaatcaaagagaaagcaaaaaaaaagagagaaggaaaatttccaatcaaaggaaaaaagagaggaaaggaaattcccaatcaaagagtgggagaaagcgaatagaaaagaaagaaaattcccaaccaaagagtgggagaaagtaaacggaaagaaagaaagctcctgatcaaggatcgaaagaaatcagaagaaatgtgcagaaaggtctttggaccggacaatatctgtacaatacagaattgtcaccaaatg

SEQ ID NO: 102206 - DNA, 494 bp, Glycine max
  unsure (1)..(494): unsure at all n locations
ctaagctggtcgagcctacccgtgaagatcaagaacgatgaaagctattgtttatctttataaacggntcacacctttgcgagattcctcacggaaaacgttacggaaacgtttcggaagcgcctcggcttatatctttttttacggaaacaatctttccaagcaaattccaaagagagagaagtgcctaatgggctgggatcgcttccttcttcatttcctcccctatatatagcaaaatacgggaggtggttgccgcccaactcgcccaggcgagctcagctcgcccaggcgagcagggttgcttcctccagaagcaaccgccttctggaggaatcttctggagggcccaagtgggcctgggtgctattngcacccccatttctactaagtacacccccctctgctgttttctttggattctctttcganagttccgaaattacgaattcgtacgaacttgttctttcgtatgtacgaccttcggatactat

SEQ ID NO: 102207 - DNA, 443 bp, Glycine max
  unsure (1)..(443): unsure at all n locations
agcttcgtttancgactaccgcgtaagggtgtctgcgtttntcagtaagataattagagaaaatatgattaaaaatttgccgcaaatagtgttgttgaatattgtcggcctcgcgctgtttctttcctggtatatccccgataatcatggattctggttgccgattgatgcggatactttttatttctttaatcaaaaactggtcgaaagtaaggcctttttgtggctggttgcattgaccaacaatcgcgccttcgacggttgttcactgctggcgatgggtatgttgatgctgagtttctggctgaaagaaaacgcccctggcagacgacgtatcgtgattataggtctggtcatgctattaactgcagtggtattaaaccagctgggtcaggcattaattcctgtaaaacgggccagcccaacattgactgttaccgata

SEQ ID NO: 102208 - DNA, 501 bp, Glycine max
  unsure (1)..(501): unsure at all n locations
ggcagtgatgatgtttcactacccactgcacgtgtctcaggatgcatattctttgcggtgttatttgcactacatgcagaaagcagaaccgctactgcaatcgcgggaatcccgcgcaagatatatctcaaaatcggttgagatttgaccatgttgtttgttttcccttgaagtccttaacgacaaatatcgttataaaaaaatgccaagcgacacgagactaattacctgngcatgttgaaacaattccttaaggccaaatctgtggactaacgcacaaaattatatgctgtgaggataatctaccgccgaggcaaaacgagttcgagattacccgattggtgcggtcttggcgagcggttntacatngatttttataagaaaaagtgatacaganagttaataagcggggttggtcaattaaagtacaattgagtgaaacgcatgcaatccattcatttacttagagaatgatttttgcgttcgatagatgaaagcacg

SEQ ID NO: 102209 - DNA, 140 bp, Glycine max
  unsure (1)..(140): unsure at all n locations
ctaatgtgcgccaagcgcacgagcacatacaaggccacctatttaagcctgtaatcagactttagagagagtttccactgggattcacagctttgcatgtctagaagttctagagagagnaaagttttaccctgcctttt

SEQ ID NO: 102210 - DNA, 410 bp, Glycine max
  unsure (1)..(410): unsure at all n locations
cgctgaagaaggagcagtttctgtagagacttataatgtattttattattgctctaagagagggggctaaaagggtaggtattatgaaaaaaaatgttgcacaagtcacacctccaaacactcatggtaatggaagctgcctgaaagaccatagcaagaatagcccttcatcaatttctgatgtcatcccatcattatggccttggcaagattcagtgtctcatcacttcaatcttaatgacctgnggcttcctgttactgatttgaatacccctagtatggctcctgtttctattcaccgggatggtggccctccagataacactattgatttgaatcaccctctgtattattaagttatttggttcagatatactgcgcattgctntaattgactatcatttatcgat

SEQ ID NO: 102211 - DNA, 211 bp, Glycine max
tggagtggaggagaatctatgattatgctcggcctccgacttgcttgataatagtgtaacctcttctgagcttgtgtcttataaggacgctctggattccctaccgacaaaacatgattattcttgagcgatgacacctctagaacataagcgtgtgagttactgaatcgcggagagttgctgttatagacgcctagacattgatctatgt

SEQ ID NO: 102212 - DNA, 378 bp, Glycine max
  unsure (1)..(378): unsure at all n locations
actcagcttgagccaaagcctgctacctagacactgctcagtgttttttgtctatccttaccctcggaagcggaacgaatagattggatatttccactctcacaataggagagaaggacgatttccaatcatagagaaagctaaaatgaaaagaacgaaacttctccaatgccagagcgggagaattgcttaagaagataatgagaattcccaatctaagaatgggagaacgttaaaaaggcataacaagaacgaatgatagctcctgatcacggatcgaagganaacataagacatgtgcagaaaggtctttggaccggacaatatctgaacaatacagaattgtacccaatttcgcggagttagctgggtgacaac

SEQ ID NO: 102213 - DNA, 336 bp, Glycine max
  unsure (1)..(336): unsure at all n locations
agcttggagaatggatagacaagatttatgttattgtncggttcgaaacaggacaaaagggatgccccacatgatttacatgacacaaaggctgaagagatgatgtggatagttcatgcaagactggtcgtgcatgcacctacttggacgcgtaagtgtcaaagtcttatggtcacgctatgcgtgggcttacgatatatttcctgtctttaaataacccaatgtttccggatatgttgttttatattttgtgatgcatcctactcatttgggacggtcgggaagtactcagggacacccttcgggggggacactgtttcaaaaattggttttgat

SEQ ID NO: 102214 - DNA, 410 bp, Glycine max
gatccttaagcacctgcggctgcagctagagaggatgcttaatggtgatattttgagaaagagaaagagagggggggagcatgaaattgaaggaataaaagagagagagaagttgaaatttgagttgtgtctcacaagactctcattcatcaaagttacaacaaatgttacacatgcttctatttatagactaggtagctccctcgagaagctttcttgagaagattcctagagaagatagagcttagctacacacacctctctaataggtaagctcacctccttgagatgagaagctagagcttagatacatacccctataatagctaagctcacccccatgcaaaaaatacatgaaaatactaaaaaagtccttactacaaagactactcaaaatgccctgaaataca

SEQ ID NO: 102215 - DNA, 440 bp, Glycine max
  unsure (1)..(440): unsure at all n locations
agctnttaagtatgggtacattagtaatttcatatactttatttttagtatatagatattgatgataattgattaagaagccgcaaaaggaaaacatatttacaaaaaggaagctgttacatgacataaagaagtgtcaatgatgtttatcaaatttttgtattgacttttgtacattgagacttaattcgattatactcttgatattttaaatgaataaaaaaatagtatttgattaataaaaaagtatttgctaacacataagtgatgagtctaatggatttatattgttttgatttgacttttagggtggttattatcaaattcaatacggcaaataatcaattttgtctctaaatgtatagagcgctgataaatttgtttccaaagaagaaaattcaaatttaattcccaaaaatgagaaaagtaccataaattca

SEQ ID NO: 102216 - DNA, 471 bp, Glycine max
  unsure (1)..(471): unsure at all n locations
tngatgatgtcgagacgatatcacatgtgtgccatcgttatttatgttgataatgtgaatgtatgtctacatgattatgatgatgtcagaagaagaatcaaacaacgctcatttgcttcatgattagtacaagagtgtttcaacaaacaaagccttgattcaagatttcttcaagatcaagccttgcctcaaaacgaaaggtttcaagtcatccaaggcacatgtcatcgattaccattacatgtaatcaattaccaatacatgtaatcgactaccaatggtttgaaagtgtgtaatcgactacacatcatatgttatcgattacaagagactctgaacgttgggaattcaaattctaaataaagagtcacaattgttcaagacacataactgtgtgatcgattacacttatgctgtgattgattactagagaggattntctagtaatatcaccaacagncacatcttatc

SEQ ID NO: 102217 - DNA, 416 bp, Glycine max
ggatcttaagcaccgcagctgcagctttcgctattttggttccctctatttaacacccgtgcagcctatagcacccacccagagggaagctacccaagtatcgactccgaacacgactcgaccggccgtgaattccaacacgacaaggaacttccctccgatgccattttcggaattcaccccgctcccaatgacgtacgaagaatttctaccatccctcattgccaatcatttggccgtggtaacttccggaagggtccctcaacccccttttccgaagtggtatgaccctaacgcaacttgcaagtaccatgggggtgtcccggggcattccgtcaaaaaatgcttggcccttaaatacaatgtcaacattaatggatgccggatggctgactttccaaatgatcggaccatgt

SEQ ID NO: 102218 - DNA, 290 bp, Glycine max
tctaaactttgtacaagaatgaagctctgataccacttgttattcttgtggcctcagatatcctaagaaggggggggcgaattaagatattccaaacttctctcctaatgaaaaatctatcttactctttacttaaggtatgaatatccttaatgaccatcggcttaaatattaatgcaaatgaagcagcgtgcattatgaatctttatgcctaatcaataaaggagattaatggcagagaaaatgccaacctcagtttatactgtgtcgggcacccccttgtggctacg

SEQ ID NO: 102219 - DNA, 426 bp, Glycine max
  unsure (1)..(426): unsure at all n locations
agctntaagtaaagcttgagttgtttagttatatgtgacaatgactaatacttgtaacttataaaagttagtggagcttggcggtttgtcaagaacttgatatggtctcaatgatagaaacgaaaatgtataaattcttatggcttatatgttnttcttattattctactttaaactgtcctaggtttgaattaaatttcttcttggaaaatcatgtctattttgtaaaatatattttcatcgtttaaaagtgtgttctgtcaaaaaaatctatgtcttataaagttttcttcaaacaataactttgtgtttttcaaaaagtcttgaaaagtttctaaaattatatttaattccttcttgtgatatttgcctttacaggtggtaagcaacacaaaacacatctatattaaaattattatgaataca

SEQ ID NO: 102220 - DNA, 474 bp, Glycine max
  unsure (1)..(474): unsure at all n locations
cgatcttntagtttcttatctctaatctttaatccctgaacgaactattcaagtttgtaattcgaactttaattatcttttaattcgttcctaaagatagatcgccaaatctgttgctaactgcacattaatctgttaaagatataacagatttatgtgtccagtattttcgggcaagatgtcctggacatcgtatccgacatcgtggatcctgcagcttcaattcttcatttgacattctatcttgccttgtgcattgtgcagcccaatctgattccttgacataacgttggacatcatgtgcagcaactccagctttccttcattgtctaagtgcttatgttttaacaaaattntagccaatcttttaaagctcagtaaagctaagcactaacaatctccccctttggcanattttgtctaaaacatacttagacacnttctgaacacgtacgagcagttatgcaagtggga

SEQ ID NO: 102221 - DNA, 253 bp, Glycine max
  unsure (1)..(253): unsure at all n locations
agncttgagagtgaagttccgaacctgtgatcttaataagatggcgatatatgtttatggatgtcaacaatagatctttttatcaaccgaattcgcgaacccaaaatgcattaaccatgtattatcctaaatcggatgatataaacgggatagccagataaacaattactattgattttgtaggctaatactcatgagctttaatgaaaatagtatgcatatatatatatatatatatatatatatatatata

SEQ ID NO: 102222 - DNA, 381 bp, Glycine max
atgatgatgccagatatgtcaacctcaaaatgaacaacaaagctctagaaaattcaaaaggtcataacttttcactcggaggtccgattcaggctaggaatcctacacttttcctttaacactgagcataaacacttttctcaaggtaaacaccagtcgggttattgtataattcacagtgtcacatcaagtgttaaccacacacttattcaatcaaatctcaagtccacaatttaacatctcataatgtcacaatccaccatcacatgtttacgtgtatctcacaaattaacacatgttcaactttatacttatactcaatctcaataacaatattataatctcaaagaaaattgttatcgcataattcatcacatattc

SEQ ID NO: 102223 - DNA, 491 bp, Glycine max
  unsure (1)..(491): unsure at all n locations
tctagcacactccagacatcttctcaaagatcccaacggtcagatcatggtgaatggtcttgtgaagttgcagatcaaatttcgagaagatccaacggctaataaaggctgggcagcgttnttaccgaggcagcttcatgtagctttctctagaagcttcattaagaggctgtctccagaagcttcctcgtggcttctttgagaagctttctcaagaggcttctttgagaagctagatccttatctatccataccactctattaactaaattaacttccttaaaaataatttcggatgaaaataacgtaacaaataatcaaacatcaaacataattactaataatatatagatatatatatcagggtgttacacgtgtcaacatccctagtgaagtgaattaccaagggcttgggtttgctcaagctcttgtcagccgaaggcatgcacatatattgctctcccttccttgcaccataaacctcanacatg

SEQ ID NO: 102224 - DNA, 364 bp, Glycine max
gtcgcaaggggtttgtggtttgtgctcctctgctgaccaccatacagacctttgcccttccatgtagcaacctggagcaattgagcaacctgaagcttatgctgcaaatatttacaatagacctcctcaaactcagcagcaaaatcaaccacaacagaacaattatgacctctccagcaacagatacaaccctagatggaggaatcaccctaacctcagatggtccagccctcagcaacaacaacagcagcctgctccttccttccaaaatgctgctggcccaagcagaccatacattcctccaccaatccaacaacagcaacaaccccagaaacaaccaacagttgaggcccctccacaacct

SEQ ID NO: 102225 - DNA, 390 bp, Glycine max
  unsure (1)..(390): unsure at all n locations
tcttaaaagaggttttagcagcttgctcaagatccaagangagtttggcccaacacttagaagccacggagcatagcatgctagctataataggacagttcaaagaagagttaaaccagtctttgacccatgagcaaaagctagaagaggacttcgcacaagcatacgccgagaaggaagcatgagggagggtgattgatgcattgcatcaagaagcgaccatgtggatggataggttcgccttgaccttaaatggaagtcaagacctcccgcgactactagccaaagcaaggcccatggccgaagtgtgttcagcctcagaggaaaatcacgggctaatcaattactgtcaacacatgataaatttaatggcccatataattagaaatc

SEQ ID NO: 102226 - DNA, 433 bp, Glycine max
  unsure (1)..(433): unsure at all n locations
acctgaggctgcaagctnnttggcaaaggcttgtggtatgactttcttggttcttatcatgtncncatntatacatttcattctaaaattcagagatcgatgcaaagattattactccaagctagtcgttcactcacagagtaaggtcacactctcaccggttttggttcaagcttttctttctcaatcacattgtctactgactaagaattctaaatgcaagttcacattcttgttctttctttgtctaacatacacacttgctcaaactcatgaaaataacacaaattccatcaaaatcatgcactcaattcaaaataaaagcatacacccattttttacaaaagacaaaagtgtttcactgccatgccatcaaaaactatattatacttctcaaaatgcttcagaataagcataccaactattcataaat

SEQ ID NO: 102227 - DNA, 478 bp, Glycine max
  unsure (1)..(478): unsure at all n locations
gcttaatggagganaagaaagagagaaggtgtgatcactacattgaaggaataaaagagggagagaagtggaactntgaagtgtgtctcataagactttcattcatcaaagttacaacaagtgttacacatgcttctatttatagactaggtagcttccttgagaagctttcttgagaaaacttccttgagaagcttctttgagaaaatttccttaagaggctagagcttaactacacacacccctctaatgactaagctcacctccttgagaagcttccttgagaatatttctaaagaagttagagcttatctacacacacctctctaatagctaagctcacctccttgagataagaagctagagcttagctacacaccccctataatagttaagctcactcttatgcccgaaaacatgaaaatacaataaagtccctactacatagactactcataatgccccgaaatacaagact

SEQ ID NO: 102228 - DNA, 427 bp, Glycine max
  unsure (1)..(427): unsure at all n locations
agcttatggactntgctcttagccagggtgctgtttattaatcagtacaagacacctcgntgtgtgaagtatgctcccattgttgagcttcttgactcgaaaactgtttccaattacttcagtccaaaatgtccactgtgggttcctggtcacaagaagtggtgcatgtaccctcttgacaacaaataataataataacgtatgagtactgctatagtataggcaatggagatattgcttttatctttgatttgttgtattaagtcgtagaaaaaccttcatggtcgatcgtccattaatgttgtagtgtctcttttgaagttcttatttatccaatctagtgtaagatctttttaatctacggtggctaactattattgcaaattacttataagaggtctctaagtttgaattctgtataataaaa

SEQ ID NO: 102229 - DNA, 452 bp, Glycine max
tcgaccttcgagggaatattgcatttgtttatatcacgtggtctttataagagattatgcggatctttggatatggaggagttgtgcggtacggacttatactatgaagtaggcttattgctcggtgcaacctaatgaagatcatcaacatgctcctttgttcaaagtcttatggagtattaattgcccatcaaaggttgttgttttcggctggagactagtgtggaatagaattcaatcatgagttgagctaaagacaaggaacattttgggaccaactcaaagcatcaactgcctattttgttggaaggaaaacgagacagcctgtcaccttctattcttatgtagattcacttatagagtgtggtagcatatatgtgtgtgtgtgtgtgtgtgtgtatgtgtggattgcgtttgaacaatctttgcctcaaacgtgctatgaacaattt

SEQ ID NO: 102230 - DNA, 427 bp, Glycine max
  unsure (1)..(427): unsure at all n locations
agcttctcgatatattatgcacctgaattagttttctctntgaaaagttatgaccaattgaatttctggagagcttccgttgtgcaatttcgagcgtctcgatatattatgcacctgaatcagacttccgtttgaaaagttatgaccatttgaatttatggagagctttcgttgtgcaattccgagcgtcttgatatattatgcgcctgaattggacttccgtgtgatatgttatgaccatttgaatttctcgacagcttccattgttaatttcgagcgtctcgatatattatgcgcctgaatcggacttccgtgtcataagttatgaccatttgaatttctccagaacttccgttgtttaatttcatgcttctcgatatattatgcacctgaatcagacttccgtgtgacatgttattaccatttg

SEQ ID NO: 102231 - DNA, 405 bp, Glycine max
tttattccgagcattagagtcatctcttgtatcttactgagagtgattctcctagattcttgagtgatcaagaacaccctggctgtatcaaaggactttcacaacccttgtgtgttgccctcgctggaaagagagattctttccttactttcatcttcacccttgttctttcgaaccgcgattgcagaatatccacctctgcccacaattatgtcggggccgtaactcccattctacgcactcaaattaagtgattcttgagcctaaattgaatttcgaaacgagacctttcacctcgttttggaatcacctcatatggagccctgtagcttcagttattgccatttctatatttctgtcaagccaccacttaacctacgtttaccatcccatcattcatttatg

SEQ ID NO: 102232 - DNA, 427 bp, Glycine max
agcttgtcagatgggataaaggctcacattctttattatctacatcatattcaaacttggctaaataaataataaagtcatcttgactcaaagaatgtcatctaagtctcataccattaatatagaacctatattctaatgtcacatgctatgagagcgtggtgttcccgtgtcctctagcgtgaggttcttcatagtcatccacctattcatctgctgccccgaacacgatattcaagatcatcacaggattcctacacatacagcaaaccgggagtgagttatcatatttctaactactagagagaaacaccacaacatatagtcgccatatacaatctacttagcatatctcacattatttcatcactttgtcattcatgactcacacctttcaatcatcaatcactatacacaggaatcacat

SEQ ID NO: 102233 - DNA, 361 bp, Glycine max
  unsure (1)..(361): unsure at all n locations
gaatctacctaggatagatcaacatagtaatggtctcacggatgtcttatttctggaattatatacttgggactggaaaaatgataataatgtcctagcttcatgaggagaatgcagagttgatggaaagccattacattgaccacatcactttcaaacctctgtcaanagtgtaatgttggtgtgatggagccttccggatattaagaatctacagctgatcaaaaatggataaatgcaatgaaagatgacttacaatgattgaanagaataaacatgggagctggtggacaaccttaccacatacagcgattggtgtaagtgggttatagaacaagctcatccgatggttgtaacaaat

SEQ ID NO: 102234 - DNA, 418 bp, Glycine max
agctagaaggtaaactagatgccttgtgttattctgttaacccaactggccatgaataaaaaatctgcacctgtcgccagactctgtggtttatgctcctctactgaccaccacacagacctttgcccttctatgcaacaatctgaagcaattgaacagcttgaagcttatgcttcaaacatctacaatagacctcctcaacctcagcatcaaaatcagtcacaacagaacaattatgacctctccagcaacaggtacaatcccgggtggaggaatcatcccaaccttagatggtcaaatccttcacaacaatagccttattttcagaatgctactggcccaagcagaccatacgttcctccaccaatccagcagcaacaacaacaacaacaacagccccagaaacagcaaacagttg

SEQ ID NO: 102235 - DNA, 420 bp, Glycine max
  unsure (1)..(420): unsure at all n locations
agcttaacagattctcgggaggcatatttctttattgaagttgagggatcattctagaagcttaggggcagtgatgtantcatgccacaagccgttaggattgttagttagctgttacgtaactaactgcatgtataaaagccaagttcaaacccgtgagaggaatatatgaataatattctccttctgtgcttagattctctctctctcttgttttccctctagaatattctttcacgagaaaaggttcctcctaacattggtgctttcattgtatcctctccgccatggctgaagctacacgatcgaaaacaagcatggagcgttgggaagatgtgtttgcaaagctctcggcatccatgacttcaaagttcgatgaacttctcagtcgtatgaatcaattagaaaactcccacacca

SEQ ID NO: 102236 - DNA, 473 bp, Glycine max
  unsure (1)..(473): unsure at all n locations
gctttatatttaccaaggtcaagcttaagctnttaatgtagctttatttaaactttcatatttaaaaaggccaagcgtaagcttttaattagctcatttaaatgagttaagtacttaagtatgagcaacctttctttttcatgagccaagcttgaacttcaagtgctcaacttggctagatagacttgtntgcacctttactaatagacaactaatcagaaaattaaattcacatacaggaatacaatcattagtactaatgtattggtaacagacacacctcacttctgcatttaaccttgtagactgcttctctgaatgatgagacaaagctgttattaattctgatctgtcaacaaagggcaagggaaatgaaaagtattagtcgtgaaatttataggtgagaataagaacagaaccaacctgtgcatgatgaagatctggctcaatggtgtttctacataatggaaaat

SEQ ID NO: 102237 - DNA, 394 bp, Glycine max
  unsure (1)..(394): unsure at all n locations
agcttgtanggttacagtctcatgattgtcatgtgcttatgcaacaattgttagtcgnggctatacgagacatcttgccaaacaaagtcaggttagcgataactcgcctgtgctttttcttccatgctatatgtagcaaagtcattgatcctgccaagtttgatgagttggaaaatgaggccgcaattatattgtgccaggtggagatgtattttccccctgctttctttgacatcatgattcacttgattgtgcatctggtcagagaaatcaaatgttgtggtcctgtttatctacggtggatgtacccgattgaccgatacatgaagatcttaaaagggaatacaaagaatctatattgtccaaaagcatctattgttgagaggtacattgc

SEQ ID NO: 102238 - DNA, 457 bp, Glycine max
  unsure (1)..(457): unsure at all n locations
tatgcacggaanatgtaattatgttattgagatgcccgaaattcaccatttcctagttaaccatgcattaggtaccatgttcaattattttgttttttaagtgaaacgggtttatgatcccaacatggttggctcgtggtgcctaacacatgaaactaagaatgtagtgtgaagtttcacgcttcccccttttttgtttttgttttgtagaggaaaacgcanggatgagcaaacatgaaaacaaatggtatgcaattttgcagatcaaaaagtttgttgaacgcatatgcatgatgatgccatgactcatgcaaaatgtgaggctggaatatgataacggacaaatgcaggatatgttcattatgatgttatgaagagatgcttatgcgatgcatgatatgaatgcattttacggacacgagagcccggaaaatatctttcttacttgtgcattggg

SEQ ID NO: 102239 - DNA, 427 bp, Glycine max
  unsure (1)..(427): unsure at all n locations
agcttatacatacaataccgaatgtctttctctactacaggactactgccaacgtccggataagtagtaaagaacttctgaattagatcataacccactgcatgtagagggagcggaacgaggcaatactacactcaatcaaacaacgcaaggatatccttatactcccctgcattggtatagagcgctcttagaatagatcctgcggccctatccattgctgcacaaatgaaaaccatcgcaggatttgttattgttattcgacaaccttaacacacttacaagaggccccatagcctctaaagcataaacaccattattccaaaatgacgagcgaagaatacatgtgtggcgagcttgctcatgggctctttatctgccttagactgtcaccatncatctcaagaaaccatccttctaagattgg

SEQ ID NO: 102240 - DNA, 390 bp, Glycine max
agcttaatgatagccgcaatagatatgttcttatttctgcagggctacgcttagcgggaccataaatttcagaaatttcactatgtttgtgggcttagcgagctaggctcacttatcccaatggctgctgtaacgaaatgagcttagcccagataggctaggcttagtgtgcgtctttcaacaaaataattgactaagttacttaggcttagcaaattagccctgcttagccacaggcaactcatcagggagatgaatgttcttccccaaaagatgaactcgcttagcgcagtaggtgcgcttagcgagttcatctgaaaatgcatatattcaagcaatattgatgaactcgcttagcacagcatgcacgctgtcataccctaatttcgt

SEQ ID NO: 102241 - DNA, 457 bp, Glycine max
  unsure (1)..(457): unsure at all n locations
ngctctactatgcattttataaccaaggaagatttcttcatctgacttagcatcaaattttcctaggttttctttaccattgtttaatacaaaacatttgcatccaaaaacatgaagatgtgaaatgttgggttttctaccattaaacagttcatatggagttttctttaaaatgggtcttactaaagccctattcatgatataacatgcagtattaacggcttcagcccaaanatattttggaagaggagtgtcatccaataaagttctagcaatctcttccaaagacctatttttcctttcaacaactccattttgttgaggggttttaggtgcagaaaaattatgttcaatgccatgtttttcacaaaataaatcaaattctttattttcaaattcaccccatgatcactcctaatagatataattntgagattnttcttatttttaataactt

SEQ ID NO: 102242 - DNA, 302 bp, Glycine max
attaaatggctttctgagagctctatttggaagtctcaacaagcacaaatgataggggagagaggatccccttgtctaagacccttgtgccctttgaaatggccataaatggatccattgactgccacactaaaggaagtggaagaaacacattccatgatccaagtacagaattgggctgggaagccaatgaacttaagcatcctgtgacaccctttaccccacacatatatgtactaataataaaagaaataataataaaaaattaaacttaattcaagtttttaaaacgtatttaaata

SEQ ID NO: 102243 - DNA, 302 bp, Glycine max
  unsure (1)..(302): unsure at all n locations
ttttgacatcaaaatcaacacgcgaatgattgatgtaaaatcaatcacctgaagcttaatgtggatttacaatgggaattatttggtctaaccatggtcnaaacagatttagcttgttaacgatgacaatgaatacataccatataaattacccctcgattttttgctttcttcttttcttttgaacaattctatttgtcccctgcccctttctatacccgactcaatcgagtttcttttaatttttaaatgttactacattaaataaataacctctacgatttaattgtttaattaacata

SEQ ID NO: 102244 - DNA, 428 bp, Glycine max
gcaagcttgaggataagcttttaatgtcggttaattatcatgttgagtgtcagattccttaaccacaaatgaattttctggccaattgattgattgaacttgtatgttatttcgcatttctatggttttacactgttctgcgactcagttatgtatgatggtcatacgatattattttgtaggtatgttttagattctcggacagctgctcctctcattctttctatgcttgaggtgatgcataaataaagtactttctctctgttatgccatctgtaatttttttgggtactaatttatttcaaatgcatatttcaggatatgcttagttcttctaaaacagcatgcagggttcgtgcttttgatttaattctaaaccttgcggttcatgcacatctcctagaaccgatagttgctgatgatgcttc

SEQ ID NO: 102245 - DNA, 439 bp, Glycine max
  unsure (1)..(439): unsure at all n locations
agtcacctgcggcatgcaagcttctcccncaattttctataaatagggggagatttgttttataaaagggttcagtcccttaggcacttctctctctttcgaatttgcttaggaaaattgtttccgtgaagaaaatccaagccgaggcgcttccgtaacgtttccgtgagtgattttgcgaaggttttcgaccgttcttcgacgttcttcattcgttcttcatcgttcttcagtcttcaacgggtaagtacctcaaaccaagcttttcaattcattctatatacccgtggtgcgccacatttggtttcatgtatttttattctcgtttcatttactttttatacccccttttgacgtgcttaagccattttatttaagccatttctcgcttaacctacaaataaaataaatttccaccgatcgtttgaattatatcatc

SEQ ID NO: 102246 - DNA, 453 bp, Glycine max
  unsure (1)..(453): unsure at all n locations
cactccacatctcatctctagcatgcatttttctttctttacccactttctcacgnttgcgcttttagggaanaacaccataactaaacgcgccgcatgggatccctatcgcaccagatccaaatctataacgatgggtgatcaagaggagacgcaggaacagatganagccgacatgtcggctctgaaagaacaaatggcctccatgatggaggccatgttacgtatgaagcagctcatggagaagaacgcggtcaccgccgtcgctctcagttcagctgccgaagcagacccgactctcttggcaactacgcaccatcctccctcatacatagtangacggngaagggacacactgtggcacgatggcagccctcacctgtgatacaaccgagcggcttacccttatggattgccgcccaactattcaccacccatcttgcaagaagatgc

SEQ ID NO: 102247 - DNA, 428 bp, Glycine max
  unsure (1)..(428): unsure at all n locations
taagcaccgcagctgcagcttataggacatattgggcaancctaatcttatgttatctcaacacncaccctcactccgagaataatgaaagaaaagtttacaaaaatgttcagtatttaaaataggtcagaaagcatggaacacgtgtcaacaaaagttaacaatggtcaagagtatacttgacagtgagaaggtgcactagggaaatccatgtcattgagtatatatgataatggtattttcaattttatgtgtcattggaggtacctggcaagcttttagtaaagcagagtgtgtttgatcagatgcatacatcacaagcttaggaagggcattccttccaaccctccttaagatcttgtcacgggcagctaataagacaactagtacagcttcacttgcagttccctgtataactccaccacctt

SEQ ID NO: 102248 - DNA, 448 bp, Glycine max
  unsure (1)..(448): unsure at all n locations
cttctgtgagatagttatatgtgagattgagttcatttatggatgccatgcccttaaactgaaccgggtcaggattctccaaataatttgcccctagatcaagaaaccataaattctgcaaattgctaagttgaactggtatttgatttacgagtgaattattattgagagaaagaacttgaagttgtaggatgtttcccatttctggcgggattggaaaggtgaaattgttgctacttaaataaagtattttcagctctgttgcattttcaattccagctggtatctctccaacaaggttattcatactgacattgaagatactgagattagagcaggctgagaagtcaacctgttaagggtccatcttgcctgaatgtgaactttatctaacaacatgcctgcntgttgcaagaataccggtccattgcatggattgtgctgttgt

SEQ ID NO: 102249 - DNA, 433 bp, Glycine max
  unsure (1)..(433): unsure at all n locations
gcttgcccagagaaggaatccacggaggaattgctttactttctcgaaagactggaaagcggnttctaatgactcctctgcggcctccacataaggcatagaggatgggcagctcaccaagatgtctttctagcctgatacgatgaccagatgcccttgcactacgaatttcaacttttggtggagtgtagagggaacaactcccactgagtggatccacggacgccccaacagacagctgtagggggggttaatatccattatttggaaggtaacttgacaggtgtgagggcctatctgtactgggagatcgatctctcccctaacctctcggcgggtgccgtcgaaggcacgaaccaccattgaactcgactttaggtgggaagcattgaatggtaatttctccaaagtgctcttaggcatcacgtttaaa

SEQ ID NO: 102250 - DNA, 410 bp, Glycine max
agaagtggaaaacttgaagtgtatctcttaagactttcattgatcaaaggtacaacaagtgttatacatgcttctatttatagactaggtagccttctttagaagctttcttaagaaaactttcttgagaagcttctttgagaaaacttccttgagaagctagagcttagctacacacacccatctaaaaactaagctcacctccttgagaagcttccttgagaagctagagcttatctacacacacccctctaataactaagctcacctccttaagaagagaagctagagcttagctacacacccctataatagctaagctcacccccatgacaaggctaaaaaatcctacatttctatggtacccgacctacattatggagccctaaatacaagggctaaaaataatg

SEQ ID NO: 102251 - DNA, 430 bp, Glycine max
  unsure (1)..(430): unsure at all n locations
agctngtgcaaatcaaatcactcctacattttttctctatcatgcattgtatgttggtctcgtcctttgtcacgggaagccggaaggtccatatcaccttcttaattgtacacatggggcactgcgcccccaaatgcgcaagtaagaagagataattttccgggctctcgtgtccgtaaaatgcattcatatcatgcaccacataagcatctcttcataacatcataatggacatatcctgcatttgtccgttatcatattccagcctcacattttgcatgagtcatggcatcatcatgcatatgcgttcaacaaactttttgatctgcaaaattgcataccatttgttttcatgtttgctcatccttgtgttttcctctacaaaaacaaaaaaggggaagcgtgaaacttcacactacattcttagttg

SEQ ID NO: 102252 - DNA, 399 bp, Glycine max
  unsure (1)..(399): unsure at all n locations
acccgtagtgtgcctttctggttgatatctttaggaagctataaataggggttattctctatatcttttttatcttntacctaatttatgaattagataacacttttgagggttgtaaggcgtatgaaacactgtaatgacagatcgtgatcattgttctccccttgtggtacgtctatgctaattgcttataggcttactagttntggtttgatcatgagcaactagccatcctagtctgggagctatgatgtaattgtccaattgtacccctttctctgtcttgataaaatccttagtgttttgtgtaattcattctctctctcattttattgttaattgggactgataaatctatgcttatcaatgactatgtgacatcttgttgttgtagactaa

SEQ ID NO: 102253 - DNA, 426 bp, Glycine max
  unsure (1)..(426): unsure at all n locations
agcttactcctggatgtgccgnttggtctgtttatgtgaaatttctccccagccatggcgcatctaccaactccaagtcatctacccaatcgttgaactccttgatgtcgtttgtccctaaacccctttggcaaatcccaaatctctcagcaaggtacctgatgctattaaagtcacccaagatgcaccagaaatcccctgatagagaatgctttagctgcctaacctgatctcacaatatcctcttattttgtatttcacagggggaataaattgtaagtatactgatttgttgtgcctccctcaaccattctcctctcaggaaaataaagccacagccaacaactttcatttgtagtttaaatgttcgttcactccacaagcataaaataccacctgttgtattgacagcgggatgcgtctccc

SEQ ID NO: 102254 - DNA, 465 bp, Glycine max
  unsure (1)..(465): unsure at all n locations
gaactggctcaacanaggctaattatgagtgtagagttattcatngataagtggnnctggctggagcccgaccttcttttgtgggggataattgaaagtttacaacccacgcacctcaatagcatgagctagagccagaaaatgatcactcatctgaagccatcatccctggagctgtttgattttcgaaaagaagattagagacaagatccaatgaggctgctcatcctgngccagtgcctgtatcagctgatgcaccatttccaggggtggatccatcttcacctcagcacgcagcagactcttccactcctgtcttagagatacctgagggccagaccataccagttctgactntggacacttctcctncagctactccagtattgcatctgacagatgaagaggatgttcaaacacaggatacccaagaccagtcacagggaatttgattcctgatgacac

SEQ ID NO: 102255 - DNA, 420 bp, Glycine max
  unsure (1)..(420): unsure at all n locations
agcttttgactaagttagcaggatctcagttttttgggagtgatctatgaccttgatgttgcattagaatatcactttgcctttgttttttgcaaaaagggtttgagatgtaatgtttggtgtgacctcattttttgtggaggaatataattgatgtagntttctatttcttttcttcatttggtaacaacttgctttgtcgcattaaaaggatggttatgaatattaaaaacatgtggaaaaagcaattttcttgcatggacagagagggtacaatttgttgtgattcaactatatcttgggtgcctcggaattctggggagtacaagcttaactgaatggagtcgttgttggggaggagttcttcgtgatcttcttggtgttgtgaccatctagtatgctcataatgtaacattatgt

SEQ ID NO: 102256 - DNA, 381 bp, Glycine max
  unsure (1)..(381): unsure at all n locations
atgcataattaccaaatcgactaccggctaggggattgaatttttcaacactcttcataagacccatactttcctcctgccacagcaccagaaaagaaatggtaaatacagttgctaattgtaattgacaatactgaagagtgaagacaattatcacaatcctttaataaaagtagtttccccccccccccaattcatgctccaactcangccaatcaattatttacaaattcttctatgttgagaaaagttgatgaatgaggttaagttgagatcagtaaagatgaaaaatggcaaaatctaaagcaatcattccccttctatattctacatctatagtctttttatcctggcgtatctctttcacatttaagaaaagtc

SEQ ID NO: 102257 - DNA, 361 bp, Glycine max
tctcaacgagacatccatgtcaaatgttatagcggtttgaatatgctccagctttcgtgtctctcgatatttaaaccagaaggtattgccggtggaatatgcctggagcattggtctttcatctcgagcatctcgatatgttatgagcctcaatcggaaacttgaatcaaaagatattgcaatttggattttacagtatactccttgttcaatttccagcgtctcgatatattatggaccgcaatcaaaaataaagtcagaatttatgggaatctaaatttgctgggagcttcgatgttcaatttcgggcgtctcaatatattatgggactcaaacagacatgcgagtcaaacgctatgct

SEQ ID NO: 102258 - DNA, 328 bp, Glycine max
tggagtctatgagcctacctctacctcgtgggaccttcaatttcaagtaaaggtggacttcgcctcacttaaaatttgtgggtgttgggttcttgggagctataatggatagttctactaggttattgctttacggtagttgtttgtgaaagaaattgttgtaactattgctaacttgacatgtttaatgtaagcaaaactgcccatgttgattaagggttcaataatgatgttttgagatatatgtgtgcttaaaatgtagataaaaaactggtagagaggatggcgagagttagcttacagttaaatgtgagaatggtagtgttgt

SEQ ID NO: 102259 - DNA, 428 bp, Glycine max
  unsure (1)..(428): unsure at all n locations
agcttcataagcaagcttccaacaagtgttattttatcacaagagcttcaagtaggtgctccttaaacctccactaattntcagctntactttctcctccattgttgnttcttcgtttctctccatgtatctcttcccatgtcttgtgctgaatgttgttaacataattttttagaagttccaccgattaagcttactatagaagctagatttgattttctatggttcaaattccttgttcttgttcttgaaccatgaattgtgttgagtttaggttcctttgagttttatattgtcaatttttttggctgaaacctaaaccataaaattcttacaaaaatattaaagtagaagaaaacctcaaaaatctagaatgacatattcacctattttagttttgtcataaaagtcatgtctagtcatgaaac

SEQ ID NO: 102260 - DNA, 418 bp, Glycine max
tggcacggctgctgaatgcagatagcaaagcccttcagctgtttggtgtgcaactttgagtctttgatgccatttgaggggttccctacagccacaagagtagcgatgaatgtagtcgaaaagggtcccatttgagacgtactcgtatattagcaaagggttttcaagttccaagcaacaaccaaggagtctaactaggcttctgtggtttacttggcagagaattcggacctcgttttgcattcgatcaatgcctttggtgcatccaagcttggcacgtttgatggcaaagacggttccatcgtcaaatgttcccttgaagacttctaccaagccaccagtgccaacgaggttttcttgggagaaattgttggctgctcttcttatctctctaccagtgaagaatcttcgatgataa

SEQ ID NO: 102261 - DNA, 417 bp, Glycine max
  unsure (1)..(417): unsure at all n locations
ggatcttagagcgacgcggctgcagctgccattatactaagcgtttatattaattgccctcgcaccagcgccataaaatctcacttttacagtagtgtcaattgcaatctatgtttcaattgaagatccttggcccttctaaatattttcttggcttagaaatagctaaatccagcaaaggtatctcactctcccaaagaaaatacactctatctctnttataaatacaaggttcttggcatgcaaaccttccaatcttccaatggatcccaacttgaagctcaatcttcatgatggagacttactccttgatccctcagtgataaaaggttaattggtaaattaatttatctaaccaattcacgtcctgatataacatttggtgtaaatcgcttgagtcaatatatgaaaaaacat

SEQ ID NO: 102262 - DNA, 444 bp, Glycine max
gtaatagaggtatcacattagttttacttatgcagccctcacttgttagaatgctaccttaattgtggtcacttctagcatgtcttagttgtgactactctgggggctgccttaattgcaactacatggggggtgttttagttccacatcgattagagatatgtctagagcttataaagcttggatagtcctcaccttataaatctgtttttaactgttgagttagtctgaaagcgaaattctaagatggtataacttgatccataatccatccagatcagactcggaccatccattgactcggtcggtgtattgagccactgggtcaggggtcaacccaatgagtcactatttgactcacatgacccgtctatattaaaaaattataaataatttataactcgtaaacttttatacttaaaaatatatatggaaaatataatc

SEQ ID NO: 102263 - DNA, 416 bp, Glycine max
  unsure (1)..(416): unsure at all n locations
agtgaaaatattatagtctatttctctctctcaaatttaaggaaaaccaaataccaatgcctttatatactggatcgtaaaaaaattataanattaggtaataaatctaattatttgntctgttggtttaaagtcggcagaaagcttagatatcttcataagtttcaatgtctacctaatgaaataataaccataatatgtttcatccataacaaaggtccaaaataaaaatgctcgaataaattggagcctaattaactttaatatttgttcatatatataattcactagggtcggcctaataatgcggattgaaattatatatatgcataaggttacacattctaacttttagtgtgattattgtataccaaataaaactttaatattgctcagggaagaaataagttcaacat

SEQ ID NO: 102264 - DNA, 458 bp, Glycine max
  unsure (1)..(458): unsure at all n locations
acacaatcttaacctcgtcaagaactttattcaagtctttagcatatttagaaatcatttagaaaggaaaatgttttgaaaggatagattaaatgtataaaaaaatctacataaataaaaaagttagactaaacatttaaaattgaaaaaatgatttgatctcgtgtttaaaaaagttatgtccatcaaaatgaactttaagttcaaatataagctattgttctttaattntaaaatgttatatccaccatgctaacatttagaattaaaaaacccaaggggttgtattaacattgaagttgtatatggtgaaaaaagtatgttgacagcatttttcttaaattgatgtacatcacagatgttcaagctgaagtgttttaaaattaaaattaattttgacttgtagaacatatntctaattaattgacctatnaatttatattaaaacgcgttaggat

SEQ ID NO: 102265 - DNA, 371 bp, Glycine max
aaactaaaaatgtgaacaagatttggtcaaacaagaagaaaagctctaggaaaagcctagaccaatctagcatgaacttcaaatagtttgtcaaaagctttttgagcttcgagcaaccaaagagaccaatgaaaagaataaagattttatttattcttctgccaaagaaattgtccaagaattaacgggtcctctcaagaagcaaaagcaacttgagtttgcttagaaggaatctatgaatgcattatccacgtggatcgaaacctgcaccaaaaggaagatgagttattacattaaatctacaaaatcttcatcagttgtataatcttcaaatgatttactattttattttgggacaatttcattcatgt

SEQ ID NO: 102266 - DNA, 465 bp, Glycine max
  unsure (1)..(465): unsure at all n locations
aagctagagattagctacacatacctctctgatagctatatctaccttcttgagatgaaaagctagagcttagctacacaccgcctataatagctaagctcacccccatgacaaaaaaacatgaaaatacaaaaaaaaaagtccttactacaaagactactcaaaatgccccggaatacaaggctaaaaccctatactactagaatggccaaaatacaaggcccaaacgaaggaaaaacctattctaatatttacaaagataagcgggctcatacttagcccatgggctcaaaatataccctaaggctcatgagaaccctagggccttcccttggatctctagcccaatctacttggagtcttctacccaatgcccttgcgggataggagtgcatcaattatgtatgaagggatttggaagaagaggggactagaccaaagattgatggagtcaattntaaacat

SEQ ID NO: 102267 - DNA, 457 bp, Glycine max
  unsure (1)..(457): unsure at all n locations
tgatccttaatggtgttatcgattaccggtgtatctgaacgttgttattcaaattcaagtgtgaagagtcacatcttttcataaaaagcattgtgtaatcgattacatggttatggtaatcgattaccagtgacaatttctgaataaaaagtcaagagatgtaactcttccaatggttttctcaagattatctcaaggttataactcttccaatagttttcttgaccagacatgaagagtctaaaagcaagaccttgacttgcattcaaataacttttgaacttctttgaacaactnttgagaaatcttgaaacctttcccactcatctaacttcttcttcttcctttgcccaaaagctttctaagtattctgttttccaaaccttgttcttctgcagaanacaaaagtgtgctatatcttttcattctcttctccctctgccaaaaagaattcaac

SEQ ID NO: 102268 - DNA, 304 bp, Glycine max
  unsure (1)..(304): unsure at all n locations
agctagaagcggctatattgcttgagattgattctcaccacggcacaggactgagncgtggggagcttaagagcataaaccacctattctggcgacaagagcagaaattctattctaaggcaactggattaccacgtgaatcaaggcatctaaccaacctccaatcttcgtacattctttgatgaacacgaacttgtggctgcttcatgcactcccctaatgacaatagcatcattacaggcactatatggtccggagaaggaaaccagcttctatattaaatttctggctgcaccaaggtcat

SEQ ID NO: 102269 - DNA, 465 bp, Glycine max
  unsure (1)..(465): unsure at all n locations
agcttcaagtaggtgctccttaaacctccattaattttttgctntaccttctcttccattgttgtttcttcatttttctccatgtatctcctcacatgtcttgttctaaatgttgttaacatgattctttagagtttgcaccgattaaacttgctatataagttagatttgattttctatggttcaaatttcttgttctcgttcttgaaccatgaattgtgttgagtttaagatcctttgagttttgtcttgttattttttgtggctgaaacctaaaccataaaattcttacaaaaatattaaagtagaagaaaacctcaaaaatctagagtgacttgttcacctattgtagttttgtcatagaaatcatgtctagtcatgaaacttgtcacataagaattcttatgttgtgctgaattttattttctcgtntctttgtctaactcatttgttcatgagtgtatg

SEQ ID NO: 102270 - DNA, 434 bp, Glycine max
  unsure (1)..(434): unsure at all n locations
agctagaaggtgtgtagccaaccatctttcatatttatcactggtaatgtgtctactatcattgntatcatttctttctccgtcattgaggtgccacttgagctaccaggtctctccacctttggacgtattctttgaaagattcatgcccctctttgcatatgttttgtagttgcatcctatctggagccatatcagaattgtactgatactgcctaacgaaggcaaccattaggtccttccaagaataaactcgggaaggttccaagttagtgtaccaggtaacagctaccctagtaagactttcttgggaaactgtatcagcagtttctcatcttttgcgtatgcccccaccttccgacaatacatctgtagatggttcttagggcaagtagttcccttgtacttgtcaaagtccgacaccttgaacttgg

SEQ ID NO: 102271 - DNA, 354 bp, Glycine max
  unsure (1)..(354): unsure at all n locations
atgttgcacatgttatattttggagtcatcctgatccagtcaaattaaccaatgtctgtaattcggtatttctcatanatagtaccgaaaaacaaacaggcacatgctgccatacttgcattgtggtgtgacaccaatgggatgaattttagtgcatttcctattggaggacgaacatctaacaatgttgtttaggctctagaatggtttcgatgaatttttctgagacgtgatgcactccttggagttattgttatcgacagagatttagcattgatgaatatagtgaataatgttttccctgagtcaaccaatatgttgtgtcggtttcacattgataagaaatgtgaggca

SEQ ID NO: 102272 - DNA, 385 bp, Glycine max
  unsure (1)..(385): unsure at all n locations
agcttgagatgatgaagtgacgaagggttaattcnttctgctttgattggngaccacagagcggtacctgtaaatatgtatcggagggcaagagaccttggtgacatcaggaggggtgctattgcccacaaccaatcttgaccgatcccgacccaacccgggcgtatctggtcattgaaaaactgtgatgtacctaaccaggcgagctcctgtctttttacagattaaaggaacaaagaccactatgcccggaggcttgtggcggctggccatctgtgatacttgatagatatgtgagacatggtctctggtcatcaattaccaacggtggcgagacctttacaatgcttatatatgaacacaggagactaacatggtctttggt

SEQ ID NO: 102273 - DNA, 336 bp, Glycine max
  unsure (1)..(336): unsure at all n locations
ccacaagcttgctacggagcagcgggattcatgaggcactagcatatgaactcgatncacaacaggcatatggatcaacttgatcacgaacaagctagcggatcatctatgtgaactgcggatcaaatattgcttctgcagatcaacgaaaccctatgcggatcacgtcatagcatacacggatcaagctgaatgagatgggtgcacgcatcaataatgctcggtgcacctagctacacccatagcaatgacgtgatctattcacaagattccgtgcttccgcatcggaccgaatagcttagggtatttgtaaccaacaatctcaaacactatcta

SEQ ID NO: 102274 - DNA, 426 bp, Glycine max
  unsure (1)..(426): unsure at all n locations
agcttgtcctactacggatttgncatcctcctanattactcaacagccagcccaactcactgcaaaacaatgatttaacattcctaatgccaaatgatggtgaactatctcaattctcaataactctagaccagcttcatgatttcatactcagccattctattccaacaccattagtgctcagccatctattacattttccaaatggctctgtggtttccctctagcgttctaagcagagtgatcaacatcaccaacagtggaagaacaggtttgttcgtcaacaatgcaagaattgtcgcactaaatttgtgacaaagctcttccataagatgccacggaatcaatgctgctttgacatgtgacaacatggtgccttcccaccgagctccagaacccaaggaagacccaaagaacagtaatgtg

SEQ ID NO: 102275 - DNA, 384 bp, Glycine max
acgaggcttgaggggatctgtattcagagcaataatggatttccttattgactcaacaccaccattagaatcctagttcaccaccacaacaacaacagattagctatcttactagcttcatcagattttgtcccttctcagaagaaaacaacaactactcaacttaaaaaataacaaacttttctctttctagtactgacattcccattgaaaacttcccagactacagacacaaatcaaattaaaacagaccctgtttggttatttccacgttaaataacatgcattaagcagtggttaaaagtacatttcctatcatgcacgaagtattatagcttcatcacatctccgacttttcaaaatagaaaatgcaactctttcatt

SEQ ID NO: 102276 - DNA, 426 bp, Glycine max
  unsure (1)..(426): unsure at all n locations
agcttctagccaaatggacttaccttgaatttttttttttgatagcccttttgagccttgtttccctttccttgttttgaagctcactacaagccttaagtgaaaaaccatgatatcaccatatccttaaggaattttggagctttggaattgttttgggaataagtgtggggggtttttgtttcattggacaacttgttttgttggctatgcttcatgatgtattttgggccatacttgatgtacattgtatattggttaaatgctggacatgctgaatgaaatgttgtttctcanaggctatagagtaaaaaaaaaaatcaaaaaaaaaaatcgaacaaagaaaaagaaaagcaataaagttgagtgaataagatcttaaatggcacaagaatgatgaaactcttggttctactcttcatgttt

SEQ ID NO: 102277 - DNA, 427 bp, Glycine max
agcttctagagaaagctacatgtagctgcctctgtttttacacttcccagccttcgttaaccgttggatcttctcgaaattcggtctgaaactttacaagacaattgtccatgatctgaccgttgggatctttcagaagatgtctggggtgttctcgaagcttccgttcccgagagcatttcttatttaagcacttcagcctttgctttcgtgtagcttaggaaaaacgtcatttcttcttctttctttcttccaaagccatttctaaagttccaagaactttctccatcacccacagccaccattagccaccacaaaccatcgttgttctccattgaaactccacaacgagaggaacccgtcgattagagcagaatcttccaacttggcttgcggtttcggtagagaacgaaaccctaatctgacc

SEQ ID NO: 102278 - DNA, 440 bp, Glycine max
  unsure (1)..(440): unsure at all n locations
cttgatggtgtcgagaagaaatcacatggttgtcatcatcaattttgtggagaatgtgaatgtatgtatacatgatgttgatgatgccaaagaagaatcaaacaaagttgcttcaaaggataaacatggcttcaagattaatacaagatttcttcaacaaacaaaaccttgcttaaagattaactcaagatcaagccttgccttaaaacanagtgctgtcgagacattccaggctctggtaatcgattactagacagtgtaatcgattaccaaaagacagggttgagaaatagctattgaaaatgggtntgaactatgaatttcaatatgtaatcgagtaccatatgtctggtatcgataccagcacaaaacttctgaattcagatcaaaagtatgaccctcaactatactgtgtatcgatacacaacatgtatcgatac

SEQ ID NO: 102279 - DNA, 397 bp, Glycine max
  unsure (1)..(397): unsure at all n locations
agcttcaacattcaattacgagcggcttgatttattactagactcaancacacatcagagaaaaacgttattgtcgtttgaatttgctcagagcttcaacattcaatttcgagcatctcgatatgttacgggactcaatcagacatccgagaaaaaagttattgtcgtttgaattagctcagaagttcaacattcaatttcgagcgtctcgatatgttacgggactcaatcatacattcgagaaaaaagttattgtcgtttgaattggctcagaggttcaacattcaatgtcgagcgtctcgatatgttacggggctcaatcagacatccgagtaaaaagttattgtcgttcgaatttgctcaaagattcaacattcaatttcgagcgtctcgatat

SEQ ID NO: 102280 - DNA, 382 bp, Glycine max
ttgaatggtgaagctgcgagcgaattcaaaccacaataactttttactcggatgtgtgactgaggcccgtaatatatcgagacgctcgaaatggaatgcgtaagctttcagccaattcacccgacaataactgtttactcggatgtctgattgagtcccgtaatataacgagacgctcgaaattgaatgttgaagctctgaactaattcatacgacaataactatctactcggatgtatgaatgagacccggaaaatatcgatacgcgtcgaaatgaatgttgaatctctgagccaattcaaacgactatatactctgactcggatgtctgattgagtccccgtatatatcgagacgctccgaaatgaatgttgaagctctg

SEQ ID NO: 102281 - DNA, 398 bp, Glycine max
agcttctcaagcaaacttccatccaagctcttcttgacctcttcaaagggttcaaaaatgacactggttaagggccggttattggagttctttatagtacatggaaccaagtgtttgccctatgagtagtgaacataggagggcgatgaagaagaagaagaagaagaagaagagttaagtgaagggagtagtatatggtcgtcgtcagcgttgaagagagagaaagaggaagttgttctaagatgcaataattaaaaattaccacaaatggttaaaatgacgcacctatttaaggtccaattagaatgcgatacgtggcagttagcgtttgttagtaacaaaattcgtgaataaatttaaagggagaccaaaattaaaatctgagacaaattggggac

SEQ ID NO: 102282 - DNA, 420 bp, Glycine max
  unsure (1)..(420): unsure at all n locations
gctatctgatttgtccttcctcagggcctgaactattatactcaacttatcaggcagaattcccacgagcacccaacttcagagctttgaagaacttagctacactggaaatcctgagctttgtggtcctcctgtaacaaataattgcacagacaaggaagagctgacagagagtgcttctgttggacacggcgatggtaatttctttggaacatcagagttctatatcggtatgggagttgaatttgcagcacgattttggggtttttgcagtgttgttttctttaacagaacttggaggcgtgcttattttcattaccttgaccacttgagagatctgatgtatgtgataatagttntgaaggtaacaaggttacttgggaaattgtgagtttacatgctaactgttacgagtgagag

SEQ ID NO: 102283 - DNA, 440 bp, Glycine max
  unsure (1)..(440): unsure at all n locations
ggagtggtatcacagcattgaactaagtngaacgttccaatgggatgatggttttgattgctgcacataaagtgtgtgattgtgagtttctggctccatgagtaacagaggtgaggtagtttgtgccttcatggttgggatgatgcatgttgcaagtgccggccggtttgttgttgatagaaaagatgatcagccacgtctcgtgtgtgcatangagagtgtctttgccctctccacgacattagtttcaaagattgacgttagtcgaaacttgatggtgagaatcaaaagagtaaataataaattcaactgggactaaagtagaatgatttaaactattaaaacatattgtgataaacttaagggtcaaaaggactattaaactttcttttttttttgaaacgggttatatatatgtagcagtttattctaaacaatgg

SEQ ID NO: 102284 - DNA, 428 bp, Glycine max
  unsure (1)..(428): unsure at all n locations
agcttctattttcaatttcaagcatcatgatatattacnggactcaatcggacatccgagtaaaaactaattggtcgttgaatttcctcagagtttctattttcaattttgggagtctcgatatactacacgattcaatcggactttccagtaaaaatgtattatcgtttgaatnttctcagagcttctattttcaatttcgagcacctagaattattaagggactcaattggacatccgagtcaaaagttattgtcctttgaatttcctcagagcttctattttcaattttgagcgtctcgaattattaaaggactcaatccgacatctgtgtcaaaagttaatttcgtttgaatgtcctcagagcttctgttttcaattttgagtgtctagatatattacgggactcaatcggacatccgagcaaa

SEQ ID NO: 102285 - DNA, 333 bp, Glycine max
ccgctcctgagtatgacagtcaccgctttacgagcgctgtacaccaacagcgcttctaggccatcaagggatgggcatttcttcgggagcgacacgtacatctcacggacgaccagtatactgatttccaggaggagatatgccgccggcggtgggcatcactggttacccacatggccaagttcgatccagaagtagtccttgagttttatgccaatgcttggccaacataagagggcgtgcgtgacatgacgaactgcgtgatgggtcagaggatcccatttgatgcagatgctatcggccacctcctgtgatatacgatggtgctggaag

SEQ ID NO: 102286 - DNA, 426 bp, Glycine max
  unsure (1)..(426): unsure at all n locations
agcttctccatctcttcctccctcattntcgatactttactctttcactcactgcttgcaagggtttcgcagggtctttttcttcactctgcgtggttcaaaggccaagttgtgacggcggcctggtggtgttcctgcaacagcagtgctacctcactggttcgacggcaacgacagctgaggctgatgcgtttagggtttcagtggttcactgatgctttccttcctttgtttcgttcaaatccaagggagggaaggttgtgttgtgattcnaatttttaatttttaatttgctattcaaaattatgttaatattcaaattattctttatggattaacccaaacggcaatccgttgtagtctagttggttaaaccattcaaatatttaaattaaccatattttagtagagaacgaatttattttt

SEQ ID NO: 102287 - DNA, 413 bp, Glycine max
tgacaatggcggaaatttggagcagactctctccttacacaagtctataacattaatctaaacttgctcaaactggttttatgcctaaaatttcaccgaatcaaaatttgactcctcaacacccaattttaccttagagatggcccttgttttcactttggtcactcatattcctcatttgcacagcctaagctatctcttaagtcctaaatgacattttaaactatgattaactcactttaacccccaattaccactgaatacatatttatccttccaactctcaaagccttactctgttttcactcataacaccacattctcactatctaaccttaggataactgtaccccttatctctaacagtcttccatcagcaattacaacacattataatcacaagcatcatcata

SEQ ID NO: 102288 - DNA, 425 bp, Glycine max
  unsure (1)..(425): unsure at all n locations
agcttaaggcaggagcatcattacaccattttattcatggccaccacttccccttcctctttgagcagcctcacaatttcttgcttgtgcctaggttcagcccttgaaaacaaaagcccgccatgctgtctcagatatgcctttttatcacgcagttccataaaatctctacctgttaaacttttagaactaatgtcttcatctggagaaaatacacctatttcacggcatatagcttcagcggtgttcttgttgtctccagtaataaccataacacgaattccagcatctctgcagtcttcaattgcttggtatacttcctccctangaggatcctgaaaacaattcaatattcaatttcacaaaaacattaaatagatatgataaaagcgagaaagcatgaattataaaataaaaagttcaaa

SEQ ID NO: 102289 - DNA, 401 bp, Glycine max
  unsure (1)..(401): unsure at all n locations
atgctacatatgggaaagagatatagaaatcgtttgattgctatatggataattaaagggtatttagtttggttggtttttgcttttattttcattaaaaatagaaaatgatgatgaaaatgtgtttggttggaattctgttttcatgttcagtgaaaatatttttccaaacgaaccaaaaattggaaaataataaaatatcgtttccagtgttttcagttaaaatcaagaaccccattctgggtaaaatgaaaacgtggtggtaaggaatataattntaagcaaacctaanaatacattttcttttgaaaacgtattttcagtgcttttatttcttataagcaaaaaacaagtagtcaaaccanacatgttttcataattctaatcttttaaaaatgaaa

SEQ ID NO: 102290 - DNA, 434 bp, Glycine max
  unsure (1)..(434): unsure at all n locations
ggatccttaagcgacgcagctgcagcttaacaattaaatgggcataagttcattcggaggtccgattcaggaacatcacatatcgagacgctcganattgaacaatggaagccctcgagaaattgaaatggtcataacttttcactcgcatgtccttttcaggcgcataatatatcgagacgctcgaagttcaacaacggaagctctcgagnatttaaattgcataacttttcactcggatatccgattcaggcgcatcatatatcgagacgctcgaaattgaacaacggaagctcgcgagaaattcaattggtcataactttaaacaaggtggaccgattcaggcacatcacatgttgagacgctcgaaattgaacaacggaagctctcgagaaattaaaattgtcataactattcacctcgatgttcgattc

SEQ ID NO: 102291 - DNA, 387 bp, Glycine max
  unsure (1)..(387): unsure at all n locations
actgaatattcttatcagattaatgaatggattcttctaacattattagacaaacataaaatcagctactatgtcatatataatcacctaacttcttctggaatctaatccatagattgcaaacattctatgtgatacattctaaattaagagtaccaaatgtacaactgtggcggtggcgcaatgaaggtgaatagaatatcatcaatagttagatgttcatttgtaacatatcatacgtggagactgtacggaggctgcctgcctatatacagtntaatcccctaatcatattgttcttgtaattcttaagatggtgttagagcatttttcaacccatctctcccatcaaaatcctaaatctgatgtcccactgctcaatgacaa

SEQ ID NO: 102292 - DNA, 423 bp, Glycine max
agcttctgtattcaatttcgagcatctttaatattacgggacttaatcggacatccgagttaaaagttattgttgtttgcatttgctacgagcttccgttttcaattacgagcgtctcgatatattacgggactcaatccaacctccgagttaaaagttattgtcatttgaatttgctacgagcttccgttttcaatttctagtgtattgatatattacgggacttgatcgaacattcgagttaaaagttattgtcatttgcatttactcacagctttcgttttcaatgacgagtgtttcgatatattacgggactcatccgagttgaaagttagtgtcatttgaatttgccacgagcttctgttttcaattttaagtttcttgatatatttcgggactcaatcggacatccgagttaaaatt

SEQ ID NO: 102293 - DNA, 456 bp, Glycine max
ctcagcttcatgcctaacaagccacttattacagcagccccaagagtctcagcataatgatgcacagaccaaagttgcgtatcgtaaaaaattgtatgaccaagtgaaggtgcaaattgcaaagaagaatgaaagctatgccaagcaagcccaatagaataggaaggaagtggtacttgaacccggtgatgatcttggacatttgaggacaaatgttttccaagaaggagggaatgatgagaatcatgaaacaggccatatacagtctataggcccaagtggagaaagacgaacgcccaagtggagaaggacaatacccccgagtggagaacgatgaaggcccaagtggagaatgatgaatgcccataggcagagacactatcaagactattaattgatgcttgacgccaagattaatttaaggcccataataaatatggtctatttaggtataaa

SEQ ID NO: 102294 - DNA, 422 bp, Glycine max
  unsure (1)..(422): unsure at all n locations
agcttatgtgcacttaanaaaatggtttatttcttttctccccaagaaaaggtcaattacccgttgatttttgcaacattaagaaaaaatacaacttaatatagacaataaagaattggagtccggcgggtgtaaaaaaagtgttcataagatgagtttatcttcgggctttgcccttcttcacaccaaaagaataagatgagtttatcataatccttagataacatgaaattctcatagcatcatttatttagactttattcctgactcagtcaagatccactaatatgagttgaacaaccgaataaactatagagacataattagtttccagattaataggacagaatggtcatgaaaacaagtaccgaaagccccaactatatcaacatgacaagtatttattacaaaatttttggaaa

SEQ ID NO: 102295 - DNA, 356 bp, Glycine max
  unsure (1)..(356): unsure at all n locations
aaagatacaatctttgtagatgagaatgcttcaaatacattataaaagctagcagatgggcctaatagaanatgttataaccccgacaaggatacaacataaacaagtattcattttacacaaaagcacaagatgacaaaagtacaatgcagaacaacggggtcaccctaagggctgaatctcaacacttcgcaacttttgttttgtaaattacagtgtagtttacaaaagcaaaggtganaggaaagatattgagctggtagaggaggaagagccatanattggtgcttgatggtctggagcaacctctaataaatctgagaattatatggaggaagcacataatacagcacaga

SEQ ID NO: 102296 - DNA, 426 bp, Glycine max
agcttctcaagctaacttacatcacaagtcttttcttgtcctcttcaaagggttcaaaaatgacactggttaagggccggttattggagctctttatagtacatggaaccaagagttcgccctactagtaaagaacataggaaggctatgacgaatacgtaaaataacaacaagagttacgtgaagggagtattgtatcgtcgtcgtcagcgttcaagatatagaaagaggaagttgttctaagatgcaataattaaaaattaccacacatggttaagacgactcacctatttaaggtccaattatagtgcgatacgtggcatttagcgtttgatactaacaaaattcgtgaataaatttaaagggagaccataattaaattctgatacaactagggggacatgaattacaatgttgtctataaat

SEQ ID NO: 102297 - DNA, 329 bp, Glycine max
atatgatctttggataccttcttaaactacttttgcatgttctgaagctattgaaggaatggatgagtttgacagtagttcatgatgactagtcttaaagattaagggtcatcgagatctaccttctcttggtctgattcttattcttcagaagatgcatcactcgtcagacataagtcggctctctctactacttcttcatcagagatggctcgtctagatcctccgaagtgctcataagactcttactatccttggatgtctacaatcgtgggcattctgactcgaagtgtacaggcttcttgcactcataacatattacggagctc

SEQ ID NO: 102298 - DNA, 420 bp, Glycine max
agcttatgttgaagtggctgacatttctctttttattttcaccacctatgggctcgagttaattaaaagaggtaaaggcttaataacgtggaaactctatagcttgtggctgcctcttggctgaccaagagctaaacatttttccacatgtttatgcgtcttaattctactttaattaggtataatgacaccattaattgtggatattggtgatcatttgtcttaattctagttttaactaggtataatgacaccatcaattgttgttattaccgatcatttcatcttctaactagtgtaaccaacttgatgtcatacctatttatgggttgcacatttattaataaaaaaacagaccttgaattgaatttaatcaccttctaagtatgatagttgaagaagataactatcctaatgttt

SEQ ID NO: 102299 - DNA, 402 bp, Glycine max
ctgatgaatgcattatcgcgtgggtgtgtgaagcatatataaatctctattgagtgaatatgattagcacagaggaatgtaccacctgagataaacctgaaagccccaccatatcacatttgattttcgatgaatcagatgctgatgcgatacactatgggctatatttggcttgttccttcactttcttgagatacgtgaagccctgacaaaccaactaaatgtttgactactgtcatgatgcttaggtctggtgctgatattgctgaaacatccatattagggagaataacattatattactccagcttaagaaaaaaatagatctcccactggaagaatggatcttacaaccttctcatcactattgatttttagactggttcgttactttgatgtggt

SEQ ID NO: 102300 - DNA, 327 bp, Glycine max
  unsure (1)..(327): unsure at all n locations
ggatccttgagtcacctgcggcatgcaagcttgaccaggaattatnnggatgggttggttgttgaattctggttgttcctggggcggagatgatggtacagagggtgaaccaagagctgaagtttcttttggtgaagtagccatggaaaagcaaaacgtttggaatgatttcgtaaatttctgagagctattgggaaatgctgatgaaaacaccaatgccacgaaaatataaatttgaatgaagaatgtagaggggcgtgtgaagcaacggtcaaatctgttttggcccagtaatgaacgtgctattaattttaagtgattcgtttg

SEQ ID NO: 102301 - DNA, 469 bp, Glycine max
  unsure (1)..(469): unsure at all n locations
tttgagaagctaacactntaactactatcaccatnttgataactaaactcacctnccttgaaataattacggataaaataacacaacaaataatcaaacatcaaacataattactaaatatatatagatatatatatcagggtgttacagccgtcccttgtgacggacgcgtggggtactaataccttcctcgtacgtaaaaacaactcccaaacctttcacacttaaagtttgtaaaccacaccttttctggtttttctagcgttttcctcaaataaacgttggtggcgactccacacattttcctttcttggaagacgcacatgtgagccccgcgtcgccctcccaccgaagggtaggttgcgacagttggcgactccactggagactgtntttagagagttaggcctattaatctttngtggaaatgtgttntccctttcatcnggttcccttttcctttatgttc

SEQ ID NO: 102302 - DNA, 429 bp, Glycine max
  unsure (1)..(429): unsure at all n locations
agcttctagtattcaaagaccttcttcttcatgtgtttgttgtctctaagcgaatagaattcttcacttgagctntgtcgcaagctacccttttgcgggcgagcgaggcaaggctcacaggtgcgtcttccataggaagaaaatgcgcggagtctccaccaacgtttattgaaaggaaaacgttagaaaaatcaaaggaaaccggtcatgaagaatattccagattcgggagttatctttacgtttgaggaaggtattagcacctctcacgtttgtccccaaaggacaacagccttagattagaattgtgtgaaattatgtatctaaacttttatttcttttttattttttgaggtcgacaaaagcggggctcttgctcctacgtaccctccatcgaagaggaaatcagacctacgtagttctttcaaa

SEQ ID NO: 102303 - DNA, 327 bp, Glycine max
  unsure (1)..(327): unsure at all n locations
ttgtatagggagaattccatttggaaatataatcgtgtgctcccattctacctttattactaaggctatctaactcacgaaggggaaagtcgagtttccaacagggtatcagagccgatggtcgattgggaccggtcaacagtaagatggcgggaggatctcaccttgggatccttgatcgaaagtttctggcgggagtcatcagcgtgctcgcaatggagcgagatcaagtatctaggtgctgagatgangctctaatggctatactgggatatgacttcctcgaggggagtatatgtggaaaactacactgaggggaatggttga

SEQ ID NO: 102304 - DNA, 320 bp, Glycine max
aaatatttggaatcgatcataccaaatgatgaacaataagaatattacacacagaatacgagtgggatggctaaaataaagaaaggcctcggggttattgcagttgttgtatcattataaattcacactgacggactgtttcatgtttgaccatatttttctcccttgattgccacatgtttttgaggaaagacaataattaaatttaaatacaaagacattctaatggattcactatcatccaatcacttgtcaccatgtatagtattagagtttgagataggtttgagagaaaagagaagaagcaaaagatctgagtg

SEQ ID NO: 102305 - DNA, 402 bp, Glycine max
  unsure (1)..(402): unsure at all n locations
ttaagaaggggggggtgaattaagatattcgatactctttcttctaattaaaaatctatcttaccttttacttaagttatgaattcccttaatgacaatcttcttaaatattaattcaaatgaagcaacttgaatatgaatataaagcaataataaataaaggagattaagggaagagaaaatgcaaactcagttttatactggttcggccacacccttgtgcctacgtccagtccccaagcaacccgcttgagagttccactaacttgtaaattccttttacaagttctaaacacacaaggacaacccttcctttgtgtttagagattctntacaacaagagactcacagtctcttaatcccttatagaatgagaagaagaagaggaacanatctctcttg

SEQ ID NO: 102306 - DNA, 426 bp, Glycine max
agcttctctatattgggcgccggttgtagcttgtgttagaagtttgcctgaaattctccacgctggatcatctccagtcctttttcaccgagtgacaggcactgtaagttggatgtaggctaccaagagaaaccgataaccaagcaaaagcaggttagagaggatgtaaaagagatgaacctggctagctagctattaataaggtggaagggattttgatacggtatgtgcctaaacaaatttatttatttgtagtttaaaattttagatggaaaaggtgataaaggagaccttaagggaggtagtagtggttccaacggagaagaaaatgatgaaaaattcgatcctttagatggtagggagattgtttataaagatttgaaaaccatccatacatgatatttgataaagtaaaatggcgtgtgt

SEQ ID NO: 102307 - DNA, 451 bp, Glycine max
  unsure (1)..(451): unsure at all n locations
ctcacagnatttgttatactcgcgaacaggactataggccttcctccttcatgtttgttgagttgttttgtatcagggttgatttcggagctccgccgcgaagtttaagccctttgtcctctctctttgccgcaggcgactgagcttgtgagactccaagaagacaagatgctagaccgctgccgcggtactcgtgctccttcgcatccaaaccctaatctccagcacagaccccctccaaatctgcagaccgcgccacctaaagtactcttgaaacgcctcatgacggaggaaatggcagtccgccacgatcaagggctctgttaccattgcgatgacaagtggtcgcagggcacagatgcataccacgtttgcacctcctcatagcagatgaagacctagaaccttcctagggttcgccccttcccgattcaccttcaccctcagcact

SEQ ID NO: 102308 - DNA, 432 bp, Glycine max
agcttaggctctaatcctgtgttcgcccactttcatgtcttcaacaaaatctaaattcgttgaagttgcatgatcatcatcagtagtcaatgctatgtcctcgggtttaagtttacagcttataatccaaaagctgaatggaagaaactacattgaatgaactcaatctatgaaaccttggcgtgatcattgtagaaaactagggcttagaaaggatacttactagaaacaccacagaaagccacctgactagaaaaagaaaacaaatggaggtcaggtatttcaaacctcaaatggagaaaacatggagcaaacgggaaactctaagtactcactttctctaaggaacaattggagcatttctacaaaatcttttcaactaaaacgtcaattattccatcctcttctctagcccataaaggtatttctttt

SEQ ID NO: 102309 - DNA, 483 bp, Glycine max
  unsure (1)..(483): unsure at all n locations
actacgctattcccagatnttacccccaagtacctatttctatcantctcactttagctctaaattaaatcagcagatntattacaggctaggtgcacactgacaagattatcgtcttatagaagatgaatatacaagttaagcattatgtatttttctctcaagatttactaagtgttttgagagctntaaaacttaagaaatattcaaatacaaagagcttanaggtagtagggaatattcgttggagcattaaatgcgagtcaaatcaacttgagcaacacttcttctacataatagtgacacatctttttaagtaaaaagagtatttaaacttgaatgttctttactttttcacttagacatatcataggaaggatgttcgaacattctctacataaaggatcaagagaacaaagcattaactcaatctttaatggttcaaagaactagtgtctatctaccattatctgatccattata

SEQ ID NO: 102310 - DNA, 424 bp, Glycine max
  unsure (1)..(424): unsure at all n locations
agcttcctcggggccatttcctgcgagttcatacattcataagttagntnaacaggataaggcttatcttaacgcaaaaaatgtcatgccaatttctctaatttagaccaaactcatatgatccattcatgcacacacgcatgtgtagaaaataccctattatttacatcaacatacaaggatattcaaaacattctaattaccacacatatatttttttttggaaagaatacttacacgcatgctcaaggtattgtgccaaaattacatatgttcatatcctaactatttgctaccactaactaaccacacatatttgaagtattttattaacatacaaacttttgttgctccgttcctatttatttatacatatatgcgcattggagagccaatctctcgcacgcacatacttgcatttgaa

SEQ ID NO: 102311 - DNA, 409 bp, Glycine max
agcttgaagctgatgaatcgctctagattgttgtacttaagggcaacggtctgtgcggaggtatgcttaggatcataaaccacacagtctggcgacacgtgcagattttttattcaaagcctactgggttaccaggttaatcaacgcatctagtttaccttcaatcttcctatactcagctgatgaagatgaatttgtggctacttcatgcactcccctaatgacgatagcatcatttatgagcactaaatgtgtgggaagaggaagccatcttctcaattaaatttctggcttcagcagtggcatgtatccaatggctccagcactggcagcatctatcatacttctctccatgttactgagtccttcataaacatattggaagagaagctgttcagaaatctggtac

SEQ ID NO: 102312 - DNA, 389 bp, Glycine max
gatccttaagcgacctgcggctgcaagctggataagaatctatccctttttctctcattctcgagatcaacagaacaaacaggggattatttagtgacgagaacaccaatggatgccttgttgtgtgaaatctaaaaccaaccttgtggattaaaatggaagagaaaccaaatgattccgagcctgtttgtattcgcgttgaaacaaatgcaaggctttgtgcctctagcttctgtgttttttgtctcgtaacatgtgaaatgttcgttgaacgtggttgaaacgcgtaaacaaacataacctccaaagtttggagttaatttgtgccttgctcacatagatttgtaaggaaatgtgctacattttagtaggttggcaacacttttatg

SEQ ID NO: 102313 - DNA, 440 bp, Glycine max
  unsure (1)..(440): unsure at all n locations
gtcatgtactattcctatgcttgtagcaacaaaatgatcagtcatatcttatctctggaaaaccatcacttacaaataagattttcttaacacacattatccatatattgaaataccattcatcattgttatctataaaaaataccattcatcactttattaattattaatacaccaacatatataactaagcatactgatgaccatatcaagcgaagagacatacagttgccatcgatcaaactcaattcaagaacaatgtaaagagggtctcgaatttgtccatttccttgtgaggaagagccactataatatttatcccatcatccgcactaccaaaaggaggagacactaaaataatgtcctttctgtgatacaccacgggacaacaatacttangcttcccccacggatactccaccttctcaagcctaatctca

SEQ ID NO: 102314 - DNA, 411 bp, Glycine max
  unsure (1)..(411): unsure at all n locations
agcttgaagaagagcttggaagaattttgtgttttacatgcgcaactaacttgagtggaatttgtattgattgttgtattatgtgttgcatcttagtctttgtcatttcatatatgtatcatgcatgatcatgtangagtaagaagaaagtttctgaagttagaaaatttcttctaatgttaaaactttctattttaatctattacagccttactataatcgattacacaagttggtttaagctggtagagaagtgtctcgtataagtttaatcgattacaagcttgtagaaattgattacttattttttttttgagacaatgattgatttattcatgaatctctgctttaatcgattaccatgtgatataattgattacttctcccttaaaaagtggttcaaaagttatc

SEQ ID NO: 102315 - DNA, 410 bp, Glycine max
  unsure (1)..(410): unsure at all n locations
tgttggatggngatttttatgngctttattcatanatatgaagtgcgaagtcattaattggacatccatatgctgagtgattgactaaggatgaaaagataattattgctgatctgacaaagtcaatggtcaaaccaagaaacattctgctaacgttgaaggagcacaatgtcaatagttgtgcaacaatcaaacaaatatacaatgcaagaagtgcatatcattctttcattagaggaagtgatactgaaatgcaacatctaatgaagctatctaaacgggatcaatatatttgttggcatagattaaacgatgaagatgtggtacctgatatcttttggttcaccctgatgcagtgaagttcttgaatgcatgtagattggtgttattgatagatagtacctacaaaa

SEQ ID NO: 102316 - DNA, 298 bp, Glycine max
  unsure (1)..(298): unsure at all n locations
agctctaagtttgaggcgagtaagagcattgttgttgtttcctatattngcaaactattgcacaacaattatctcactttgccttgaatcgtagctaagtttgcccttgtttaagttagggaatatatataattagctagatattttcttacaancattaactagaacacttaattgcttttacatgtatatacagccattcagtcattttagtgcacctggaacgaaattgagggtttggaagtgaaaattgatcactcaatgagtttgccaagtagcttaactaggaagccatatt

SEQ ID NO: 102317 - DNA, 412 bp, Glycine max
  unsure (1)..(412): unsure at all n locations
cgcttcttatggtgcatagaatgcgtgtaaaaaaaatagtatgtgtcatgaatctgtgacaaaagcttcaaccaattaacattgtttgaatgacaactgttgtagttggacagcaatcacatagtttgtccaccatggtatgctntatgttccaccattgctccctgtggcctgttatcaaattttcagtatattcaacttccttcttcaggagtggaactctgatgtcatgatagctaggaatgggcaaatgtggctcatattgaccaaatggctgcaaccatattctcaaagcttttcaatataatgaggttgaatgacaaatggcttggtaccaaaagcgagaaatatgttgatgcaccttcaatacttaattcttatccattgactctcttatgttcatttgcctaac

SEQ ID NO: 102318 - DNA, 419 bp, Glycine max
  unsure (1)..(419): unsure at all n locations
agcttggccattgatcctacagatatctcattataccaagttggtgtgtataattgggattgaagctcccacacagaagttcaagatcatgcaatcctccaaggaagattgtgatcttaacaacctttcccaatatagaaacttgaaagaaagaaagaaatgaaaacaatcttgtccttttggatcaaggcttttattcatagcatttcatgggcatcttcactaggcaaacattaaaaactattaaacggatggccagctcaaaaaattatggcagcaaaggaatgtaaggcatctagagatgaacacaagttgtctggtcaagtagaacctaatgaactccaatactaagactaaaacttncccaagtaccttaccacaattaatgccaaaaaggtggtagacaattactgaaccta

SEQ ID NO: 102319 - DNA, 232 bp, Glycine max
  unsure (1)..(232): unsure at all n locations
attcatgggtctctannactaattgaacacccaattttaaaatttagaatttcaacttcaactgggacacttaaaaagctaaattggtgagatgaaaattattcctcatttatgtatagtacactaagtatggtactagcttctcaacaatgagtttcacctaccccaactagaattccatttgctcctccaaattccaatgtcgtgatggcaaaagcacatttcacggtca

SEQ ID NO: 102320 - DNA, 360 bp, Glycine max
  unsure (1)..(360): unsure at all n locations
agcttgtagaatggctagacattatacatgttatggtttggtttggttcaaggataaaagggatgccccacattatttccatgacacaaatgccaaaatgatgatttggaaactttatgcaaaactggtcatgcctgcacctatgtggaccctcaagtgtcaaaattttatggtcatgtgattctaaggctcaagattcatttcctctattttagtcaacccaacgtttccaaaatatgttcttttatcaatttgtgcattcatctgagtccattttgggcgtctgggaaaatcttacagcattcacccttcaggtgtatacacattntttcaaaaactagttatgatcagngaattttt

SEQ ID NO: 102321 - DNA, 438 bp, Glycine max
  unsure (1)..(438): unsure at all n locations
gatggtgtngagaaganatcacatgnttgtcatcatcaataatgtggagaatgtgaatgtatgtatacatgaatttgatgatgtcaaaagaagaatcaaacaagactcattttgcttcaagattaatacaatgattgtttcaacaaacaaagccttgattcaagatttcttcaagatcaagccttgcctcacaatgaaaggttttatgtcattcaaggcacatgtaatcgattaccaatggtttgaaagtgtgtaatcgattgcacatcatatgtaatcgattaccagagactctgaacgttgggaattcaaattttaaatgaagggtcacaactattcaagaaaaataactgtgtaatcgattacactaattctataatcgattaccagagaggattttcaaggaatatcgccaacagtcacatcttatcatttgga

SEQ ID NO: 102322 - DNA, 427 bp, Glycine max
  unsure (1)..(427): unsure at all n locations
agctaacaatgacactaaatccacganaacttatttaatcaaactcatttttctttgactaaaataggcgttcctagcacatccaatgaattctgcagttattatccttcgattccccgccagaatatgcccatcaaagtttctattaatttcaccataacagccttctgagattctaatagcaactcactttgtagtttgaaatgccctgtgcgagaacctcctttccagcacgtcagaggtacatcaatatgatttttatctaattaaaaatcattattttttatatgaatatcatgtatatcgacatttataatatatataataataatataaattaatttttatattaatcgattgtttcttgttaaataaaaacaacaccgatgaagataaatacaatagcaaatgtaatttttgagcatat

SEQ ID NO: 102323 - DNA, 339 bp, Glycine max
atgttgatgttaattgcaggatctagtatgggagaaattaatacgttgaagcaatggttggcagaaaactttgaaatgaaggatcttggtccggctaaacaaatccttggtatgagaattcttagaaacagataagaaggaattttgaagctatcttatgagaaatatatacacaagttgtttgacaggttgtaccttgaagattctaagaccaggaatacccctttgggatctcatttgaagttttcaaagaagcaatctttgcatgcagatgaagaaaaatgtacatgtcaagagtatcatatgcatcagcagtcgggagttcgatgtatgctatgg

SEQ ID NO: 102324 - DNA, 430 bp, Glycine max
  unsure (1)..(430): unsure at all n locations
agctntcaactcaatacaatttcatccaacttttttatctcaatatgtaatagacatctctatagattaaaataattttaaatgtttaatgtgtatccaattaattatatggatgtgtatctcaatatgtggtaaacattagaatgaattttaatataatacataagttatttttatttgtcaaacctatctgtcatataatgaaaaagacaaaaaaaaatgtacaataacaaattaaattttatttattttctataaattttctatatcttttctatatatagaatatagaattcctatatatagaatatagaattcttttattctttaaccttttttagttaataaggttaaagaataaaagaaaaaaaaaatagaagcgtccattgtctaatggataggacagaggtcttctaaaccttaggtatag

SEQ ID NO: 102325 - DNA, 465 bp, Glycine max
  unsure (1)..(465): unsure at all n locations
ttgaggaatctcaggatcttgtcttagaccctgttattactgtcagaagacacgtgagcccgcttagaggtaagggatgagnntatcgcaattgtggttataatgaacatgtgtatggatccttaaaaaatcaaaccgggcnaatttggggaggggtattaaantataatttttcctttattattanaaanacaanannngangncnngatggagattggttgttaaaatatattgatcttggcgcaccttttatatnnatgacnnngannaanngannntgggataattatgtgaaattatatgaggggttttactccccatgttatgataaactctttgtataaattgttatcttgagaatattaaatggttgattatattgtgagtatgtgataatttgaacctgtgattaatggtgaaatagatgtgtattgagttatgagttatgatctgtgcaatcaca

SEQ ID NO: 102326 - DNA, 423 bp, Glycine max
agcttgccacccagctcgcccaggcgagcaatgttgttttctccagaagcaacatccttctggaggaaggatctggaagcccaagtgggccaaattgctatttgcacccccccttttactaaatgcacccccatctattgttttgggaattctttttccgtaacgttacgaaactttacgaatttcgtagcgatacttataatccttccgcaaggttacgaatccttacggattatgtatttactcttttttagctttcgaagaagttacggaaactcacggattgcgcaaaaacacctcttttcgatttccgccacattacggaatttcacgaatcgcgcatgcatgcttccttttgatttctgagacgtctcgggacttcatttatcgtgcaacaaaggatgccaagtacctcacagcggc

SEQ ID NO: 102327 - DNA, 426 bp, Glycine max
  unsure (1)..(426): unsure at all n locations
agcttgagcttattttagatgaccaataagatatatttaactngagtntaaagaaaatgttgtcattggccaaaatagattatttagtgaggattaacctatctagtaccaacttctagaataatatctgaatatgcccaaatatttttatgttcgaaaagttaatgagatatttttctttatgattcaacttaaagatagaacaatttaagtaaaatatttggaatcaataaaatgttgttggctgaaattaattatacgattaatttgttttagataaattgtatgattgattctttaccattattatttactagtcggtaacccgtacatacgcacgggtggttccgccaattgatttttgatgaatgaattaaaagaaatgtaggattactatatagacaaactggtaaacaaatggaactt

SEQ ID NO: 102328 - DNA, 384 bp, Glycine max
  unsure (1)..(384): unsure at all n locations
atcaagttctcttcaagactgtctcaaagacaccttctgagttattcaagggttggaaaccaagtatgcaacatatacgcgtttggggatgcccgtctgaagtaagaatttataatccacaagagaagaaactagaccctaagactattactgggttatcattgaattgctaaagggctaaaggtataggttctattgtccatcccacaacactaggattgtggaatcaaggaatgcaaagtttctcgaanatgacttgatcagtgggagtgatcaatttcagaacatttcttctgaaagggatcactatgaagctgaaccttctgggacaagtaatagggtggtagtcattcccacccctcaagttaaaatgggtgttagaca

SEQ ID NO: 102329 - DNA, 436 bp, Glycine max
  unsure (1)..(436): unsure at all n locations
gcaagctatctatggtcatttgctgcgaaggcaatacatttttatagttagttntaccaagaaatgctactcttaaaacaaaaatggcgtacaacctccttcaataaacacaaacatcaatgtaaatgtagagcaatctcatgcacattcttccttacgaacattcactcgcacaagatattcttctaactaagaaaaatacacccatgcacaatcaaggcaccttcgttacctagattatttatatgtacttccaaggtgtatttgctacctacatcacatgcacttccttggctaaatttacatacatgcatactcaaagcatcttggctaccaaaaattgcacatgtgcacattctggtatttctaatacctatgcatacacaaactttgtgatgaatcttggctatctacacaatatggtgctacatttcat

SEQ ID NO: 102330 - DNA, 422 bp, Glycine max
  unsure (1)..(422): unsure at all n locations
agctngcttctacagagactaggccaatatttgctcttctctatccactgtcaagncagaagtgtgtgatgtgggggccaagttggagtatgagaggacactccacacctgagctagtgtggtcagacccttcctgagaatcttcctaggatggccctctgagttcaagatgaacccttggccaggtatgcataaggcagcctctatctctctgtagtctgtaggcaacctgcagcatctggagtaagcggtaaggtctccccctcagctaataccataggtgtctccaagaatgtgttgagactgtcagcatcaatcttcaccaaatgacctctgactctggactgctttggtggatgatcctcanaactgtataaatttgcatagaattctttcaccaaagctaggtctatgctcccatc

SEQ ID NO: 102331 - DNA, 425 bp, Glycine max
  unsure (1)..(425): unsure at all n locations
agctngaagacacagaaccnngaanactctgataatttattattcatgaaggcatcatcagatttctaggattgaaaatcagaacatcgactccccaaaccacctcgaatatctaaaatacctttggttgtagagctgagaaacaaaccattttctagcataaagaaagatctttaacaacaagctctatacgaggggcccattcacgatggtgtgaagtaatacttcatctaacaggaagaatggcatgagaagatgagaaaacccctcccataccttgagtaatttgaaaaatggttcgaatgagattataaatgtcattaccttgtagcgcaaggtctcctctacaacatacttgaatttgaggaagaaaaacatctttcttgaacatgaaagtttaaagagaagtcatggaaatttagaga

SEQ ID NO: 102332 - DNA, 386 bp, Glycine max
tccttaagtcacctgcggcatgcaagcttatatagcttccataacatgcttattgtttttatcaattaaattttagtttcaaaggtatttcaatgtgtggaatctttcctcaatttaaggataagcaagaatatttatgacataagttctaataagtaatagcactgtaggataagttattggcttgtattttagatgtcattagattatgatttttcgagaattctagcttctctatggaataataatacatttcaacttatctttttttttttggggcggcatggcgagaatcagcatttcagcttgaatataacttaatcaatggctgaatttggaagttctcatgcgtgggaccgattaatggaaatatttgcttgatttaa

SEQ ID NO: 102333 - DNA, 457 bp, Glycine max
tttatgcgatgacattgtgactggaaagacacttcttgcatcagcgattgtggcctctgatatagctgagcatcgaacttcaattgggaatgaggatcttctgccatctttaattatttgcccatcaactctagttgggcactgggcctttgagatagagaagtatattgatgtttctggtatctctagtcttcaatatgttggttctgctcacgagcgaatgcttcttcgggatccattttgcaagcataatgtcatcataacgtcatatgacgttgtccgtaaagatattgattttctatgacagctgttgtggaatcactgcatcttagatgaagggcatataatcaagaatgccaagtctaaagttacacttgctgtataacagttgaaagcccaacaccgcttgatattgagtggtacacctatacagggtggggtatgagttatgtctcat

SEQ ID NO: 102334 - DNA, 439 bp, Glycine max
  unsure (1)..(439): unsure at all n locations
tccttaatcacctgctgctgcagcttcttgattcattatggtatctttggttttctcctttcaaaggaaagttctagtgtgttgggggccatgccagttccagacaagggggaaaagcttatggttttggtcagggggattaagttcggggaagagaggtaatggtaatcccaagacatgagatgaatcttccaattatccatatcactaccccaaacaaagtccctgcatattntctcaatctcattacaaatggagataggaagggttgtagcttgaactctataaaaggaaggttgaaaaggcatgattgggccagaggttatgtgcttcgccatagataaatttcgacccttccaagcaatgagcttgctatgaaccaccacgggggaaaagtagtgagcacttttctttttgtgtaggaccataaaccctatat

SEQ ID NO: 102335 - DNA, 355 bp, Glycine max
  unsure (1)..(355): unsure at all n locations
tttctgaaatgtgttagacgcctggtaatcgattactggttcgaatataagtaaagctttctgtctttacttgagataatcaaatgcccatgatggaaatcgattacaggtttacctagaaggattatatatcaacctcaacttgaaatatcgtacaaaatatgctaatcaattatcatgcatgctaaatcacaattttccagaattaaacatgctaaaatggttattttatgaatgctaaatgttcaagaatgcanactacatgtacaaacaaaaaagcatacaaaagtaaatgcttatgtacatgaacaagtactctctaattggcttaagtaaatatatactcacttataat

SEQ ID NO: 102336 - DNA, 419 bp, Glycine max
  unsure (1)..(419): unsure at all n locations
agcttattgaattntgaagataaaatatatatttgaaattgattntccatattatgatttgttaaaatgttctcctattattaaaaacataagaggatgtagtagatgtatgttaggagagtgaagttaaccactttaggagagtattcaaaaatgagagtgaattaatttttaaagttattatcacttttttaaaatttgtatacattttattttgtgaatcaatttttttgttattagactcaaaagaaagaatataaatttttattcttgtcaaaaataattattggttaggttttattaatttttcggttaaactttgaaatagtcggagtttttttttttcctctantgaatcaaaagattaaaacaaagaaaagaaagaatataaatttttatccgtgtgaaatgttctttga

SEQ ID NO: 102337 - DNA, 188 bp, Glycine max
cctataacgcaacgtggtggacaataatgggcaattaacttgaatggccattaatgtcaatgcggaacgtattctgcgcttcactattcatgatcacacattattgcaactagtggctacgtgagcatgaactactaccaatatatagatgttgtccacaccaatgaatgcatcttaaaagcatacta

SEQ ID NO: 102338 - DNA, 418 bp, Glycine max
  unsure (1)..(418): unsure at all n locations
agcttgaaaattggtattnttcaccttctctctaagccaatctgctggcttagcgagcctccgctaagcgcaacactcatgggctaagcgcgaggaagactctagaagaagatgagttgtacaggttcgctaagtgcaccacttcatctcactaagcgcaccacttcagtccatccgctaagcgagaaaggcacgtgctaagcccaaattcactaatgtgcgctaagcggtccataattgcgctaagcgcacgagcacaaacaaggccacctatttaagccagaaatcaaattttgtgaagggagtttgggctgggattcatagctttgcatgtctagagattctagagagagaaaggtccaagttccatatagtttagagagattttttgtgtgaagatctgtagagactagagctt

SEQ ID NO: 102339 - DNA, 407 bp, Glycine max
  unsure (1)..(407): unsure at all n locations
tctacttatgtggcatggcgggnttcctttactttcttgtcttcaacgcgagctctgaccactgttctaccttcccgcgatgcctctattcatgtccgcctgagtgggtttatagcctaaaccatacttcccacgatttccttgggtttttatcaagctagttatgccgccattgtctttgcctaaacccatcccgggttcataaccgttccccaacataactcgggccatcaataccgccgcatcggacagacaaggttgcccaaagagggagtccacggaggaaatgctgaccacctcaaaagactggaaagcggtttctaacgattcttctgcggcttccacataaggcatggaggatgggcagcttaccaagatatcttcctcgcctgacacgatgaccaagt

SEQ ID NO: 102340 - DNA, 424 bp, Glycine max
  unsure (1)..(424): unsure at all n locations
agcttgcttgttgngcttctatggaggctagttctttgagcttcaataaggtcctttaatggtgattttccacaatggagatgcgcggaagacaaagagaaaaggtgagaggaggcgccatccactagggaataagcaatggaagaaagagcttcaccaccaagatgagccttggataagaagcttggagaggatgcttcaatggaggaaaggaaagagggagagaaagagagaggggggagcacgaaattgaaggaagaaaaagggagagaagttgaacttttagttgtgtctaacaagactctcattcatcaaagttacaacaagtgttatacacgcttctatttatagactaggtaacttccttgagaagctttcttgaaaaaacttccttgagaagctagagcttagctacacacacccc

SEQ ID NO: 102341 - DNA, 307 bp, Glycine max
  unsure (1)..(307): unsure at all n locations
atactatggatcaagaagcttctcgagaggacttcacatccatgagagtaacattgttatctattctgatctaacatgatgagctactatcaagctttctaaaaatcctacaattgcatctaagtggacagcatctccaaattacatactaggtcatacgataccatgttcaaaagcaacatgctaatatatttattacacccgttactaaagaataaacttggaatggactgtataaaggaatgattcattatctatatgtgcggtcaatatagctntatgtttacaggacatatcggctgatgac

SEQ ID NO: 102342 - DNA, 451 bp, Glycine max
atccttaagacacccgccgcatgcaagcttgacaccattgcttggtgctttcattgctgattcttatgccggaaagttctggactgtcacccttgcttccattatataccagatagtaaagaccctcccctaactctttcttgtgttgaagtgaattgagaaagtattatacatatgcgttacaactcagattttaacttcttggtgctacaataaaacttaagtcgagttctttatattcttaccattaaacttaaattatttcacttattatatatatgtacttttctagatatcttctctctctctttaatttatctctctaagtgtcttcatgaggctgttcatccattattttgcatatggatatttttaaaaatttactactcataatagaggttttatattcagtattaaaaaaaaaaacattcacatgccatatttaatttga

SEQ ID NO: 102343 - DNA, 450 bp, Glycine max
tgcattcagacaatctgcttaatatcctcccaaacgtcaaattctccgcctatatattcaacctttccatcactggcacgtggagcgaatcttcctccatggtgcaatactaaagttatattgtcattcattctacacaatcagaaaccacaaaaattgtcatatattatgaaataaaaaaacctacctcatactcaaacataggcacatcacacaacaacatgcaatgtcatctataaaaacagagcatcataaacgaaaataataaaggatcataaacctccctacgaagcgcgaagacaatgcaaatgaaacccctcgaacatataaaaccccaaattaaaccaccaaaacaatgcaaacaaaatgaacgaaaccaccaacctgacaaatagcgcgaaccctcacaatcacgagaatgcaggggagggaagagcaaaccgcatacag

SEQ ID NO: 102344 - DNA, 433 bp, Glycine max
agctagaagcaatgcttaccctgtgaagcaatcttgtttgtattttctttggcatcatcaaaatcatgtatcatacattcacattctttaggtaccaattcaccatttacagggtgaattggttttcaaaacaaaacaaaattttaaaaccatagttgcaaaaactttttttttgtacagatcgtatcacaaaaatttcataaactgtactcaatcaatactgaatcaatcctccctttacaaaatatccttgttaaagttctttctttcaaaaggatgttttcttgaacctttagaaaactgatcaagactagaatgagaaagaaagataagatcaagagaagaagtacacaacatttttatattggttcactctctatcactagagaagctaatccagttatctaatccaaaacctaaattagattttcac

SEQ ID NO: 102345 - DNA, 445 bp, Glycine max
  unsure (1)..(445): unsure at all n locations
ttattgttgaccacagagtggtttctggagatatgtcgcgggggtcaggagaccttggggacgtcangtggggtgctattgcccaaaaccaagcttgaccaatcccgacccaacccgggcatagtcggtcagtgagaacctgtgatgtacctaacaggcgagctcctggcagtcaacagataaaaggaacaaagaccacaaagcaaggaggcttgtggtggctggccagctgtgaaacttgattgatatgtgagatatggtctctggtaatcgattaccaagggtgggtaatcgattacaaggcttaaaaatgaagacaggagactaagatggtctctggtaatcgattaccaacgggtgtaatcgattaccaggcttggaaacgaagtcaggaaactaagggagcctctggtaatcgattaccagcctgtgtaatccattacac

SEQ ID NO: 102346 - DNA, 434 bp, Glycine max
  unsure (1)..(434): unsure at all n locations
agcttgtaggattatggngtacccatcacatgtggttctatgtggcggtcgggcgatggtgcacaacaagtttttccacatccacaatgcgcgcataaacccaccatcccctgttgcccacctccaactgagctcacgtactcccacgtagcccataccctcgtttctctcaacaccgggtccccatcaatcctcccaagcttccacaatatccaagcaaaacaacattcacacagcacacgctatcacagccaagcaaaacagagcaaaggcagaaaactctgccaaaacaccaaccaaaaatcacagcttttcccactcaaagaccccagtaacaattccttcgatccaattcgtaaaccgttggatcgactccaaaattttactggaagtctatagtgcataagcctacantttgaccgttgggatctact

SEQ ID NO: 102347 - DNA, 389 bp, Glycine max
atagaagcgaaatccaacaatgaagattgtaaggttgttgtgttacaagaagtggttagggtatagaccatgagagagtgaatatgagtgataaagatgttgtaaaaaaataaaagtgagtgaaaaagagagtgagaccacaagtaatgtatgtgacagtgataagaaaaatattgaacatgagaatgaagaagagaagaagaaaaagaaaaagattttgaaaaaaataaactagacagtgagaaaaaggagaaggttgttttcaacgagacactaccaccatgacaaaaaaatgtttgtgcatgcattgaaacatgtatgtagcattcctctctgtcaattaccagtgcctttccttatggatgatgcacttgcgataacaataccta

SEQ ID NO: 102348 - DNA, 437 bp, Glycine max
  unsure (1)..(437): unsure at all n locations
cttatacttatgtcgcgnggcgggctttcttcaccttcttgtcttcaacgtgaactttgaccactgttcttccttcccgcgatgcttcttttcatgtccgcctgagtgggcttatagcctaaaccatacttcccacgatttccttgggtatttatcaggctagttatgccgcctttgttattgcctaaacccatcccgggttcataaccgttccccaacataactcgggccatcattaccgttgcatcggacagacaaggctgcccaaagagggagtccacggaggaaatgctgaccacctcataagactggaaagcagtttctaacgattcttctgcggcttccacataaggcatggaggatgggcagcttaccaagatatctttcttgcctgacacgatgaccaagtgcccctgcactaccaatttcagcttttg

SEQ ID NO: 102349 - DNA, 425 bp, Glycine max
  unsure (1)..(425): unsure at all n locations
agctnggcactatcaacactataaggtttatttctaaaataaagcttggtggcagaggaatcagagtcttgttctgccaccgcttctccttcattctcctccactttctcttcttcaactaaaccagcaccatcatcatccacaacaacaacagcctcttcttgtgcaacagcagcagaaattctaggtccccacaacttgtgcgaattaatggacaaaggttccaccaagtgtgacccaaacatgccacggtttgagggcactgttgttatgagagggtctattatggagcagttcttggaggaacgaagacatttgacactgttaatagaagaagaaaacaaggaagctatgcctgcagcagcagtggcagccatgttgttgttgtgatgtaatgcaactcanagtgttacattacaagtgat

SEQ ID NO: 102350 - DNA, 423 bp, Glycine max
  unsure (1)..(423): unsure at all n locations
agctntgatggtgttgagaagaaatcacttgtttgtcatcatcaaaaagggggagaatgtgaatgtatgtatacatgattttgatgatgtcaaaagaagaatcaaacaaggctcattttgcttcaagattaatacaagattgtttcaacaaacaaagccttgattcaagatttcttcaagatcaagccttgcctcacaatgaaaggtttcaagtcattcaaggcacatgtaatcgattaccaatacatgtaatcgattaccaatggtttgaaagtgtgtaatcgattacacatcatatgtaatcgattaccagagactctgaacgttgggaattcaaattttaaatgaagggtcacaactgttcaagaaaaacaactgtgtaatcgattacactaattctgtaatcgattactagagagaatt

SEQ ID NO: 102351 - DNA, 474 bp, Glycine max
  unsure (1)..(474): unsure at all n locations
ngagttgtaagagccagaagtggttatgattaatacttgtatcttgttgaagttagtggaacatggtggttagccaagaactagacgtagtctgagtggtagaacaaacttgtataaatcactgtgtcttatgtgttttcatttcttctatgctttaaattgacctangggttgaattggtttttgttttgaaaactttgtatgttagcaaaatttgttttcatcgtttgaaaatatatttntgcaaaaatatgttatatgtcttacaaagtttctttttagactgtaactttgttcttcacaaaaaaggcttanaaaaaattctaaaatcacaattcaactgtacttcttttgatatttgcctttacatagaatatactaagaaacaaatttcttaatagttaaaacaactagttaagtctaatgaaaacaagtctctaaaaaaatacctatgagccttgcaatattataatg

SEQ ID NO: 102352 - DNA, 425 bp, Glycine max
  unsure (1)..(425): unsure at all n locations
agcttgtgcaaatcacatcactcctactttttatctctagcatgcatggtatgtaggnctcgtcctttgtcacgggaagccggaaggtccatatcaccttcttaattgtacacatggggcactgcgcccccaaatgcgcaagtaagaagagataattttccgggctctcgtgtccgtaaaatgcattcatatcatgcaccacataagcatctcttcataacatcataatggacatatcctgcatttgtccgttatcatattccagcctcacattttgcatgagtcatggcatcatcatgcatatgcgttcaacaaactttttgatctgcanaattgcataccatttgttttcatgtttgctcatccttgtgttttcctctacaaaaacaaataaggggaagcgtgaaacttcacactacattctt

SEQ ID NO: 102353 - DNA, 384 bp, Glycine max
tctgggtgatatctttatgaagctataaataggggttatcttctatatcttctttatcttttacctaatttatgaattaaataacacttttgagggttgtaaggcgtatgaaacactgtaatgacagatcgtgatcattgttctccccttgtggtacgtctatgctaattgcttatacgcttactatgtttggtttgatcatgagcaactagccatcctagtctgggagctatgatgtaattgtccaattgtacccctttctctgttcttgataaaattccttagcgttttgtgttaattcattctctttctcatttgtattgattaattgggaactgataaatcctatgcttaatcgaatgtactatggtgaacatctctgta

SEQ ID NO: 102354 - DNA, 453 bp, Glycine max
atccttaagtcacctgcggcatgcaagcttctatataagctgaaccattttatcaattaactcaagttgagttttattcagaaaattagagtttatctcttttatcttagtgagagtgattcttctaaattcttgagtgattcaagaacaccctagctgtatcaaaggactttcataacctttgtgtgttgccctcgccggaaagagtgattctttccttcctttcatcttcaccttgttctttcaaatcacaattccagaaaatccacttctgcccagaattatatcgtggccataactcccattttacgcactcaaattaagtgattcttgagcctatattgaatttcaaaacgagacctttcacctcgttttggaatcacctcatttggagccctgtagcttgagttattgccatttctatatttctgtccagccaccacttaacctacg

SEQ ID NO: 102355 - DNA, 423 bp, Glycine max
tattaacccccttttcaatactaatcatgttgaattcatactatcacaagcaatctaacttagctaaaggcaagaaaagaaggaattaaaaagggctgagttgcctcccagtaagcgctcgtttaacattattagcttgacacatagttctttcatgggtcctataagttgataatggtgtttagcctatcaatgcttccaccatggtacgactttagtctctgaccattaactacccatgatctgtctagagttgatgaatgaggatcaaacaattccacaaccccatatggcctgacctctatgatagtaaatagtcctgaccatttagatttgagcttgcccagaaataattccagtctggagttaaacatcaatacttgttgtctcggtctgaaatctttctttgacagcttcttatca

SEQ ID NO: 102356 - DNA, 428 bp, Glycine max
  unsure (1)..(428): unsure at all n locations
agcttgttacaaaagcatcaatttacattgttttcactctcagaaaacagnttattgttagacaacaattgtgatatgaagaaacatgggcaattacaatgtaacagtttacccaaccctggaaatccgaatcctaacatcatatgccagatggatgattgtgccaatagaaaacaacaacatttgtatacgcctatgaccttgaaactttaagagtaggttaggaatcaatgataaggggaatatttcttaataaaatcttttgttcagaaatttataaaacattatgtttggaaatggaaatccatttttactttagttgtctacaaacaaggtagttgaatcgggatacaaattgtgattctgaaggcccgttttccaaatcaggaatcaaattgtatcgtgaattgtaagattcgtgatcaata

SEQ ID NO: 102357 - DNA, 413 bp, Glycine max
  unsure (1)..(413): unsure at all n locations
cgaaagagcctgttagtcaaagagaagttcaagtccatagtctcatagtctgaagagagtatgatgaactaacggacgttaatatggccaccgatgaagccttggaatgagaaaccaaaaaggcctgaaaggaagaacacgaccaaaacaagttttgaggggctttatagggcagcaatagtgagctcaaactctgaagaggtgaaaggaatcatcatgggtcanaggcatgatctggaaggacgagctaaaggcttgccttatgtcgaaaagaaatttgtcccaacagttaaagtgagactgaagggaatatgtgggccatcatcgatgagtgcaaagagaagctaaatctagcggcgaatcacgagcaaaggctagaagatgagtacgccaagatatcatcagaaagggaa

SEQ ID NO: 102358 - DNA, 396 bp, Glycine max
  unsure (1)..(396): unsure at all n locations
agctagcatacaagaatctccttgcctggcatcttaaaaccttctgggggggncatatagatgtcttcctctaaatccccatgcaagaatgtagttttaacatctaactgctccaagtgaagattctctgcagctactatgctcaaaataactctgatggtagtcatctttacaactggagagaagatctctgtgaaatcaattccttgtttctgctgaaaccctttcaccacaagtctcggcttgtatcttcttctaccgtcagattcttcctttagcctataaacccacctattctgtaatgccttctttccttctggcaatttagttaaagaccacgtcttattcttctgaagggatgtcatctcatctttcatcgctagctcccactcaata

SEQ ID NO: 102359 - DNA, 434 bp, Glycine max
tctccgtcttttctctataaatagggagcttacggaagaatatagacgttcaaccttgctggtatctgatgatcacttgaaattagtgaaaaaaaatcgtttccgtgaagagaatccaagccgaggcgcttccgtaacgcgtctgaaacgtttccgtgggtgattccgtgaagaatttccgccatctatcgttcgttcttcatcgttcttcgtcgtcctgcggtcttcaaccgataagttcccgaaatcgaacttttcaattcattctatgtacccttggtggttcccacttgttttccgtacttttattttcatttcatttactttctgtatccccttttgacgcgctttagtcatttatttaagtcattttctcgccctatcaaaagataatatatatttccaccgatcctttaaatgttacatttttaatt

SEQ ID NO: 102360 - DNA, 299 bp, Glycine max
  unsure (1)..(299): unsure at all n locations
agcttatgcagactcacggncaaattcttattttatgtgcacagacnagcacagccgagacattacaggttatgttgcatcgaacgaatgtctatcacctacccataatctgacgaccctaattatagacccctgggaatcaaccttatatccaattcgagtgccagtggactcacaactataagtaacatggtatctttgagtctatagctcactttgagaccgatgggaacgaatgagtccattccaaccaaaagtagtctgctcatttgctagatcaacacacacatgcatatatc

SEQ ID NO: 102361 - DNA, 361 bp, Glycine max
tactatgacgactgagaaaactggggcaaataaagagggtgaggatgagggagaaacccatgctgtgactgccattcctgtacggccaagtttcccaccaacccaacaatatctttactcagccaataacaaaccttctccttacccaccacccagttatccacaaaggccatccctaaatctaccacaaagtctgtctaccgcactttcaatgacgaacaccacctttagcacaaaccaaaaacaccaaccaagaagttgaatttgcagcgagaaagcctgtagaattcaccccaattccagtgtcctatgctgacttgctcccatatctacttgataattcaatggtagccataaccct

SEQ ID NO: 102362 - DNA, 419 bp, Glycine max
aaagggattctcaccaataatagcctttttattattattattattattatttccatgcccagatattacatctctctctctcatttattaagtttcttttttaatataaaaatggggatctaatcaccatacatgttgagatccccttgattctcgttccccactgattgagcaccatcaatgctagctttggcagagttaagcttagctatttcgttcccagctctgcttccttctcctcttgccttcgctgctacttgcttccccatggttgcttcggccacgttaaaggaggagcacaacctcacaatatgcccatacaaaccacacttctttcatattctacgaggaaccaatgattgcgaaaccagaccttccctaccaccagttgattcaggtcgatctcgacacacaccctc

SEQ ID NO: 102363 - DNA, 357 bp, Glycine max
gacgtccggcgacagagctgcatgactcagagactagcgcgacgctgaagaacctcctctaagagggagaaagaatggtgacattcctagagacgagcgcgccagcaccaccatcaccatcgctgatgttattcaaaccctaaccctcctcactctcaccctcaacccgttttgctcgtcttttcctgtgggaccgccttcaacgacgtcgtcgaggagctcaagaatttcaccacccgcatcgctcacgttctccccatatctgacgatggaggaagcactgctgagaatgttcgtgtgttgtcagtactgcgttatgttaaattaataattatgattactagtgtttctacattt

SEQ ID NO: 102364 - DNA, 439 bp, Glycine max
  unsure (1)..(439): unsure at all n locations
taagcaccgcggctgcagcttggaagnagtgtgaggacaagcctttttgcttatcttgaaagagcccgggtagtcgaagagaagttcaagtccatagccatcaaagtctgaaaagagtatgatgaactaagggacgtcaatatggccacagctgaagccttggaacgaagaggtgaaaggaatcatcacgggtcaaaggcatgatctccgaagaggtgaaaggaatcatcacgggtcaaaggcatgatcttgaaggacgagctaaaggtttgccttaggtcgaaaagaaatttgtcccaacagttaagcgagactgaagggaatatgtgggccatcatcgataagtgcaaagagaagctaaatctagcggcgactcacgagcaaaggctagaggatgagtacgccaagatatcagcagcaagggaagcaagggaaaggg

SEQ ID NO: 102365 - DNA, 403 bp, Glycine max
  unsure (1)..(403): unsure at all n locations
ggcgacaggagcagaattttgattaatagctagtgggttaccacgttaaccaaggcatcaagtttaccttcaagcttcttagtctcaactgatgaagatgaattcgtggctacttcatgcactcctctaatgacaatagcatcacttctggcactatattgctgggagtttgaagccatcttctcaatataaattctggcttcagcaggagtcatgtctccaagggctccaccactagcagcatctatcatacgtctctccatgttactaagtccttcataaaaatattggagaagaagctctcanaaatctggtggtgagggcaattggaacatagtttcttaaatctctcccaatattcatataagctctctccactgagttggctaattccttaaatatc

SEQ ID NO: 102366 - DNA, 455 bp, Glycine max
tccttaagtcacctgcggcatgcaagcttgtttaataattcactattattgtcacctactccttctgtaagggatttattctttctgagttcccttattctttgtttggctttgtcactaattttgaatggtttgaataaaggtttttctgttgggatatttgactgaggttctccaaaagatttttgtctagggagtatcttgggtttgatagactcttctaaaacttgtaaatatttgttgctgtaatttgcctattccattaggcttttgatgtctttggaggttatttctttgttgatgtcctttgtcttaaaaggattggccatgacagatttatcattatcgtctttgacctttagaagttgatattgtgttgtggtaggtaattctgattggattaactcaccatccttaatttgccaatttgttatcacatttgttgttggatcacc

SEQ ID NO: 102367 - DNA, 433 bp, Glycine max
  unsure (1)..(433): unsure at all n locations
ccttagcagacacantatgatctatgaactcaagttgttgttttgcanacgtacacttaaattctttgagatagaactacgcttgagagagacattctaacactgaatgaaggtgtctaacatggtcagcaagggaggtactatataccataatatcatatataaatacaacatccaaacatcagacgaatggcttgaatagctcattcatggtagcttggaaagtggagggagcagtgcagaggccaaacgacatcaccctatattcataatggccgtgatgggtgcggaacgccgtcttagctatatcatggtctgccattaatatttggtggaaaccttgccgcaagtctaaattggagaaccacgaatctgagccaagctcatcatagagctagtcaatggtcagcatatgaaaatggtccttgaccgt

SEQ ID NO: 102368 - DNA, 182 bp, Glycine max
gaagctcactacaagccttaagtgaaaaaccatgatatcaccatatccttaaggaattttggagctttggaattgttttgggaataagtgtgtggggggggcggggtgtttttactcccacatttcatatcataatatactatttatattatctccctcatatattacctgcttacttcttt

SEQ ID NO: 102369 - DNA, 429 bp, Glycine max
agcttcataacatccaagaaatttcaacatttattcatcatgaactatcaaaactaagcaaaaacagggcagaggcagaaaactctgcccaaaacacaaaccaataccacaacttttcttattcaaataccccaatcacattctttttgttccaattcattcaccgttggatcgactcaaaaattttactggaggtccctagtacataattctaaattttgaccgttgggatctcctagaaaacgtccagaacccaatctgtactactctttccacaaccagcaaatacacatcattttctgcatgcacaaagccaaaattctgctgcacatttcaacagcaaaactctgcataatagtgcaaattttcgaaatcacacttgcccttgtccaattttgcccaaattgaatcctacaagtcctaaatcat

SEQ ID NO: 102370 - DNA, 462 bp, Glycine max
  unsure (1)..(462): unsure at all n locations
ntaggtgcatgcatgccttcatgtgatgtgtgacaatgcggtatataagagagtttcatatgagatatactctcacattccacanaatacaatattataagtacctaactctcatctccttcatccttaaatccaacctacttttcttttccccttcagactcttcccttcccttcccttcattcattctctttgtacaccaaaccaaccaatccccttctcttatcttatagagtggagtttgtttacttgcatttttctttcttgttcatcaagaaatttagccaagatttcaagtcaaccaattntatctgcaccacatttagctagcactnaccctttatcttcttaactntgtttctcattttccctgcaagccatggcggtcttgtccataggttattctttttcctcaagtttactcaccaaactcatatatggagtgccacaaaacaatgagcg

SEQ ID NO: 102371 - DNA, 421 bp, Glycine max
agcttgttctaaatttacattgatgtttgtattttatgaggttacatgccatttttgctttaagagtaatgtcccactaaaactaactttccaaatgtttgccttcgcaagaatggcaccgaggaagcttgcctcaaagaggtccaggaaagacaaggcggccgaaggaactagttccgccccggagtacgacagtcaccgctttaggagcgttgtacaccagcagcgtttcgaagccatcaagggatggtcgtttctccgagagcgacgcgtccagctcagggaggacgagtatactgatttccaggaggaaatagggcgccggcggtgggcaccactggttactcccatggccaagtttgatccagaaatagtccttgagttttacgccaatgcttggccaacagaggaaggcgtgcgt

SEQ ID NO: 102372 - DNA, 446 bp, Glycine max
  unsure (1)..(446): unsure at all n locations
tctattgacagccactcatgacacatgtcctcaggcttccctttctttgtgagttatttgtgcaatggcatgtcggcatggcatccctacatcaaagttgtaaaatcagcacacatgtaggttaggaatgaaaaaaaaactataaaaaacacaacctgttagttgccatactccacaagtgcatgtccattcacctaaattgacctcaaccttattcccccacatgtggacctcatatctcangcccatgttatcaccacaccaaatgggagtccattgattagcaaaatggaattctttttctagtcttttatactgcactggacataatggtccaggttttccagaaagtttaaccttgcgggcagccatggttctcatgatataacttctaatttcttcaagcattgtgataataggcttgcatctatagtgcagaattctgg

SEQ ID NO: 102373 - DNA, 390 bp, Glycine max
  unsure (1)..(390): unsure at all n locations
agctagagctcactgttgctgcccctattntttccctcggaacttgtttcggccccatgcttcctttcaggccctctttgtttcctgttccaatgcttcggctgtggccacattgacgtctctcaactcattgcattctttttggaccttgatggccattgtcttgaacctttccttgactgcttgtgcctattcaagtttggcattcaaggcttgcacctcttcactctccttaggggtttcagcctcttcctcacttgaaacctttagctttgggagccaatctaactcttgcatccgagccttcagccacttgtgatagccaccgacgatctcattgctgcttcccctaagctcattatcctttctttgcaccatgctccatgcctt

SEQ ID NO: 102374 - DNA, 410 bp, Glycine max
  unsure (1)..(410): unsure at all n locations
acaaggcggtcgaaggaactatttccgccctttagtactacagtcaccgctttatgagcattgtgcaccagcaacgctcctaagccatcaagggatggtcgtttctccgggagcgacgcgttcagctcatggacgacgagtatactgatttccacgacgaaatatggcgccggcggtgggcaccactggttactcccatggccaagattgatccagacgtagcccttgagttttatgccaatgcttggccaacagaggagggcatgcgtgacatgagatcctgagttatgggtcagtggatcccgttcgatgccgacgctatcagccagctcctgngatatacgatggtattggaagagggccacgaatgccagtattgtcagaggaggaaccggtctgatgggttctat

SEQ ID NO: 102375 - DNA, 417 bp, Glycine max
  unsure (1)..(417): unsure at all n locations
agcttcagccaaataatnnatatatattaaatagcttcagctcaacngaaatgaaggaaatatatagttgagatttaatctctagatttgtatagatcagttgcttaattaagctctaactttaaacaaatagatttgtgtatataaaagactctttaactctcgataacaaatattctaaagtttaaaaaatataactcacttttattcgaaactatttactatttactatttactattttaattgattggataactttttgtgtgtttatttaagtttgaaaatgtaattttgaaataaatattaaattattttctctattttttattttaaataaaatctgtatgataattataatttttaaataatcctttaaattaaaattatttttcattacaaaaacttagataaatata

SEQ ID NO: 102376 - DNA, 327 bp, Glycine max
gagatagctcattttgagactttatgctaagaacccaactatgctagctatgtaaactacactaagataagagcgggataatactctcctgtgtattattatgctccattatcttacatttatactggaacttgagctcaacgctaaggccgacaatcattgtcctgctgtgctaacactattaacagaatggatatattgtgcagtaacagaattagtggataatcactaatggacacaactgaatggatacgtcatggaaataacagaatggatgctgcctattcattgttggccgtaatcactgaaaccggtgggcttcctagc

SEQ ID NO: 102377 - DNA, 131 bp, Glycine max
agcttacacaacatcactcacttttcactctctttgggaaagaaagggacgaatagtgttgcagacttgcagcgtgctcctgggcctggaagaggtggccgcgcttcccgatgttgtaacatcgccggggt

SEQ ID NO: 102378 - DNA, 369 bp, Glycine max
cgacagacttaatgattgcaagtggtggagtgtaaagtgagtatcaatgaaacttaaactcgagttaagggatgtttacattgaggagattttgatatacataaaggtagaatggaagtaccaaatgtctggataaattaatgaaatattatttttgtttaaccaaatgtctcaagtttaagtttttggtatacaattacgttaaatattcgaaacaaaataattttatcatttataataattttatttaactcaaacaaaattatttttagtgaaggaaactttatgaccatgaggctagcacaagaacctatgccaaataactcttgcacaaaatcactatcaaattcattttttcttttatttttt

SEQ ID NO: 102379 - DNA, 403 bp, Glycine max
  unsure (1)..(403): unsure at all n locations
accttggtgctcatttctgctccttatcgtggaaggatatcattttctgngtcgtgaagtgcgtggctactagtgggacttcgaaaatccaggtttgggtggacttctttccctcttgattttcgcgggtatgggggtttgggagatatgaggggtagctttgttagttttctgctgcgcgaagattatttgtgaagacatttgttgaaagcttgtcgaaattgccatgtttgggtgagttagatatacccattctgttttagggttttgcgatgatagttgtgatgtttatatgctgaaattgctgatggaaatctgttagagacgaagggtagaacttacccaaggttanaaagtgagaatgtgatgttttgagtgataaaaaaagagtgagactttgaga

SEQ ID NO: 102380 - DNA, 442 bp, Glycine max
  unsure (1)..(442): unsure at all n locations
cgcatgcatgcaagcttgaataaaatatctggccaggcgtatataaaatgcgcttttttactaatagtcgccagattcaatattctatattttaatccaagtgaacacttccataaggtttggttcagtttctatcaagaacatacatcaaataaaggatgctcagtttttagataaaaagtttatgagctccaacatacctgcaaaagacaactacattcgactcgtttttttgatacaactgccacaggtctttattacattcctgtagaacagcatttcaacaacaatgacattcagatggttgaaaatatcaaaaccacactgcttggagttatcatatttataatatgaaatttatgaatgtagcgcttggcatatggcagaatccagtntaccaatgactttttaaactacaatcagcagaccatattattttgtt

SEQ ID NO: 102381 - DNA, 269 bp, Glycine max
  unsure (1)..(269): unsure at all n locations
tttttttagttnattttttttccaaganggtacctgaaggggtgtatgggggttatgaaacctcggggacccttagcggggtgctattagtcaaaacttagcttgaactatctctgatcgactttggcaaagatagttattgagaacctgtaatgatcctaaacaggcgagctcttggcggtaacatataaaaggatacgagacctcatatcactgaggcttgtggtggctggcccgctgtgaactttgattgaatgagggtatggctt

SEQ ID NO: 102382 - DNA, 252 bp, Glycine max
gaaatcaggtttgcgttggtgatattataaataccatttccttggtcttttcttattagtgacttttgattcgatcttatcttttagaaagtgctttttgagagtcatctatgtagacaaaggatcaagctgaatgtcttgatgatgccaaagggaaagcttgccaaagggttacatgttttttaaagctttattcaagacaaagatattcaagatggatgatcaagaaagtgtttagagtcttagaaagag

SEQ ID NO: 102383 - DNA, 109 bp, Glycine max
ctcctatcaccatctcttattttcgtacaactcaggctgaaaatactatagaaggacctcatttgaagctctaagatccaaccctcataaaatcttgtcaagcgagctt

SEQ ID NO: 102384 - DNA, 335 bp, Glycine max
  unsure (1)..(335): unsure at all n locations
gaccctaagtcacctgaggcatgcagctngtataaaacatttatcatgcttttgtttttgcaccgatgccaaacatttatgttattcgatttcaacacaatgcctatgtaaaggaaggagaaggattcccacaaatttttttaatttggtcactccaacctcgtgttgcatttagttctcacctaaaatgaggagatatttactaacacaaccaacaacttgttgaaccaacaaattgttggatttttacaattgccaacaccctagatggactttcttgccaaccttttactataattttcttgcttgccacatgttgcactttcaacatctct

SEQ ID NO: 102385 - DNA, 260 bp, Glycine max
gacaatgcggacgagattgactggactagtgagcctactgtagtgccactatctaaggtcttgatctatctcttttgatgcagatggaggaaccttggatttgaggacaaaatccttttacaaagagggacggatgaggaccactactaaggccaggaccctgatacacttgaagggcctatgacctaaagcggacttataccggcccatcacattgatgatgacataacaaatgggcagggaccttgtgatcactgaga

SEQ ID NO: 102386 - DNA, 392 bp, Glycine max
  unsure (1)..(392): unsure at all n locations
agctttaggggtggtttttctatataacagtctcttgttctagngnagctctttctctcttctctcttctcaatcccctattttcattttttagttttaggcgtttctatgagacagttcttcattttgcaattctagtagcaataaaattccgttcttcaatttataagatcgttctctattgattaatggaaggctaagtctccaacgttgttttctcttgaggatcaagcacaattctctttgaggttctattattactgttaaattctgttcagtttttcctcttcactaattactctgaatttgtgggctttaattcatgcatgcctagtgcttgattaattggctctgcgcttaatttacgttcatgcttaatgatcgttatgagt

SEQ ID NO: 102387 - DNA, 298 bp, Glycine max
gttccacacgctctaccaaatgaattgaagacaaggtcacctaattaagatttgtgtcaatccccaagaacaactattttagcttctttctgtctgaattgccatgaagaataaaactctgaggaggagaaaaattctctttaaataccttaagagaaaacactgaaagaccttgctcttatggtttaactaaaaattgtttttgatacactcaatagtgttgatatattcttatccgaccctacctattgcgacataagcttatgttatgttatttgaaaaattgctggtgaatatt

SEQ ID NO: 102388 - DNA, 441 bp, Glycine max
  unsure (1)..(441): unsure at all n locations
taatcacctgcngcatgcaagcttagatagaaacattgaacacatgaaaataacctcaaatagattattaaaatatttacatcaagtactcagtagaaattcccaacaaaggattttagccctccattacaagggagcagctttcacaaataggagaagggttttagagaaaataccagattacaaagcagtggagatgtctcctccacctctaagaacctagaaaataactctaaaacctataatctacctaaaagttaggacctttgcttccttgcttagctttttcctctgttctctgcacacaattcacagtcaattcagacatctttcacgtcatcacgctttctctttttttctacacaaatcangcttaaaaagggctttctgacctcgaaggcgtgcttagtgccattctcgcgcttagcgcgagtaagtgat

SEQ ID NO: 102389 - DNA, 441 bp, Glycine max
agcttcttcatcttcaccataaccacaacatttacctcccccacaatggttatgcctcctccaatctttgaagaaccacaaattgatgcaatcctaccccgcaagggcattggatagaaaactccaagtagatcgggccaaagatgcaagagaaggccctagggatcttatgagccttatggtaaatttcgggcccatgggctaagtaccagcccacttatctttgtacatattagaataaggggtcattaattttgggttttgtatttaaagctccataatgtaagtagggtaccctaaaaatatagggattttcagcccttgtattttaaggcacctagactagtttttgtataggggtagttttgtatttcacatacactaaatgaatatttgatgtgtgtggttggaaataaaattaattgaattgtattagcccaa

SEQ ID NO: 102390 - DNA, 435 bp, Glycine max
  unsure (1)..(435): unsure at all n locations
agctncagccttaacttctgtaagctcatattgtattgagatagatctttcaacattgggataagcctggcgttgagactgagcatccctggaaacaagagattcacatatttgtcagtataaagatgaaggcagaatgatcattttcaggattaataggctgggcacaatgctcaatctttatacgctttatagatgggtgcaagtcctctgaagtttcaacaactaagggaggcttcgagatcaatctaagcgatgcacctacaatattgtaaggtttagaggatccattcactgcaggtggcaagctagattcaacttctggccgaatctgaggcttgagttgaaatgcacgtcgatactttctcacaaatacacaaacagggcaacatggattcttgcagttattaaatgatgaagcacaccctgtatgat

SEQ ID NO: 102391 - DNA, 435 bp, Glycine max
  unsure (1)..(435): unsure at all n locations
agctctcgagtgaaacaatgtgactctncatatttaaattngaatttcaacgttcaaggacactggtaatcgattaccaaaacatngtaatcgattatagcctttcgaaaatatttggaacgttgtaaattcagtttgaaaacattttcaaacttattttgctactggtaatcgattacaacaatatggtaatcgattaccagagagtaaaaactctttggttaaggttctgtgaaaatctcatgtgctattcaaagttttgaaaaaactttttaatacttatcttgattgagtcttttcttcattcttgaatcttgatcttgatncttgagatcttgaatctttaatcttgattcttgtttaaagggcttcttcttgattcttgaactcttgacttgttcttgattctctcgagatggatgttctttgattcac

SEQ ID NO: 102392 - DNA, 406 bp, Glycine max
  unsure (1)..(406): unsure at all n locations
actcctacattttatctttatcatgcctngtatgttgggctcgtacttcgtcaaccggaaggcccgaacgtccatattaccattcttattgtcacatggggcgctgcgccctcaaatgcgcatgttagaagagaataattttcgggctttcgtgttcgtaaaatgcactcatatcatgcaccacataagcttctttttcatacatcataatggacatatcctgcatttgtccgttatcatattccagcctcacatcttgtcagagtcatggcataatcatgcatatgcgtccaacatacttattgatctgcaaaattgcataccatttgtgttcattgttgctcatacttgagtttttctttacaaaaacaaataaagggaagcgtgaaacttctcaccacttctt

SEQ ID NO: 102393 - DNA, 409 bp, Glycine max
  unsure (1)..(409): unsure at all n locations
agcttctgcatgtatatactgttctagagattttattgttcatcgtccanagagcgagagagaatttgttgttgtgaagattcgcacacaccagagctggaagaggaagccatcctgagagcttgagatgagtttgtgagtgaatgtgatgtcctagaagtggaagaaaccatcccactacttgtatgtcgggaaactttcattctcttctctttgttgcgagggaagcttcctagttatggaaagcttaatcctctgttggatcttcctagtaggtactagatgtaaatttctttttatctatttaatgatgatttgtgtgtgcattgtgctatcagaacattattctaccattgcttttgccatgatcatgtagattgcatgtgtttttaggatcattcaacagtgg

SEQ ID NO: 102394 - DNA, 258 bp, Glycine max
taatatatgcgtaacatactctaatccaaccactcatgttgcggggaagagattaacagaatatggctgtggttattcccatcttatgttatacttcctgacaagcacatgcctaaaatgatcccaatatcaaatatcagaatccaccacagttttttctacctgagatttctaataaatatgaaatatttaccggagattgattttgcactattgtgaattgtgaggaatgtgagttgaacaataaacattttacat

SEQ ID NO: 102395 - DNA, 426 bp, Glycine max
  unsure (1)..(426): unsure at all n locations
tagacccggatccttnagtcacctgcagctgcaagcttaaaaaatgtgctttacatgtaaatatgncaaattcgggtcatatacttttaactaaggttaggcttatgcctatcaaaacctatcatgacctagcctatttccacctctatcaattccatgttagcatacttatcagaccgtcatgtcatttaccatgtcacaatgtcaatatcacatcatcatatcatccattactaccaaaaatttgacagttggctaatagttagggatgggcatacggactggtctgacccatttaaggctcgtgaagcccatgttttaaacagatgggataaaccaaatgcacacaatatatggagtttgtttcaaggtctgtatccagcccgcaaaagcccacagttccaacaaataatttcaatttttgat

SEQ ID NO: 102396 - DNA, 324 bp, Glycine max
ttcctacatctatactcgccactcctttcacagccaattaacacaaacgtagtccttcctctactacctatgtttgtatccgaccttaaaatcaccgtcacaaatctggtttcatgagcaacgaatcgagcccaccgcataacatcctcttggcactcaaacacctacaaagcaatccacataatttaagttgtttactagtattcattctattaaatctgtgacaaacattaacattataacctgagaagtattgaacgcattagaacaatcaacatgtggttcattcgcaccacatgctttttcattttcataaatcatatc

SEQ ID NO: 102397 - DNA, 440 bp, Glycine max
  unsure (1)..(440): unsure at all n locations
agcttcatgatgatgaaccaagccaatttgatgatgctcaaagccttagtgattgattcaagattgattcaagacttcaagatcaagcatcaagaatccaatccaagattcaagattcaagagaagaaatcaagaagcaacaagtcaagacttcatataggataagtattaaaagaatttttcaaaaaccaaataacacatttttgttttacaaaagaattttttcaaattttctaagttaacagagtgattactctctggtaatcgattaccagttagcagtaatcgattaccagtgaccaaattggttttcaaaatattttcaaatgatttgtaatgttccaaaatgattttcaaatagtgtnatcaattacactatattagtaatcgattacaagtgaatctgaatgttggaattcaaatccaattgtgaagagtca

SEQ ID NO: 102398 - DNA, 437 bp, Glycine max
agcttatgcatgtgaaatgtaattatgaaatatatatgcccgaagaaacaccatttcctagttaaccatgcattaggtaccatgttcaattattttgttttgttgttgtgtgtgttttttttttttataaatgggtttatgatcccaacatggttggctcatggtgcctaacacatgcaactaaaaatgtagtgtgaagtttcatgcttccttttttgtttttgttttgtaaaggaaaatgcaaggcttatgcttgagcaaacatgaaaacaaaaggtatgcattttgtataacaaaaaatatgttgaacgcatatgcatgatgatgcaatgactcatgcaaaatgtgatgctggaatatgataatggacaaatgcaggaacgaatatttcattatgatgttatgaaaagatgcttatgccatgcatgatatgaatg

SEQ ID NO: 102399 - DNA, 292 bp, Glycine max
  unsure (1)..(292): unsure at all n locations
gccgctcaactccttccagcgatcaggggttttttcttcttcatggcttttttcctagnggatgtgcgcctctctcacctattcttctttggccaccgctgcatctccatggtgaaaaaccaccattaaaggatctcatcgaagcttaaagatccaccctacataaaagccccacaagctatcttccatcacatatggaactaccaaaaaaatcattttttaaaaaaacataaagtttttgtgatagtcatttgatgaaagatgaaacacctatttgttataattaaaaacc

SEQ ID NO: 102400 - DNA, 383 bp, Glycine max
cacaacaagttgttgcacatgcacaaagcacgcataaacccaccgtccccggaaggccacctccagctgagcacacgtactccgcacgggcccaaatacaagatattttcaacacaaggggccccatcatatcctgccaagcttcatcaacgttcatgcaaaacaacattcacacagcatacgctatcacagacaagctaaacagagcaaaggcagaaaactttgtcaaaacacccaccaaaaatcacagctattcccactcagagacccctgtaacaattttcttcgatccaaatcgctgaccgttggatcgactgcaataaattaccgtaagtctatagtgcataagcctacattatgaccgtcgcgatctaataacaaaa

SEQ ID NO: 102401 - DNA, 307 bp, Glycine max
  unsure (1)..(307): unsure at all n locations
tgaccggactcaagnactgagctgcagctcttacattttttaaataacttgacgattgagagatcaagtggtgggatgtttccctcacctctataacctcaccatcactcacgaacttatctcatggcttatgatggcttcctttcttgttcattgtttgtcagcttcttacatcaacagctttcaaaactctctggaactaggacccttttctctctagaaaactcttaacatgccaaagctttggaaaaagcccccactccccttccacaaacagaatttaaggttacatgggcggctttgtgtg

SEQ ID NO: 102402 - DNA, 393 bp, Glycine max
ggatccttaagtcacctgcggcatgcaagcttctatccaatcattccggggttattcttttcttcctaggcctattccctagtggatggtgcctcccctctcttcttctcctttgccttccgctgcaatctcatggcgttaaatcacctatgaatgacctgattaaagctcaaagatccaacctctataaaagcctcacaagcaagctttcatcaagctgggctcactaaaggtcactatgccccaaacttacaaatatgatttttgggctccaataaagtctggtggcaccatttctaaaattcagcccactaacaaaaataaaaatgtcaactttcttcatttcatagtcattctgccgaatttagtatccaacccaactgcttataattt

SEQ ID NO: 102403 - DNA, 415 bp, Glycine max
  unsure (1)..(415): unsure at all n locations
agcttaaggcccgtttttatattcaaatcatttcttgttttgaaagctgttcttttatncaagccatgcaaaaacatctgaattcatttggtttttgggaaagtccttcattgttttcaaaaattcttttgctgtgttctgataaaaaaataagtttaaaaaaaaaatatactagttgtttgattctttcaaagtatgttatgttcaagaaaaaattttctttttaactcccagaaagagttataatctataactatactaacaaaatatcaaagcacacacaaattagtcaaaataaactcgcgtaagtaaataaggtaataaagtactgaanntttatacaaagcgataaataaacataaagataagttcacgagtttttgagattcatgctgagcactcagtctcccccatg

SEQ ID NO: 102404 - DNA, 244 bp, Glycine max
agcttcaatatttaatttcgagcgtctcgatatattacgagactcaatcacacatcggagaaaaacgttattgtccgctgaattagctcacagcttcaacattcaatttcgagcatctctatttgttacgggactcaatctcacattccacaaaaaaggtaattgtctttgaataatctcaaaagtccaacattcaattttgagcgtctcgatttgtaccggacttaatctacattccataaaa

SEQ ID NO: 102405 - DNA, 282 bp, Glycine max
acccactcactaacttccactaatatatacaatcactatttaaaacgaacggatgaggccttattaagcccaccttatctacctacttaactaattacacaataaaaatcccaatatttcaacccaaatttttcaattgtataggttcttgactttccatacccacatttacactaaaaagtcaaaatttgccccatcttattttctactataattaaaatattttttttttctttccaaagactattaacatactccatttgtatttttagaatagtccaa

SEQ ID NO: 102406 - DNA, 392 bp, Glycine max
  unsure (1)..(392): unsure at all n locations
agcttcaaagaatggtgacggctcatcccaatttgtctttagaggtttccaattntgagaatgctgagtccccaacccaccccttctgcacacaagcagggagagattctttagatagaaggggttcagatgtgagttcacaggattgtcttttgacaatagagttggcttctgataaggaaaaagtaaggccattcatgaattgcaatgagagtgatgccctctctgtatcgaattttaataatattggatatggaaatgagcaaagcccctatgttggtggcagttgcagtttcctacttactgatttgtctgcagcataattatgccatagtccttttggaagtaaagcctctcataagactaagcatttgtatgggcatattagtggg

SEQ ID NO: 102407 - DNA, 457 bp, Glycine max
  unsure (1)..(457): unsure at all n locations
agagccacctgcggcatgcaagcttaaataggctctgaatccgngacattgcgcttagcgcgagttattggattngagcttagtgccagtcatgcgctgagcctggctaaagacaatcgtcctgcttagcgcgcgaccttgatatttaagctctgctagattcctcttccacgctaagtgcactgaagctgcgcttagcggtggatgcacgctgagcctaaatggtgagttgagcgcaactaccacttttagcactttaagacttagcttcatttaacctgaaattgagcagatttcatcattaaatccaatggaaagtattctaaagacaactataacaagaaaacaagatttatttacaaacccctacaaaataactataaattggggaaactatattagttttgggaaatggtttctattcaaaagtatattgataagacgactaaaaactccc

SEQ ID NO: 102408 - DNA, 418 bp, Glycine max
  unsure (1)..(418): unsure at all n locations
agcttcaagtntgtggtcatgtaacactaaattatatgattcatttttcctatttaaaagcaacccagtgtttccaaaagatgctcttttatcaatntatgcacacattctagcccatttaggcattctgaaaattttttacgacattcacccttcatgtgtacactacattttttcttttttttcaaaataccttttgtgtactgatcagtgaaaccttttttcaaagaaaaactggcagtcacttcttttcaaaagcgtcttggctttttagtcaaaatataactatatatcttttgcatatcttatttaacgaatcctttgcaaaatttgactacgttcccggtctacgcttgtttatattatatcctatgattatgacgaaactatgcatttttaactattacttataaaatat

SEQ ID NO: 102409 - DNA, 332 bp, Glycine max
  unsure (1)..(332): unsure at all n locations
catgcaagccttgaggaaattcaagcgacaaccacttatagattctgangtctcttatgtgtccacgagcatgtctagacgctcgttactcctaacacatgctattgaaacaatcaaacgacgattacctgttactcggatgtccgaaggagtcccataatatatctagacgctcgttattgtaaaaccgaagctctgacaataatccaacgagtataacctttcgactcgcatgccccgattgtactccctgtcatttctctagtcgcttaaacacctgaacagaagcagtttgataaagcacacgacgatcaacttatacacagatggca

SEQ ID NO: 102410 - DNA, 360 bp, Glycine max
  unsure (1)..(360): unsure at all n locations
agcttggtcattcagaagtcacctacaagcctanttatgtccaatgccccgaatggccctctttgttattattaggataaacgtggacttttgaaagcgtaaagccaacacataaatttgtcactactttcaagaaaccaagagatcattaatggtccgatgccataaagttttctttcttttcaacaagaatcaaaagatcgtttaatggtccaccaccttaaatgaccctttgttcaattaaaatatatcttgctaaaaagataaatacaactgaacccacgtttagtttttaaagaactacggaggtctgaatttcttatcacaattgaggaatacgttggaacaagggaaacaccc

SEQ ID NO: 102411 - DNA, 400 bp, Glycine max
  unsure (1)..(400): unsure at all n locations
agctnggngagacgtttatgtaagtgncgcttctctttctattttaaactcgtcaaagttagaatgataaagtttcacatacattttccagaggatccttccgtctaaaatattatcgatatatcggctccaggcttcctctgattgaaatctcctattatcattctgatcctgtggactagaatcactacttctatgtttcttagaagccatctacatataaaggaaccaaacaattaatcaggacacagctattcaaatttttaaaactgaaaaagacactggccgcttatcaagacatggtccgcttagctgggctttgtaaaaaaaaaaaactattgcttatggacagtgatcctcttatcggaagtgtagaaattttagatctgtgaattggcta

SEQ ID NO: 102412 - DNA, 361 bp, Glycine max
  unsure (1)..(361): unsure at all n locations
agcttccattntcaattatcangcgtctagatatattatttgtacccaatcggacatccgagtgaaatgttattgtcgtttgaatatgctcaaagcatcttgtttcaatttccagcgtctctaaatattacgggactcgatccgacatccgagataaaagatattgtcggtgataatttgccccaaagcttttattttcaatattcgagcgtctttatatattatagcactccttccgacatctaagataaaagctattgtcgcttgagtttgctatgagcttctgttccaatacgagcgtctttaattctactgggcattaacatacatctgattaaaagttgttggtttcgaattttct

SEQ ID NO: 102413 - DNA, 325 bp, Glycine max
  unsure (1)..(325): unsure at all n locations
ngctngatttgtaattagaacctattttttttttacttgagtcactgnctctctggtattggctgttcaactctaacatttgtgacacttcaaattccctcaactacatgttgccacaaagttgatcaacacaatgaacataatcagtttttgcactattttttctcccatcaacactagaataccccttgaatgctttaacctctgccggaagaatggaaatcaaacgcgatatcaactgaagcaccttcaaacttttgagggttttctgcctcaatcctgagtgtgtgttgttcagagccttctaatgatgtcaaatagctta

SEQ ID NO: 102414 - DNA, 288 bp, Glycine max
aaatcttcatgaattataggaggtacacttacacttaccccatattcaaaagagtttctgcgacctctctcttttaaaattttcgcattgcatttgggcgttcatcttacatctgtcactgaatcttcacgaagcagtgtttaatccaagtgagttcccaacttcattttatgctttttcttttggtaatactttacgaatgaatacattatggtagcaatttgaggtcttttagtttagaatgtgagttgaagaaattaaaaattatgactctggttcgagttcaat

SEQ ID NO: 102415 - DNA, 392 bp, Glycine max
  unsure (1)..(392): unsure at all n locations
agctntgacttgagtcatcaagagattattaatatgtgaccatggtatgagttttaataaacatccttcaacatctttataatcattaatcatctttgaatcatctatctttcaatctttntcaacatcatctctcaaacatctttcaatcaatctttcaacactttctatagtattttctgattcatttctcttcatctttctaaaagttttttatcaacactttctcttccaagaaaagttctttgttcaaaaacttgtgttattcatctttttcattctcttctccctttgccaaatgaacgaaggactaaccgcctgaattcttttgtgtctctcttctcccttacaaaagattcaaaggactaaccgcctgagaattcntttgattc

SEQ ID NO: 102416 - DNA, 359 bp, Glycine max
agcttcaacatcatggccatccaacaaattttttaaagacacatttctttataagaatgtataaataaaaataattacttttacgtccattaaaaaaattagttgaaattatttaattttgttaatattaagtaaaaaaataagattatttctaaaatattctttattggaactttaatatcatagtacaatttttttattaattattaaagaaaatattttataatttatttatttttaaaaattatacgagccgattttgtattgttgaattagaaacataattcactatgatattaaagtttatggttaattaagtttttagtcctcaaaatatggacttttgaaattttggtccc

SEQ ID NO: 102417 - DNA, 243 bp, Glycine max
  unsure (1)..(243): unsure at all n locations
ccacacaggaaaaccccangcaaatnggaacagggcaaaaaacacaagantaggggaagccaaaaaaaaaaggccataaagacccactacaagagaaagaatctcaatagatggttgcctaacaaatagaagcataacactataaaaacctagagaaaaatgggctgaagaggatataatacgagaacaagacagtctaaaagccaaaaacataataacatctgccctgagaatggaagaata

SEQ ID NO: 102418 - DNA, 370 bp, Glycine max
  unsure (1)..(370): unsure at all n locations
accttaagtcacctgcggcatgcaagcttctaagctcatcatntacttntcaatttttagaccaacgncnnngggctaatgtaggatcttgctcaagacctacatgtttaagtaaatatctaatgcgttccccgacaggagaatgtatttttgggggagaaactatgcatctttgggatttgcgtgctccttggttagaacctttaaggggtccgaatgggtttatacttgagttaactgaaaaaagatatacatccttggcaagaacgctcgtctgcggaatatatgactcatgctcctttagttcctaaattccgtgggggcgtatctaccagagattaatgcatgcaattatgtttctcctataagt

SEQ ID NO: 102419 - DNA, 217 bp, Glycine max
tttctttccaagacgcagcatgcacacaaatctcactttcccgaagcgagcaaacagccctgttaagtacggaaattttaacatgtgaatattttcagctacattataaaccattgtcctacatgtgttaccatattcatcattttatgcacctgcaagaaattgacggttggaatgacaattatacctatgagttgccagtacttatcttgaaccc

SEQ ID NO: 102420 - DNA, 422 bp, Glycine max
  unsure (1)..(422): unsure at all n locations
agcttggtttttgatcctacagatatctcttctatccagnnggngtgnataatagggagtgaagctcccacacagaagttcaagatcatgcaatcctccaaggaagatngtgatcttaacaacctttcccaatatagaaacttgaaagaaagaaagaaatgaaaacaatcttgttcttttggatcaaagcttttattcatagcatttcatgggcatcttcactaggcaaacattaaaaactattaaacggatggccagctcaaaaaattatggcagcaaaagaatgtaaggcatctatagatgaacacaagttgtctggtcaagtataacctaatgaactccaatactatgactaaaacttccccaatatcctaccacaattaatgcccaaaaggtggtagacaattactgaacctataatg

SEQ ID NO: 102421 - DNA, 251 bp, Glycine max
ggaaaccttatgtcaaactggttatgcatgcacctatgtggacactcaagagtgcaatatttatggtcatgtgatactagggctcaagattcatttcctctattttagtcaacccaactgttccaaatatgatcttttatctatatgtgcattcatctgagtccctattgggcgtttgggaaaatcttcacagcattcacccttctggagattacacattttttcaaaactagtgatgaaagagaattttt

SEQ ID NO: 102422 - DNA, 425 bp, Glycine max
  unsure (1)..(425): unsure at all n locations
agcttactctagtccaaaaaacattaattgttttatgtggatgctacctattatttacatagctagttcacatgcataagggataccatatgtatatcttatgatgcatccacaatgaccattgttaacaccatcaaactaaactcaatctaattcatattaaatatgatccaagcataccttgaaatgaattcgtgcaatctcttatacaatattacattataactatgatccacaaaatgaatactcttctcaaatgaggctttaatttcaatatgttgcaatgtgatcaagttattcatggcattccaacatttacacaagtcctccatgctggtttaaatcaccctctntaagctctaatgcgtagactcaaccctgttaataaaaaaagtccacattagtttcaatgtattacactttgt

SEQ ID NO: 102423 - DNA, 423 bp, Glycine max
  unsure (1)..(423): unsure at all n locations
agctnttgtattcaattttgagcgtctcgatttattaaatgactcattcggatatccgagtcaaaagctattgtcgtttgaatttgctcagagcttctgtttgaaattcgagtgtctcgatttattacgggactctatcgatcatccgagttaaaagttattgtcttttgaatttgcttagagttactgttttcaatttcgtgcatcttgatatactgcaggactcactcaaactttccagtaaaaagttattgtcatttgaaatttgtgagagcttctatattcaatttcgagcgtcttgaattattaaatgactcaatcggacatctgagtcaaaagatacattcgtttgatttcctaagagctttgtttcaattttagcgtctagataattactggcacaatagacactgagtaaaaata

SEQ ID NO: 102424 - DNA, 396 bp, Glycine max
gcatgcaagctttgatttccttgttccggaaacctttcttttctcatgtgctcccatttttaatctccgggttcgaagacaaccttcttactccctttgttggcttgtttagcatagcttttatatttcctctcaatatgatctttgactctcttatgaagcttcttcacatagtccgcctttgcttgaccttctttatgcttaaaaacagaaacattatgcacaagatcaagaggagttagtggattaaaaccatatacaacttcaaaaggagaacaattagtggtgccatgaacagctctattgtaagcaaattcaacatggggtaaacaaacttcccaaagttttaagttattcctccaaactgtcctaagcaaaagttccaaagtcctatta

SEQ ID NO: 102425 - DNA, 412 bp, Glycine max
  unsure (1)..(412): unsure at all n locations
acctgcngcatgcaagcttcttaggatctttctgtgtngatcttatgtattgtatggcttttcctctgatttgatcattacttgggtagacccatcatgggccacttgaagtgtatcccaacagtagtattagacacttctctcagaacttctccttctatgttgattggtatgctcaaccctttagacgttgtgttttgataccaactaaagtggattggttggtcatcaactaatcactaatagcggggttgaagtggaccaattttgataccctcatgttctaattctcgactacgaatactcttagaacaatgtgtcattgtacaatgatacttacaatctagtctcacatgatctgccattgtatgaatcatgtattttaacggcgttcttccactctcttattaat

SEQ ID NO: 102426 - DNA, 388 bp, Glycine max
  unsure (1)..(388): unsure at all n locations
taagcaccgcggctgcagctaaagatgattcgagcgtncggtattttgacttttcnacatccaggaaatgtttgcgatgaatgcttaagctaaacatcaacttgacgctcgatatattcgggactcatcagacatccgagtaaaagtattgccgttgaattggctcaaggttaaaatacatttcagcatctcgttttttctggactcaatagacatccgagaaaaattattgcgtttaattggctcaaaggtcaacattcatttttgagcgtctcgattatatgggactcaatcgacatccgagaaaagttttgtcgttaaattggccaaggttaacattcaattcaccgttcgtttattcgggactcatcacatcgataaaaggttt

SEQ ID NO: 102427 - DNA, 289 bp, Glycine max
ggaatataaagtcactactctggttatatgaactgtacgtggaggaaaatattaacgctgaccgaaatcattttctgtcataggcaacttcaatcgtcagatgtgggcacatatgacactcctgtatatgttcgtgacaacattccaacttattaaattgcggcaggcctacaacagaaatggaggcttgtctttgagagactgatttctaaatgggttcacagaataaactcttgaaacccttatcttgatacaaagctacgagaaaattcaacctttccggtaaatt

SEQ ID NO: 102428 - DNA, 391 bp, Glycine max
  unsure (1)..(391): unsure at all n locations
agctatgtctatctttatcatgatcacaaatgtggatatttcatcngatcccatggagngcaccatagagttcttgaagctgccctggaatgtcctcctggcagggatgcatttggatatgtttgatgttatgatgatagaatatcactttatggttctgacagaatgcagactacagacatgtattttcatcctcaagcagatttgtgatcacaagatgccttgatgtttggagatacctattcgtttattgataccagagaatactatggtccttgtgcaaatccaatccacattggattaacctcaagtgtaagagggaatatctagtggagtagctaacatgcaggtcatgatcaaccacttcttcttgacttttcccttgctccgg

SEQ ID NO: 102429 - DNA, 391 bp, Glycine max
  unsure (1)..(391): unsure at all n locations
ggatcctcaagtcacctgcggcatcaagcttaatagctttctaacatgcttaattgtttactattaaatanttaacttcaaatgaatttcaatgtgtggaatctttcctcaactcaaggataagcacgaatatttatgaccataagtcttataagtaatagcactgtatgataagttattgccttgtgatttagacgtcattaaaatatgatttttcaagaattctatcttctctatggaataataatacatttcaacttatctttttttttttgggcggcatggcgaaaatcaacattcagcttgatttaaataaacaaaggctgatattggaatttttattccttggacccattaatgaattatttctcttattaaggtaggaaaaaaa

SEQ ID NO: 102430 - DNA, 360 bp, Glycine max
agcttgcctgcccgattctttataatgatttttcttttttgttggggaacagttacgaacccataatgggtctaagcaaagacaccgccacatatctatcctgataaatgccaaaggaaatcctgggaagtattggttaggctataatcccactcacgcggatatgaatagtaacctcctctgaaggaagagcggtggtcaaagctctctgtggagacaataaagtggaggaagcccgccctgccacataagcagaagctttataagcacgggtctcggagacgaaagccaagtggtctcctatatacgaagatgatgtccccatacattaaatttgggtccaccatgccctcctgattt

SEQ ID NO: 102431 - DNA, 400 bp, Glycine max
agcttcttttgataaacttccttgagaagcttgatcttagctacacacacccctctcataactaagctcacctactcgtgaaacttccttaagaagatgcctaaagaagctagagcttagctacacatacctctctaatagctaagctcacctccttgagatgagaagctaggagcttaacttcacaccccctataatagctaagctcacccctatgactaagaacatggaaataaaaaataaagtcctttttactaagacaactcataatgcccccgaatacaaggcttaaaccccattcttctataatggccaaaatacaggccctgacgaaggaatactctctctaattttacaaaaaaagcgggctcatacttatcccatgggcgtcgaaactacc

SEQ ID NO: 102432 - DNA, 356 bp, Glycine max
  unsure (1)..(356): unsure at all n locations
agcttgagatgaggaagtgttgaagggngattcttcctgcttttattgttgactcacagagnggtacctggagatatgtcgcgggggtcaggagaccttgtggacgtcaggtggggtgctattgcccaaaaccaagcttgaccaatcccgacccaacccgggcatagtctgtcagtgagaacctgtgatgtacctaagcaggcgagctcctggcagtcaacagataaaaggaacaaagaccacaaagcaaggaggcttgtggtggctggccagctgtgaaacttgattgatatgtgaaatatggtctctggtaatcgattaccaagggtgggtaatcgatttcaaagcttaaaaat

SEQ ID NO: 102433 - DNA, 404 bp, Glycine max
agcttatcctgtaactgaccaggctttaggtgtaatcgattacagctctttgttattgattacagcctgctatattatggtaatcaattacagggagtggtagtcgattaccacaccttaaaacatagctttttctataaaaactaaccattgtttactcataaaacctacacactcactgtaactattatcaacaacaatcaaagataaaaaaaaacatcataaacttcttaactacatttcatcaagcacaattaaaagtacaaatacaatcatcaaaacacaaacaaagacaatctatgactatcatgaagccacaatcaataataaccatcagaaacaaactctatcataaagaaagaaaataacaatccattcagttaactatctatctaaagcattga

SEQ ID NO: 102434 - DNA, 433 bp, Glycine max
atcttgaagcaatgcttacccttagaagcattctctgttgattcttttttgtcatcatcaaaatcatgtatcatacattcacattctttaggtaccaattcatcattacagggtgaattggtttacaaaacaaaacaaaattttataaccatagttgcaaaaactttttgttttgtacagatcgtatcacaaaaatttcataaactggtctcaatcaatactgaatcaatcctccctttacaaaatatccttgttaaagttctttctttcaaaaggatgttttcttgaacctttataaaactgatcaagactttaatgagaaaaaagattagatccagagaagaagctccccacatttttatattgggtcactttttatcactaaagaaactatatccattatttaattcaaaactatattaaattttactat

SEQ ID NO: 102435 - DNA, 360 bp, Glycine max
  unsure (1)..(360): unsure at all n locations
agctngtaggattatggcgcacccatcacaatagttactangtggttgacgggcgatggngcacaactagtttattcacatacacatatgcgcgcataaacccaccatcccctgttgcccacctccaactgagctcacgtactcccacgtagcccataccctcgtttctcttaacaccgagtccccatcattcctcccaagcttccacaatatccaagcaaaacaacatttacacagcacacgctatcacagccaagcaaaacatagcataggcagaaaactctgccaaaacaccaaccaaaaatcacagctttttccactcatagaccccatgaacaattccttctattccattttgaa

SEQ ID NO: 102436 - DNA, 417 bp, Glycine max
  unsure (1)..(417): unsure at all n locations
cctgctgcatgcaagctcggagaggatgctcttacgggcgagtttatttaggganacatattttgtgggggagcncgaaattgcaggaagaaaaacggagagaactttaactttcgtgttgagtctcacaagactctcatctattacagtatcaataggtgatgtacatgcctttagttatttaggaagaaactttactgaaaagcttgtttgtgaaaaattcctcgagaaccttctatgagaaaactttctttacaagataaagcttacctgcgcacacccatctaaaaactaaactgacctccttgtgaagcttccttgagaagctagagcttacctacacacacccctccagtaactaagctcacctactatgaaagagaagctagagcttagctaccttcccctatatatctg

SEQ ID NO: 102437 - DNA, 394 bp, Glycine max
caccgctgctgcagctgatggtaagctcatatgtctgttctctgcacaaagtagccgggctatatatacatcttgccaaacaaagccaggttaacgataactcgcctgtgcctttttcttccatgctatatgtagcaaagacattgatccactcatgtttgatgaattggaaaatgaagccgcaataatactgtgccagtaggagatgtattttcccctgctttctttgacatcatgactcacttgattgtgcatctggtcagagaaatcaaatgttgtggtcctgtttatctacggtggatgtacccggttgagcgatacctgaagatcttaaaagggtatactaataatctatatcgtccacatacatctattggtgagaggtacattgcat

SEQ ID NO: 102438 - DNA, 354 bp, Glycine max
  unsure (1)..(354): unsure at all n locations
agctntacatcatattntagtaatgacccatttacctagaattaaaataacttaatgccattaacctatggaaattaaaaaaacttaaaggctgagtgtaactgaaattgtggcaaccaaaagtcacccccaacagccaacaagtcagccaccatttggtctcccaaaaagctgatgcctatgttgccaattgggcccttattacaacttgaactaaacctaactaaagcccttttaattgattaaccaaaaacatatttttggtcatccaactttacaaggattgggccattatttagacaaactaaacactctaaaaattgagacaagtggngtcatttagtcctcctccat

SEQ ID NO: 102439 - DNA, 433 bp, Glycine max
  unsure (1)..(433): unsure at all n locations
agctntcaactaaaagaagtatctccaaggatgtggatacaagttattaacatttatttcgaaagtgcaaattaggttatgagagccttcttttatggttctcaaagcgtattagaggcttcttttcaatggctactaaatgtagttaagtctttacagaactgagtgaataaactgacaatattagaaaattacaggacacgagaaatacctccattattatcagttaatggtacaagagtcttcaagtgcacatgccgtgcatataataatcaaaatcaagccaagcacaaaacatgcaaaaagtgcacaaacatatacaatgaaaaacaaaaagcctggctgagcctgagcataacacaactgaattggtgttggtcttacttgaatcatattggctgaaccatccaaaaaggtctgcttgcactgaatt

SEQ ID NO: 102440 - DNA, 389 bp, Glycine max
  unsure (1)..(389): unsure at all n locations
agcttcanatagtataggcaccaaccttactttctcaataaacattggctaatcagcaggccaatacccaataataagtaaaagttgcaactccgaatgaaacattaaaatctatgtgaatcaaaatgcagaaagataataaagtagtctgattaccctcttgaagagcctcgatggttgactgcaaatcatggcggtctttgtctaagctagacattttctttctgcaatatttattatgaaaagttattttgatataccccagaataaaatatattaaaattcccgagaaccatcaaagaagggagatgaagagctgacagaatatcaaattccgtcataattgatgcaaaattttatttaaattaatagaatgcagtttttttaac

SEQ ID NO: 102441 - DNA, 419 bp, Glycine max
  unsure (1)..(419): unsure at all n locations
taagcaccgcggctgcagcttgtctanattacattgatgtntgtatgggatgaggttacatgccattcttgctttaagagtaatgtcccactaaaactaactttccaaatgtttgccttcgcaggaatggcaccgaggaagcttgcctcatagaggtccatgaaagacaaggcggccgaatgaactaattccgccccggagtacgacagtcaccgctttaggagcgttgtacaccagcagcgtttcgaaaccatcaagggatggtcgtttctccgagagcgacgcgtccaactcagggaggacgagtatactgatttccaggatgaaatacggcgcctgcggtgggcaccactggttactcccatggccaagtttgatccagaaatagaccttgagttttacgccaatgctttgcccac

SEQ ID NO: 102442 - DNA, 313 bp, Glycine max
ggccccatgcaagcatattagccctctatgtctccagttccagagcttcggctgtggccacattgacgtctctcaacatactgtattcttgttggacctcgaaggacatagtatgaaccttttactaactgctgttgcatatcaaattttgctatcaggctagcaccatcctctctcctaaggggtgagtctctcctcacttgaaccttatcgttggagccaatcaacttgaggacaagccttaatcactgtataccaccacgaaacatggtgctgacaagccatattcttttatgacgtgcctataccttca

SEQ ID NO: 102443 - DNA, 348 bp, Glycine max
acccggatcttaatcacctgagctgcagctgatttttatttccatttctgctctttaaaccgtctggttgggtcatatagatgtcttcctctaaatccccatgtaagagagtatttttaacgtgtaactgctctaagtgaagattctctacagctacaatatttagactaactctgatgataggcatctttactactggagaaaaaatctctgtgaaatcaatttcttgtttctgctgaaaccctttcaccataagtctcgccttgtattttcttctaccatcatattcttcctttgcctataaacccactattctgtaaactttcttttcttctgacaattaattaa

SEQ ID NO: 102444 - DNA, 319 bp, Glycine max
catattccagatagattaatatatatgtgatagtttctattggataaaattaatagatctcattattcatttgcatatatagatgaatcacattgctgatgtgaccattgaactgactcaattgaaattttctaatggttaaaatttaccataaagtgtcaatagaaaattctcaagaagaggtataatacctttcattgacctgagattgtcttaatgatcaacagattatttgtcgtattttgattcccgacacctagtgtgtataagcacttgttgaatgaattatggatatggattaatatatgttcaattaatg

SEQ ID NO: 102445 - DNA, 455 bp, Glycine max
cttgaagaggatgaattaatggaggacaatatgacttttgatgggagcacgaaattgaaggaataaaagagggagagaagtggaactttgaagtgtgtctcataagactttcattcatcaaagttacaataagtgttacacatgcttctatttatagactaggtagcttccttgagaagctttcttgagaaaacttccttgagaagtttctttgagaaaacttccttgagaagctagagcttaactacacacacccctctaatatctaagctcacctccttgagaagtctccttgagaagattcctaaagaagctagagcttagctacacacacctctttattacctaagctcaccttctatagatgagaagctaaagcttagctacacactcccctataatagctaacctcacccccatgacataatacatgaaataccaaaaagtctctacta

SEQ ID NO: 102446 - DNA, 283 bp, Glycine max
gactatgtatatatatatatatatatatatacctatgtctatataacccaaactaatatatattgggatatgtttcaaaaacaaataatataatatgaatatattaacatgatgtgtgaaatattatcgatacaagtgcctttgggctgcataatcaatttctatatcataacacgcctcaatgtaaagcttatgcctaatactataatacgcgcacattttaatcaccctccagagataaaaaaacagatctctgaaaattgatgacaaaacacctatatcc

SEQ ID NO: 102447 - DNA, 62 bp, Glycine max
aaataaaatctagataagaggagataggacaaaatcgagatgaaataacatctcgataagat

SEQ ID NO: 102448 - DNA, 314 bp, Glycine max
cctttagcgcttacagacaaccctaacccactccaaacttttcccattaaacaccttagtccccaacaatatcaagaacgacgtgcaactagtttatgctattactgtgaggaacggtatcataccggtcacaaatgtgcccacaagtttcttctctttttaactgaggaaccatccttagacctacccactgaccctgaaccttccctagacccacctactccaacccaaccaactaatgctgaccccttttatttttggtttttggttcaagccattttgggcagcagctcaccataaaaccctcaaatttt

SEQ ID NO: 102449 - DNA, 378 bp, Glycine max
  unsure (1)..(378): unsure at all n locations
ccctcatttantggatntcagggttgagaagtgaanatgagaatggggtaanattttgagcaaactctcacctcacacaagtctataaccttaatctaaacttgctcaaactggttttatgcctaanattccaccaaatcaaaatttgactcctcaacacccaaattntaccctagaaatggctcttgccttcactttgggtcttttgtttttctctcttgcacagcccaagctttctcataagtcctaaatgacacttcaaactaggactaactcactttaacctccaatttctactgaatccagatttagcctttcaaaccctcagagcatcacactntgtccactcataacactacattctcactttctaaccct

SEQ ID NO: 102450 - DNA, 133 bp, Glycine max
tgaacatgtctacctcatttgagttgatcatgactgctggcgaacctgatcctttctcaggcccttactgattttcactattgtgagtaagctattatggtctagcaatattgggtaactctgatgatagaag

SEQ ID NO: 102451 - DNA, 290 bp, Glycine max
  unsure (1)..(290): unsure at all n locations
tataatattaatgtgatgatatgaagaataataataatctataaatgaaattacaaatacaaattacaaatctgtattaagtattaccattagtagctgaacgttgtctttttcgttcttggtaaatagttttcctacgcttccttcgttcagcatatatgtccatgagtagttgatttctgcaacaattgccttataattgccaaacaacaggaaaatcaaatgttgaaactgagttaaataagttgctgtagtaggctgactntaaaatgataccaacattatagtta

SEQ ID NO: 102452 - DNA, 378 bp, Glycine max
  unsure (1)..(378): unsure at all n locations
caagtttcatggtcttgcccgtgaagattctcataagcatcttaaggagttccatattgttctgttcaccatgacgcccccagatgttcaagaagatcatatctttctaaaggcttttncttattttctggagggaggggcaaaagattggctatactaccttgctcccaggtctattttcagctgggatgacctttagagggtgtttttggagaaattcttccctgcatctaggaccactaccatcagaaaagacattccaggcttcaggaaacttagtggagacagcctgtatgagtactgggaaagattcaagaaattgtgtgcaagcttgcctcaccaccagatttctgagcaactctttttcaattattctat

SEQ ID NO: 102453 - DNA, 338 bp, Glycine max
  unsure (1)..(338): unsure at all n locations
gcagggaaaaagggaactggtaggtttgaacaagttgagcaactcaccttcttaaccaaagttgctaagacacctgcacagaagctggaaattctgttcagtgtggtttctgctcagtttgatgttaatccgggcctcaatgggcatatgctcatcaatgtatggaaaaaatgtgtacagaacatgctgatcattctttgatatttggtgcagcacccaaacataactggtgatgattccgtggaaccggatgagaatgaaactcanaaaggtgcttgacataatggaacaattcgggtttggggtaactaatttgttttttataaagaattgatgtc

SEQ ID NO: 102454 - DNA, 447 bp, Glycine max
  unsure (1)..(447): unsure at all n locations
catgcaagctaggttttatatttttgtatctngggtcctcttaaggacttacgcaaaatatacgctgggtgatcattagaaccaacgaactcagtgacaatctccttggacagaaacttctctcgaatgaaatgacaatcaatctctatatgcttggtcctctcatgcaagactggcttagaggcaatatggagagcatcctgattatcacaatacaacttcatttgcaactattcacaaaacctcaattcttgaagaaattgtttgatccacatgagctcacatgtgaccatagccatatgatcgatactcagcttttgcactataccgagcgacaacagtttgtttcttgcttttccaacagattatatttcctctcatgaagacacaataacctgatgtacatttcctatccatgggacatccagcccaatcaacatgacaata

SEQ ID NO: 102455 - DNA, 410 bp, Glycine max
  unsure (1)..(410): unsure at all n locations
ctacaacatagaacacaggagcatgattgattagagaaatatccttatatgcatcagnttgtttgttaaaaagacccaanacttttacatactggtatcaatcttacttgcatatttactatttttagcctagacttagtttaattatgttctaaaccatcaattgccaatgtttctttcaacaatgccttatttatgaacttaaccctgtctaatactagttccctgagttcgatactcggattcatctattttgattttaaatacttgacgattcgggttgctttccaatgaatcagaattccattgaacatatttgtataaaggaaaaattggaccaaaaagtaactgcaagggaaatcccacactagtccctttntgggaactagtctanggngtgatttctctat

SEQ ID NO: 102456 - DNA, 285 bp, Glycine max
attgtgaaggaatgcattaacaatatcctggagagagtgtgatccttaaattttgtgagagatgactatcatttacttctgattattgcgtgaatctctgaagtatggactaaatgcatgaaagtgacgatgatgaaggccctgtttgattgtgatacccacttaaccaaaaagctgaccatgtgcttgaatgtattatcccttgcacctagtgtgagctggatgaattaatggattgattgaaccttgagcctaaacagtggtatattctgctaccatatctta

SEQ ID NO: 102457 - DNA, 342 bp, Glycine max
ctcaaccgcgagctttgaccaccgcccttccttcccgcgatgcttctctttacatctgcctgagtgggcttatagcctaaaccatacttcccatgatttcctttggcatttatcaggctagttatgccgccgttgtctttgcctaaacccattccgggttcgtaaccggtccccaacataactcgggccatcattactgctgcatcaaacaggcaagcttgcccagagaaggagtccacgaaggaaatgcttaccacctcaaaagactggaaagcggtttctaatgactcctctgtggcttccacataaggcatagaggatgggcagctcaccaagatgtct

SEQ ID NO: 102458 - DNA, 389 bp, Glycine max
  unsure (1)..(389): unsure at all n locations
tcacatgccaagtgactcgtctgttttctttttgattactcacctttcctttccttttaagagtgaataggcaatttaatccctgagattgaaccactttgcatattagtcccctgacttatatttttaattcataatagtccctaactntacataagtattgcaaaatagtccctggcgttaatttctcaggtgacggcgtttctgatgtgaatggtggcaattcagtgccacgtagattgtccaacgtggcactgaggtctgcatctataaattctctctcacatgcaagggtgcttctctctccccacaaaaatanggtttacacagctgctggttgcttcttcttcttcttcttcttcccacgctgagttgcttcttcttcttct

SEQ ID NO: 102459 - DNA, 344 bp, Glycine max
tgaaattgaaattaaaaattgggaatttaaaattgaacttgaaaaatgcacattgaaatttgaaagttgtaatctgataccactcgtctgtaatcgattaccagtcacggaactataaaaattcaattgaaaagtcatgactcctcattacataattgtgtaatcgattaccaaagagttgtaatcgattactagtaaggaaattttaaaagttactttgaaaagtcacatcccatcataagtttttgaaaagccaccaagagcctataaatatgtcacttttctacgaaaggtgttagagagtttttcagaacattattgtcctagcctctcacaacaaatca

SEQ ID NO: 102460 - DNA, 309 bp, Glycine max
  unsure (1)..(309): unsure at all n locations
ctaacatagtaacatgcccttagtccaagttattaagtatatccatcgacaacttatcaataaatttgaaaggatcaaactgaagtgtttgagctgcctagattttaagcataggaaggtagtaatttaagccaaaactcattatgccttttaacatgctatcctatcaaattatgacanatttataaatttataatcattactctcaaaattctggcaaaccataaaatgttcgcctagttttctttcttttttgatatcctctggccgagagtcaaaaactaattttttaaagactaatatccatta

SEQ ID NO: 102461 - DNA, 326 bp, Glycine max
  unsure (1)..(326): unsure at all n locations
ttatgagccttanggtagatttcgggcccatgggctaagtacgagcccgcttatctttgtaaatattagattaaggtttcattattnttgggccttgtatttagggctccataatgtaggtagggtactctagaaatataggatttttcagcccttgtattttagggcacctacactagtttttgtattaggggtagttttgtaatttcacatgcactaagtggatatttgatcgtgtgtggttggaaataaattaattgaattggtagaagcccaatccaattaaattttagagggggaggtgagcatttgcttactacacccca

SEQ ID NO: 102462 - DNA, 217 bp, Glycine max
tcttcctacctcttttgagtgaattgacggggtaaaatgtcccctgccttttcttcccccaccgcataagcgtcgtcccaacctaacacctgcactgatgactgatgttttacaccgcaagttgcgccacgatagcccttagagatatggctataccccacgaagatacctcgtatagtcttgtcttaagcttgtgcccttacgtctggaaatgaat

SEQ ID NO: 102463 - DNA, 424 bp, Glycine max
catgaagctcataatatcgaaggctttataatttctcggaaactctcgcgaaattcaaatgggcataaattttcacacggatgtccgattcgggcgcataatatgtcaagagtctcgaaattgaacaacggaagctcttgagaaattcaaatggttataacatttcacacggatgaccgattcaggcaaatcacatatcgagacgatcagaattgaacaacggaagctcttgagaaattcaaatggtcataacatttatctcggatgtccaatttaggcgcatcacatatagtgatattcgaaattgaacaacagaagctctcgagaaatcaaatggtcaaacttttcacactgatgtccgatcacggtatatatatgatacgctcaataaacatggaactctcagaaattaatgtcatacttt

SEQ ID NO: 102464 - DNA, 319 bp, Glycine max
  unsure (1)..(319): unsure at all n locations
tgatactttggcactatgtgaccatcaaaagtcttgttgtgccnctgccctcaactggcatctnctcgtcggcaaaagtcanggaattgtttgtagtgatgtngttgactatgcccctgaagccctccactgatatgtcttgcactacatgggccnntattaaaattttgaccaacagtgcccgatgaggttcggagttcatgagcagccctaatagagagatcctangctggagtttgtccattgctcaatcactcttaatttactctattgaatgaattcttagaaattcagcgctttctctactgatatctctctc

SEQ ID NO: 102465 - DNA, 314 bp, Glycine max
  unsure (1)..(314): unsure at all n locations
ttggagccttggaatttgtttgggaataagtgtgggggggttttgtttcattgaataacatgttttggtggctatgcttcatgatngtatttgggccatacttgatgtacattgtatattggntaaatgttggacatgctgaatgagatgttgtttctcaaaggctacgtacgtaaaaaaaaatcgaanaagaaaaagaaaagcaataaagttgagtgaataagatcttaaatgacaaaagaatgatgagactcttggntctactctntatgattaaatntcatctttactctcttttaatttcttcttttttc

SEQ ID NO: 102466 - DNA, 419 bp, Glycine max
  unsure (1)..(419): unsure at all n locations
agcttgccgccacggagttatccgactatgcttttgtgtggnggaacaagctacaaaaggagagagcaagaaatgaagagccaatggttgatacatggacggagatngaaaagatcatgaggaagcggtatgtgccggctagttactcaagggacttgaaattcaagctccaaaaactaacccaaggcaacaagggggttgaggagtatttcaaggaaatggatgtgctcatgattcaagcaaagattgaagaagatgaggaggtaactatggctcgatttcttaatggtttggctaatgatatccgtgatattgttgagctgcaggagtttgttgaaatggatgatttgcttcacaaagcaatccaagtagagcaacaattaataaggaagggagtgactaagaggagttntaccaac

SEQ ID NO: 102467 - DNA, 367 bp, Glycine max
  unsure (1)..(367): unsure at all n locations
atctttttcccaaggttcaagctcagcacgaactttagcaagctcagagcggtatttctcagtttcaactgcttaccagtcaatgacagagttaacaaaggcaaaaaaaatacaagtaactaanaaccctctatagcacataggatattagctccatttgtctacatggtagataatattaaaaacataaagaccagctaccaccaccaaaaacactgaaaatcagcttgatgcatcccagacaataacaacaaaaaaacaatntagaccttgagataattatatacagttgactaanataanaaatataagaacatattntgaaatanatcatgccaatatatatatatatatatatattcacctt

SEQ ID NO: 102468 - DNA, 377 bp, Glycine max
gaatgtatgtatacatgatcttgatgaggtcaaagaagaatctaacaaggctgcttcaaatgataagcatttgcttcgagaataattcaagattgcttcaacaaacaaagtcttgtttcaagattcactagagaccaagccttgccttataacaaagtgctttcaagacatgcaaggctctggtaatcgattaccacgaagtgtaatcgattaccacaagacagggttgagaaatagctgttgaacaaggttttgaatttgacatttcaacatgtaatcgagtaccatatgtctgtaatcgattaccagccacgaaactttggaaatcaaattccaaagcataacccttcaattataactgtgtatcgatacacaac

SEQ ID NO: 102469 - DNA, 252 bp, Glycine max
aaattgtagtggttgtgaattcaaaagatccttccacccaagcataaagaccttgggagtgtaactattccttgttcaattagagaagtcactgtgggaaaagctctgattgacttgggagccagcattaatttaatgtcattctccatgtgcagaaggttgggagagttggagaccatgcccactaagatgactttacaactggttgaccgctccattaccagaccatatggagtaattaaagatgtgctg

SEQ ID NO: 102470 - DNA, 377 bp, Glycine max
  unsure (1)..(377): unsure at all n locations
tgcaagctatctacgctactattacatggcctnatttttcctttgcaaatgtagtggngagtcaattcatgcaatctcctcataatgatcattgggatgcagcattcgaaatttgagatacattaaaggaccctaggacaaggactactctatgaagacaaaggaagcactcaaatagttggattttgcgatatagattgggcaggatcacccattgataggcgttccacttcaggatatcgtatgtctattggaggaaatcttgtctcatggaagagaaagaagcaaaatgttgctgcaaggtctagagcagaggttgaatatagagctatggctgtagccacatgtgagctcatttggattacacaccttcttca

SEQ ID NO: 102471 - DNA, 427 bp, Glycine max
  unsure (1)..(427): unsure at all n locations
ttatgactcctcgatctttggaacttgcttaactcttgattctttggcattatcaaaataatcttggaagtcattgcttccatacaagttcatcaattactcatattcctaattcaaaaacaaagggagatttttgtttaattgcataattaanaacaagaacaaaacaacacaattaataacgatgtagagaaaaaattaaccctaagattcaatgttttttattaaattaacacggttccaaaaatgaaggacgaatatatgatcatgcaatccaatatgagttcatcaaattatgtcaaaggtggaactcataccttcaacacactcactctcaacctcacaagagaattgtagatgatacacaataacttgattgtattactcatcacccaaattatgtacaatcattcctatttataatatc

SEQ ID NO: 102472 - DNA, 379 bp, Glycine max
  unsure (1)..(379): unsure at all n locations
caaaagccaatgaaccggtaagaagccttgtcatatccgcttggttggtgcaaaccaaccggcgggcatcatgcacaaaanaatcaaatttccaatcgtcaatcagtgcaccttcaagtggtacaccttcgcttggcaatttggttaaatcatagaatagggactggtcaatgaccatcttaatcccataaacctcagacattagggtgccttcttggatttctaagtttgaatagaaggctttcacaagatcataataaataggtaattntagagacatgaatggaataagattggagttttcaaatgcttaaaagcatttcaaactctcatttgaaaagaaatccatatcaatgaattntgggtctataatggaacg

SEQ ID NO: 102473 - DNA, 319 bp, Glycine max
tttgagacaatgactgatttattcaagagtctcttgccttaatcgattaccacgtgatttaattgactacttctctttctataagtgtttcagaagtgaacaagaacactgtaatcgattacatagatcttgagtggtttccatggtttgggaagaacactttaatcgattacttggagtatctaatcgattacattgatcttgagttgtttccatgggttgggaagaacatttaatcaattaaagataatctaatccattacttcattgaattaatcgatcaccttgtagattaatcgattagaggaagcaaccctgc

SEQ ID NO: 102474 - DNA, 429 bp, Glycine max
ttttatttttacttcatttttataacattgaatcgcatcgtactaaaggaaattattggctaattacatacacaagaaatgaatgctaaacaaaaagcaaaatttccagagtacacaaaggatggaagttttttataaaaaaaaatagcaattgaaagctcttaaacgaagaattcagcttaataataaaactgagggctcttgaataggttcgttagcctggacaccttccatcaaataggaaatgatcttaccatccttgaaggatcaaatattttctttaagtgcattgaaataaaaatagctaactatttaatgtgctggtgatgctacagttcctgtcctgaacgtatgtgcttacattcataatgactttgcaatggaacatctttttttatcaacagcaatggaacatatatgaatcctacc

SEQ ID NO: 102475 - DNA, 346 bp, Glycine max
  unsure (1)..(346): unsure at all n locations
gcaagctngcccctgtgatagcctcttcactagattccatgagttgactagctccatgtccccaatactttgcctcacanatcaacatataagtagcaatacgtcattttttggtcatctggacaattcatagctctgaagattttctttaactctttgagtgaaagatcaattctgttttgttctgactcccctatgaactgtgaaggatcattcttcttgaattcaactaagccttgaacttcagaaggtataacagcctcgtgttacttagccatggtagcttgatattgagccatggcagtttggtgttgttgctcatgctaagccataacagcatgatact

SEQ ID NO: 102476 - DNA, 382 bp, Glycine max
  unsure (1)..(382): unsure at all n locations
tttttcgttatagatattgacaagattggagccttaatttcactgtgtatattcgaggggaatctatctctctaaagatattgtatcacanatgccaacattgagaatatataaaaaggagtttcgaaagtggtattgaaatatcaatacgatccaatagataacgagtctgggatagaagtattacttacgcacgtttgggtgtatgcgggacaaatagacggttctgagagaggaagatgggataaccattctgggagaaagaaagagcgtatatgcgtctttgaaatgtaaaaccgacatatatatgtctatgtatagctaggacttagacctattattactcttacntcttttgaatatgattgaaacaaagaactta

SEQ ID NO: 102477 - DNA, 363 bp, Glycine max
gatgataccatgatgataacaaaagatgatgacagaagtgatgaccaatagctcaaagatcaatcaaagaacaactcaagtgaatcaaagatcaatcatagaacaactaaagtgaatcaagaacaattcacgagttcgagagaagaatccagaagaattcaagactcaataagaaagcctagaatcaagaatcaagattcaaggttcaagatctcaagaatcaagatcaagattcaagactcaagattcaagaatgaagaaaagacttaatcaagataagtattaaaaagtttttcaaactttgaatagacatgagtttttgaaaaacctttaccaaagatgtttactctctggtatcaatta

SEQ ID NO: 102478 - DNA, 377 bp, Glycine max
  unsure (1)..(377): unsure at all n locations
actngaggtgtgtacccaccatctttcttgtaaacattgtaatgtgtctactatcattggtatcatttctttctccgncattgaaggaaccacttgggctgccagatccctcaccttgggcgtattcnttgaaagatccgtgcccccccctcttggcacatgtttttgtagttgcatcctatccggagccatatcagaattgtattgacaccgcctaacgaaggcaaccattaggtccttccaagaatggactcgggaaggttccaagttagtgtactatgtaacagctaccccaataagactttatgggaagaaatgtattancagttcctcatcttttgtgtatgcccncatcttccgacaatacatctttagat

SEQ ID NO: 102479 - DNA, 316 bp, Glycine max
cacatacacattctttgttctagtcgatcactcacttaattcttcatattctccccctttgttttgagtttaatctacacttgaaataaaattacttaattatatgagttcttgatttaatccctatattctctaccgctgtggcatcaacgaaaatgtcaaaagtgtgtaatacatacataattaaaaaaaacatgcacacggcattcattagaagatctaaaccagtcatgaagcaaaaacatgaataacccaaattaaaatataaaccacatagttatatcacatgattcatagatggtcagtcatactaagc

SEQ ID NO: 102480 - DNA, 275 bp, Glycine max
  unsure (1)..(275): unsure at all n locations
gaaagctctcttctctgagagagttaatgttcagtctataacttatgagatcttgctctctcctatccttcttcctctatttatgactaataaaccccattaactaactaactcatgagttaactatattaactaacttctccttatatcctaacatatataaccacatgatatccttaattaaaaaataaagaatacttgattttaatgaataaaaatgaccattaataataataaaaaaaaaatattaaagcatcagacanatttatttaaca

SEQ ID NO: 102481 - DNA, 371 bp, Glycine max
  unsure (1)..(371): unsure at all n locations
gtattcacctattatttgagaangagctcaaactaagaggaggaagacacagagtatgttgaaactacctagaaagcggtaataacggtaagcttctattaaatgtcgtttggtgctgtcaaagttattagacgtgaaggtatgnttcatgcaaatatacctaaggggtcttattttaaaaactatttacgtctgagggtttgttttaaaagtaatgacggagggggtcggtttttagggggaaaacgccattgccactggcggcaaggctcaacccgccattgccagtggcggcaaagcaagagagaggggtgtatcgcccctggtagtggcgacatangccacgtaggagtgagaatcaccattctcac

SEQ ID NO: 102482 - DNA, 441 bp, Glycine max
  unsure (1)..(441): unsure at all n locations
catgaagctcgagagtatgnctggattggttaaggattaaaccttatataatcgatacatagttgtttttgagacaatgattgatttgttcaggagtctttgttttaatcgattaccatgtagtataatcgattacttctctttctataagtgttttagaagtgaacaagaacactntaatcgattactttgagtatgtaattgattacattgttcttcacttgtttccagattttggaaagaacactttaattcattaaaaagataatctaatcaattacttcattgaattaatcgattaccttgtagatttaattgattacagatgattacaattggtttctctataaataatcagcttgtgttctcttctaaacaatctcagaanaacaatgaaataagcttttgaatgagctaagatcatgtgctgntattagtaaa

SEQ ID NO: 102483 - DNA, 270 bp, Glycine max
caaaattacaatcaaattccaggtttttgacatatatcaagctgaatgttagtcacctaaatttattaaagctacaataaactagattccacgaagcttgccaaaatgactttttttggtacagttaactttttatgacacgtgatggtgaacccaggaatctactacgtggcacttattcagctggcactgcatgtggagtggatcttcattctgttgaatgagttcttttatggtgaacgtttctataagggcactacaccaaatgac

SEQ ID NO: 102484 - DNA, 278 bp, Glycine max
tactgaaaacccgaatgcaattttattgaggaatagatctaatatttgggaagcataaaaaaggccttatatcccaccacagtaaaagagtttaatagaggtagttataagtgaaacataccatagaaaaactaaaataatggttgaaagataaaaacatacatacacttaaagccaaacatatacattgcctagaaggataatattaggttaaattgaaatgctagaattggacctctcattacaataagactcaatgtaaaattagataagcctac

SEQ ID NO: 102485 - DNA, 174 bp, Glycine max
  unsure (1)..(174): unsure at all n locations
cctgtgccactcattgactacgtctccacgagccatatctgttttcacacggtccataatctcagctccaacatcaagatcacatcacagcaacttacagcacaaaaagcaagaaaacttgcaacaccaccaatacagtnttactaaacccaaacatccttattcgtataccgt

SEQ ID NO: 102486 - DNA, 281 bp, Glycine max
cctacatgaatcggctactgcgcttggggcttttcggggccttcttcatgctaagattgcactggccactgagtgaggcgatgtgttgggcctgtcttgtgcgctaagcaagctgtctcattcttcaactttttcttcgagtttttgcatctattttcctccaaagcacttgtaattttcttcttttgaattttgctggtaaataattaacatgatataaattcctcgtattttattaaaacaacagtaagtagggaattatatattctagtcaaatgata

SEQ ID NO: 102487 - DNA, 405 bp, Glycine max
  unsure (1)..(405): unsure at all n locations
gattnggatgtttatgattctcanagnttggaggttgggaaacataaacttcctcttcaacgtatccatttaggaaagaacttttgacatccatttggtataacttgaaacccataacacaagcataagcaagtagtaatcttacggcctctagccttgctattggtgcataggtttcaccaaagtctataccctatcattggttatagcccttggctactagccttgcctcattcctagttatcaaaacatgttcatccaatttattcttgaacacccatttagtgccaatgatgttcatgactntagaataaagtaccaattcccatacgtcatttcttttaaatggttcaactcctcatgcatggacattattcaaaactcatctttgattgccacttatat

SEQ ID NO: 102488 - DNA, 369 bp, Glycine max
cttacaaagataggacatcatgggaaaactatagtccttgatctttggaaaagtccttattccccattcttaacactttctatattgttacatgcaaattattccttttattttcttattggcttggcatgaggtgatatgccttttgcggtgcacttgtagaaagaccgcactttagtgctaatgattatacaagaagtaatgcaagtgtatattatctttcattcttggggaatgtcacattttttgtttcatgtttcgcctctatagtcaagcattgaccatctccttgaggtgaatgatactaatacatgtacgcacgaatatctaccactagttcatgttgcacattaatgtaatgttgagatc

SEQ ID NO: 102489 - DNA, 333 bp, Glycine max
  unsure (1)..(333): unsure at all n locations
tgaaacgatantttgtctcattaagatataaacattgatcgtaactcttatccaaagtttctaaaggatcaaatccaaccttgttggtagtaccttccttttgacccttgcagagagaccaaggggtggggtttctgctgcatgatttgaaatgaatgtccacggagtgagtgtgactgtgtgactgacatgtgcgtgaattaaaaaaaaaaaatctaacaaaattctaaaaatatcctacgcgaacttttaaaagaaaaatgttgtgtctacccacaagttatacaacacttcttataacanaaagaaagtgtgatataaaataaataatat

SEQ ID NO: 102490 - DNA, 381 bp, Glycine max
  unsure (1)..(381): unsure at all n locations
taatccaacattaaaccatccaaagccctgcacctataaaatacagtccacgtagcaataaaaacaccacctacctacacaaatacacagcactcaaaaaacatcatgtcacaaattgcattattcaccccacaataccctcttgaagttttatgaatagaagtgactgtgattntaaattgcggctacagtctcaattatggtgagtcaaaaatcatcttttattactggaattatggaaaaatgcagttatacaactataaatatggtcacgtgcaggtgcggacggacaaaataccgttatgtcgcggtcacaattgtgtgaacagacgacaatttacgactatggaattgacatgaacttacagaaccactcatgct

SEQ ID NO: 102491 - DNA, 442 bp, Glycine max
  unsure (1)..(442): unsure at all n locations
cttcttctttcggatatagatagcttttatgttggttgggttttaagaattaccatgtcgatgttcagctctctgtntctntagtcaggaaaggatatttgttgaatacagtttgcattatttntggggaggcttatagttatcataggaagggatcgtttattttgtgaagctggcagaggtgttgctatagtctgaggttggtttgtggtgtctttattttttatgtaactgctgccaggctggtaccgatatcactccttgtgtctcggtccagacctggtgttatatttattatatgatcggtttttgccttgcaaaaaaataaaccaaggtcctatcccactaggtgaagtcttggaacatggatcacacaaaaccattcagcttgattaaagaccaaatcttcgaagatatcatntaccatgaaatctctataaca

SEQ ID NO: 102492 - DNA, 216 bp, Glycine max
  unsure (1)..(216): unsure at all n locations
atcactcaagaatttaggagaatcactctcactaagataaaagagataaactctaattttctgaataaaactcaacttgtgtttattgataaaatggttcagcttatatagaagctttacagcagattttagtaatgacccactaacctagaattaaaataacttaatgccattaacctagggaattaaanaaaacttaatggctgagtgtaactg

SEQ ID NO: 102493 - DNA, 372 bp, Glycine max
  unsure (1)..(372): unsure at all n locations
agctaagctccttcaattgaacaaggctcttattatttgaagagtatccttgtggaaccttcacctgacgaagacactgacanaaacttatcttctcctttttggaaaaagtatgacaagctgggggcaagtaaattttcttcccatcagaccttggatgcaactgtgatcgaatccctatataagctagatcttgacaggtattcaagccatccttcatcttggcttgaatgttaaggagcatcccaatcacattgtcacaaacatttttctccacatgcataacatcaatacaatgtctaacatctagatcagaccagtacgaaagatcaaagaagatggacctcttcttccatatgcaactcttacttt

SEQ ID NO: 102494 - DNA, 448 bp, Glycine max
  unsure (1)..(448): unsure at all n locations
agcttcttttggaccttgaacaagcaatcatcttctctntcagaaccatgctatgtgctcgcgactggtccctttcttcccttcgcaacttgagttcattattgctaccccatagagctccgcgaaatttgttccggccatactcttccttgcgagccctcttggtctcttgttcaagggcttttgcggtaattgcattctcttcccgtaacccggcgcactccttccgaacgtgtgtagcagccaacttgaacttttccttggcgagttttgcctttcctaactcgcttttgagagcttggacttcttcgtcctcttccggtgcttcaaaactctcttcgctgacgacttttaacttggcgagccaatctaaacctcgtatatgaactttcagccattcgtggtacccaccaatgatgccattacgaatgcctctaagctcttgatc

SEQ ID NO: 102495 - DNA, 375 bp, Glycine max
tcattaagaactagctcctttcttcctctattgcccttagttgaatacacctttgtttggttctctatttgggtcttaaccctctcatgcaacttctttacaaactctgacctaaattccccttctttatgtataaaagaagtgtcaagtgggaggggaatgaggtctaacggtgttaagggattgaacccatagacaacctcaaaaggggattgcttggtggttctatgaacccccctattgtaggcaaattcaacatgaggaagatactcatcccaagacttatggttgccttttagaagagcccttaaaagagtggataaagacctattcactacctctgtttgcccatcagtttgtggatgacaagtggta

SEQ ID NO: 102496 - DNA, 393 bp, Glycine max
  unsure (1)..(393): unsure at all n locations
cttcatctagtagatgaacatccagtacacttggaatgagaccattaccaattccttgaatttggtgatcacttgaatatgtacaaaatagtcactaaatggtttcatattgttgtctaaggtcttgctaaagcttataaaacaaattttcagagttgatgtatgctatttgaattgaaaactcgattttacaattcaactagtaacaacatttagcaggataattagatttaaagataactngataagtatattattacataataactatgggatagcaaaatgtttaattggctaaaagaatacttggcgggcctccactgaggactgctctttaactggttctatgtcgtacaactggggccaaatgtgaagttagcataaaatgtagta

SEQ ID NO: 102497 - DNA, 317 bp, Glycine max
tttttttttatctcgttttatttcttattttcattttttttatttatctcatgaatctctgcatcaaatcaaattaaattaaatttttttcttaatttattattcaaaatagtaatttctactttctattcaaatgtttaggtttcttccatggatattaattatctttaaatattaatttataaatcaattgatttatagttacaaactacacttattatatatatatatatatatatatatatatatatatatattaattccatttattaacttatatatatatatatatatatatatatatatatatatatcat

SEQ ID NO: 102498 - DNA, 234 bp, Glycine max
  unsure (1)..(234): unsure at all n locations
atgtatttgctggttgtggaaagagtactacatattgggtttggacatttctacagctcccacggcataagtatttatgtctaagacttcagtaaatttcagtcatccacggtaacgaatggaacaaagaaatactgngtattgagtggaagctggatttggttggtttggccagtttctgctttgccgtttttgttggtagttggagatgaagtaatactgagtgtgaactgg

SEQ ID NO: 102499 - DNA, 371 bp, Glycine max
  unsure (1)..(371): unsure at all n locations
aattctagtattcataataaacttaacaatttgcccaaatttttttctccaactatcatctgaataaaatttctctactcttttccaagaaattggtatcaagaatttcggttcaagattagttccacatatgtttcatggtagatcaagtcattagtaatcaaccattctatctgctattntgtttgtggtgtgtcttcaagattctattcaagaaaatggtcaacacaatcaagattgagaaattcacagggaataatagcttcaacctttggcgcatcaagatgcgagctttgctgaaagaacagggcatttgggcttctctctttgttaatcggtgaacattgataaatcactgcttgagttacaag

SEQ ID NO: 102500 - DNA, 351 bp, Glycine max
  unsure (1)..(351): unsure at all n locations
ttaagcacctgggctgcaagctgtaaaccttagagtntactttatntttattattctaacattgtggttgaaagaactctaattaaatataggtcctattaatcaataggatgaagcacaatttcttcacaaataatccaaaactcttcatgaaatataaaaaaattacagctaaaaataaactattaaaattgttggacaagtgacctcaataacttaaggggggggggggggagaggtctatctcatattaaacactcacatcacctgcagtctccaacttctcattaatcccctctccaccccgtacgcatatctcaataaattgtttgccggctcttccttcttgta

SEQ ID NO: 102501 - DNA, 384 bp, Glycine max
gcttgatgcaccatttggagaggtagtgttacacgtgattgtgcactccatgagagggtggatcgaatggagaatatacatcattatgaacaacaaaggaggaaaagagggaatgatggtgttcctaaacaaaaccgaattgatggtattaaactcaacattcctccatttaaaggaaagaatgatccggaggcctacttggagtgggagatgaaaatagagcatgtattctcatgcaacaactatgaggaggacaaaaaggtgaagcttgccgccacggaatattccgactatgcccttgtgtggtggaacaagctacaaaaggagagagcaagaaatgaagagccaatggttgatacatggacggagatgaaaaagatcatg

SEQ ID NO: 102502 - DNA, 414 bp, Glycine max
  unsure (1)..(414): unsure at all n locations
tgaaagagaaggcagactnttataaagctntaatatgaaataacctattcccacccataatgggtataggtaatccatgatctcaaaccaaccgaaattgacccaattagtttggttcaaatttttttagcttaggtcaaacccaacaacaacccaatcctgcctgttcaatttacaagccaagtaagatggtttgtttttttaactcgtgacccaacccgtaacatataattaaattcattatatatataattaaattattaaacacaaaacactataanctttttctaacataatttattaaattaaatcaattatacttctttctttttcaagtgctctttttatttttatcttgattttgttttctcatgctaatacaatattctaattctatctaanataaaaatattg

SEQ ID NO: 102503 - DNA, 443 bp, Glycine max
  unsure (1)..(443): unsure at all n locations
atctaagtggctatctttaatatttactggncttcattatcttcaatttcatgcattcattccatactcaaagattcatgcaaaaatcattactcaatgttagtcgttctctcaacctgacaaaccgactaacattttcagtcatgatcctaattccatgttctttctctctaatgactgcatgctcattcaaggcatatgatctacgcatttcaattcactcacatcatacaactgatcaattcaaaccaatgacaacgctgaattccaaaatcaagtatcaactgctggataatataaatgcacttttcaatcaagctttgtacaagctatcaaccaaaaaaaaaactataaagtgaaatttaaagactgagacataaacaacaatcanaattataaaatgtactaaagacgagataatattaaaactgttcataaagcag

SEQ ID NO: 102504 - DNA, 321 bp, Glycine max
attggatggtgggcaagatggattttcaaatttcgcctattatgcaaaaaaaacagctgccaaaaagagtgcagcagtttcttttttaccatagtgtagaaaaatgctcgtgcattgctagtcatgggaagagtagtacatttccggttccaggcattttctagtagatcccaacggtcaaaatgtggctttatgtactaggaatctctagtaaaattttcaagtcgatccaatggttaacgaatcggaatgaagagaatgttactggggtatataagaacaaaagctgtggtatttgaatgtgtttggaccagagtttct

SEQ ID NO: 102505 - DNA, 427 bp, Glycine max
gcttcgaagggaagagagagaccagtcactagcacatagcatggtattgaaagaggagttagctgcttgctcaaggtccaagagaaacttgtctcagcatttatgcgagacaaagaccaacatgttagccatcgtcagcaagtaccaagaagaattaaatctagccatggcccatgagcacaaagtggcggacgagtatgcctgagtgtacgcgaaaaaggaggctagaggaagggtgattgactcgttacatcaagaggcagcaatgtggatggaccgatttgttcttactttgagcgggagtcaagaacttccccaattgctagccatggccaaagcaatggcggacacctactccgcccccgaggagatccacagacttctcagctattgtcagggatgatagacttgatggcccatatgatta

SEQ ID NO: 102506 - DNA, 388 bp, Glycine max
  unsure (1)..(388): unsure at all n locations
atgataacaataatgataacaaaagatgatgancaaggtgatgacaaaaagatcaaagatcaatcaaagaaaaactcaagtgaatcaagaacaattcaagagttcaagatagaatcaagaagaattcaagactcaagaggaaggttaagagtcaagaatcaaagattcaaggttcaagatctcaagaatcaagatcaagattcaagactcaagattcaagaatcaagagaaggcttaatgaagataagtatgaaaagtttttctcaaaaattgagtagcagatgatttttctcanaacatgtttaccaaagagttttactctctagtaatcgattaccagattgctgtaatcgattaccagtagcaaaatggatttgaaaatggtttc

SEQ ID NO: 102507 - DNA, 408 bp, Glycine max
agcttcaaccaagaggtgatggtccatttcatttacttgaaaggataaatgacaatgcgtgcaaaaatgaattgcctggtgagaataatgtgagtactacatttaatgtgtctgacttaactctttttgatgtagatggagaagccgatttgaggacaaatctctttgaagagggagagagtgatgaggacaaggcaaggaataagggcaaggaacctttataaggacttggaggacctatggcaagggctagaacaaagaaggccaatgaagctcttcaacaagtgttaaccatgctatttgatattaggcccaagttacaagtgaagaagcttcggattgttaattgcaccatgttccaagaagagtagagggtgccacttttgttgagtggttttattagcattt

SEQ ID NO: 102508 - DNA, 384 bp, Glycine max
  unsure (1)..(384): unsure at all n locations
ttattgtcatattatccctactttgnggtatttggtattttaacttggaaattgattttattattngaattacaggcatgatcagagaagatccatcaataaaaatttctttgattcaagaaaggataaatagtgaattttcctataaggtttcatacagaaaagcatggatggccaaacaaaaggcgattgcaattgaatatggcgattgggaagagtcgtatgcgaaaatctcgtcatggctaacacacatgcaaaatcattctcctggctcttactttcaaatactacatgacgattttattgttggtaatagggtaagtcaatcatacaagtngacgagtattttggacatttggtcaatgcaaagaggcttttaagtac

SEQ ID NO: 102509 - DNA, 339 bp, Glycine max
ggtaccctcctggaaacccaatacaaattttattgaggcaatagattaaacaatttggaagccataagaagtggaaccttatgtacccccccatggtgggtggtaatacaacaattgagaaaccctaagaagagtgatatgaagatgaaagaagattagtgcagtacaatttaaaggctaaaaacattattacttctgctctgggaatggataaatattttagggtttcaaaatgtaagagtgctaaggatatgtgggacactctacaagttacacatgagggaacaactgatgtcaaaagatctaggataaatactctaactcatgagtatgaattat

SEQ ID NO: 102510 - DNA, 320 bp, Glycine max
  unsure (1)..(320): unsure at all n locations
tagagagagttatagagagagagagagagagaatgtggtgtgggaatgaaggaaagatatgcanagaagttgaactttgaagtgtgtctcacaagactctcattcatcaaagttaccacaagtgttacacatgcttctatttatagtctaggtagcttccttgagaagctagtgttacacccctctaatagctaagctcacccccatgccaaaatacatgaaggaagaaagctttcttggggagcaagtgtcacacccctccaatagctaagctcactcccataggaacacacacccctccaatagctaagctcaccccc

SEQ ID NO: 102511 - DNA, 352 bp, Glycine max
  unsure (1)..(352): unsure at all n locations
tagggactacttntcttagcacccttatgttcaatacgntcgataaataatgttctttatttcgctatatgcatgagagtntcaatgctagttgtcacacaaatgtgtgacaccctntacccctcacgtntnttttantaagggaannanaatgtnaatattaattaaaagtcactctctccnaanatttttaattacaagcctttccaatgggtcaaaggctcacattcactttnntngacagaatatnnaaacttgaccaaataaataataaagtcatattggttgaaagaaggtgatctaagtgttatacaattaatatagaactcatatnctaaggtcacatcctatc

SEQ ID NO: 102512 - DNA, 298 bp, Glycine max
aacttccttacaattagaaaccaacgcagtcctaacgacaccgtttttctcctctaagcaacccatcattgtcggcgtaggcttctcaatcacaccaggaaccgcagacacaaactcccactttctcccgttcaaactcaaaccccaaagctccactcccttcaacaccctcacgttcctcgtgttcccaccctccgatttcacaatcatcatgtacccatcgccgtacacgtgtaacatgtccatcacgttcccccaactaaatccaaccgtcagatcatcattagcctcagtcacg

SEQ ID NO: 102513 - DNA, 472 bp, Glycine max
  unsure (1)..(472): unsure at all n locations
ccggatcttaagcacctgggctgcagctcaagaaaagatggcctctgtatattttcttatttcagaagggaattctatcaatagacctccaatctttaatggagagggttaccactactggaaaacccgaatgcaaatttttatcgaggcaatagatctaaatatctgggaagccattgaaatagggccttatatacccaccacagtaganagagtttcaatagatggtagttcaccaagtgaaagcataaccatagaaaaacctagagatagatggtctgaagaggatagaaaacgagtacaatacaacctaaaagccaaaaacataataacatctgccctaggaatggatgaatatttcagagtttcanattgcaagagtgctaaggaaatgtgggacactcttcgattaacacatgaaggaactacagatgttaaaagatctatgataaatgcactaactcatgagtat

SEQ ID NO: 102514 - DNA, 204 bp, Glycine max
  unsure (1)..(204): unsure at all n locations
atatgggnaaatacttaggctttataaatgggaaaccactgggttggtactatgtgtgtgatgctaggaattcggaacatttgatgaccatgtgcttgacaatgagttttggttgctggttctcacctgttgtgattttataatggggctggactgatagaagtngagtattgtgtcaatactatactaaaagggatattccta

SEQ ID NO: 102515 - DNA, 339 bp, Glycine max
ctgagacacttgatattgaataacagaagcttcccagaaactcgaatggtcataacttttcacacggatgtccgattcgggcgcacaatatgtcgagacgctcgaaattgaacaacggaagctcttctgcactttctatggtcattactttcacttggaggaccgatttaagcgcatcacctatcgagacgctctgaattgaacaacggaagctcccgagaaattcaaatggtcataactttttactcagaggttccattcacgcgcataatatatcgagacgctcgaaattgaacatcgaaagctctctagaaattcaatggtcataacttttcactt

SEQ ID NO: 102516 - DNA, 260 bp, Glycine max
  unsure (1)..(260): unsure at all n locations
cacttatggatgcccatcatcatactnnngttaatggattntantgatataaatntntnacaagaagatcgctcattccttggcaagttacattagcagatgtacatgtgagatcaagccacaatgtacccttctagtctacacatctcaagggaaactgacattaaaaattgtgctgattgagtttgtctgcatctaccagtgtaggatgtntccaagaaaactatatttgagttgtaatacaaagaaaaaatgcctac

SEQ ID NO: 102517 - DNA, 424 bp, Glycine max
  unsure (1)..(424): unsure at all n locations
gctgagctctcatgacttgtctttttttcatacgatcatgtcatcttggcatgaactaaagtttacagactcatgttcattctcgtccattgaactanaggtctaggggtttttttttatctgcattgcgattcactaaattaaatatgatcttttagattcactgtttattcatgttactagactttctatatctaaattgtctactaatcttttgttttgtgtatatgaactattaacttttccaactcaaaagctatcaatcaaggcaaaagaagcttcttggtattcaaacacaatggaatcacacctgcaattcaaaaaaatgtttattcttccagaagagtacacatgtngaacatttaggctgaagaatatgcacatgaatgtccctttctanaatntatttttctgacttctatat

SEQ ID NO: 102518 - DNA, 258 bp, Glycine max
  unsure (1)..(258): unsure at all n locations
atccgaagaagttnnacaggaaaaaatgaattggaatctatagattgaanatgaaggcattgcttgttatgtagaggcatngtgtggagacatagtntttctaaacaaagtgtctaaagtagagaagaaaacaataatggaaaaagcacacgacgtcatcatcttgaatcttggagatcgagtaatgtgagaggtattgaaggagaagaaattgttggtgtttggagcaagttggaaagccttcacatgacaaaatca

SEQ ID NO: 102519 - DNA, 390 bp, Glycine max
  unsure (1)..(390): unsure at all n locations
gcttctccattgtttcttntcttctatttcataacttctnttcaagaaattcataacccccatgagataacacgtgagtgaggggcagcgttttgtttttgaatgacctgttgcctttttttgcacatcctttaaaaattgaacattatccaaagttattattactgacaataataagtaagtttaatgtttaaaacaatgaaaatgacaaagttaccttccacaaagggtctctgcaactgtgacaaaattgggtccatttttccttgctaatgtcgtacttttcgcaaacagtgtcatcgacatcgtccttgtcgactgcaaatgcccatttcgaagtcaaattagacttaaactatcttcaccgctcccctacagtctgaagtattt

SEQ ID NO: 102520 - DNA, 393 bp, Glycine max
  unsure (1)..(393): unsure at all n locations
aaagaattaatttaaaaaagataaaaagattagaaatttttttcttttcctccgtttgttgggtactgcaatacttttttaattactattaatagataaatgataggaagatactttaacaaaaatattcgtagtagaaatttgntaaaaatcacaaaattaatntgattcaaacaaattaaggtgcaagctcgttgaaagtcttattttgtacacgcnttgtgcatgataaatccatgtttaatcattatgattagattaagctaanaaggccttgattcattttcaaaatttaaaggttgtgcctcattttttcactgacaaattgatgtgagaagggggttatanacaagacccanattcaatgaaattntaaccattgtgacttttatg

SEQ ID NO: 102521 - DNA, 413 bp, Glycine max
  unsure (1)..(413): unsure at all n locations
actctataaataggccctctattttaatggagagggttaccactactggaaaacccgaatacaaattttcattgaggcaatagattaaacatttgggaagccatagaagttggaccttatgtacccaccatggtggctggtaatacaacaatagagaaacctanagaagagtgatatgaagatgaaagaagattagtgcagtacaatttaaaggctaaaaacattattacttctgctctgggaatggataaatattttagggtttcaaattgtaagagtgctaaggatatgtgggacactctacaagttacacatgagggaacaactgatgtcaaaagatctaggataaatactctaactcatgagtatgaattatttaggatgaagacaaatgaaagtactatacaagatat

SEQ ID NO: 102522 - DNA, 355 bp, Glycine max
  unsure (1)..(355): unsure at all n locations
cacacgacaattactttttactcggatgattgattgagtcccgtcatataacaaagaacgctcaaaattgaatgttgaagctatgagccattcaatgacaataactttntactcggatgtctgattgagtcccgaaatatatcgagacgctcgaaattgaatgtngaacctctgagccaattcaaacgacaataactttttactcggatgtctgattgagtcccgtaatatatcgagacgctcgaaattgaatgttgaagctctaagcaaattcacacgacaataactttttactcggatgtctgaatgagtcccggaatatatccagacgctcgaattgaatgttgacctatga

SEQ ID NO: 102523 - DNA, 371 bp, Glycine max
  unsure (1)..(371): unsure at all n locations
aaactctgccaaaacacattccaatacaacagctttccctactcaaataccccaagaacattctctttgttccgattcgttaaccgttggatcgactcgaaaattttactggaggtccctagtacataattctacattttgaccgttgggatctgctagaaaatgttcataacccaatatgtactacctttcccataaccagcaatgcacaagcattttttgcacaagaacaaaaattctgctgcacaattcaacagcaattttttgcataataggcagattttcgaaatccctcttggccctcatccaatttgctcaaattggatcctacaagtcctaaatcatatataaaatgtatntaaaaccaaaaa

SEQ ID NO: 102524 - DNA, 338 bp, Glycine max
ttatgggtattttttagtggatgttgtaaataaatcttatgtaatggttaatgttgtctctagaacatttcctttggatttaatgttgaaatctgtgtattttcaggtgaaaaagagattaagttttgaattgcaaaatgtaacagttgggctaagcgcatatccactactaagtgcagcttcaacgtgcttagcgcaaaagagaatctggaagagcatcatcatcatagccgcgccgctaagcacgagattagtgtgctaagcgcagcaggtgccttcagccatgctaagctcgagactggcgcttagcctatattcacttactcgtgctaagcatg

SEQ ID NO: 102525 - DNA, 378 bp, Glycine max
  unsure (1)..(378): unsure at all n locations
cccgcggctgcagctgcaancattggtatgtgattnggactaattgatacatataattgagtatggagatacttgcactatatagggctccaatatgaatntctgactgcaagatgaaaatgggatgttataatttgcaccttttcatttaatcattttactttntgcagattatcgcagagagcttatctgaagaagaaatagctggcttaaaagaaatgttcaagatgatagatgcagacaacagtggtcaaatcacttttgaagaacttaaagctggtttgaaaagagtgggtgctaatcttaaggagtctgaaatttatgatttaatgcaagcgggtagttttttttaagcttattttataaaataaaaagaaa

SEQ ID NO: 102526 - DNA, 252 bp, Glycine max
taaagatcctatgcatgcagtagatgggctataccaggaagtttgtaaagccatccaatggtttcttggcttctgagaatatcaaaactttactttgctcagcagaaggaggagagatgacattggaatttttcttgcttccagtaaaatatttggggtgctagtagggcttaacttggtggggtggggctgaacgtgggagaccatggatgaaaaataatgttctcaccatactcaaaagaggtagaagat

SEQ ID NO: 102527 - DNA, 415 bp, Glycine max
gcaagccttgcggatttggtcttcgccggcgaaatgtatcaagtgggtctaaaaagaggccaatctaatcatcctgcctagaccaatgagaaaactggggcagtgaagagggtgagaatgagggagaagcccgcgctgtgactgccattcctatacaggcaagctttccaccaacccaacaatgtcattactcagccaataaaccttcttcttacccaccgcccagttatccacaaaggcaatccctaaatcaaccacaaagtctgtctaccgcactttcaatgacgaacaccacctgtagcacaaaccaaaaacaccaaccaagaaatgaattttgcagccagaaagccttagaattcaccccaaattccggtgtcatatgctaaacttgctctcatatctactcgataattca

SEQ ID NO: 102528 - DNA, 168 bp, Glycine max
tttttttttgcaatctggagatgctagggtatgggggatacaacaactacggaccgcatataccctttatggtagtcaacctattaatttctccaaaatcccatatcatagtataacctaaaaaactgtcaagaatttattgcacggatatgaccttacacacttatc

SEQ ID NO: 102529 - DNA, 387 bp, Glycine max
  unsure (1)..(387): unsure at all n locations
tgttctcagaatgttccaaatcaaaatgctcaaaataataatgctcaaaattcccaataacagaatgctcangatgctcataaggtactaaatgatgtctaactaatctatgaaatgtcctatctatctcaagatcaaaaggttgtaagtcagatggattgcctctagtcatacactatattcagcatgcacagctaattgccttcttatgcaagtaacaatgtaggtttgaactacagctatcattaaatgatatccaaatgacctataattttgtgaacaaccttatataatgatgagaagatagcacatcaaatttcaagcaaaaattcaaagtctaactatagaagctacaaatgataagttgagaaacataatagaataata

SEQ ID NO: 102530 - DNA, 397 bp, Glycine max
  unsure (1)..(397): unsure at all n locations
cgagcgntcgctaagcgcaacactcattggctaagcgcagggaagaatctatacgaaaatgaattgtgcaggttcgctaagcgtgccactttatctcactaagcgcaccgctntagtccatccgtgagcgagaaaggcacgtgctaagacaaaattcactaatgtacgctaagcggtccagaattgcgctaagcgcacgagcacgaacaagccacctatttaagcctgaaattagattttgtgaagggagtttgggctgggattcagagctttgcatgtctagagattctagagatagaaaggtccaagttctagagagtattgagagatnnttgtgtgtgaagatctgcagagactatagctctgagcaggagccgttctgagagcttgagatgag

SEQ ID NO: 102531 - DNA, 402 bp, Glycine max
  unsure (1)..(402): unsure at all n locations
ctaaattaattcatacgtgcacctatgaccacattaaatgtttttgttagtaagaggagtaattcttaaggggttacaaacaccgaataattaattttaagtatctctacctcatataattagacccttaaattaaggcaccaatctaattcaaaactaagaatgtctaatttattgaacatagattaataatcggccaatgtaatgaagcatggtccttccactcgtaagacttctatatacttatattacgccttcttctaatatttatgaaagtctaagctcaccatttaatcaaccttaattaatttcacttaagttctaaccttacttacattaaatactaatttntctttttcaagctgctatggtcatttctagataaaattaattatttacatt

SEQ ID NO: 102532 - DNA, 459 bp, Glycine max
  unsure (1)..(459): unsure at all n locations
atgaggtgtgtacgaatatatgtgttgctttattagngaggaacttacggaattgtagaaacaagtgcatcttcagtgagaacagattgaccattgaagaatgatggatgatattttggttgctatttggtcttggactacagggtattcaccattttttactccctcttatatctatggatagctaaccccactacatgcttattggacctgaataatgctatggttcaacatatacatttgaatgtttttgtaacaacttatggtatgtacgaaactttgtatggtggggttattatttgtgttggaaagtttataactcatttatgaggtggggatattgtttacttcatgatcgccagagatgatatgagtcgtatagatatcatatgcggtaggaaccttatatcctctacctcttatataattcntctctctctctatatatatatatgataa

SEQ ID NO: 102533 - DNA, 418 bp, Glycine max
  unsure (1)..(418): unsure at all n locations
gcttggagtttccaagtgccaattcgnctttttcttttttccaaacttcttctggcttcaattcaataatgggctttccttctgtgtcagcaatttgggaaggtcccagcctttgatgacaactttccaggttctgctattcagtgatttgaggaagggccaccatccttgctttccaatattcatagattggtccatccaactttccttttgtgtcctccctttttctccatgttcatcagaatttatctccctagatctcactcaatgatttagagtgcctgctctgataccaattgaaattctgataccaatgccagatgtcgtacaggatgtcacgacatcacgcttcagaacatgcagattatatttgagagtatgaacagattaaacaggttaataacacaagagaattgtt

SEQ ID NO: 102534 - DNA, 413 bp, Glycine max
  unsure (1)..(413): unsure at all n locations
tgaagttagatatatcttactattataatacatctttatctatttgttaagtatattntctagttagntaatttgtgagatgttaaattatggacatgggatatggttgtgaataagtaagtggttaatacttgatgtgatattacttgtgttgtgagttgtgaattatacaataatccaactggtgtctatcttatgaagaaattatgcgcgaagtgttaaaagaaaagtgtagggttccaagttaagaacctaaagtgttaaattgtagcgcaatatgttaaacatgtttgaaacacaagtgagaagtcgtgggtattgtataattcatgtgcagtgtctgcgtgcaaaaagtggttttatgggttggactttgatcagaaaggtgaagccctaacagaatttttagagtc

SEQ ID NO: 102535 - DNA, 467 bp, Glycine max
  unsure (1)..(467): unsure at all n locations
tctacttatgtggcagggcgggtttccttcgcttcttgttttatctcgagctctgaccactgttcttccttcccgcgatgcttcttttcatgtccgcctgagtgggcttatagcctaaaccatacttcccacgatttccttgggtttttatcaagctagttatgccgccattgtctatgtctaaacccatcccgggttcataaccgttccgcaacataactcgggccatcattaccgccgcatcggacagacaaggtcgtccaaagagggagtccacggaggaaatgctgaccacctcaaaagactgtgaagcggnttctaacgattcttctgcggcttccacataatgcatggaggatgggcagcttaccaagatatctttctcgcctgacacgatgaccaagtgcccctgcactactgaattcagcttttggtggagtgtagaagcacaactcccactgagtgga

SEQ ID NO: 102536 - DNA, 320 bp, Glycine max
tttgggtggttgtgcttggggagtaattcttctgcttcgtggaaagctctttgtggctctcttgaaggagagtttgtcactgcgctttgtgatcgctggcatggcacccacccacaccatccactgctgagactattaaccccaaatatgtgcagtgggtttgttttggtttggttttggacgttgtgtgaatttctgggtacactgcctggggtgtgaatgtgatcagaaaagagagggttctgggtttcagtcctggagattccaggagtttgccacttgatggtgttggttactccggaaatgccactctccttttt

SEQ ID NO: 102537 - DNA, 413 bp, Glycine max
ggcataatattggagcctattaatattgtaatttttagcttgaacaaagtttgtctaagatgcatgcttaatgggcgggttatgggggtgtgagcttaaacaaactaacttacctgtgtactcaggtctattatgagctcgctcttttaattgagttatgctcaaactcatatttctaatattttccttcacaaaaaaatccaccaaattaatccaattaagtttaatttaatacttaaaagacataaacttgtatacaaaatgactatattttatttgatcaaacagtgaatcaatgatcactattatgcgatcaacttaattacactgatgaacaataaacttgacctattagtattaggtttaaatatctttttaatccttattatttaatatttcttattttgttcttg

SEQ ID NO: 102538 - DNA, 403 bp, Glycine max
  unsure (1)..(403): unsure at all n locations
tgcacgcttatctttgatgnaaaggttactatttttctagatgttgctggggnggntgaaaattttctgttgaacacaaaggtacaccatttttttttaatgaaaaaccttctttaaattctagttttatggtttaagaaataaacatgtattctattttttccctttatcttctttctttttctttatcacacatgttttctatgatatggatctggaaccactttgttttaatgttcatgaaaccaccttcacttgttgggaacaaatacaaatgggattttgtaaattgcatgctcaacaattttagttgagccacctctgttggcccagccaaaagcactacacatataagggtttattttcttatcgttacacgtgttggtatttaaacaccctttct

SEQ ID NO: 102539 - DNA, 152 bp, Glycine max
gatatctcaaatccttcttggaggtggcattatttgatgctgcagccaccctcttttataacaaccactcctagggatgatccccctccaacgcaaaatccttaaagatcgttcaagggccacacctcttctaaatctcctctcatgcttga

SEQ ID NO: 102540 - DNA, 409 bp, Glycine max
gcaagcttgttgttaaaaacccacttttttcttactactggacttttacttgcactttatggttttacataaaagctagctaaattctgtttgaaattataatcatacatgttctctatcaatgtttcattttgaacttaacttaggctaacattagttccctgtgttcgatactcgaattcatcccgtttaatttttaaatacttaacgatctaatgcgctttccggcacaccgaatttccctggaatatatttctacagatcttgcttagcgagctcgtctcgctaagcggaaatccactttcggtgcagagcgtgacattttgcgaggagcgccattcctctttagttgggaatagagctgagcggtttatttgaacaagttaagtaaaacttgaaacttataatt

SEQ ID NO: 102541 - DNA, 243 bp, Glycine max
actcttatgtatgatcgatgctgattatatatcaagcactcccaattgaacaatagaagctcatgagaaattcaaatggctataacgtttcatctgcatgttcgagtcacgccattaattatttagcccttcgaattgaacacgaaagctcttggcttatttcaacagccataacctttgactctaattgttgatggatgccacttatatatcgagacgctcaaaacttgaaaacagaagctc

SEQ ID NO: 102542 - DNA, 437 bp, Glycine max
  unsure (1)..(437): unsure at all n locations
catgcaagcttgctttacacttaacccccttaccttttccaactatcctgagaggctaggaaaaaagagccacctgtccctctaaaagagcccccatattctttatttccatcaaagaagaataaggagcactacttcaagtgtttattggagatattcaaggggttggagataaccatgccatttggggaagccttacagcagatgctgctctacaccaaattcatgaaggacatcttcaccaagaaggggaagtacattgacagtgaaagcattgtggtgggaggcaactgcaatgcagtgatataaaggaagcttgccgagaaattcaaagacccagggagcgtgacaatcccttgcaccatagggaatgagtcagtacggaagactctcattgtactangagcaagcatcaacttgatgcccttgtcatgtgt

SEQ ID NO: 102543 - DNA, 429 bp, Glycine max
  unsure (1)..(429): unsure at all n locations
gacctacagtaaacgtgaatacagtcactgngatatgctcaggcccgcataaagacaagtttcacagttatcttatggtggtagcgcgagacaagattcctattgtgcactctagctggaatgatgtacccgaaatgctaatgaacatgatatgggatgacatattggtaagtcccttttgtacgtcacttaatttttgttacatacattgatatctaagtaaacatgacgccaatacaaatgctttgtaggctaaatttgacatccccgaggctgatagtgcaaaaaaaaggtcatgtctactgtggctacacgatggaggcaatttaagtcatcgctgacaataaaatatgtgtatggtaatagtgaggaacaaccaaaagatgatcctttagttaaatacggtattgatgcaaaagatcgggctaa

SEQ ID NO: 102544 - DNA, 410 bp, Glycine max
gaccgtctcgatatattactgtgacttatcatacatccgagtaaaacgtgactgccgtttgaattggctcaaaggttcaaaattcacatttctagcatctcgttatattactggactcaatccgacatccgagtaaaaatttattgtctgttgaattggctcaaagggttaacattcatttttgagcgtctcgatatattatgggactcaatcagacatccgagtaaaaagttatagtcgtttacattggcacatacgatcaacattcaatttcgaccgtttcgtttattacggaactcaatcagacatccgagttaaaagttattgtcgtttgaattgtgtcagaggttcaacattcaatttcgagcgttttgatatatgacggaactcaatcatacattcagtaaaaa

SEQ ID NO: 102545 - DNA, 421 bp, Glycine max
  unsure (1)..(421): unsure at all n locations
agcttaacacctgtgaattatcctaatttaangnagataagagttaagcttggactcacttataagctgtaggtagggagcactctctttccaaatgcacacatgtgagtatgagagtacacaagtacttgcatgcattacatcacccttgacctggtcaacccatcaacatcactcacaacttccatctttcttagccattatatataattacctggatcttcattaaaggatttaaattgaaatatctaaataaaacaaaatcatttttctagggttataatcattaaattctgttgtaaacaagagatactggtaataaatgtgaggactngagttatgtgccctttacaaatagagcctagatgcaagcagagagcagagcaacgaactttgttgtaagtttatattttcccaaaca

SEQ ID NO: 102546 - DNA, 361 bp, Glycine max
acacataaaactcagcttagcacttctgtagggtttcagggctttccatcatttctgtataatctgccatatactcagccgatattaggcctcatgagctttctcatattcagcaacttactagatttagctagggtgacttcccttttagatacttgggtgttccccttttatcatctagattaaatgtatgccactatgctcccttgctttccaagattactggtctgattcacggatggagcaggaagtttttatcttatgcaggtaagctagagtttatcagagcagttattcaaggaattatgaatctctggatgggaatatttcctttgcctcaatcaattctggaccggatgaa

SEQ ID NO: 102547 - DNA, 422 bp, Glycine max
  unsure (1)..(422): unsure at all n locations
agcttcctcggtgctcattcctgcgaaggcaatcatttggaaaggtagttntaccagtgggacgctactcttaaagcaaaaatggcatataacctcttcccataaatacaaacatcaatgtaaatttagagcaagcttatgcgcatatttccttacaaacgttctcttgcacaagacattctattaaccganaaaaatgcacccatatacaatcaaggcagcttcgttacctagattatttacacgtacttccaaggtgtatttgttacttacatcacacacctccttggctaaattcacatacatgcatactcaaagcatgttggggtaccaaaaattgcacatgtgcacatcttggtatttcacaaacttcatgatgaatcttgactatctacacaataaggtgctacattttatgctct

SEQ ID NO: 102548 - DNA, 448 bp, Glycine max
  unsure (1)..(448): unsure at all n locations
ggtgaaatctcaggatggaccattgggtcaagcccagcttattttgggtgagatttatttgatagtatgatgaaaaattgcaagaatctattattccgaanattaaaaatataaattgctacttgtcccttttttcttggctaggtttgaatctgttctcaacactttggaagatgcggttaatgatgcccccaaagcaccagagtttcttggccgcattnttgccaaagctataacagagcatgtagtctctttgaaagagattgggcggttaatacatgagggtggagaggaaccggggagcctcttagaagctggacttgcagctgatgttcttggaagcaccttggaggtaataaaaatggagaagggtgatgctgttatgagtgagatctgcacgagctccaactttgcggtggagaccttccggccgctggaacctcttaca

SEQ ID NO: 102549 - DNA, 256 bp, Glycine max
  unsure (1)..(256): unsure at all n locations
acatcatttcaaaacatctaaagcattggtcttcacaggatttggacattttccatatgaagcttctccaaaaaaaaaataatatcgtctgtatattggagaatgttagcaggcactctattctttcccaccaaataagctttggaagcatgttttgcttgttgcttcancaaggattcataagcatttgaaatatcccacaccctttgttgccaagctatttgcaagtattttggtaaataatgtgattgaatat

SEQ ID NO: 102550 - DNA, 378 bp, Glycine max
tggagcaagactatacggaatgatgctgatgtgcacctgagtttctctttgaaaatgtgaatttggaaaccttctcatgaacactcttgacccaagagatataagcttttggaggaagactatggagatggaaatgggataaatgaatcaagggcatatattgacgggttaatggatcttgaatagagattcaatggattggagatagtgactaagaaatataaagatagcaaacattggtcactattgaacaaattattcttataaaccaaatctttagcattcgctaatatgttttacttatatcttatactagcacaagtacatgtatgaatgttcagtctacaaagaaaatatgacatgatcttggaattttta

SEQ ID NO: 102551 - DNA, 353 bp, Glycine max
  unsure (1)..(353): unsure at all n locations
accttttttattggacacatggggcactgggcccccaaatgccccaggtaaaaaaaataatttttcgggcgtctcgcgccggaaaatgcattcataatatgcattgcataagcatctcttcataacatcataatgaacatatccgtcctgcatttgttcgttatcatattccagcctcacattttgcatgagtcattgcatcatcatatgcgttcaacatactttttgtttgctcatacatgatccttgtattttcctctacaaaacanaaacaaaaaanaagggaagtacgaanantcacgctgcattcttagntgcatatattcggtaccatgagccaaccatgttgggat

SEQ ID NO: 102552 - DNA, 451 bp, Glycine max
  unsure (1)..(451): unsure at all n locations
gtgtanaagggtgaaacttcctggctttattcgttgaccacagagtggtacctggagatatgtcgcgggggtcaggagaccttggggacgtcatgtggggtgctattgcccacaaccaagcttgaccaatcccgacccaacccgggcataatcagtcagtgagaacctgtgatgtacctaagcaggtgagctcctggcagtcaacagataaaaggaacaaagaccacataacaaggaggcttgtgtggtggctggccagctgtgaattttgattgatatatgggatatggcctctggtaatcgattaccaagggtgggtaatcgattacaaggcttaaaaatgaagacaggaggctaagatggtctctggtaatctgataccaaggggtgtaatcgattaccaggcttgaaaacgaggtcaggaagctaggagagcttctggtaatcaatt

SEQ ID NO: 102553 - DNA, 420 bp, Glycine max
  unsure (1)..(420): unsure at all n locations
agcttgtatgtccttgataatgaaattaatcttatgctgtcaacattacttcacatgaagaaagaaaattcaaaaacaccaatagttattaaccattattaaattaagaataatgtatttttaagtaatcatggaaggggtagtaaaataagtggcgcatcctcccctttgtagcttttaaagactaatttttagtaattgtgaaagtaatagaaaagtattaaaaatgctaagataattagaaacgtattttctaactgtagcagagtaacaggtaagttagaaattttactaagcatgatttgaagtatcccatattatagttggaatttggtttacccttggtctaacttcntcatttgctcttaagaaaagtggaaagttttactaagaattgttattgatgcactcccaccatga

SEQ ID NO: 102554 - DNA, 378 bp, Glycine max
  unsure (1)..(378): unsure at all n locations
ctaagcttctcgcatccttcanacccagctggaaatggttgtcaagaatcatcttagtatgtgcaaattaatttacaaatactacaatacattcgcatgataaaaatgatgcaagtggacatacttcagcaagtgttgtgggttcaagcccactcaatggcctacgttctgaaaatgatggtgttctgtgcatgaaatattggctaatcctcgatggaaaatatcatgattgccatgagaccactaaactatacaaaactggagcaaaattatttgaagatgataaatacgtttataacaagtaattcaaaagaaaattgtgaaactatgaataacctaatataagctgcacttcgattgctgaggatgaatggatca

SEQ ID NO: 102555 - DNA, 283 bp, Glycine max
tactagatttttattatacactttcttatatcactcatgcaagataaatcaaatgaaaggaagaaatgggtgctccaaaaccgttttaagtactactgaccatatctgtatcagaccacaagttctattaaggaccttttcagtctcttttgatacatgccttaaacaaattagctagggatttgtcatgaacaaaactgactttgatttttgcattgcattttttccagttacattactgagaactgaggcgacaaataagaagcctcttttttttgaacga

SEQ ID NO: 102556 - DNA, 443 bp, Glycine max
  unsure (1)..(443): unsure at all n locations
tcgtcaataagagtgataagcttccaaaaaatgtcgatgccaagtgtatactatttttctttcgtgtttcaattgtgcataacttgtgacttcttcacagatagggcatgcacaatggcccttaacactgtatccacccaaattcccgtatcttggaaagtcattagtggtacaaaatagcattgcacgcaactngaatgtctcacttcgatacccatcaaacacagtaaccccttcatcccataactttgtcaagtcttcaatcgagggactgagataaacatcaatgttattgtctgattgtcttgggcccgatatcctcatagacaacatcatgtattttcgcttcatgcacaaccaacgaggtaagttgtcaattattagcanaacaggccacaaacggtactaagtgcttaaactatcatagggattcattccatcac

SEQ ID NO: 102557 - DNA, 282 bp, Glycine max
gagagcactggaaccgaggattttttttccgccacaaaggggggagaaaatacacatccccccagcggataacaaattgaaaaacaaagtgcatctggccaccaggtactctggaaactgaaccccccccattttagaccggctaccctgaagtaaatagaagccagaggaggaagacacggtaaaccaaacactgctctactaaccaaactgtcgcgaaacaacaacattgtgtcaaaccggacaaatttccaaccatcaagacccccccacaagaaagcc

SEQ ID NO: 102558 - DNA, 445 bp, Glycine max
  unsure (1)..(445): unsure at all n locations
ctgcagcttaagaaaagaggcctattcttatttttatttccagaagggaattctatcaatagacctccaatctttaatggagagggttaccactactggaaaacccgaatgcaaattnttatcgaggcaatagatctaaatatctgggaagccatagaaataaggccttatatacccaccacagtagaaagagtttcaatagatggtagttcatcaagtgaaagcataaccatagaaaaacctaaagatagatggtctgaagaggatagaaaacgagtacaatacaacttaaaagccaaaaacataataacatctgccctaggaatggatgaatatttcagggtttcaaattgtaagagtgctaaggaaatgtggaacactcttcgattaacacatgaaggaactacagatgttaaagatctaggataatgcactactcatgagt

SEQ ID NO: 102559 - DNA, 421 bp, Glycine max
  unsure (1)..(421): unsure at all n locations
ctatgcagctctcttggcagtggagaatctagtatgtttcctctacatgcaatccctcaaaaccacactattggccccacactattggcgagaatctattggtactcgccacgaggcacccttacatggtggcaatcgacatagtgtattcgaattcatccaacaacaacgaacctgtcacccctactacaatctgcacataccctactggcatttttgtagcactgccctaaaatggagtcatagtcaaacctctctagctataggccctcaagcgattgccccgtcaggcattgcagcaccatgcatgagggcaatttggtagttttgagcgagggagagggagaatctgtaatcgcgtcgttgaggtcctaaacatcgttggaggcacgtgagatgaangactatacggagtctatgt

SEQ ID NO: 102560 - DNA, 425 bp, Glycine max
agcttgtactttctttagacatgattttatttttatttacgacttgtaggattcaatttgggcaaaattggatgaacgctaccatggatttccaaaatccgcactttatgccgaattttgctgtcaaatatgtgcagcagaattttggactgtgcagaaaatgcttgtgtatggcttggtgtggaaagggtattacatattgggttctggacatttgctatcagatcccaacggttaaaatgtagacttatgtactagagacttccaataaaattttcgagtcgatccaacgatgaacgaattggaacaaaggaaatgttactggggtctttaagtaaggaaagctgtgatattgaatgtgtttgggcagagtttctgctctgcctgtttcttggtgtgtagtcatgtgcttgatgttaattact

SEQ ID NO: 102561 - DNA, 480 bp, Glycine max
  unsure (1)..(480): unsure at all n locations
tttcacatcgacaagaatgtcaaggtcatttgcatattcttaattggtcaaaaaaatgcttgggagtatgtcatggatgcctacggtagtctggttgattgtccttctgaacagcagttcgctgagtgccttcagaagtttcaaatggcttgttcaccttggctaatgttcgttgactatgttaacgaaacctagataatcccacacaagaaaaatnttattacagcctgaatgaataatgtgatgcacttaggcaacacaacaacaaacgggtattaaaatgttacaatttttctagtaatgtttattaattcatggaatttaattgtagtatatttttattntttttgtgtatttcaaatgtagggttgaatctgctcattacgctntaaaaagagtattacataatagccttggagacctgtgtagtggttgtgatgccatgaacaacatgaacacgcagcagcacactcaaattat

SEQ ID NO: 102562 - DNA, 407 bp, Glycine max
  unsure (1)..(407): unsure at all n locations
agcttgccacccagctcgcccatttttctttgttgcttcctccagaaacaacagccttctggaggaatcttctggagggaccaaccgggtctggatgctatatgcgccccctttattactaaaagcacccccctttctatttttttgggaattctttctccgtaacgttacgaaacttcatgaatattcgaccgaagcttattttcctttcgtaaggttatgaatccttatggattatgtatttactcttttttagctttcgaagaagttacggaaacttactgattgcgcaaaaacacctctttttgatntccgccacattacggaatttcacggattgtgcaagcctgcttccttttgtattttgacatgcctcgggacttcattcattgtgaactaaagatgcc

SEQ ID NO: 102563 - DNA, 494 bp, Glycine max
gcttcttataagctgaaccattgtatcaataaacacaattcgtgttatattcagaacattagagttcatctcttttatcttagtgagagtgattctcctaaattcttgagtgattcaagaacaccctggctgtatcaaaggactttcacaaccttcgtgtgttgccctcgctggaaagagagattctttcctttctatcatctacaccccttgttctttcaaaccacaattccacaatatccacctctgcccaaaattatctcgtgaccataactcccatttcacacactcaaattaagtgattcttgagcctaaattgaatttcaaaacgagacctttcacctcgttttggaatcaccatcattggagccctgtagcttccgttattgccatttctatatttctgtccagccaccacttaacctacgttttaccatcccattcattcattttatgcaagaaaccaccttattaagacccacgagaataaccac

SEQ ID NO: 102564 - DNA, 437 bp, Glycine max
  unsure (1)..(437): unsure at all n locations
gtggtatcagagcacatgagcttcaagtttgttcttcttatacctccattaattgtgtgtgctttaccttctcttacattgatgcttcttcaattttctccatatatctcctcacatgtcttgtgctaaatgttgttaacatgattctttagaaattccgccgattaaatcgctatagaagctagacttaattttctatggttcaaaattcttgttcttgatcttgaaccatgaatcgtgatgacgttatgttccattgagttttgccttgttatattttgtggctgaaacctacaccataaaattcttaaaaaaatattatagtagaagagaacctcataaatctatagtgacttcgtcacctttgtattttgtcatacaagtcatgtctagtcatgaaacccgtcacataagagttcctatgtcgngctgaattt

SEQ ID NO: 102565 - DNA, 451 bp, Glycine max
  unsure (1)..(451): unsure at all n locations
gaccctaagcacctgagctgcagctttccttttttatttattctaccctttcaggcattggatagaagactccaagaagattgtgccaaagatgcaagagaaggccctagnggtctcataagccttatggtagatttcgggcccatgggctatagatgagcccacttatcgttgtacatattagactaagaagtcattatatttggtccttgatttagggctccatattataggtagggtaccctacaaatattggattcttcagcccttgtattttagggcaccgagactagtctttgtattagcgggtagtttgtaatttcacatgcactaagtgaatatttgatgtgtgtggttggaaataaatctaattggattggtgcatattatcctctctatattattgttcctgtctatttcttcctccataactctctgtcccatgtctcct

SEQ ID NO: 102566 - DNA, 461 bp, Glycine max
ctcagcttactatttctaaccattaatgttgattgcttatgtctgtatgttcaacggaatgagtattagacaagtaggttagaatctacgaccatgcgagagctggggtagaatacattagtgagttgaggatgagcaagagagatgagtagagaattgtgaagttataatggatcgagcaaattccaagttcaaacctaaacattcattcataatgatcgacgtcaccatcaaagactattatttctatctttacttaattattttatcatcatttaatttctatttcaatttatgttatgttatttatttcgtgacaatcacaaaacatatatgcacatggcttaggtaggctcaacatggatggaccaatcactataataatgagtaagagacttcaagaaaggctcggcgagaggctaaattctctcatgcgggagagataagaacaagcagagctc

SEQ ID NO: 102567 - DNA, 222 bp, Glycine max
  unsure (1)..(222): unsure at all n locations
cagcttctagcctattggactttatcttgaatatattncttagatagctcctttaagactattatcctctttctttgttttgaagcctcattaccagcctctagtgaataacgaagatatcaccttcaccttaaggaattttggagctttggaattgctttgggaaataagctgcgaataagtgtgggggggggggggggttttttccctatttttcatatc

SEQ ID NO: 102568 - DNA, 250 bp, Glycine max
taactctgttgaatggctttctcgaccagacatgaagagcgataaatagcatgcttcgttttgcactttgaatcaatcattcccaagtctttctaacaatctcttaccatcctttacaagccttgaatctcttcgaacttcttcttctttgtaccaaaagttatctgaagttttctggttttccaaaccttgaaaacttgcgctatacatccttttcaatctctcctccctttgccaaaagaattccgca

SEQ ID NO: 102569 - DNA, 438 bp, Glycine max
  unsure (1)..(438): unsure at all n locations
gcaagcttagaatttcctttatacctgggttaacttttcaattattacacacggtctataatacgataaaccaagggttaatatataatgtgccctacttctaaatggaatggtaaattaagtgggagtcggaccaatatattaataagtacgtcctttcagaaatacagatcatacacaatgaccataacaattttcatgcagcatgcaaggtttctaatcagacaacaccataaaaaaaaagaaaaattatttgtgacacaacaccatcagaaaacaantccatgtcttttgatgacttatttatcgggcttcanaaaaaaagaaaaaattacatatatggtacttactgggatgcaaacacnaaatgaataatgatgaagttgctaaaaatgatacatattagttcttaaattttataaacaaattaacctttat

SEQ ID NO: 102570 - DNA, 362 bp, Glycine max
  unsure (1)..(362): unsure at all n locations
gatcataantaattaaattggttacaaatgttggttgctttagcagcttttccattatgattacattatattttggctcttcttgtccctaaagttgaaatatcacgacactggaagagagaaagaatacttgccacaagttggtcagtggaatatgatgaacaaggtcagctaagaatgaacaaataatatattagatgtaattattttaatgaaagaaaataaaagggaaaattacttggttccaacttactggaattcctgtaattttaatgcagaaagtataaatggaagtactgtaagatattgggcgtgtatcaacttctctctgaagggacaagagagtacagctcgtggatttt

SEQ ID NO: 102571 - DNA, 439 bp, Glycine max
caccgatatagcaagatcattatctctatctccaagatgaaactggactggctcattccagtgagagaagttaagcccattaaacattaacacaaatgatacataagaattcagtgaattgggaacaggtatagcatactaaaattcacataagcattgtgcgatataaaacacatgtcatacatataattcattcagataacaaacaatgtatattgatgctctcctttgggtgatacaccaactgacaacatacaaacatgatgatactaataaaactcttaacattatttgacaattaaatatgcaccaattagtagtacctactacctttgggtatataaataaactaatggtacacataaattacctacaattatattcattgattatatgaacaactaatcaacctttggacgatctatagatgccttataac

SEQ ID NO: 102572 - DNA, 393 bp, Glycine max
tcatctggccatgaaaaaaaatctgcacctgtcgccagactctgtggtttatgctcctctggcgaccaccacacagaactttggccttctgtgcaacaatctgaagccattgaacaacctgaagcttatgctgcaaacatctacaacagacctcctcaacctcaatagaaaaatcagccacaacagaacacttatgacctctccagcaacaggtacaaccccgggtagaggaatcatcccaaccttagatgggtgagtccttcacaatagcaacaacaacaacagccttattttataatgctgctggcccaagcagaccatacgttcctccaccaatccaacaacaacaatagtcacagacccagaaacaacaaacagttgaggctcctccgc

SEQ ID NO: 102573 - DNA, 374 bp, Glycine max
  unsure (1)..(374): unsure at all n locations
ctctgtccaaaactcaaaccaaaattatagctggttctcacttaacgaccccagtaacattcccttcgttccaattcgctaaccgctggatcgactcgaaaagtttactggaagtctctagtacataagcctacattttgaccgntgggatctgctagcacacatacaaaactcattctgcagtactctttccacaaccagcaaaacatagcactgttctgcacttatgcaaaattctgctgcacaatctcacagcaaaattctgcatatagtgcagatttcgaagatcacactttccctcatccaatcttgcccaactcaaatcctacaagttcccacatatgtatcaatcgtgtgtaaaccaacgtcaagct

SEQ ID NO: 102574 - DNA, 411 bp, Glycine max
  unsure (1)..(411): unsure at all n locations
ctgcatgcacccattctgaccttttatttttatcagcactacacaaatagtaagcatttttgatggcaattgacaattaatcatgggagaaaacatggacaccattggagattggagacaaataaatgcttgcttctagtattgacaagttatgaagctgataaaggggccaagttcgagtctgaatgaaataaatcagttgcagcatgtgagataagagttgatgactcattatcatgctacaatggtcaggagacaaaaaacctatataatatattgtatagacatgtcaacctttattatatatgtccccgaagcttatgcaatgacacatgcatattttgtctaaaagaattacagaacttgtatgagacaaagcactgtaanaccctgatattgtgggtacttaat

SEQ ID NO: 102575 - DNA, 342 bp, Glycine max
  unsure (1)..(342): unsure at all n locations
acccatgagataacatccgtcaagctagtgactgttttattatttctcgctgggaggcaacccggttctttttctttattntcattaatcattacatatagctaggtttcaactctgttgtgaatgctagagtaagtcatcaacatgctttgcatgatacatgaagttgttgaagcttcttcgaagctgtggatgatgaatcacttaaaaagtttctcagtcatccactcgcttagcgcgccttgtgtgctgagcgaatcatcatgcatgcgttaagcgagtaaccacccatgctaagcacaacaacccttaccaattggctgaaagggcctcattaagcga

SEQ ID NO: 102576 - DNA, 369 bp, Glycine max
  unsure (1)..(369): unsure at all n locations
ctcgcccaggcgagctattgtgctttctccagaatgtttcgtcttctggagaactttctggaaggcccaagtgggcctgtgtgctatttgcacccccttgtttactaaatacacccccttgcttttntttgctgattctttttccggaacgttacgaaaacttacgaattacgtaacaatacttgttttctttccgtaatgttacggaaccttatggattacgtaatcatcccttttttgtcttccgaaatgttacggaaatttacggattacgcactaacactttcttttgacttccgacatgtcacggaacttcacggaatgtgcaacaatgcttttttttgactttcngcatgtcacggaacttca

SEQ ID NO: 102577 - DNA, 247 bp, Glycine max
tcctcagcttttattttagaatgagataatccgtgccacctcatggactcctctaggacaatagcatcattcttgactgaatgtgggattaaaccatctttaatcaattctacctcacagggcatatctcaagctcacatggagatcatatactcttcatgtgtagtccctaaaaatgagaagagtgtcaaattgatggagacgctgccacattttgattttccaactatacactttcatagtgctg

SEQ ID NO: 102578 - DNA, 382 bp, Glycine max
aaaagctctctttatattctttacaagaatgcaaagctctcaaaacacctaaaacaccctgagagaaaaaaagattaagtggattatatatctattagcaagacaattaagagttagttagtgagcaatcaaaccacaaatcttttgattttgataaaaccagcggcttggtaggaaaaagaatatggcttattttaagcttggtgtagagctcgaaatgtaaagccagaagtgacagcgacataatacttataacctttgaaagttaatggaacttgatggtttaacaagaactggatgtagtcttgaggggtgagacgaactaatataaactctttgtgtatgttattctcttactctattacgtctacactaccttggg

SEQ ID NO: 102579 - DNA, 360 bp, Glycine max
gatcatttatatatgaaatatctcatgcttatctcagatataactaaatctacactggtgtatgtggatcaattacaaaaactatgctttctaacgtgtgtgaatgcataaaatctcccaccatgtgtaatgaattttatcaccatgaacggctgatttgatgccattaacgttattgttacacaccagattataggaccgcaactccttgggtcgtgtaatcctttgaggccgcgaagccaagcgcatgtaacatacatatagatctctaataatacataattttgtccatcgacattgttgagaggatcatgtacgacccctatgatcggcttcttggttaggtactacacaaatcat

SEQ ID NO: 102580 - DNA, 430 bp, Glycine max
  unsure (1)..(430): unsure at all n locations
agctttaatcattnnttccacgagtaatgatttatagagnatctaacaataaaaccattcatccaacacctacttacatgatataaaatatattattatttaataaaaaaagaataaataaaattaaattttccaaggaaattggagatttggcttatttagggtagaacatttctctttctccttagtgcatccaaagtattcacttcctcttttctaggcatttttgtctccacttatggtatggatttccactgttcatttacttgcttgatttctaacatggtgaaggattaaagagcttcctttataggtttgacttttggttgtttcttggttatcattcattttctctttnggtggtgtcattctggctcggggtgttaattgggaagagtcttatgtttgtgacttgagtggatgcatgtgt

SEQ ID NO: 102581 - DNA, 450 bp, Glycine max
  unsure (1)..(450): unsure at all n locations
acaaggcaacaaagacttaanntatgatttttgaatgactnttaccacaccttttcattggtgttatgccttagtttctccaattccccaagcagcagaaagctactagctttntaaaaatgtaatatcgtactctccaagttttcatatgcttgaaaanatgcaacattttctaaatttaaccgaacagggaagaataactttcttagaagacaagtatactaagaatgtaatatcgtactccaagttttcatatgcttgaaaaattgtaacatctttctaaatttaactgaacggtgaagaataactntcttagaaggcaagtatacgctaaacgattgtattataagagaaattctagacagtatgaatgcaaattagatagaanataatcacaggattcatggtaacacatgaatcattccattttttaagatgtccaacactatt

SEQ ID NO: 102582 - DNA, 432 bp, Glycine max
  unsure (1)..(432): unsure at all n locations
agcttgtaggattatggngtacccatcacaattgttactaggnggnggncgggcgatggtgcacaacaaggtttccacattcacaaatcgcgcataaacccaccatcccctggtgcccacctccaactgagctcacgtactcccacatagtccatatcctcgtttctctcaacaccgggtccccatcaatcctcccaagcttccccaacatccaggtaatacaacattcaaacagcacaaactatcacagccaagaaaacagggcaaaggcagaaaactctgcccaaaacaccaaccaaaatcacagcttttctcacttaaagaccccagtaacaattccttcgttccagtttgttaaccgttggatcgactcgaaaaatttactggaagtctttagtacataaacctacattntgaccggtgggatctact

SEQ ID NO: 102583 - DNA, 438 bp, Glycine max
agcttggagaggatgcttcaatgtgttatattttatatggagagaaagagagaggggggagcacaaaattgagggaagaaaaagagagagaagctgaactttgagttatgtctcacaagactctctttcatcaaagttaccacaagtgttacacatgcttctatatatagactagggagcttccttgagaagcgttcttgagaaaacttccttgagaagcttctttgagaaaactttcttgagaagctagagcttagctacacacacccctttcataactaagctcacctccttgagaagcttccttaagaagaatcttaatgaagctagagcttagcgacacatacctctttaatagctaagctcaccttcttgagatgagaagctagagcttacctacacaccccctatatagctaagctcaccccatggcatgag

SEQ ID NO: 102584 - DNA, 462 bp, Glycine max
  unsure (1)..(462): unsure at all n locations
cagagacaacaatggtggtgaagaaaatgaatattattattgttgaagaaagagagangtgtgctagaagtttctggagaaagagagacaagactcggcttttaaaatgggttgtcttttcttnttcattttctttttaaaagcaattccacatgtcattttttaattggagcacaaagggcccacctttacctttgacttgaccacatactcagccataaaagaagaaaaaaattggacctttttggatgctgaaatcctgcctcggtttgtgtgccacctccctggttccaattcttcgcgtttctttgcacccatcgagggccgttttcaaaggtaggcaatatgtatatcataatgctcataatgagaccctgagcgtnggtcagaggttggttttgtttaattataagttgcacgcacaatgataattcttagactaattaattgtgaattaatcta

SEQ ID NO: 102585 - DNA, 321 bp, Glycine max
  unsure (1)..(321): unsure at all n locations
aaaagccacgtgagggagagagaaagctgtcttgaaaaaaaaaatgacggctgaatgaaaaaagagaaaggctttttggttttaaataaaaggttttcctctttttctaatattttattcaagctctgccacatgtccctatttgattggagcanaaggggcccacttttctctttttgactgtgacccatactcagtcacaaaagtgagaaaaatctgacctttgaaacgctaaaatcctgcctcggtttgcgtgccatttctctggttccagtttctcgcgtttctctgcgtccgtcggggccagttttcgaaagcaag

SEQ ID NO: 102586 - DNA, 485 bp, Glycine max
  unsure (1)..(485): unsure at all n locations
ctgtaccttgctcagacaaagaatgtcttgtactaatctatcgtcttcgacgcacaacatcagaggctgatttggttgaaaaatgtgaagaaataggaggccatcttaggcttttaatgtcaggtccatatgcccagccttccttgtcaacatattgagacttatctatggaccaacccgaagcccatttccacccatgaggaagtggaggctcaaagaaatcctttanaatggtacaagtgaatgaggaaaacaatcataatgatggaatcttaagagagttaacaagtgataaaacagaaaatttataaatataccaaccttagatgagtatgagaagtcccttgtgctccaatgtccaggattatcattgtgcacagctggccaattgttaccccaaccagatgatggctgataatactgattatgaaagacttctgctgttacagtgttagaactgtnntactccaagcaggaatcacaac

SEQ ID NO: 102587 - DNA, 332 bp, Glycine max
  unsure (1)..(332): unsure at all n locations
cccaatctaatctcacttccacactcacaaggcccactccattgtntatttttaaaaaacccaagctggggccttggcttattgaatggactaatgcctaaagctgggcctcttcctataaattataattaatctggtgctttacctaatacccgacctggtgaccagactcggccttatttttactctcatgatttgggaataaaaaaagaataacctcttcttttttatcgcatcaaaatctagtgctttatcaattattaaaagttaatgctatgcatgaaataaaaatatttttttctatcacatcttctttctttacattgtagtct

SEQ ID NO: 102588 - DNA, 410 bp, Glycine max
  unsure (1)..(410): unsure at all n locations
agcttatcgngacatctgaactcgatggatggtcagtcttcatgtgggggtaactgaaacatggatgctagggtggcaagcaccttagccatctgatttttctctctaagaatgggggggaaaaaaacctcattaagaacttcatcagtttcttgatgtaggcctgattagggatcaacttgtgatccctaggtttccatttctcccctcagctggcgaattaccaaggctgagtctcttgacactttaagcaatttgacattaaagtcaattgccacttggattccgagggcacatgcctcatactcagccatattattcgtgcaatcgaagcccaatcgggccgtgaagggaatgcattggtgtnttgcactccgagatactacttgtttgtgtggatgcacaatcta

SEQ ID NO: 102589 - DNA, 370 bp, Glycine max
  unsure (1)..(370): unsure at all n locations
tctacacctcatttcgcaatgtaatttttcatccacaggggaaatcatcattgtcaaagattatcagaccaatgctcgtgactggttatgtaaaagtgcagataaactgaacataggtgaataaaaaaacacaggcccatcttatatcatgtgtcgtcactacattgcaggatcctgatccttgaatanggtttgaagatcggtgaccaacctcaattgagtacattgagcctatccaaattggcagggacttcaatgtactaatattaacaagcaaatagaggattcaatagtgccgacttgtttgcttggagcgcatccaacatngccaggataggtcccaattatatttgccacaaacttgctattt

SEQ ID NO: 102590 - DNA, 405 bp, Glycine max
  unsure (1)..(405): unsure at all n locations
acatgctctattntcatctcccactccaagtaggccttcggatcattcttttccttaaagggaggaatgttgaggtcaataccatctattccggtttgtgtaagaataccatcattccctcttctcctccttttttctttattatgatctctttttctccatgtgatccaacctctcatggagcgcatcatctcgtgtgttcattaacctctccaatatgtagcatcaaagcttgcatttggaattgcgaaagcccccctccctcattaggaattgtgcccgccatctccaacaaacaaatcaaacgtaacatgactattatagtttgtgtttgaatcctcacccactcaagtgattccacaattatggcttttctctaatgaaacacttcttgctcttaccact

SEQ ID NO: 102591 - DNA, 382 bp, Glycine max
agtcttacataagagttttgagtattttagaactaggcttacgaagataactaagcctctaataaggcttatttacatcaagctcatgccgattacacatatcaagaaaaattatgaattttcataaattcacactgaaggtgtgcgctaagccccggcgctaagccagacaacttgtgctaagtccagtttctcctcaggttggaattgggctaagcagatagctcacgctaagtccgacagcttgtgctaagccccaacgctaagctaaacaacttgcgctaagcccaagcgtgctattcaacaatcttcaacctgctccaattcagctccttgtgaatttatccttacatgcctttgatgagatgatcatccttgatcc

SEQ ID NO: 102592 - DNA, 333 bp, Glycine max
ctctacgaactacaaagctaacgtatatttctcctggccctactcctaacttaatgggctaccaacctccctcacgactaccccccatttggatggtattttcatatcctccaagttgcggcgtggctttttactgacggccttgtccaatttttgctgcacctctttgtaactgcacccctcaattcctccgttcaagaacaaatccccttgaccacacggtttgaccagtatagcaaattaagcatccacgtccaagattgattaaaaccaataaatttaaatgtcattatgtttaaacagcacaatatgccctcaaatactacctgataa

SEQ ID NO: 102593 - DNA, 310 bp, Glycine max
ttttgttctacactttggtttcaacatttataagggtggaactttgaagtttttgcattgtaacttacgggggcatgcccaaaaataacattctcctccttaggctctatcacgacacaaagaacaatttcattctccctaatttaaaatagaaatatttctttatcaattatgtttttaaagataaaatgtgttagaataatttctggaaaactgcaagcatccattattttattttgtacttgaagaatggactcttggcaaatcaaacatatatccacaataccaattaaccaatataaaaagttat

SEQ ID NO: 102594 - DNA, 305 bp, Glycine max
ctctattatagtcactaagttcttcacttacgctcttgcaggagtcatgactactatatgaggcatgtctttctttatctaactcgtttaataatattcttctttcgtcttcccttatttgtttcctcttatcttgatttatttttaccctctcttttcctttttcttctctttctagtttttttctcataactggagggaactcaactcatctaagaatctagataaagggtccttatgcctagtaccctcaccattaacactatatgaatgatgaatgttggttcctaagttgtggttctttc

SEQ ID NO: 102595 - DNA, 351 bp, Glycine max
  unsure (1)..(351): unsure at all n locations
ttttttttncattcccaccgaggcattgatccaaccaaaccggccctggtcgaaacaagtggtcgttaaccttacacataaataacccatacaagggtggtaataattatctcgggcacttaattttttaaataatcccctgcactctcttcatattttctttccaaaacccacttttacatatgattaagaaagacccccaggagtgtattccatgctctatcatccaacacacattttggatattaatcaagataaagctatgacttactatggaccctctaagcttaaggaggattttgcatactaggtgactctaatctattcttgtgaattcataggtcttgttta

SEQ ID NO: 102596 - DNA, 427 bp, Glycine max
  unsure (1)..(427): unsure at all n locations
agcttgtgcaaatcanatcactcctacatnttatctctagcatgcattggatgttggnctcgtcctttgtcacgggaaaccggaagggccgtatcaccttcttaattgtacacatggggcactgcgcccccaaatgcgcgagtaaaaagagataattttccgggctctcgtgtccgtaaaatgcattcatatcatgcatcgcataagcatctcttcataacatcataatggacatatcctgcatttgtccgttatcatattccaacctcacattttgcatgagtcatggcatcatcatgcatatgcgttcaacaaactttttgatctgcaaaattgcataccatttggtttcatggttgctcatccttgcgntttcctctacaaaacaaaaacaaaaaaggggggaagcgtgaaacttacactacat

SEQ ID NO: 102597 - DNA, 136 bp, Glycine max
ctgtttatccactttgaagtattttttttttttttgtcccttactacggagatatttttcaatgttttcgccgctacgttaaaattccaataaatggtcgtttctcggagcgacacgttaacttagggggcgattt

SEQ ID NO: 102598 - DNA, 401 bp, Glycine max
  unsure (1)..(401): unsure at all n locations
agctgcttgtggngcttctatggaggctgtatctttaagcttcaatgaggtcctttaatggtgattttccaccatgaagatgcagcagaagacaaaggagataatgtgagaggaggcgccattcactatggaataagccatggaagaaggagcttcaccaccaagatgagccttggataaaaagcttggagagggtgctttaatggaggaaaagaaagagggagagaaagagagaggggggagcacgaaattgaagggaaaaaaagggagagaagttgaactttgagttgtgtctcacaagactctcacatgcttctattaatagactaggtagcttccttgagaagctttcttgaaaaacttccttgagaagctttcttgagaaaactctcttgagaaac

SEQ ID NO: 102599 - DNA, 472 bp, Glycine max
tacccatcacatgtggtactatgttttgtcgggcgatggtgcacaacaagttttccatgtggcgtccctaaattaatgactggtttaatagtaataatttaaataacaaaaaccatgcgcaattttttttctcttcgttttctttttcatttctttctcttttcaccataactaaggttataagggaaatcctcactataaagtcctgaatggccagttcacaactttactcggagtcatttctttcttaccgctcataattctctaaattattttgctgtttcaaaaggaagaatataccagccattactttatgtcgtcacgtgaaaataaaaggataaagtacagtcggtaaattcttttacaaataaagttgctaatgctctcttttcaataacaagatcgatcataaatgcattcatcatttaaagctgtccaaaatatgggaagtttacaaaatatatagtgtcat

SEQ ID NO: 102600 - DNA, 406 bp, Glycine max
agcttgacaatgatcttgtcatatatacatatcattatagacagcaactcaatcagtactaaattggataaagatgagtgatttccaccttcctaagaaagatatattttttcataaatttcctcccgtagaatgtgttaattttgcataacatgaaatttgctaaaatttaaaggggtagatttctttttattaacatgaagtattcattttgccgatgactacgcctgaaaatctaactaatcacctttattgagattcactttttccagctacatttttttcattaagaaggttcgaatctgaaactctggttaaagaaacttaattcaatattacttggggagttgttggtaattgcagtggtagctttatatttacgtgtagtatggtatagatcaagtgt

SEQ ID NO: 102601 - DNA, 470 bp, Glycine max
  unsure (1)..(470): unsure at all n locations
cgtgaggcatcatgggcaagtaaatgaatatatgttgttatgatagaataccctgaattggtaaagaaaaaatcataaactcatacattctatgcagacaaggcaagtcagttcctaacactattttattttgattttatcttttatctaaaacttttatctttcttatctgttatcttttcctttatcttctaattttatcttttcttatcttctatctttttctatttgtttttagtttaaatatattatctcttgcttgtaaattgggtttgcattattctaagtacaaacaaagtccctgtggattcaacactcggacttccgagaactttactacttgtgacgatttggtacacttgccagtgagttaacatgtttttggcgcccgtgccggngactttgttttcgtacttgattaattcatattccaatttgtaagcattagtttcactttcaatnnttatttt

SEQ ID NO: 102602 - DNA, 406 bp, Glycine max
  unsure (1)..(406): unsure at all n locations
agcttcctcggggccattcctgcttagttttctattggatatatttttttaccacaaaatgctacccttaaaacaaaaatggcatacaacctcctccaataaataccaacatcaatgtaaatttagagcaagcttatgcgcatacttttttactaacgtcacttgccaagacattcttataactaagataaatgcacccatatacaatcaggcaccttcgtaccaaaattatttacatgtacttccaaggtgtatttgttacctacatcacatgcacttccttggctaaatttacatacatgcatactcaaagcattnggggtaccaaatattgcacatgtgcacattccggtatttctaatatttacccatatacacactttgtgatgaatcttggctatctaca

SEQ ID NO: 102603 - DNA, 373 bp, Glycine max
  unsure (1)..(373): unsure at all n locations
ttttgcgtaccttaatatgatgtttttatacttcactngaaaacccttggaactgagatgttgtcaaagttaccttttctataaaatgatggtggtntcgtgaccttcattgaaccccacgcacattggcgtaatcagaatttcaaaatgaccgctccttgagtaaaaaccaaaaacaccaattctctcccttttaaaactgaatgggtatttgacccaaatgttaatatcaaccttgcccttgagatatatatgttagtgcttagctttactgagtgtataaaagataggctaaatattttgttatacataagcacttagacaatgaaggagagctggagttactgcacatgatgtctaacattatgtcaag

SEQ ID NO: 102604 - DNA, 307 bp, Glycine max
tccctatggaagcacgaaacattttgttggataggccatggaaatttgacaagaaagcattccacaatggtctcaccaatgaaataaacttcacccatggaagcaaaaagttcaaacttgttcccttgacaccttcacaagtggctggggtgatcaagtacaaataaaactcaaatgggataaggaaaagaataaaaaaagaaaagaagaacaacctttaatggttaaggagaagtgtaaggaggtaagtgtctcctccaagaggttagctaagaaggagagtcatcttgcaataaacacaaacatt

SEQ ID NO: 102605 - DNA, 477 bp, Glycine max
  unsure (1)..(477): unsure at all n locations
ctaagcttaaacctctacnaagagaagacaagttttattgtatgtctcataactctaagaggtgagttcaaatccttacatatgaaacagttcgagtccatttcagattatttttcaagaactctttctttctcaaatcaactaaaaagaaatggtgagaagttagaagatgttagaattatggagaacatactacactcattagatcccaaatttggcacattgttgtgacaatcgaggaaaccaaagatctagaaatcatgacggtagaacaacttcaaggatccttgcaagcttatgaggataagcataagaagaagcaagaggtcaccgagcaactcttcaagatgcaatngaatgagacggaagaaagtcaaggaaatgaaaatagtcaatgaggccgatggtgcagtctatgatatggtggacgtggcaacaatggacgacgttcacatttcatcaatagcagttatgaga

SEQ ID NO: 102606 - DNA, 263 bp, Glycine max
  unsure (1)..(263): unsure at all n locations
agctntacttggcaaatgggggtggcagntgtctaataatcatgaccaaccttggtctagaattttaatctctaagtatggggggtggaaggaggaacttcacttcccaatggtggcaggatttgaagagcatctttcacagcaacacaatgactgttttattgataatttaaaatggagggtgggaagggggtccaccatcagtttctggaaggataaatggatggangacaactgttatctccaaggaaaatattccccat

SEQ ID NO: 102607 - DNA, 329 bp, Glycine max
ggcaatattccttggcacccttaatcatgtacaatttgttggtaagcttacgtcttttaatccaaacaaggaaacttgtgtaccatgtgagagtaatatggataaatgaaaatagtattggatgttatatgcatgaatatttcaatgcttgcactactacgaaagtgtgttttttatgacaggcgttctacttttgtaattatgtgtctgacaaatccttttatgatgcacattctaagacggttattgaaaaccgccttagaatgtgtgttcctcataaaaaattattacgggttttattaaaatccgtcggtatctcaattgaattc

SEQ ID NO: 102608 - DNA, 453 bp, Glycine max
  unsure (1)..(453): unsure at all n locations
agcttgaggccttggatcttcttcatcaatttatgtctttgcttctttaagaagaatggcagcgtaatggagaaggaagaaagatgattggagacgccacttctaggagaaaatgatatcagaagaaacttcccaccataggaagccatggattagagctcgaaggtaggagaagatgagtggagggagaggagaggcacgaaattntgagcctcaaatgagatctgaactttgaagtataattcttaaatgatcaaagttgaaaatatgcacatacatgacctctatttaaagcttaagtgtcacacaaaattggagggaaatttgaatttctattcaaatttcactcgaatttgaaattggaattggggagacaaattttcgagccaaaaattcactaattatgattagtgaattntagctatgggtcagcccactaatccaagatcaagt

SEQ ID NO: 102609 - DNA, 458 bp, Glycine max
  unsure (1)..(458): unsure at all n locations
tctgtccactgactaacatttctaatcattatcctacattcttggtctttctcatctagcatacatgctcattcaaaactcatgaattcaacacatgcttcaccctttcatgcaatcaattcacagcaccaatttcacaacaaaaataattattgttgcactgcatactcaaataatcaagtcaaactattcaatatgcttcaacccatggaaactactattcacaatcaaaagtatgtaatcataaatataaacccgtatcacaaaaaagacaagtgtactaaaagcatcgtaattataatatttatcagaaaacaagaacaagaatctaaaactcctgtgactggtcatcctgctgggtctcctgatcctgagtgccctcctcatctgccanatgtagcacaagagtggctagaggagtggtagtcagtcccaggactggtgtggaagggcctctg

SEQ ID NO: 102610 - DNA, 382 bp, Glycine max
  unsure (1)..(382): unsure at all n locations
gcaccgcggctgcagctgtacagtacacactgaactttacaatccactctacaaatagaccgtccccgcaggaagttctctcaacgtgaccaacctataactaattccagactaaaaaaaccaatctgagctgaaaccggaagaaaattgaatctgagattaatatagccaaaaaacttgccaggtcttcagcccatagccagcacttacactaggcctgtcaccgtcctagtcacccccaccattgcagctccatccatccaccatgccacagacaccgcaaatatatatatgttcaatagtacacatgctccacagttcangcatatggacaggttttgggatattgccatggccacatcacaacaatacctacaggaag

SEQ ID NO: 102611 - DNA, 324 bp, Glycine max
ttcgacgcgaaccgtgatgggggtctcaaccgcgacgaaatggcgttgctggtgggtgctgtgaaccctatggtgaaattcagcgacgaacaaatcaacgcgatcctcgacgaagttgttcgaacctacggcgaattcattgatggcgacaagggtctcacttacgagggtttgttgcgcacgtacgacgacagcgccggcgacgtcgaccgtgacttcgacgccctcggtctcgacctggtcgccgccgacgccgtgaaggagcccctcgccgcatcggaggcatcgttctcgtcgattgtcgacgagagaataacggtggag

SEQ ID NO: 102612 - DNA, 325 bp, Glycine max
cttatgatagccgccgatgatcccattactggcttccctaaactcttctgcctttcttcacgccgcatcccatgccttgcgaacctcctggagtaccctcgcgttgtgggcactaaaaccctgtgcgatgaaaggcgcgatgctttcgtctaatggcgctcctctcatggggtagccaagctgtcttatggcgagaacgggattataattaataccaccccttgttcccatcaagggaacatttggacatccttcgcatgaagatagaaacctgattctttcttccttctagcgagggaaccaattaacagacgcccccccatgc

SEQ ID NO: 102613 - DNA, 284 bp, Glycine max
ttggactgtttatttcggcaaatggagaggagggtgatcaaaactgccttttgcaaattgctgtcaatagtgcgcaaattggttggcaaaaggtgtgattgtggtgggaaagtaaacaatggtttggcttttacactccaaggctatgagatatggctaagacttcataaattcagcgacatggtacaatggacaaaaaattcgggtttgagggaagcggagtggttggttggcaaattgcttgctttttggtggtgtatgagctgagtgatatgagtgcgact

SEQ ID NO: 102614 - DNA, 440 bp, Glycine max
  unsure (1)..(440): unsure at all n locations
cttcatgttactcatgatgctccttttatctataacacatacttggntctctgggccatctctttcttgagaagctttgctctggaccatgtcattggacccttcaactcatgaaatgcttcggggtctttacgctctttggatagccatctgtcactaacattcacaccaagcaaatgcttaatgataattcacacaacacttcaacttaatccaatttaataaagtaattaaataataaaagaaatgcatcaaacatctatttttagttatcaaaatttcagggcattacaagatagatggtgcaatggaagaaacaattttgctctgcataagtgtagaaagattattgccatcttcacttgctcattttccgttagcttcctctgttgcgtgcacacactcttcaagaacttngcatattttggaatcctttttat

SEQ ID NO: 102615 - DNA, 350 bp, Glycine max
  unsure (1)..(350): unsure at all n locations
actatgaaatttggctattaaaaaatgtaagaagaaaactaaaatacttgaatattctcccatatcaattccttctgagcagcagagactttctttcaggtctcatatgtcatgtcgaccttatcacgcgtggcaatccccaaatatgttcttaatttcttctgggggggaccatcggccttgccggtagctgtagaagcaagcttcataatgatgaatcaagtatgattcaagtagttntgatgatgacaaaaagaagcccaaaagaatgatgtcaagattgagtcaacaagttcaagatcaagaataaagaanagacatcatgaagaatcaagattcaagaaaagatg

SEQ ID NO: 102616 - DNA, 468 bp, Glycine max
  unsure (1)..(468): unsure at all n locations
atgttgctccccctatctctatctctttatactgcttctaataactagcgtttctgattatggagctctcaaacttcacctgcttaatgacatcctcagccttgcccaaatctttattagatttaaaaggcaacatagagagtttttaaaagcgatatctttactcagaatgatttttcttttatatggagaccaaactcgaaatcatttgaatccatctccatagcccatgaaaaatcccctcttaactcagggttctaacttacacttacttacatgatagtatgtcgaacatccaaacatctttaacattaagtatttagctagtctattagaccatacctcaatagggatcttgaagtctatagcagcggatggtgagagatttacgagataacattgtgtgctaactgccttatcccanaaacttctatttaagcctgaattggatgacatccatatgactct

SEQ ID NO: 102617 - DNA, 422 bp, Glycine max
  unsure (1)..(422): unsure at all n locations
agcttaggacaaggtccagtatacttcaacttttatccaaacaaaacggggagtctgattgacagaaacattcttgactctctatttttaaatatccactttcatggccttgacattaaagaaggatcaattccagcagctttgatctataggattcagtacaaagtaatgaatacttgtgcatctagagtcctgttaaaacctcaaagaggagaaacaactttgtttatcactgatatgacaaaggctaacatttctctcccgagaaaaataaaatgggatgaagtaactcttcccgaaagatgggtcatggataaggccacaccatctattccctgacccgctccaaccatagagcaaattaagcaagataactccgggtaggtagaaataaccttcaataacaaaaattctntttcatc

SEQ ID NO: 102618 - DNA, 477 bp, Glycine max
  unsure (1)..(477): unsure at all n locations
tggtaatcagagcacaagagcttcaagtatgttctccttannacctccattaatttttttctttaccttctcttccattgttgtttcttcatttttctccatgtatctcctcacatgtcttgttctatatgttgttaacatgattctttagagtttccaccgattaaacttgctatagaagttagaatttgatttctatggttcaaatttcttgttcttgttcttgaaccatgaattgtgttgagtttaggttcctttgagttatgtcttgttattattttgtggctgaaacctaaaccataaaattcttacaaaaatattaaagtagaagaaaacctcataaatctagagtgacttgttcacctattgtagttttgtcatagaagtcatgtctagtcatgaaactcgtcacataagaattcttatngtgtacctgaatttattttcttggttctttgtctaactcattttgtcatg

SEQ ID NO: 102619 - DNA, 422 bp, Glycine max
  unsure (1)..(422): unsure at all n locations
agcttgtaacgagcccaaaagntgctcaatgttcatagcctccaagtctcttgtttcttcgattatcgtgacaatatgttcatactttggatctaatgatctaagaattttctccataatatttacatcatcaagcttttcaccatttctcttaagttgattggtgaccattatagctcttaaagtttgaagacataccttcttgaccggatctattcccttatataagggttgaaacttctcccacgcttctttcaccgactttgctntcaaaaccttctcgaaagcatcatcatttaatccttgatagaatagatagagagcctccttatctctctttcttgagtctctcaaactatctctttgagtttgagagagactatccntattctctgtctctgggtgacctttctctactatct

SEQ ID NO: 102620 - DNA, 481 bp, Glycine max
  unsure (1)..(481): unsure at all n locations
tgcagttgtccaatcctcacaggctaatggtgcattcattgtattangtcttttaggacctcgccctgctgataaaaagaagaaagtgcacattacaaaaacattgaatgaattctacaacttagctggtgttcccaaaaaaagtcaaccgtttgatagaagtgaaatttatcactcacagacacaagaaaatccatanagaatttatagtacatttaaattaccatagtcaaatattatgtaacctctgtacattctgctgtcatagcttgagattttttgtatccgtaggccaagaaggtaaaagaatcacagtcatgttttcttccactactgttagcaaaatagagatgcaacccttttttgcggaactattttagattatggctcacattctactcanatattcgtgaggacatagaagtatgtcctctcgagaatattttgtgttcaatgtgtggtttctcttattgagatttaa

SEQ ID NO: 102621 - DNA, 355 bp, Glycine max
agcctcttatccatggctatatttgtggtgatatcttcttctccatgccttaattcttagaggatggcgtctccctcaccccttcttccttggctttcggtgcatcctcctggtggaaaatcaccattaaaggacctcactgatgctcaaagattcagcctccatagaagccccacaagcaagcttccatcactcactctcacaaaggcaccctcaggccgccgtcatcactggcattgtccctgatccccgacgctaactctcgcatggccacgcttaggccgccgtggtcaccgagacgctcgccccaccctcgtgtttgtgggtttccttaacaaccttcggtttgaacaac

SEQ ID NO: 102622 - DNA, 127 bp, Glycine max
ctaaccctagaattagctgaaggccacagttgctgctcgcatcttgatcaagacccatcataagaggagattgtgtgaaaggtaaagagaaagagaatgaagagagagcggtgtactttatatgatg

SEQ ID NO: 102623 - DNA, 337 bp, Glycine max
  unsure (1)..(337): unsure at all n locations
agctgggtcctctgggctgtataaattaacatttaattccttaaccacagccacgtctatgctttcatcttggagggtggttaagcggttttggaaattaccccttctccaacttcactttgaactcatcggctcagtatgataaaacttaacatttctctccataaggatattctggcctagaatggtgcccgtgtatctattccaagcttncaaagaatggaatcgcctagtatcatactgagcttgagggttggaagctgagncttttcttttcctggttgccatctgcaataaaaagaacccgtcgatttattaaaccagaagttatcaaaat

SEQ ID NO: 102624 - DNA, 383 bp, Glycine max
  unsure (1)..(383): unsure at all n locations
ctctanattacattgattggaggaggttgtatgccatttttgttntaagagtagcatcccttggtaaaactaactttccaaatgtttgccttcgcaggaaatggccccaaggaagctttcctcatagaggtccaggaaggacaaggcagccgaaggaactagttccgctccggagtatgacagtcaccgctttatgagcgctgtacaccagcagcgcttcgaggccatcaagggatggtcgtttctccaggagcgacgcgtccagctcagggacgacgagtatactgatttccaggaggaaatatggcgccggcggtgggcatcactggttactcccatggcccaagttgatccagaaatagtccttgagttntatgccaatg

SEQ ID NO: 102625 - DNA, 358 bp, Glycine max
  unsure (1)..(358): unsure at all n locations
acgatatcccatgggctagcttgatgatacttgataattttattgctcctatatcaaaatcaattgtctgatgtatttggtaatatggggcttctttatttggattactagggggagtttcatgtggaattattttgccagaaaaatatatcatggcggctccaaaggacttaatttatgtgatgcttttttttctatatacatcgggggtatcttttggcgnnaagagctaagtttctggtaagtcttggcccacctaacagaaaagacaagggatattatttgttatcttcaattggtttaacactattttttgtgtttgggatctaatgatacgaatatgtatacctgcctatat

SEQ ID NO: 102626 - DNA, 351 bp, Glycine max
ttgatcatcctactaggacgactgagaaaactggggccaattaagacggtgaggatgatggagaaacccatgctgtgactgccattcctatacggacaagtttctcaccaacctcacaatgtgtttactcattcataacaaaccttctgcttacccaccacccagttattcacaaaggccatccctaaatcaaccacaaagtctgtctaccgcactatcaatgacgaacaccacctttatcacaatccaaataatacaccaacaaaaaggaattttgcagcataaagcctgtaaggttcaccccagaatcgcgtgtcatatgctaaacttgatcccatatctacttgataa

SEQ ID NO: 102627 - DNA, 332 bp, Glycine max
  unsure (1)..(332): unsure at all n locations
cgagaccttaagncacctgcggctgcagctggagaaaaaccagctggcaacatgcattctttctttttaatccttcactttacaatgagctggtctggatctttgcagccccaagggtaaatggacacctggatgaagttgcttcaaatttggtcaaataagtacattagtaaataatcaaatattagcgtgcgaagggatgtcatgctcacaacttgttttgaagggtcaatgggttttgcggaaaaaaagttagtgtcctatataagttgtataggcttaactatacaaaaagtactttggtgggagcaattatgcaccttatacaattc

SEQ ID NO: 102628 - DNA, 441 bp, Glycine max
  unsure (1)..(441): unsure at all n locations
cctccattctgataaacctgtccagacttatgtacacaattagtcaacaagacagagctttataacttagtatgtatgtagtacataccaatttcaagaaaagtgattatggcaattacttggagaattaatgtatgttataaaaatgaactaaaaanatgacaggatagaatggatggtagcacctttaaaatgagagtgtgcattccatcaaatgaagaatgaccatttcctccataaaggagagcatgtctaaaatactattctcttgggaatcattctaattatattntttaccttttactcttttcaaacaaaaaaataccctaacatcacaaacccaaaatctcaaatcaactatactttcacaatgttctaaagtagagctctcctgtaagtatagcagttttgacctaaccaggcattaagtggtagtatgta

SEQ ID NO: 102629 - DNA, 431 bp, Glycine max
actagatgtctggttaacttggcaacccaactggttatgtaataaaaatctgcacctgtcaccagactctgtggtttatgctcctctgccgaccaccacacagacctttgcccttctgtgcaacaatctgaagcaattgaacaacctgaagcttatgttgcaaacatctacaatagacctcttcaacctcagcagcagaatcaaccacaacagaacaattatgacctctccagcaacaggtacaatcccgggtggaggaatcatcccaaccttagatggtcgaatccttcacaacagcagcaacaacaaaaacagccttattttcagaatgctgctggcccaagcaaaccatacgttcctccaccaatccagcagcaacaacaacaacaacaatagccccggaaacatcaaacagttgaggcccctccgca

SEQ ID NO: 102630 - DNA, 441 bp, Glycine max
actatgtggcgggcgggcttccttcaccttcttgtctccaacgcgaactttgaccattgttcttccttcccgcgatgcttcctttcatgtctgcctgagtgggcttatagcctaaaccgtactttccacgattaccttgggcatttatcagtctagttatgtcgccggtggttttttctaaacccatcccgcgctcataaaccgtccccaacataactcgggccatcattaccgctgcatcggacagactacgctgcccaaagagggagtccacggaggaaatgctgaccacctcaaaagactggaaagcagtttctaacgattcttctgcggcttccacataaggcatggaggatgggcagcttaccaagatatctttctcgcctgacacgatgaccacatgcccctctactaccaatttcaacttttggtggagcgtat

SEQ ID NO: 102631 - DNA, 361 bp, Glycine max
cgactggtaaggataacaatatagttgatacacttccatttagcactatgtcatctcattgaaaggtgcatccccgacaacaaagaattccttactatcatcggtcaagggatgtatgtgaatctcacacctatgtgcttaaatattataggcaatggttgacatgttactattctttagtagtacatcgtaattcattgagtgagccatagttccccggttaagattgaatacaacgattaataccgacacgttggattaaatgttgattcaatcttgaattggcccgttggacagttgggaaaacaaattgttttacttattttgcttataagtaagatgtgtgtattttgactaattc

SEQ ID NO: 102632 - DNA, 370 bp, Glycine max
attcatcctttcgagccgctctttgttatccgctctaacacttcaaccatggtcatgatgatatctttcaacataatcacactcttttgtgaccctaatgactgatcactttagcttctcttatcccacccttgactttacgacctctgccttcaagcctgcacttcttcactttcctcaagaatttcagacctttgttccacttagactgtctagctgtgggagccaagatatcccttgcggactatacttaaccacttgcgataccgccaatgacgccatgctacatcccttaatctacttaattggcttcctactctattcacgcttatggatatattgaaggattttccattatgtcattgaacct

SEQ ID NO: 102633 - DNA, 417 bp, Glycine max
  unsure (1)..(417): unsure at all n locations
agcttatctacagggaggcctaattgttttctttttacgnggagnncncaacggcggcgagctgtgtcaccgttatgcggatgtcaatgtgcttgctgggctcgcaaaggatgataagctgcccgcttgactttgacaaaggcatccttgaggttattgaagatggagaatagcgagcggaggccattggtggtggtctcccagcctacgccacggatgaagagcttgcgctgggagacgtcgtggtccgcgacggtacgcacaacagcaaggacgttgaggtggcacaccaccgcatcctcaaggatgtccaggagctgtgtgggagtgaaccccttgatgagcttgtaagcttcgcaaggggaaagctcgagaacgagaaagcttcataaaaggaaaattaaaacacaacattat

SEQ ID NO: 102634 - DNA, 441 bp, Glycine max
ttaagtcaccgcggctgcagcttgctttacatacccctttttgattatgaccacttctgaaatcaagaaacacactcacacttatttttctagtctaacactgacggaaatttccattctcccgctttgtttttgaaattatgcttcacttaacatgaagttaattactcatgtgagttctcgatttaatacctatttatctccccctttggcatcaacaaaaagccgaagttgtgaaccagtatgaaacatacaaatactactgatcattcacactacggtcctggaataatattaactactcttgaagcaagagacatgtccgcctcaaatgtatattaaaatcacatactcacatcacataatgcataatcgttcaacacaccctgcaaataaagaaatacgtaaattgtctaatgtgataatatatagccaaataca

SEQ ID NO: 102635 - DNA, 377 bp, Glycine max
  unsure (1)..(377): unsure at all n locations
agcttcgagattttataanactgatggggattctcattctcttccatcatagtcatcgatgatacagggctgctctcaatgctactcgattcccttctctcactcataacaccaacacgcttaatttgnggccactcgaatcatgggtgagttgtgatgcttcagcttcaacagctgcgttgttgggtgtgtgtgttaaaacaagagaaagggcaaaagaagaagattgcttgcaaaaattgatgcttttcttggtccttcttctaagacaacagaggagagaaggagtgatacaagatatgggtgcccgaatcctgatgaccctttgaataaaataaaccggtttcatgattttccacgaaacccggaagagaaaa

SEQ ID NO: 102636 - DNA, 433 bp, Glycine max
  unsure (1)..(433): unsure at all n locations
ctacttggactgaacatattctctaatgaaatgatgttcaatgtcaatgtgcttggatcgctcatgatgagcacggtttgaagcaagacttatagcagatttattatcacaaaataacatcacagagggcacatcaacttcaaagtgaagaattaacttgcttaaccaaacaatttcactagttacagaagacaagacacgatatttagcttcagtggatgattntgaaacagtggattgtttcttagaacgccaagaaagaaggttattttccaaaaagacacaaaagtcagaagtggatcttctggtatcaacacaaccggcccaatcagcatctgcaaaggcagtgaggttgagagagttctgagcagggaaaaacaaaccttgtccaagagcagaattgatatactgcataaaatgatgaacaacatgt

SEQ ID NO: 102637 - DNA, 218 bp, Glycine max
cccctttgagccctggattcctttccttggtttggagctcactacacgccctaagggaaaaaccatgatatcaccctattcctaagggaatttggagccttggaattggtttgggaataaatgggggggggtttagattcattggataatatggaatggtggctatgttcattgatgatttgcggtcatacttgaaggacactgcatattgggtaaat

SEQ ID NO: 102638 - DNA, 245 bp, Glycine max
aatcacattatatggtatgataacaaaaattttatactacaagaggcacttacacatgtagattcttttgatcatctatgcttactttctaccctagaaatagcgactcttctaagagaattactatcgaaagagaataattttcatacactacaatgtagaggtgctatacgcagacaaccaataatcacattgctccaaatatcacgtcactataatcgtttaattaaataaggggcaatatc

SEQ ID NO: 102639 - DNA, 407 bp, Glycine max
  unsure (1)..(407): unsure at all n locations
tacatgctctattttcatctcccactccaagtaggccctcggatcattctttcctttaaaaggaggaatggtgaggttaatacccatcattcgggttttgctaggaacaccatcattccctcttcttcttctttctttttcattatgatctctattctcccattgatccaacctctcatggagggcatcatctcgttgttcattaacctctccaaatgttgcatcaaagctttcatttggaattgcgaaagccccactccatcattaggattagtaccagacatctcanacaaacaaatcaaacgtaacaagacaattatagttgctggttgaatacctcacccactcaagtgtatcacacaattatggcttttctctaatgaaacactcttgccttttaccactct

SEQ ID NO: 102640 - DNA, 449 bp, Glycine max
  unsure (1)..(449): unsure at all n locations
taagcttctatatagctgaaccattttatcaataaacacaagttgtttttattcttaaaatagagtttatctctgttatcttagtgagagagaatcttctaaattcttgagtgagtcaagaacaccctggctgtatcaaaggactgtcacaacctttgtgtgttgccctcgttggaaagagagattctattcttcctttcatcttcaccctcgttcttttaaaccacaatttcagaaaatccacctctgcccagaattatctcgtggccataactctcattttacgcactcaaattaagtgattcttgagcctaaattgactgtaaaacgagacctttcacctcgttntggaatcatctcatttggagccctgtagcttcagttattggcatttctatatttctgtccagcccccacttaacctacatttaccatcccattattcattt

SEQ ID NO: 102641 - DNA, 440 bp, Glycine max
ctgcagctttgcatagacaaaagaaatttttaatttttggtgagagggggaggcaagttaaatcaggcttgaccaggaaatgggcccttgcagccgaccaagacggggtggatcacactatttgtgaaaaatacagcattagcaaggagaaataggcccagttttgttagacacgcagagacccttcttggtaggtatgtactttgtcattttagttgttttccacaaaatattaacttggtataattcattgtagtaatcaatttcattaatggttgatttttgtaggatgtgcggaaaaaggcacaggccattcataagcaaaacactgcccccccccccccccacgtgttgtctcgtgggggttatgaatattagaacaaaatctcatggctgacaagcaaaaagaaattggacgaactacccagtcttgaagcact

SEQ ID NO: 102642 - DNA, 375 bp, Glycine max
  unsure (1)..(375): unsure at all n locations
ttgtttaagagtagtggtccactggtaaaactaactttccaaatttttgccttctcaagaaatggcccccaggaaacttgcctcaaagaggttcacgaaggataaggcacccaaggaactaattccgctcccgagtatgacagtcaccgctttatgagcgctgtacaccagcagcgcttcgaggccatcaagggatggtcgtttctccgggagcgacgtgtccagctcatggacgacgaatatactgatttccaggaggaaatatggcgccggcggtgggcatcactggttacttccatggccaagtttgatccagaaatagtccttgagttntatgccaatgcttggccaacaaaggagggcgtgcgtgacatg

SEQ ID NO: 102643 - DNA, 325 bp, Glycine max
tctatcacgtggtcttaggatttttaatgaattaattggtcttagggggtcttcctttcattcaccataaaaaagggagagaatttgtgtatgctttaatacctacaaaacatgtaccaattacgctaaataaaaggaagtccgagttattcgctacaaaaataatataatcttttatatgtaaattaaaatataaagtatctcttaaccaaagaatcctttaaaacgtttattttaagcattttgccttcgggttcagggttatggatcacaatgaatgcctgtatgtttgtcaatatacttgtctccaggctccgttctcttc

SEQ ID NO: 102644 - DNA, 344 bp, Glycine max
atcgacattatgtacgagcgtatttgttggattaaacttaatctcattacaactcttgcatgtttttatgatcaatgagacccttgagtttatgattatatttaacttacgaagaaaacgcactatgtgccttttattcactaactatattaacaatatataaatattctcttcataatttatataaacgataagaagatcaattccataattataacattgactctccactatgttattaattgtggaaagaagggttgacaagaaaggatcaaaatagttcttcttcctaattagtgtaagaaatcatcaacaatctcatatcattaattgtggaacgttaa

SEQ ID NO: 102645 - DNA, 334 bp, Glycine max
gtacctggagatatgtctcgggggtcaagagaccttggggacgtcaggtggggtgctatttgccaaaaccaaacttgaccaatcccgacccaacccgggcatagtcagtcaatgaaaacctgtgatgtacctaaataggcgagctcctggcagtcaacagataaaaggaacaaagaccacaaagcaaggaggcttgtggtggctggccagctgtgaactttgattgacatgtgggttatggcctctggtaatcgattaccaagggtgggtaatcgattacacggcttaaaaatgaagacaggagactaagatgatctctggtgatcgattacca

SEQ ID NO: 102646 - DNA, 427 bp, Glycine max
gctcgcgaccggtccctttcttcccttcgcaacttgagttcactattgctaccccatatagctccgcgaaatatgttccggccatactcttgcttgcgagccctcttggtctctcgttcaagggctcttgcggtaattgcattctcttcccgtaacccggcacactccttcctaacgtgtatagcggccaacttgaacttctccttggcaagttttgccttacctaactctcttttgagagcttggacttctttgtcttcttccggtgcttcaaaattctcttcgctgacgacttttatcttggcgagccaatctaaaccctcgatatgaactttcaaccattcgcggtgcccaccaacgatgccattacgaatgcctctaagctcttgatcatttcttaaccgggtttaccatgccctatcggatc

SEQ ID NO: 102647 - DNA, 308 bp, Glycine max
  unsure (1)..(308): unsure at all n locations
ctgaaaccttatggaagagtatagaacaatacggcatagagtagaagagggtagagattcctataatgtgtggagcattctaaagaattaatctccaccctaaaatacaagtaatttccatcattcattggtgagggggagtagtattaataaaagtaggagtcttcattcctaaccatccaagacaagagtgaatccacttcttaaagtgagaaaactagaaagttagaaagcctctctgagagagaagataaatagcttgagaagtctctatcctttagctngagtgagccatcatagaatgaatc

SEQ ID NO: 102648 - DNA, 168 bp, Glycine max
  unsure (1)..(168): unsure at all n locations
agctttgaaattgcgctaaccaatgttactccgttgcgtacgcacgggtngcagactaatatagaataaatatatttctaacttttaattaagaacgtacgtgtagttcaaaagatcagctaagccaatttaggtgtgaatgtgtattaagagtggatcacttgatac

SEQ ID NO: 102649 - DNA, 462 bp, Glycine max
  unsure (1)..(462): unsure at all n locations
ataggtactcctactcatgatctcattaaagcaacaaaagggttcaaggataaagggctgcttggacaacgtgggtttggtagtgtttacaaaggaacattgccaaattccaatacccaagttgctgttaagagaatttcacatgactccaatcaaggccttatggaatttgtgtcagaaatagccagcatatgccggcttttccaccggaatatggttcatctgctggggtggtgtcgccgccgtggtgacctcctccttgtgtatgacttcatggaaaatgggagtttatacaagtacttgtttgatgagccagaaatagtcttaagttgggagcaaaggttcaaggtcatcaaggatgttgctttatccctcttgtatcttcatgagggctatgagcatgtggngatacatatagatgtgaaggctagcaatgtgcttctagatggtgaactcaatgga

SEQ ID NO: 102650 - DNA, 361 bp, Glycine max
  unsure (1)..(361): unsure at all n locations
agcttgatgattgtctatggcatatanaacaatcttctaaacacccattggcctctccccatttcatatggtgtatggaaaaacatgcgacctaccagtggagttagaaataaaagctcattgggctatgaagttcctcaactttaactctacagcatccagagagaggagaaaggtacaaatataagaacttcaagagatgtgcctcaacgcatattaatcatccaagctctacaaagaaagagccaagaggtgccataacaaaacaatcctccacaaagaatttaggcccaaacaacaagtattgctctacaactcaagattaaagttttttcccggaaaaataaaattgagatggagt

SEQ ID NO: 102651 - DNA, 433 bp, Glycine max
  unsure (1)..(433): unsure at all n locations
ttatggttagttatggagtaatatttgtaaataaatattgtttaatggttaacaccgtctctagaacatttccattggatctaatgatgaaatatgtgcatttttcaggtgaaaaaaaggctaagttttgaattgcaaaaagtagcaattaagctaagctcagcagttgggctaagtgcttatccaccgctaagcatagcttcagcgtgcttaatgcaaaggagaatctggcagagcatcagcatcgaagccatgcacaaatgcaagatcagtgcgctaagcacagcatgtgccttcagccaagctcaacgcaagactagtgctaagcccaattccacttactcgagctaagcgcaaaggtggcgctaagtgcaaggtcacgaattctgagcctatntaaagcatgttttgtgtggagttagggtacacacct

SEQ ID NO: 102652 - DNA, 263 bp, Glycine max
ctcgttacaatagtaatacttcatggagctatgatctatcgcaggagcatgtcgttatgaaggacaggatgaataggcataaagtgcttcaagagcttacttgcgtgtggaaaagacttggttccgatcacactaagctaatgcgataacgctagcaaagaggtggttcacaaacataaaaatattgtgcttagacatattcagacacatcaagaatcattgcttgtctatactaatgtaaagcagatctaatccgtgtatca

SEQ ID NO: 102653 - DNA, 420 bp, Glycine max
  unsure (1)..(420): unsure at all n locations
agctnctagaagatatatctgttatctgctttattcagcnnacccactcgaatgcccaaattatctatagtagactttgtgctcatgtgatttgacattgcaacttgcatgaactgaaccaaagtctccttcagctcgaatgttctctcataaaggctaggccctagattttaaggcctgttggatggcccctcctggtctttattgaattgggttccaggatgagacctccactgccctcgattatgattaagattggaaacttgctagtaacctgcacatccacctgcattaaatcctggactgtgcttgattctcatataattcacgctctttgcagcttcatgtagagatatacaacaatcagattcatgagctcctcacatatgctacaaccatcaacctgcagaactactgaat

SEQ ID NO: 102654 - DNA, 368 bp, Glycine max
tatgtcaacatatcttcaataaaataaaattggcagcttttatagcattaattcttattaaggtaaagtaataatgctcaaagaattcatttgttcagctagatatcaacatagatatgctgcaatttgcaaatatcttatagcacgtgtgcactatagtgcgaataatatgaattattttgtttgagaataacattcaaagatgctctcttatttttgttagctctgataaggtgtggctcaagctgcgttgtcaattatctttcattactgtcagctctggatttattacgaaaggtgtctcatttcatactttaataaattagaacttggcttccttgtatacgtatcaaggaggtgctagtagt

SEQ ID NO: 102655 - DNA, 397 bp, Glycine max
  unsure (1)..(397): unsure at all n locations
tttcatctcccacttccagtagggcttccgatcattcttttctttaaatggaagaatggtgaatttaataccatcaattccggtttggctaagaacaccaatattcccttttctcctcccttcttcttcattatgaaccctattctccaatttgaccaacctctcatggagcgcatcatctcggtgtttcattaacctctccaaatgttgcatcaaagcttgcatttggaaatgcgaaagccccactccatcattaagattagtacctgacatcttaaacaaacaaatcaaacgtaacaagacaattatagttgctggttgaatacctcacccactcaagtgtatcacacanatatggcttttctctaatgaaacactcttngcctttaccactcta

SEQ ID NO: 102656 - DNA, 382 bp, Glycine max
ctgacccaccataaaccttgacccagggtgtagaatgttatctttaccctcggaagcaaaaaagaaaagaatgaatatttccaatctaagagaaagcataaagagaagaaaggaaattcccaatcatagagtgggagaataaaaagagagaagaaaggagattcccaatcaaagaatgggagaaagtcaaaaataagacgaagaaagggaagatagttcccgatcaaagaaaacaaaagaaatatgcagaatgatctttggaccggacaatatctgaacaatacagaattgtcaccaaatgaacaaaagagagaaaaggaaaccatgacctacaagtggtcttctccctttgattaccaaccaaaatcttgtgtgctagcga

SEQ ID NO: 102657 - DNA, 326 bp, Glycine max
  unsure (1)..(326): unsure at all n locations
gagctcgggtagtcaaagagaagatcaagtccattttcttttattctgaagagagtatgacgaactcagggtacgtaatatggccaccgatgaagccttggaatgatgaaccaagaaggcctcccctgattaacacgacctctacacgtcttgaggggattatctaggcgtaactattgacctccatcttttaagaggtgaaaggaatcatcatggtgtcaaggcatgatctggaaggacgagctacaggcttgtcttangtccgaaagatatttgtcccaacacctacactgatactgaagggaatatgtgggccctcatcgatg

SEQ ID NO: 102658 - DNA, 443 bp, Glycine max
  unsure (1)..(443): unsure at all n locations
gcttgacggtgtcgagaagaaatcacatgtttgtctttatctaaaaggttgagaatgngaaagcatgtatacatgattttgatgatgtcaaagaagaatctaacaaggctgcttcaaatgataagcatttgcttcaagaataattcaagattgcttcaacaaacaaagccttgtttcaagattcactaaagaccaagccttgccttaaaacaatgtgctttcaagacatgcaaggctctggtaatcgattaccaagaagtgtaatcgattatcataagacagggttgagaaatagcttgtgaaaaaggttttgaattttgaatttcaacatgtaatccgataccatatgcctgtgatcgattaccagcaacgaaacttnggagattcaaattcaaagtcataacccttcaaatataactgtgtatcgataccacggaaagttt

SEQ ID NO: 102659 - DNA, 476 bp, Glycine max
  unsure (1)..(476): unsure at all n locations
cgaaaagaaatatgtcccaacagttaagcgatactaaagggaatatgtgggccatcatcgatatgtgcacagagaagctaaatctagtggcgactcacgagcaaaggctagaggatgagtatgccaagatatcatcagaaaaggaagctacggaaaaggtaattgattcattgcaccaagaggcaacaatatggatggaccgatttgctcttactttgaacaggagtcaagaactttctcgattgctagccaaggccaaagcaatggcggacacctactccgcccccgaggagatccacagacttctcagctattgtcagcatatgatagacttaatggaccatatgaatagaaactgctangaagtttgtattgtcgctcagatcttgactagatataacatttttgaataaaatgagtgtatcccaccgttttactctcaaaatcagcgtgaatcaagtcactcccgcaattta

SEQ ID NO: 102660 - DNA, 408 bp, Glycine max
  unsure (1)..(408): unsure at all n locations
agctttcaccagatcatataagataaatgcattcatgcaatctgcagatatatcctcccaaacgtcaaattctctgcctatatattcaacctttccatcactggcacggggagtgaatcttcctccatggtgcaatactaaagttatattgtcattcattctacacaatcagaaaccgcaaacattgtcatatattaggaaaaaaaacctacctcaaaaagcgtgaagacattgacattgtcaaaaagcgcgaagacacaatcagaaacaaaaacattgtcatctataaaaatagagcatcataaacaaaaataataaaggatcataaacctccctacgaagcgcgaagacaatgcagatgaaacccctcgaacatantaaaaccccaatcaaaccaccaaaacaatg

SEQ ID NO: 102661 - DNA, 373 bp, Glycine max
atgcgagacagagaccattatgtcttctattatcgccaagtaccaagaagagttaggtccagccacggcccacgagcataagatcgcggacgagtatgcccaagtatacgcggaaaaagaggctagaggaagggtgatccactctttacaccaagaggcaaccatgtggatggatcggttcgctcttaccttgaacgggagtcaggaacttccccgattgttagccaaggccaaggcgatggcggacacctactccgcccccgaagaaattcatgggcttctcggctattgtcagcatatgataaacttaatggcccacataattagaaatcgctaggaaacttgtatggtctctcagaccttgactagatac

SEQ ID NO: 102662 - DNA, 377 bp, Glycine max
  unsure (1)..(377): unsure at all n locations
ccctgatatgtgatttttctttatagctaacttatcatggcatttcaaaataggaatagggaggagaaactatacattcttgttttaaaatactggtgcatgcttgtataaaaattcaaggcactatattatttataaccaagatatattagtactgatatcatatcaaggatatgttttaactaactagtggttgtacaaattgacgtctataaaatgatactgaatattttattattttcaccgggataaggatataaattccattaaatactattgatattatnntgaaattctcatgatcccctagaccaaattaatntggttcaacataggtgataaacaagatcataatcattatttgtcatttttattat

SEQ ID NO: 102663 - DNA, 450 bp, Glycine max
  unsure (1)..(450): unsure at all n locations
tctntgagaanacttccttgagaagctagagcttatctctcacacccctctcataactaagctcacctccttgagaatctttcataagaagattcctaaagaagctagagcttagctacacacacctctctaataactaagctcacctccttgagatgagaagctagagcttagctacacacctcctataatagctaagctcaccccatgacaaaatacatgaaaataccaaaaattcccttctacaaagaatactcaaaatgcctcagaatacaaggctaaaaccctatactactagaatcgccaaaatacaaggcccaaatgaaggaaaaacctattctaatatttacaaagataagcgggctcatacttagcccatgggctcgaaatctatcctaaggctcatgtgaaccctacggccttcccttggatctctgtccaatctacttg

SEQ ID NO: 102664 - DNA, 374 bp, Glycine max
  unsure (1)..(374): unsure at all n locations
agcttcaagaataatggccttaactaactaattattcccaaaaggaaattcaataaataggcctcatatttttaatggagagggttaccactactggaaaacccgaatgcaaatcttcattgaagcaataaacttgaacttttggtactaatacctattgtcataccctaatttcattcggggaccattgtttatcggcatgcgaccttcgnttgaccacctcaagaagtctctgggcagaaaccacctccattttgttaaaaaatggcatccggngcttctgtaatgcttccgtaaaatatctgaaaaccttgggttagcatatttcacttaatattggagaaaatgaagataatacagaagaaaatcaagtc

SEQ ID NO: 102665 - DNA, 488 bp, Glycine max
tgtctgttcctgaatgataaagggcgcagaatctgtatctctcgtttacccaatcagcttgttgttcctgaatgataaagggcacagaatctgtatctacgcgtttgcccactcagcttgtcgttcctgaatgataaagggcacagaatctgtatccacgtgtttacccactcagcttgtcggtcctgaatgataaagggcgtagaatatgtatctacgcgtttacccactcagcttgttgttcctgaatgatatagggcacagaatctgtatctatgtgtttacccactcagcttgttgttcctgaatgataaagggcgcacaatctgtatctacgcgtttacccactcagcttgctatcatgctttgagtcttagagatagcgaaagaaagtatctactgataaccactctggtatctctgcatgttacgtgaccccactgtcagtatgacagaattattctgcgcggaataagacatatatctcc

SEQ ID NO: 102666 - DNA, 444 bp, Glycine max
  unsure (1)..(444): unsure at all n locations
agcttatgcgcatacttctttactatcgttttttgcacaagacattcttataactaagaaaaatgcacccatgtacaatcaaggcaccttcgttacctagattatttatatgtacttccaaggtgtatttgttacctacatctcatgcacttccttggctaaatttacatacatgcgtactcaaagcatttggggtaccaaaaattgcacatgtgcacattccggtatttctaatacttatgcatatacaaactttgtgatgaatcttggctatctacacaataaggtgatacatttcatgctntattcaagtgtttttgctacctaaagccgcatgcaaattcaagtatagtttcctttgctgactaanattgtattcaaaataaaagggatttttgtaaggtattntcttacataacatgcaacatatatatnattttttgt

SEQ ID NO: 102667 - DNA, 480 bp, Glycine max
  unsure (1)..(480): unsure at all n locations
tgattgaatggctaatagactcccttgttatatataaaatttacccgataatgtgagataatgatgaggacggtacttcaccgcctgcatatgaaagatagggagatttttctttggccccaaactcttcagcagaaattgtgatatgtacttgctttgatgtactctttanaaaacccaaagaacatgaaagaaacaagcagcagtcaatacaaattctccattttatatctaagtatatttttgggtttaggtgcgtaaatttcttgctcagtggaaaatgacttcaaagcttaaactaaccatattctcaaaattagagggaacttgaatggagattcttgtatcctcatttaaaaaatctgactgcaacataaagaaagttgtgaagtagtaaatctataaaacagtgaataatagataatagtgctcgaaatggattcttggaacaaanatatagtgcctatgcataacatatac

SEQ ID NO: 102668 - DNA, 460 bp, Glycine max
  unsure (1)..(460): unsure at all n locations
gacctgtatgcatgcacgcttctaacaatctaccttcntagttgggtttatagnctactactcctagacatagcctccaaaggagcgtctgaatgcgaaggggaccttgggggtattgccatgactctgtgcaaataaaacaaattcattaaagaaaaagcaattgaaacaacatataagtatgaaataaaaaatattgacattaaaaaaatttattgcaattaatgtgatatgatatacattactttggtataccgtagttatgtacggatactctcccataaaccttcattatgatcattacaatttgcatgtacatcatcatcctcatgttctgcatttatggaaggcatttgttgggagaaaacatgtgtctcattaatatcaagtgttgaagcatcattttggtgatngataccactngttattcattgtagaaccactaaccatcttgagtcac

SEQ ID NO: 102669 - DNA, 402 bp, Glycine max
  unsure (1)..(402): unsure at all n locations
tgtctcagcgtntgtgcgagacagagaccaacatgttagttatcatcatcaagtaccaagaagaattagatctatccacgacccatgagcacaaagtggcagacgagtacgcccgagcgtacgctataaaagaggttatgggaagggtgatcgacttgttacatcaagaggcaacaatgtggatggaccgatatgctcttactttgaatggaagtgaagaactttcccgattcctatccaaggccaaagcaatggcggacacctactcttgccccgaggagatccacagacttcccagctattgtcagcatatgatagacttaatggcccatataattatgaaccgctcggaagtttgttttgtcctcacatcttgactagttataactttttgaataaaat

SEQ ID NO: 102670 - DNA, 421 bp, Glycine max
  unsure (1)..(421): unsure at all n locations
atgcaagcttggtctcggaagtggttattatacatgtttggagttaaagcagctttttctttttctcatggtgcacaaaccctttgggttgcttgtcatagaataattattttgacttaataggggtccctttttgtggatacccctacgcttgaaaggttgaattgttttttgtctagttcatctgtacaccttgtacaggagctattatgctcccttagattatcaaatatattatatactttgcctttcaaaaaaaaaacttagcacactttgcttgtccattagaaaactggcacacccctaagtaaatttctcctttaaatatcaacattctcactcttaattgacaannttttttgcttggtgttacttttgtattgggggatanggatggagacatanagaaggggacaggtga

SEQ ID NO: 102671 - DNA, 360 bp, Glycine max
  unsure (1)..(360): unsure at all n locations
ttttatagatcagacaaaagaggaacaacatcccaaagacagatgcttggaaccatggcaacggctttaatagagatactcttcaattataaaccgtacatcaacaacagcatctgatccaaatttaaattgggaaactcttttgagagtgccagtctacatctatattatattacaaatattaatttgtgggtcaaaagacagtttaagtatatgcttgggaagtcaaccatatatttcagtccaatccgcaaaaatgaaaaggtaaaacttnccgaaaacataccttcttaaggataatttggcacttaaaccaatttttctatttggattgatcaacagaactcttaagtttatgat

SEQ ID NO: 102672 - DNA, 436 bp, Glycine max
ctgaatcgaaggaactgcacacctaccaacatggcttgttatgtatgtccagagattctagggagggagagggcgtagcataatggcagtcttcactcatgtaaaaacctgcatcaatagtcttcagcctattcagtcttgaaatacaacgaccttgagagaaggtttatgttcaattgatggaatcatactacagttgtcacaatcatacaagtatatacgtgtcatattgcactttgaagaattatacatccaatctggaaatctggttcacttataatcctttatatgcgacgactcaatgtttaaatgaggctgtaacttgctaagcacatctgttccaagctggaagttgttactgttgttgtacatatataccataccaacatgtaactatcaatgtgcttttgaacattatacttgccttcacgcttca

SEQ ID NO: 102673 - DNA, 399 bp, Glycine max
  unsure (1)..(399): unsure at all n locations
ngttgtgcaccatcgcccgaccgccacctagtaccacatgtgatgggtaccccataattctacaagcttgagatgaggaagtgttgaagggtgaaacttcctgcttttattgttgaccacagagtggtacctggagatatgtcgcgggggtcaggagaccttggggacgtcaggtggggtgctattgcccaaaaccaagcttgaccaatcccgacccaacccgggcatagtcggtcagtgagaacctgtgatgtacctaagcaggcgagctcctggcagtcaacagataaaaggaaaacaagaccacaaagcaaggaggcttgtggtggctggccagctgtgaatcttgtgtaatatgtggatggtggcctctggtaatcgattacaaggcttaaaatt

SEQ ID NO: 102674 - DNA, 424 bp, Glycine max
  unsure (1)..(424): unsure at all n locations
agcttatgcgatgcatgatatgaatgcatttactgacactatagcccanaagattatctctgtttacttgcgcatttaggggcgtagtgctccatgtgtacagttaagaaagtgatatggaccttccggcttcccgtgacaaaggacgagaccaacatacaatgcttgctagagataaaatgcgggagtgacttgattcgcactgatttttggagtaaaaacgtgggataaactcattttattcagaaagttataactagtcaagatctgattgacaatacaagcttcctagcggtttctaattatatgggccattaagtctatcatatgctgacaatagctgagaagtccgtggatctcctcgagggcggagtagatgtccgccattgctttggtcttggctagcaatcgggaagttcttgac

SEQ ID NO: 102675 - DNA, 464 bp, Glycine max
  unsure (1)..(464): unsure at all n locations
nntgtataatgagaattgtccttcaaacaagaattgcaatttggcatctgaagtctgagagctcggggcagataagtctgctaaagctggaggtggggatgaagtaaaagatgtatggatgcccactattggtgtaaaggaagaggaaatatcagctactctgatcttggtcttccttgtctctggaaaattaactgtttggtcattcacattccaacagttccttatgatataagctaagtcaatggctggtcttaggttttcatangaggtaagggcatcagatcccactcccttcgatctacacaaggctgtgattaaagttgggaagcctaatctagaagagttaaactaagcgatcatggtcatttgtccagagatcaaaccgccaatgttcatgtccatccttgtnattaagccatagacgaacctagctctgtctgtgttcaaatttgaagtgcgtg

SEQ ID NO: 102676 - DNA, 384 bp, Glycine max
actacataagaataccatgtgagcctcctggggggattactggctaccccacctctaatatatccgatgcttacatgtggaagggctaatacccagaatgttctgcacgggccagcctatatcctttttatgctttcttgagaacctgataacaaatttctccttctgctcattaacaagggaggcatatataattactggaaaacttttgctatcatccaagtaagcatattttaaatttgatggcagaggcttcaaatctagtgtgggcggctagataatggtaaaaagagatggtttctcagcttgtacctcataaagaaagtcaaaggtatgtatacttcctgaaacatggttagttctatctgactctataaaatcaat

SEQ ID NO: 102677 - DNA, 454 bp, Glycine max
  unsure (1)..(454): unsure at all n locations
ngtcagcacaagcattatcttcatgatagagattagtaacaaaaaatntacactataatgaatgtaaagtgagaattatgttacaaattataggttagattgattacgccatctttaattgacttaattcatataaatcatgcaacatgtacatcacgaggcaatgatcaatgagaggtgttgttacatcagtaaaaaaactagtctgaagtaggtggccagggtccatgttgcctccccttggacccatcgttgcttgtagattataacaaatcatatccattctcacaggataagtttactagtaaactttccgagaacactctctttttctatatgcaataggaatgtcattaaaagaaggaaaattgaactgtagcataagaaatgccactatccagtatagaaaagtctgatacaatgataatacctaactaanccccaaagaaaaact

SEQ ID NO: 102678 - DNA, 477 bp, Glycine max
  unsure (1)..(477): unsure at all n locations
gatccttgagtcacccgcggcatgcaagctntgggaagtacgggcggcccccatgatgtgcaaattcaaaacgagcacgccttcccaccatatggcttgcctctcaactatacgccacccaatgtggcgtacactcctaatgagaatgtcaataactccgctcctatacccattgagagccaacaaccccaaactgatcatgcacatgtctcttaaaccgtgggggagacacatgaaattccccaccacccaattatccataaaggccatccctaaattaaccacaaagcctgtctaccacgcaaccaatgctaaacaccacctttagcacgaaccaaaacaccaaccaaaaaggaattttgcagcaaaaagcctataggattcaccccaaattccggtgtcatatgctaaacttgctctcatatccacttgataattcaatggtagccataacccctgctaggttccttaacctca

SEQ ID NO: 102679 - DNA, 443 bp, Glycine max
  unsure (1)..(443): unsure at all n locations
tcctccagaaggctgttgcttctggaggaagcaacctggctcgcctgtgcgagctgggcggcaagcatctcccctattttgctataaataggggaggaagtgaagaagaaaagggttcaaccccttaagcacttctctctctttcaaaattgcttggaaaaattgtttccgtgaaaaaaatctaagccgaggcgcttccgaaacgtttccgtaacgtttctgtaaggaatttcgcgaggatttcgatcgttcttcgatgttcttcattcgttcttcatcgttcttcgatcttcaacgggtaagtacctcgaaccaagcttttcgattcattctatgaacccgtggtggtccacattgtgtttcatgtattttcattctcgctttcatttactttntatacccctttttgacgtgcttaagccatttatttaagtcatttctcg

SEQ ID NO: 102680 - DNA, 429 bp, Glycine max
  unsure (1)..(429): unsure at all n locations
agcttggtgcagtctcgtttagaggttatgggttacactatcattntattcacctggatgtacatgaaatgtgtagccatatagaggatctcataaattacctgaataatattatatttatatntatatttaacaaatgtatatatatggaggtatttcagtaattatggttttctgtcatcttcaccaattangggttgatcttaagttgataaattacggtgcatagttagttcataaattttggtttatttctagttcaataattatccaatagtgtaagttgcacaattgttgtgtagccttatttcaccatacttgctaaatataacccattcttttatttacaaattatgataacatttacaaaatacagtaccaaaaatgatattaaaaatgtgtacgttttaaacaaatataagaatttta

SEQ ID NO: 102681 - DNA, 436 bp, Glycine max
  unsure (1)..(436): unsure at all n locations
tgacagtattacaaatctcaatatacgttgccaagtgtgagtatggatcnttcattggtataccatgaaacaaattgctctgtattagttgtatcaatgaaagtgggtaaattaagttttgtgcctgaacctctggctgcgcaacacttgaaaaaattgcngcaccgaaatacttaagtaatctttcaaggtcacttgtcgaggttgctcttcanccatgacttcngcttcaatttctgatgttngagattccctggatgtaggtgaattataagatgatgactcacaaaagtgagcctcttcaaggattgatgctaatgttctgtcgtgcaaaagctattgttttctctttgcattgtttcttctaaaggtggcttcaatttctaaatccactggaaccaattcacctgcagaagatctacgcatgcaaacacta

SEQ ID NO: 102682 - DNA, 352 bp, Glycine max
  unsure (1)..(352): unsure at all n locations
aaaaaacttaatggctgagtgtaactgaaattgtggcaaccgaaagtcatccccaacagccaacaagttcagcccaccattttggtctcccaaaaagctgatgcctaggttgccaattgggcccttatacaacttgaactatacctaactaaagcccttttagtngattaacccacaacatatttttggtcagccaactttacaaggattgggccattatttagacaaactaaacactctaaaattgaaacaaagnggggtcatttagtcctcctccatatgtgccatgatacaactcacaaccttggacttttctacttgaaaactgggcttgtattcaaaccggatggac

SEQ ID NO: 102683 - DNA, 368 bp, Glycine max
  unsure (1)..(368): unsure at all n locations
tttttcttaccactctacgttggtttttgggaaacaccttacttactgcccccagggaatcctatcgcaccatatcccaatctaaaaccatgggtgttctagacgagacacaggaacatatgaaagccgacatgtccgctctgaaaagaacacatggcctccatgatggaggccatgttangtatgaagcagctcatggagaagaacgcggccactgccgccgctgtcagttctgctgccgaagcagacccgactctcttggaactacgcaccatcctccctcaaacatagtangacggngaagggacgcactngtgcacgatggcagccctcacctgtggtacaaccgagcggcttacccttatgga

SEQ ID NO: 102684 - DNA, 291 bp, Glycine max
gcacaactggacgacaatgccaaacctgtggatttcactcgaaaacaagaggcaacgtgcattggaaaagacgagccgcgaaaaagaccacagatttggcactattctccatggagccaagcacgagaaaatgccatagatgcgaattgcccaatacatctgctttttacttgacatgagtaataaacattctatattaatgttgcaagtacggtttcaagggagcattattttgaaacagagagattcattgatgcccggcagcccaactaatgcaaacctactacaaaa

SEQ ID NO: 102685 - DNA, 414 bp, Glycine max
gctctaaactctccgccactcctcatgtttccgattttgttctcccctccgacgcatgctcttcatctccggtagagactctctctctctctctctctctctaatagaacatcgtttctaattataataacgcccaattaattaatcagtttcgtgattcgtgatcgtaattggtgcgtgcacattgcgatagttgcacttgttgctctctcaggacttgttgctcatacgctcatttttctggctgctactgtaaatgccatgtacggctcccttctcatttctttggctgtggctggaggcttcttggttctgtactttgcttttgtgacagctatatatattggagcactatcactggccatcattgctatttccaccgtcacttctttggctgctgtggctttatcatta

SEQ ID NO: 102686 - DNA, 304 bp, Glycine max
ttgtcttggctccgacataaatcccagtctatgacgcttgtcatcttgtaatatcccagtttggatcatagcttatgctttcatctttgaccttctttccctgaaaaagatgcccacacgatattcatctccaagtatagctgtcacaacctccattactgttctctgcaaataataataaaagaaaatagacatattgagcatgggaaaaggtacaatggatagctaactttaagtatttattattcttactttatacatatgaaatctattttcatttgttctgaaggcataacatattatt

SEQ ID NO: 102687 - DNA, 449 bp, Glycine max
  unsure (1)..(449): unsure at all n locations
tataacggggttgagaggtgtagtaacaaattattctgatctatatggggtntccaaacaagtggttaaatctgattattacctatgtctcttctctgtcactctttgtgctgataatacaagttcggggaggaattttaagccaaatagcgggcttatgacagaggacaccctgtcccttatctttttatcctctatgttgaggctgtctccacttttatagccccagcagtggaaaattagactattaataagggttcaaattgtcctacaggtgctgccatctcacaccctaattttgcgtatgacaatattatatttcttgatgctcatcaagaggaagccacgaatatagctactccttcttccatctatgagcaagcttctactcaatgtgtaaaccttgataggcaaagattattgaaatgtttcactatcagcattgatta

SEQ ID NO: 102688 - DNA, 421 bp, Glycine max
agcttcttgtaaagagaataaatcattgaaatctacctcatattcctcttgctcattttttgagcttttgtgacttgtgtctgccattaagaatatgtggacttcttcatttccttcctcttcagaggatttatcatctaggtcttcccatgttagcatgagactcttcttttttcaatatgatcaaagttatcataatattttcctagagatctaatttcgtttaatatgggttgaaacctatattatactcttgtcaacatgatcaaagttatcataatatgtgtctaaagacctaagttcatttaatgtgatttgaaacctaagaaacgtactctgtattctctcgttttattccatattaaacaactcatattgacagacaaataaattgagtttatttcttttacctcatggaacc

SEQ ID NO: 102689 - DNA, 442 bp, Glycine max
  unsure (1)..(442): unsure at all n locations
ctttgaatcctaagagaaaccatgatttgttggcagcctaactctcattacaagcttagaaagtccttcggattcattntgtgtgtttatttctgaatggtatgagatgaaatgcaaaggttaggacttgtgttagttgtttataatggaatgagcctaaacacttgagcttgagtgaaacaatgactataaggctntggtcaatgatccttccttgatatctatcactctcactagcttatttcaattgtgactctaatgcatatgttcctatcttttgaaaagttgcatgtttgtgaaaagcaattgattgaagcattctatgctactcatttcatatgattgaatttttctatgaaacaaacacgttttggattgaccactgtatttggtcacttgaggacaagtgaactgtgcttgatgacatgcaaaaactttaaat

SEQ ID NO: 102690 - DNA, 408 bp, Glycine max
ctgcaagcttggttaacgatacactgttttgtttctattccagtatttgttgtgaatgaatcaaaagatgtaactcttcaaaaggtttttgactttttcaaattggttttaagtttttctaaaagttataacgcttctaaatggtcctcttggccagacatgaagagtctataaatgcaaggctttaatgttctttttaatacattttttacacgtagctcatcttgaacactaattatacaaccctttacagccctaaatcttttgaactcttttcttttgtgacctaagctttttaaaattctggtttacaaaccttgaaacttgtgtattcatttttcatctctatcccttgccaaataaattctcaaggactacccctgaattttttgtgctctctttcttttc

SEQ ID NO: 102691 - DNA, 324 bp, Glycine max
agtgagacgtctctcaatcaagttcttgtgattagaaagatagcagattggtgtgattaaaatactgagattatgttgcatgtgtgcatctaagaggcgactgctagaatataacctgacaaccacttcactaagcttggttgggctgatattgcaaagaagggccttcatgcatcttattcgagatatgagtataaacacttgttaaatatgtgggattctttgcctatcgactgacaggagacggctcagcttatcggacaggacaccggacttggcttggatggcgagaagaaaaccattgctgctaatgcttaatggtgg

SEQ ID NO: 102692 - DNA, 399 bp, Glycine max
  unsure (1)..(399): unsure at all n locations
agctntacttttggatcaaggggagtggttatttacaaatagcagaatcgaaatcacgttcccctaactcaccagtcaccgctaaggtggggnaatacgtttaacatctttaaatcactaaaaaagtgaattgaatgattaaagaagaaaaaaaggtcacggatttaatcatttccactgtcaaaaactaacattctaataatttgtccataaaaaaaaaactaaaaagtgaaatacatgccaagtaggcaagtagatacacccaagtcatctaaacatctcttatttgtgtcacggggaagttacgagcgtgattgatttgaaaatcatgcacctatttctgacacaccgttggaagatatagcagaatcaccttatacagttaggtccacaatcatt

SEQ ID NO: 102693 - DNA, 462 bp, Glycine max
  unsure (1)..(462): unsure at all n locations
tacgtgacctatgatactcagctttaatgcacctgatgacatacctaatactgtcgtacgaactcttaatcaaggttcatctcctatgagcatggactttcatccaattcaacaatctntgcttcttggtctgctgctcttctaaagggcttttaataacattgantttgttttcagttgcatgtntttgctatcaagtttcaatttgacttttatttgatgcaatatgtcagttggtacaaatgtgggggacattgctntgtgggaggtgggttctagggagcggttggtctcaaggaatttcaaagtttgggatcttagtgcatgttcaatgccatttcangttttctctttaccttaatgtatgaatgttctttataggaaattgtgctgaactgtgagagttgtaatgttgtcatgactgaagaaaactaattatgatcaattcatgcggctcttgtc

SEQ ID NO: 102694 - DNA, 426 bp, Glycine max
  unsure (1)..(426): unsure at all n locations
agcttaggctaaattagtctaaactttcgtttgctatttaagctgagtccagtccaacaagagagatcggaggatgaagcttantttaagttagtctaaacctagaagggttgtctaaattaagcctagtccaacaagagggatctgaggacgaaccttgggttgattcagtctgactagggatcaaggtttagtaatttaggctacatcataaaacacaaaagcgcgattaattagagaaacatctttatatacatcagctggtttgttagaaagacccaacacctatacctagtgctgtcaatcttacttacttgcatttttactggttttatgctagacttagtttaattccattctaaatcatcaattatcaatgtttctttcaacaatgccttatttctgaattaaccctgtctaagtcta

SEQ ID NO: 102695 - DNA, 440 bp, Glycine max
tatactatatattgcaggcattggtgcaattctcagatgcagaaactgctacttctgcaaaggatgctttggatggaagaagcatacctatgtgacagttgtattatttgtctgacatgatatttagttcaactgtgatggacatatggctgtagatgtggtgcatatcctcagattggtcaactatagactgttgtaacttgtatattcacactctcactttggtttatttattatgtagtttatatgctgtttttgaacttgtaactgtatgcatcattgaatgtgtaaaatacgggtagttatataacattccaactggaccaatcataagaataaatgtgttaagttcaaagtttttctactaatgagtagttattagcacattcattggctctgctgatatagttatatacattatgcattattattgcgtaact

SEQ ID NO: 102696 - DNA, 441 bp, Glycine max
  unsure (1)..(441): unsure at all n locations
agcttanaaatgaggagcataatggaacattgtcatgtgaagcttgatgttgttgcatacaatgttcttatatccggcctttgtgctaatggtgatattgaaactgcttttaaactttatgaagaaatgaaacaaagagatctttggcctaatacctctatatacatnagtcttattgattctttctgtgctggaaattatcaaattgaaagtgaaaaacttttgagggacatacaagacagggaattggtttcattaaattcatatggaggcaccaaaagattgaatgagttgttgataatttctaggaaagaattaattcacttgaggtacaaaatgagaagaaagtatggctgatcgcattatgtcttttgtttgcccaaaatgtgagttggcagatgatgctgaaccaacagttctgttactcatcaagatgtgata

SEQ ID NO: 102697 - DNA, 429 bp, Glycine max
  unsure (1)..(429): unsure at all n locations
taccttaagatagtgtgttatattgatttacataagagtgaatgctcatttgatataacatggtggaccctagaataaaacagaacctaccttctataagtggggatgaaaccggggggtggaaaatcccttaacctatgttttggcccttggcaaacttcataaatatcaataatttatacttattgttatacttaaaatccaggggatgaaacagtggtcgtcatacctaacanagtgattcaccccanattcccaaccttaacccttctagataaatgtccctaaccaatctttcattttgctagtactatgtaactttttgcataaaaccatgatctttaccacaaatccctttcttttcaaaaacatgaatcaaataacttcatgaagatgaaaactcattntgtcataaagcatgaaaatgca

SEQ ID NO: 102698 - DNA, 451 bp, Glycine max
  unsure (1)..(451): unsure at all n locations
atgcaagcttgaggatatggggaccatcacatgtttactatgtggcggnncggcgatggtgcacaacaagttttccacatccacaatgcgcgcataaacccaccatcctctggtgcccaccttcaactgagctcacgtacttccacgtagcccatatcctcgtttctctcaacaccgggttcccatcaatccttccaagcttccacaacatccaagcaaaacaacattcaaacagcacaagctatcgcggccaagcaaaacagagcaaaggcagataactctgccaaaacaccaaccaaatcacaactgttctcacttaaagaccccaataacaatttcttcgatccaattccgtaaccggtggatcgactccaaaaatttactggaagtctatagtacatgaacctacattgtgagccgtgggatctactaccaaacatccagaactcat

SEQ ID NO: 102699 - DNA, 466 bp, Glycine max
agtgcctgtatattgatgcgcctgaatcggacatccgagtgaaaagttatgaccatttgaatttctcgagagcctcctatggttaattttgagcgtctcgatatattatacgcctgaatcgaacctcagtgtgaaaagttatgaccatttgaatttctttagagcatccgttgttcattttcgagcgtctctatatgtgatgcaccttaatcggacctccgtgtgaaaagttatgaccatttgaatttctcgagagcttccgttgttcaatttcgagcgtctcgacatattatgcgcccgaatcggacatccgtgggaaaagctatgaccatttgaatttctcgagagcttccgttgttcaatttcgagcgtctcgacatattatgcgcccgaatcggacatccgtgggaaaagctatgaccatttgaatttctcgagagcttcccgtgttcaatttcgagcgtct

SEQ ID NO: 102700 - DNA, 415 bp, Glycine max
  unsure (1)..(415): unsure at all n locations
ngcttgtggaggctttatggatgctgaatcttgagcttaatgaggtccttcaatggtgattctccaccatggaggtgcagtggtagacaaaggagaacatgtgagaggatgcgcncctccactatgngaataaagccatggtaaaaaagagcttcaccaccaaataatgtgccttggataagaagcttgtagaggatacttctatggagganaagaaagagagagagagaacgagagatgggggagcacgataatgaaggagttaaagagggagagaagttgaactttgagttgtgtctcacaagactctcattcatgaaagttgtgacaagtgttacacatgtttctatttatagcctaagtcactaactaattgtgaatntcatttccatttcatgtgaatctaagaggaata

SEQ ID NO: 102701 - DNA, 402 bp, Glycine max
  unsure (1)..(402): unsure at all n locations
agctntaaacacattaatttaagaaatacttattatctattggtgaaaaatccgttgtgcctgcctaggatttctggccttgccagctttctttgcttagttgttggcatttttatattcaccgcatgctctgcatttctctttgtagtctcccttaccaaaagttattttacattcttatggagtattacactactcaagtaagactgttacacatggcactgcggttgattcaaaataaattattaaattaaattttaacgggtacaaaactttgtagagtattagctggggattgggagcatattanaatttctcctctctcatagcctgcactctntgctctttcttgctcccacattatcttttcatgtgtgtcatgctccaaatttgtgcactttt

SEQ ID NO: 102702 - DNA, 424 bp, Glycine max
  unsure (1)..(424): unsure at all n locations
ggactgttntagttntgaaactgagaaaaaaaaatgtattcatccaggatatgaaggtataaattgaggcgggaattagaatgtaattcttgatctgctagaccaattattatttatacaatgttcttgcaattaaatttgtctcaagctttttaatggatcgtatcaaagttatgcatatatatttaacgtgcttttggaagacttacttcgtttctcttccgggataacttatacataattatctaaaataagaaactgacataagattcaggtttaccaagtatttggtagtaatgcttcacggccttatttaaaaagaagtaacaccttaaacggcaccggttttaccttatagctttaatgttgtcaatgtcatcttaaacttgataacacgtgaatactgtcatgtatattcaacaac

SEQ ID NO: 102703 - DNA, 445 bp, Glycine max
  unsure (1)..(445): unsure at all n locations
gcttgttaagaattagaaaaatcaagattatgcttgttacacatcgntcgcgtgtatgatatccactccacaaggtttgaagttgaggagaccttcaatcctattacgcaacgtggcggacaaaagtgggcagttaacttgaatggtcatgattgtcaatgcggaaggtattctacacttcactatccatgttcacacattattgcagattgtggttacgtgagcatgaactactattaatatatagatgttgtttacacaaatgaacacatcttaaaagcttactccgcacaatagtggcctcttgggaatgaagtggctattcctccttctaatgacacatggacacttattcctgacccaactacaatttgtgcgaaaggtcggccaaaatcaacaaggataaggaatgagatggattgtgtcgaaccatctgatcaccgac

SEQ ID NO: 102704 - DNA, 460 bp, Glycine max
  unsure (1)..(460): unsure at all n locations
tactaacgctagcctggctgaaggcacctgctgtgcttagcgcactgatctcgtgcttagcgcactgaactactgtgcttaacgcacctgcttgcggattctcttttgcgctaagcacactaaagctgctcttaaccgaggatatgcgcctaacccaactggtgagcttagcctaactgctacantttgcaattcaaaacttagcctncttttcacctgaaaatgcacaaatttcatcattaaatctaatggaaatgttctagagacaacattaaccataaaacaagatttatttacaaaaatcactacaaaataaccataaattggggaactatacaagctttggaaaatgatttctataccaaagttagtcgtataaagagactatcaaactcccccaaatttacaagtttgcttgtcctcaagcaaagaaaaaatagttcacttgtcctcaagtgac

SEQ ID NO: 102705 - DNA, 284 bp, Glycine max
ggtgacatctcaaaaggggagacaactagacattctcttgaagatctatgcacgaaaatggcttttgtatctatgattgaacctaaaaatataaaagaagccatagtagatgataactggatcattgccatgcaagaagaactaaaccaatttgagagaaacaatgtgtggaaattagtagaaaaacctgaaaattatcctatcatacgaacaaaatgggtctttacaaagaaattatatgagcctggcataattattaaaaataaagccaggttagtagcaaa

SEQ ID NO: 102706 - DNA, 406 bp, Glycine max
  unsure (1)..(406): unsure at all n locations
tacgtgacactgtctgtatatagagctctctatcaagccatatagaatagtgggcatgtggaaccattctatgncaacagagctttggaatctgcagaaaagatagcttaagttacaagtacataaaagtactattttatcaacaagaaaatacaacagggtctggctgagataattttgttattttcaattcaaaccaaaaggaaaagttatatttgaatgaaagaaaagcaataatcaaatcataaagaaaatagtaattatttaaatcagatcataaacaaatgagtatatgactaacaacaaaaatgctaatttcttgatggtgctagctngcatataattctaaccttccctgtgcctcttggatctgtantaggaagattatgagaaacaataattcttc

SEQ ID NO: 102707 - DNA, 345 bp, Glycine max
ctaattgatggacgttttagtgttattgatctctttattatgttaaaataaaagtgcacgcttgtattaatgtaataacgagatgttcgggttatggcaaatttggaagttacatgagagttactaaaactgtcatccactgtgggaaggtactaaaacttccatcaacggtagtttttaaaataaaataactttcatctaccaccaaaaaccacctattctttgatcataaataatcattctggtcaaaaagataacgggtgaaaaacatcaagaccaaacacaactcttgaattataacttctgatttatccgatcgacaatttgggtgaaccctgaatttga

SEQ ID NO: 102708 - DNA, 455 bp, Glycine max
  unsure (1)..(455): unsure at all n locations
tgcatgatntacatctnccctctttctcaagcttattcttctttatatcatcaaaagcttcaagatttacagattatgggggatcaagtgactatggatccaaaaaataagtttctttcctcaaaatggatgcaactgttctatcttgcagagatttcttcttctctcgaccctggttcttctcantggagctttaatgtctaagtccagaggaactaaattgcctgtgggagatctatgcatataaaatactaacaaacacaacgattatccaattcaataagagaagataaatatgatttgaaaacaactattcataaataatccaagaataacgaataaagaatagacacgctaaaacgaactaactntccaaataataagaaattccccggcaacggcgccaaanacttgttcgattcgggcagtgcccggatcacgcagagttaaaacgg

SEQ ID NO: 102709 - DNA, 403 bp, Glycine max
  unsure (1)..(403): unsure at all n locations
ctgcagcttntttatatggaaaactttgcatttttgccttatataggtagaggacgaaacaaataaataacacaatcaactcccaaatggattttggtcacagcctaacaattcaccaccttgaactaacatccatataggacacaaactgctccctccaagcacacatgaacttaaccccaacaatcaacattgagcaagcttaagcagggatcaaacttgctctttggaactggatttgtgaacatatcagcaggattgtgcaaagtgctgaccttatgaattttgattcttctttctgaccgaatgaagtgatatctaacatctatatgcttggttctatcatgatgtacctgatccttggccagcatatagcactaatgttgcacagtagatgttagca

SEQ ID NO: 102710 - DNA, 445 bp, Glycine max
  unsure (1)..(445): unsure at all n locations
cctatgatactaagctatcaagcctttatggttgaacagctctaatgcttggtagataggctaagttcatttctagtttcacatggattcaccagaagaataacggaccccgcactattcataaaggctcaaaaaggagaccttcctattattcatatctatgttgatgacataatctttggtgcaacctcaaaaaagatgtgaaaggagtcttctgaattaatgaagggtgggttcgaaacgagtatgaaaggtgagctaaagtttctcctatgacttcaaatcattcagaaagttcatgggatttttatccatcaagagaaatatatgaagccccttctaaaagggtcagaatggatgaagccaaacctatggcaacccctatgcatctgttccacaatcttgacnaggatgagaaaggttatgatatttccataaaggagta

SEQ ID NO: 102711 - DNA, 438 bp, Glycine max
  unsure (1)..(438): unsure at all n locations
tctgtgagattgttaatcttatttaactcatgactcatttttcgttttttcgnccgctgtgttaacatttttgcatgaaacactctccttaaaggcgtgcttgagatatttctattatacgtgactaatataaaagcttgtttgatcagaatatattattcaataaagaggtttatttcattaattctatattatttatttaaaatattatattaagtgtgtttgacaagatttttaaactatatttaacttagttgacaaacttaaaaactcatcaggtcaaataaattttgtttggtaaatttttttaattaaatcaaagagaacaatactatatctaatacgatgaataatacctataaactctagttttgctaaaaaataattaaattcctaattatgctgtaatgattcaattgtcgactgaattatggaaaa

SEQ ID NO: 102712 - DNA, 440 bp, Glycine max
  unsure (1)..(440): unsure at all n locations
tgcaagcttaggctgatcaagactatatatcaaatgttccatactcaagngtngttggcagtctcatgtatgtcatggtatgcaccacacctgaccttgcttatgctgttagcatggtcagtaggttcttaaaccaacctcataaggaacattggaaggctgtgaagagaattttcaaatatcttaaagggactgtagatgtaggtttgatctatggatctcactcagattactgcctcactggctattctgatgtagattttgctgctggtcttgtcaaaagaaggttcctaacagggtatgcttacacccttggtggctgcttggtgagttggaaggcaacacttcaactttctgttgccctctcaactactgaggctgaatatatggctcttactgaagctgcaaagaaggaattggctaaatgtctgataatgatc

SEQ ID NO: 102713 - DNA, 459 bp, Glycine max
  unsure (1)..(459): unsure at all n locations
ntntattntcagtagatgaagatgaatctgtggccacctcatggactcctctaaagacaataacattatttcttgcactgaattgttgggagttaaaagccatcttctcaataaaattcctagcctcagcaggggtcatatcaccaagagctccaccactaggagcatcaatcatactcctctccatgttgctaagtccctcatagaaatattgaagaaggagttgctcagaaatctggtggtgaggacagctcacacataatttcttgaatctttcctagtactcatacaagctctctccactaagttgcctgatgcctgaaatgtcttttctgttggcagtggtcctagatgcagggaagaatttcccaagaacaacctcttaaggtcatcacagctganaatggatatgggagcaaggaagtagagccaatcttttgccactccctccagagaatg

SEQ ID NO: 102714 - DNA, 453 bp, Glycine max
tggagccatagtctccacaccccatttaataatgaaattccctaccctgaccgaggagattgtaaccattaaggtagaccaaatgcaagcacaataatgctatgcagaacgcctgaaggtagcaccatatccttccaccagggagcctagcaagcctcacccaaaagcggctgaaggcactcaagtcataagtgtggacagagggcttccaatctgagccctcaccgtctaacaagcaagcctagacaatgaatttgacatagatctgtgagatgacacctatgacagaggcctaaaacccatcgaagacctcattaagttgcagctcggaactaaacccgagcagtgtatgcagccgagtagggacctcaccagtcatgagcaccggcgcatcgtcgatgtgctacagagaaatgtggatttgttgcttggaaccatctgaatgtcagaatc

SEQ ID NO: 102715 - DNA, 441 bp, Glycine max
  unsure (1)..(441): unsure at all n locations
agcttcattaagaggcttccttcagaagctttattaagaggcttctagcacactccagacatcttctcaaagatcccaacggtcagatcatggaagcgtgttttgtgaagttgcagaccaaatttcgagacgatccaacggttaatgaaggctaggaagcgtttttaccgaagcagcttcatgtagctntctctagaagcttcattaagaggcttcctctagaagcttcctcgtggcttctttgagaagttttctcaagaggcttctttgagaagctacatccttatctatccacccctctattaactaaattaacttccttaanaataattacggatgaaaataacgcaacaaataatcaaacatcaaacataattactaataatatatagatatatatatcagggtggtacacatcatatattgagaacgctcgaaatg

SEQ ID NO: 102716 - DNA, 464 bp, Glycine max
  unsure (1)..(464): unsure at all n locations
tacggacctatgaatactcagcttttatccaggcaattcttggtggtgaagctccttcttccttggcttattccctagtggatggtgcctcccctatcctcttctcctttgcctttcgctgcatctccatggtgaaaaatcaccattgaaggacctcattgaagctcaaagatccagcctccatagaagctccacaagcaagcttccatcaagttatgctcgagatcttccgtggttcaatttcgggcgtctccatatgtgatgtgcttgaatcggacctccgtgtgaaaagttatgaccatttgaatttctcgagatcttccgtggttcaatttcgggcgtctccatatgtgatgtgcttgaatcggacatctgagtgaaaagtaatgacaatttcaatttctcgagagcttctgtggttcaatntcaagcgcttcgatatattatgcgcctgaatccgacat

SEQ ID NO: 102717 - DNA, 300 bp, Glycine max
  unsure (1)..(300): unsure at all n locations
ggggggttgaataaaaatattaaacttatttccccaattaaaattctatttcactttctatacaagttataaattcccttaataatgaatttcttaaatattgattcaaataaaacaatttggatatgaatataaacaataataaataaatgagtttaagagaagagaaaatgcaaactcagaattatactggttcggccacacccttgtgcctatgtccagtcctcaagcaacccgcttgagagttccactatcnttgaaattccttttacaagttctaaacacacaaggacaacccct

SEQ ID NO: 102718 - DNA, 390 bp, Glycine max
atcctgagagctaccgtagttcaattcgagtgcctgtatattgatgcgcctgaatcagacatccgagtgaaaagttatgaccatttgaatttctcgagagcttcctatgtttaatttcgagcgtgtcgatatattatacgcctgaatcgaacctcagtggtagaaggtatgaccatttgaatttctcgagagcattcgatgttcattgtcgagcgtcttatatgtgatgcacctgaatcggacctccgtgtgaaaagatatgaccatttgaatttctcgagagcttccgttgttcgaattcgagcgtctcgacatattatgcgcccgaatcggacattcgtgggaaaagctatgaccatttgaatttctcgagagcttacgatgtcaatt

SEQ ID NO: 102719 - DNA, 383 bp, Glycine max
cgagctaataaataggatatcttacttatgatacaagtcatccttagccaaagcactctaagaatcgagacaaattcttcctaccttatagaatatttataaacacattcattagagaagccatagtgaacatggaatccaaaaaggtgtaataggagtttgtccttaaaataatcacaatgaaggaaaaaatcaataaacaattaagggattgctacttttggaattatctgagaacacaacaaagttgttgtaaatgtcaacaactagtagttgttgggggttggagctggagaagctagtgaaagaatacttgggttgagtgagagcttgtagaggctgagaatactagtgaagggcttgcacaggctaggagaatactg

SEQ ID NO: 102720 - DNA, 354 bp, Glycine max
  unsure (1)..(354): unsure at all n locations
ntagattaccgtgcttgtgattcgtaatgaaaatttgaaattcattacttgttatgaggagaaagtaaccaaccaagagtaccatactaaattggatgtttacctaagagtagcatgctattcaaagtagccttagacttaaacattaattttaattgatataaattgtcttgaccccttaattgtctatagtggtgacatactacggttaaacattaattatangaaggtggttggtaaactggtggattataagctgggggtttgtagtcaggttgcttctcatcaagtgggagcttatacactagttgttcctctactgggaacttgttgtcatcggcaagaacttgaggg

SEQ ID NO: 102721 - DNA, 450 bp, Glycine max
  unsure (1)..(450): unsure at all n locations
ctatcaaaatctatcacattggatgtctggtccttctcagcattctgaactgtatgacaatcntgatcggaatcttcatatccatcctgctcactgaaaggcattctctttttaccccatctctggccgctcttcttgttggttattccataccactgaaatgttttctgaaacactcagttgacatttacaagtcaattgaaatatcatgacaaaaataatagcgtatctccaacaataccaaaaagatgaatcctttgccttctccaaagatttcacaatattacaagaactgacatgcaattacaactgtgcacccaaatttgattatttaatcaatatattgagttttacaaccttcaagctattcttaagaaggattcttcttaatttacatatgccgtaacatatatatatatatatctacttatctatctctatatatatata

SEQ ID NO: 102722 - DNA, 445 bp, Glycine max
  unsure (1)..(445): unsure at all n locations
agctntataccaagaacaatctggaaaaatttacagtatcacattacaatttaaaatgcttaaatgacatcaaaagatagaattgtgcaggtctaccaaaaaaactaaagagtagtgtgcgcccacaataattgccctttcgcctccaacattaaaggaccaaaagcatctaatatgaacggaattcactcttggtcttctaaattaataaaatatatagctaatgaaaagcttcagatttcgagctacaaaagaacttaatctgattggactctacctgtctacctatccattaagttaaaattgtactcttacattacaggttaaaagagtatcataaattaagaatcatgtttaacaattaacacttgtcaaacatgaatagcaagaagtttgtgtataatcaattgaataatattatttataaatatgtgacaaactaatg

SEQ ID NO: 102723 - DNA, 420 bp, Glycine max
tgccctaatttgaagcatatttggcattcccattatgtattttctgacatttctttagccttgatagttcatggaaatcaagttctgaaggagagtacttgtttccaccttatcaacttttgcaaagcgcttttcaatttcagtaagaaattctttggcactagttatatcatctgaatcaatgctcctaaagacctcaggaatgcgatgcttaatgatcataagactcatgcgatttaagtgatcccacttctcatgaagtttcctctgttaagagatggtggaacttgtatgagaagggggtgtctcaatccttaatgcaaggtctagatccatgcagcccaaaacaaattgaatgttttctttccagtccttataatttgcaccattaagaactggaaccgaatcaaattatctgat

SEQ ID NO: 102724 - DNA, 432 bp, Glycine max
  unsure (1)..(432): unsure at all n locations
agctttggagtttccaagtgccaattcgtcttcttctttagtccaggcttcttctggcttcaattcatcagtgggctttccttctgtgtccagcatcttgggatgttcccagcctttgataacagctttccaggttctgctatccagtgatttgaggaagggcaccatccctgctttccagtattcatagatggttccatctaagattggtggtctgttcactggtcctccttctttctccatgttcatcagaatttatctccctaggtctcactcaatgatttcgagtgcctgctctgataccaattgaaattctgatactggggacagatgtcgtacaggatgtcacgacatcacgcttcagaacatgcagaatgtcttngactgtgtgaacagattaaacaagtaaataacacaagagaattggttacc

SEQ ID NO: 102725 - DNA, 471 bp, Glycine max
tggagcttctatggaagctggatctttgagcttcaatgaggtcctttaatggtgaatttccaccatggagatgcagcgaaagaccaaggaaaaaaagggagaggaggggcccttcactaagggataagccatggaaaaagagcttcaccacccaagatgaacctttgataagaagcttggagaggatgcttcaatggagggaaaagaaagagggagagaaagagagaggggggagcacgaaattgaaggaagaaaatgggagagaagttgaactttgagttgtgtctcacaagactctcattcatcaaagttacaacaagtgttacacatgcttctatttatagactaggtagcttccttgagaagctttcttaagaaaacttccttgagaagcttctttgagaaaacttccttgagaagctagagtttagctacacacacccatctaaaaaataagctcaccttcttgag

SEQ ID NO: 102726 - DNA, 376 bp, Glycine max
  unsure (1)..(376): unsure at all n locations
agcttataaaatggccaggtacanaagatgtatgttcgataatattcatcatggagtacttttgaggcattaacatgcttaattgaatttattggcctacatattctacatgttatgcatcttaggagagtacttttgagcatctattttctttcctatttgaaaaccacaacaacaatagccttatctcgttaggaaagttggctacatagattacacaatgtcattgggctatgttaaagacaagtttttaaggatatttttcatcacaagatccattttaataatatcttcaaatatccttcttggtctccctttatccctttatccttcatgatggtgagcaaagggtgttgctgttgttgcttaatgcaac

SEQ ID NO: 102727 - DNA, 464 bp, Glycine max
tgggtgatgggcggccgaatcaccttgctatgtgcgactgtgactccgaatgactggcagagtcctgtgatcaatgcgggaaatcccaaggccctgttggacttatacgggtccagagggtgcctggtaggcgccatacctgcaaatagatagatggcatcagcgattaactgagccacgtgaatgctcatccgcgtcaggatggcgtacaccagctgacacttctgcagggggaggttggaattatggtcgctgggctggatgttgctgagcagcaaagtcatccagatctgagtcagggtggtcatgttggtgcgcatgatccgcacccgtctcccggcagcagtctcggcaaaatcctgccccggtatacatagaagatgggcgatggcctcctcatcgaacccatcggaccagttcctcctctgcccatactcgcactcctgacccttctccagcactat

SEQ ID NO: 102728 - DNA, 302 bp, Glycine max
atgcaacaaggccagaattgactatgttctttttttgatcagaagaatatattggtcctggagttaattgtgcttgggcttggcgaccacgatcaacaaagtactttcagctcctactatatgtgaactagaccaaccgctgtattggtatgctgcgacaattctgcaacacctaattcatacattctgagaggttggttgtcatatgaccatatcttcgcccagatgtatcttaagccatgctccatctttccttcggaatgcgatcaaaccatgttgctatggctggactcaattgacga

SEQ ID NO: 102729 - DNA, 418 bp, Glycine max
  unsure (1)..(418): unsure at all n locations
ngaactttgccctaagctgctccctctacctttataaatgttgtattaatacatttcacaagccactaccaacaaattttcaagacataatacttgcatgccatgtgtgcaacatttgaataatgattttggcatccgattctgttacttactttctttcaacattaacacgaggttgacattagctagtagttcacgactaaatattgcacacgaaatagatacggatgaagttatgaaagattgatgagccataatgacatcatctaaaagaataacaatttcaccatcatacatcaaagagataaaaacgaagttaaacttacccttgacttgttcatcccagcataacttagtgccaaggtggttttacccgttcctcccataaccagtagcataacaacggatacaccatctc

SEQ ID NO: 102730 - DNA, 357 bp, Glycine max
  unsure (1)..(357): unsure at all n locations
ttttaataacntatctattattcatgcgttaccctaagtttaatcccaaatgaccattgcaggatttgtacaccctgagatgttatntattataaatcgatgttaatagtgtttagcttgtcgtttgaatatatgtttgactcgaatgatgttaaatatgacttgaattagtcatgtgtgaatttcttgatgtggatgttgaattatgtggagttttgttgagcgaaacttaaattttgagattttagattttaccaaaacctagttccgtgaaatctcgattcctgatttgtttaccgttggatcattttcaagatattgtttggatccttctaggatctgtttctacattctgac

SEQ ID NO: 102731 - DNA, 435 bp, Glycine max
  unsure (1)..(435): unsure at all n locations
ntgatttcctntgttccgaanacctttctttctcatgtgttccctaacccaatctccgggttcgaagacaaccttctttctccctttgttggcttggttagcataacttttatttctcctctcaatttgattttgactctctcatgaagcttcttcacatagtccgcctttgcttgaccttctttatgctgaaaagctgaaacattatgcataggcaatagatctagaggagttagtgggttaaaaccataaacaacttcagaatgagaacaattagtggtgctatgaacagctctattgtaagcaaactcaacatggggtaaacaagcttcccaagtttttaagttcttcctcaaaactgttctaagcgaagttcccaatgttcttattacaactntcatttgcccattggtttgatatttatgcccatacaat

SEQ ID NO: 102732 - DNA, 425 bp, Glycine max
gctttaaaattaaatacaaattttctatttctgttacaaacagattaaacttctggttatcaatcgcataccttgtgtaattgattacatgcttttaaattcaaattcaaaattttcaaattgtgtcaaatatcaatttaaccactggtaatcgattacatcctctggtaatcgattaccagagatgaaatatcatattttcgaaaagatatttgttcttaaaaaacttttgtaaaatatttcctttatccaaacctgtgcagcatcaattaaggaattctttctaagatcctaactaagtacatcgttcttcttgcatttctgaattcttgacttgaatcgcactcatctttggtatcatcaaaactttatatcatatatgcttctatagatgagaaatatgatgatttttagatgaattgagt

SEQ ID NO: 102733 - DNA, 419 bp, Glycine max
  unsure (1)..(419): unsure at all n locations
ggagaaancacttgaattgaaatctaataaataacttatcatnaatacttaancntaaacataaggagagaagtattatctccataatacccaaattatttccgcattattcagtatcataacttacctcatattcttctatcttaagaacagtagctggaaaaaaatcagcccgttaatcattagctattacggtgcactgtgccttgtctttcataactagcattcacaggatccttattcttcaaagcttaaattagttttatcacaaaatatttctaattataaaataatattttataatagagcgttcacgggacaactgctggatcatcttatgtcatgtcctcctttggagcaatgctctactgatattcagttggcgttaaccagatgttgagaactccaagtttatgagt

SEQ ID NO: 102734 - DNA, 212 bp, Glycine max
  unsure (1)..(212): unsure at all n locations
gacgcagcngaccaaaccgaccacaaaactgctccagggaaaaaaaggacgnccggcgcgacaacccaaacggaacgaccatggacggcggagagcgagaaaaagagaacaacgccgctgaacgagcacacaaggagaggaggaaagacctacaaagccaaaagaaagaggggaggccgccattgaaagcgcaccaaaggaaaaagcacaac

SEQ ID NO: 102735 - DNA, 363 bp, Glycine max
  unsure (1)..(363): unsure at all n locations
cactatagcatactagagcttgtgtcacaattcaccatgacagtcaaagtgttattctcttatcttatcaccaaatgtaccatgagatgacacagcacatatatgtgtaacttcacttcatcagagatgtgattgaatctgaatatgtgacagtgtgaaaggtttctacacaagaaaacaccgctgatttgtncacaaagaccctttctagtgtcaagttcaaacattgtctggactcgataattttgtagatgcctacaacagattggtagaagtgcaacccctaatcataagatagacacttgctgatttggagtcaatgcggagatatgaggtgtgtgacacaatatcataattgacaca

SEQ ID NO: 102736 - DNA, 388 bp, Glycine max
agcttcatgatgttgaatcaagattgattctttgagttttgatgatgacaaagataatgacaaaaagcccatgataatgatttcaagattgagtcaagaacaattcaagaatcaagagaaagattcaagagaagtttcaagtttcaagttttcaagaatcaagaatcaagaataatcaagaacaagattcaagactcaagattcaagaatcaagagaagactcaatcaagataagtactaaaaagtttttcaaaacattgagtagcacatgattttttcacaaaaccttttaccaaagagtttttactctctggtaatcgattaccagtttattgtaatcgattactagtagcaaagattggtttcaaaaacttttactgaattacaa

SEQ ID NO: 102737 - DNA, 363 bp, Glycine max
  unsure (1)..(363): unsure at all n locations
tcttagtttcagatgatgcagatgggtntgtagctacctcatgcactcctctaatgactatggcatcatttctggcgctaaactgctgggagttggaggccatcttctcaattaaatttctggcttcagcaggagtcatgtctccaatggctccaccactggcagcatctatcatacttctctccatattactgagtccttcataaaaatattagagaagaagctgttctgaaatctgatggggggggcaactggcacatagtttcttaaatctctctcagtactcatacaggctctctccactgagttgtctaatacctgagatatccttccttatggctgtggtcctggaagcanggaaaa

SEQ ID NO: 102738 - DNA, 415 bp, Glycine max
  unsure (1)..(415): unsure at all n locations
agcntttgaaacaaaacatttcctggttatcgattaccagagagtaaaatctctttggtgaaagcttttgtgaaagcttcatgtgcttcttaatgtgttgaaaaactattttgtacttatcttgattgagccttttcttgattcttgaatcttgatcttgattattcttggttcttgattcttgaaaacttgaaacttgaaacttgagcctacaaggtgctcgtcccccccagcaaggtcatgccatagttacataggtaagtatgcacttctctcaattgatttatgattgcatctattgtatgcatggattgcgcctgcaagacacccattggacccagagaagtccaacagggtcttggggttttcagctctgattaccggcctctatcagtcttctgagtgccttctgccc

SEQ ID NO: 102739 - DNA, 429 bp, Glycine max
  unsure (1)..(429): unsure at all n locations
ctacaactaagttatgagaaagttaagaacagaaacaataacttagacaaaagtaaagcagaaataaaaagtacacagcggaaaataaagagtgtcgggaagaagaagacaaacacaagatttatactggttcggccacaacccgtgcctacatccagtccccaagcaaccaccgattcttgagatttccaataaccttgtaaaatcctntacaagcaaagatccacaacggatgtatcctcccttgttctctttgaacaaccaagtggatgtacgctccactcgaactgatccacaagagatgtaccctctcttgttctcagtatcacaacccaagttgatgtacgctctacttgtaccacaaaggatatactgctcaatgtgttaagacaaagaattcttatgcggttagtcccttgaattcttgta

SEQ ID NO: 102740 - DNA, 436 bp, Glycine max
  unsure (1)..(436): unsure at all n locations
atgaggggtgtgtaatcatcaagcgtggtgtgtgtggtctattgatgaggtggtctgtgttgtggttatggaggggttgtgtgccgttgttgaagtgtaaagtggtgtggtatcactcaagcatggggtgtgtgtatagaatgaaagtgtnnatgtgtgggtgtatcactcannncgtgtggtgttgttgtcttgtgtgaatgaaggggtgtgttgtgtcgtcttttgttgttaggtcaagggtggttgtgttgtgtttgtcattgaggggtgtctntgtgttgtgagtgtgtcanagttgattctttaatttcttataaattaaaaaactcgactacatatttgtatagttagccaagaagatatatggacatataatagtctcagactttggtataaagtagtatttctagttgttctagttagagccttcttg

SEQ ID NO: 102741 - DNA, 352 bp, Glycine max
tgcagcttctaagtttctggtttccaaaccttgaaaacttgtgctattcatcttttcattctcttctccctttgtcaaaaagaattcgccaaagactaaccgcctgaattctttttgtgtctctcttctcccttttccaaaagaacaaaggactaaccgcctgaattcttttgtgtctcccttctccctcgtcaaagaattcaaaacgacacagtctgagaattcttttgattcttcccattcccttatacaaaagtgttcaaaggactaaccgcctgagaattcttttgtatccccattcacaaagtatcaaagggttaacagcatgagatctttgtcttaacacattgga

SEQ ID NO: 102742 - DNA, 446 bp, Glycine max
  unsure (1)..(446): unsure at all n locations
ntgagccaaaatcctgactcaccataaaccttgacccagggtgagaatgtttatccttaccctcggaagcgaaaaggaaagaaagaagatttcccatccaagagaaagccaaaaaaaaagaaagagccgaaaggaaattccccaattcaaagagtgggagaaaagcaaaagaaaagaaagaaaaattcccaatcaaagaatgggagaaagtaaanaggaagaagaagaaggaagaaagctcctgatcanggattgaaggaaaacagaagaaatgtgcagagaggtctttggaccggacaatatctgaacaatacagaattgtcaccaaatgaacaaaaaaagaaggaaaggaaaccacgacctataatggtcttctccctttgattaccaaccaaaatcccgtgcgctagcgacttttttttcgccccgccttaacaaaaaaaaaa

SEQ ID NO: 102743 - DNA, 440 bp, Glycine max
  unsure (1)..(440): unsure at all n locations
agcttcatcctcctcagctnttgtttaaccggtgaacacttatgatttagaggtaatctgtgtggtacgatgtccgaactcaaaccgggcatatcttggtatgaccaggcaaagatgtcttgatagttttttagcagggccatcatttcttcatggatgggtgcgatcatacccgngcctatctttacttcctttttcccactattggttcctaagtccactagttccgtctcttcttgatgaggccccatctcttggtcctcatgggcaactatattctccaactctgggggaagtcccacatcctcatcctctttactttccgtctgatctgtttcttgcttgaaatcgatggtcgggtcccaggtattagtaccttcgagggactcgtcgtcggatctggcattttaagagtaaagaaataaacatgcaaatgaatg

SEQ ID NO: 102744 - DNA, 439 bp, Glycine max
tatgtgtcagaaggaggaggaggcgaggctggtggagaagccataatcctttatctgatagggaatctgttcctgttgaaaataaaggctgtgaagagattgcacaaacttcaaatattgcaaatttaaaaacataaaactgaagttggcctaccaaatgatgagattaaagatgctgtagctagtgaattataaatcaagggcaacaaagagagaactcaaacacagaaggaaaaattatcaaatgaagaagttagtgccacagataagggaaacaaagagagcactgaaacacacaaggaaaaattatcaaatgaagaagttagtgccacaaatgagggtagtgcagagaataacatcaaaagaaactataatgaagtcagtaaattttgaagataaggacaaagaacaaagcatacaaaattcaaaaatgaaaact

SEQ ID NO: 102745 - DNA, 349 bp, Glycine max
  unsure (1)..(349): unsure at all n locations
acctgcagctcaagctntaangaagctttccttatggatttttggatttatgggccctaaatatactatctctacagctggtgctacaagtaacttttgtatattgaatgcaacataccatatcattagaggcgaaactgcaagcatttatgctatagtatgtgctcttaggatcttagaattttcatattttcccttacctttttttttttggacaaaatctgggtcaatgatgctctctttttgtccaaagtggtaacaaatntagtaaacatgaaatttgtctgcaggatgtgactgcttgtggtggctcagatgcngctattataccaattgggatccttttatt

SEQ ID NO: 102746 - DNA, 409 bp, Glycine max
  unsure (1)..(409): unsure at all n locations
ctctcctcgcccaagcattaacacctgttagtttttacttggtcaccataattgcaagaagctaaaactaatcaaaaatctagataaaccattttagattgttcataatacctaaaatagaataagaaaattgttgactgcctgccacaaagttaaggataataaagaactaagaccacttgttcaaacaaaacttgcangaaataagaatgtatttacatactcttaacagcatgagacacacacacacgcacacacacacagttcacaaaaattgagaagccaacaacttataataaagatgtgaacttattattgttgaagccccacaaaaaaagaaaagaagaatctctttatcagcagcagcagcagctacattatataaagtgtagagtccaaattatatata

SEQ ID NO: 102747 - DNA, 459 bp, Glycine max
  unsure (1)..(459): unsure at all n locations
gtcacctgcggatgcaactattgaggacctatcaccccatatgtttgatgtgtggaatgttgcaattgaaatcctttctttngcagagttcaccattgcacgatgctcaacacttcggtatattccattacttataatctgccatgtaaaagtaaaacaatgcaaacaaaaccaaaatcaaccaggggtcacgagttaacttggatcaagtttaatttatctactgattttgttcttcgtatgatcatagtttaattcatgtgacaccagcagctagaatcaatctaaattatatacagggagatttgttaacttacacccttatcttataggtgagggatgttaccaagttaaatttcaaatatattttaagataatccaaggcacaacttgttaatgtattttttctaaaaataaacaaatgtatacgttagaaaatatatatctctctcacacgta

SEQ ID NO: 102748 - DNA, 472 bp, Glycine max
  unsure (1)..(472): unsure at all n locations
tagagacacatgatgttcatccctcatgagtttgagtcatgtctattaatgaatcagacattgcaagactcccatatttgagtgcaatagtaaaagagacctttcgcatgcacccaggtgtcccacttttgctacctagaaaagccaacatatattgatggatgtggagatcaatgactacaccatcccacagggtgcacaaatagtgattaatgaatgggccattggaaggaacccaagcatatgggaaaaccctaattcattttcacctgagaggtttttgggttcaaagatggatgttaaaggtcgacattntcaactaattaacaccgtttggtggcgggcgacgaatatgccctggttggccactagctataaggatgttgcatttgatgttgggatcattaatcaatggctntgattggaaatttgacaatggtggtaacccagatgttgacatgggtcaacccat

SEQ ID NO: 102749 - DNA, 417 bp, Glycine max
  unsure (1)..(417): unsure at all n locations
agcttaaagtacgcccgagtcattcatctctatgagatgtngnngaagtattggcgatcagaattgccattcgttggattatagggttgaaccaagctcatgcttttacaaaaaagttcatcaagtcaagttgaaatatggaagtaaccgtcttgcaaaattgaggcaaaagatgaatcgagtcacatcactgcttcgtctactgccaaacatatttaggattattgatgtccttgttacttccagtttcaccttgacaaagatgtcatggaccatgttgaaaatctaaattgattcaaccccatatcttgcgtaaaaattcgcaatacttcaactgtacatcattcgcatgcattcatgcttttcattggttgcattggctcgtgcattcttttcttgaaaaaataaataaaatga

SEQ ID NO: 102750 - DNA, 419 bp, Glycine max
  unsure (1)..(419): unsure at all n locations
ttttgctgcanaattccttntaggtttacgctaaaggtggttgttgggcattgngcagtggtaagcaagcaggccttgcggctganttggggatggcttttatggatgactgggtggtgggtaatgagaaaggctaatattggctgagtaatgatgttgttgagctagtggaggattttccatgtatgaacggcagccgcaacatgggtttctccttcattctcaccctcttcatttgccccaggtttctcattcatccaagcaggatgatcagatttgcctcttttcagacccactttgatcctttcgccggtgaagaccaaatccgcaaactttaaggtgcgtaccccaccattttttcatagtaaaacactggtaatgtgtctactattattgtgatcatctncttctncatcatt

SEQ ID NO: 102751 - DNA, 441 bp, Glycine max
  unsure (1)..(441): unsure at all n locations
catgcagcttaatattntataagaatttgtgttttgttacaccaatagctagtctacaccaaaagagagaacgatataaacgagggaagagtgacaatatgataactgataatgatatgatgtgatatangaaagtagagacagggaaatgagaggtgttaaatgccacaaatggattctctcgcgtgatgttacctttgcatgagatcctatcccttcaataagtttcattaacgtaaatatatttttattttaaaaatgagatttaaaagaataaacggtgagattgtgacacttaacatggtcaaatagagaatccattccaactaaatgagtgtttatatgattgaggtgtctatgcatcattcattgttgttttgataatgtgtctttggagggatacaactagttaatatttagataactcagactgggtcaatc

SEQ ID NO: 102752 - DNA, 454 bp, Glycine max
  unsure (1)..(454): unsure at all n locations
taacaattaanagcatcagtagcgttcaaggcaaggaaagttaatctgactntaagaatcaaccaccattcaaaagagagaaatattgcagtagtacgggttaaaaacaacatccatagttatgcataacaattgcatcaatactgctaatagattttaactaatagactttagttgccaatacttttggttagattttccattgaacaaaacaaatatgaaatataaataacaggtttacccaaggaatgaaattaatgtcggcaaacaatattggactgagctcctgaaagaaatgcatcctatgacataattgactgaaaaaaaattgctagctaatgatggataggaacctgtgtaccaatggaaaacagaagcatcaaatcaatgtgataaagaggaaaaacaaaaaagaagcataaanaagtaggatggacaggaaaatgcaatagtg

SEQ ID NO: 102753 - DNA, 358 bp, Glycine max
  unsure (1)..(358): unsure at all n locations
agcttttggtcttaaataaaagggttntctctttntctatnatattattcaagctctgccacatgtccctatatgattggagcaaaaagggcctactttctcttttgatggcgacccatactcagccacaaaaagtgagaaaaacctgaccttcgaaacgctaaaatcctgcctcggtttgcatgccgtttctctggttccagtttctcgcgtttctctgcgtccgtcggggccagttttcgaaagtaaccaatatatatatcaaaacgctcaaaataaaaccccgagcgtggttcagaggttggtttcgttaaattctaagtcgcacgcaaaatgatgatttttaaactaattaatt

SEQ ID NO: 102754 - DNA, 384 bp, Glycine max
  unsure (1)..(384): unsure at all n locations
tatcaatatcatgactccagtatgtgccacccatggtgagtgacatatatgcagaagcatatcaccacgtcaccagtgcatgacacccacgaagagtggcatgcatgcaagagcacgatgctcaaaacccaagtcagacaattccctggtcaatccttcaaagggctcacaaaacctaggtccacccttggtgagtcacactgattcacaccaccatgtttcaagtacctaccactntgtaagaggcgtgtatgtaagagcaagccagtttgtatccaatacatgccacccatagtgagtaccttgtatgccagagcacaacacttacgctgcacacaagactcatcanaaccaagcttcgtgcttgctggtccttacaggtct

SEQ ID NO: 102755 - DNA, 408 bp, Glycine max
cttaagtcgacctgcaagctgcaagcttctatcgacccggaactgtttgattttatcgagagacacagacaaattctagctcttctgggcatggtagggatcagcaaggacgatgctgacgctttggttacacaacgcgatcttgatggagatggacagcttaatgaaactgaatcttgcatccccatagcgaggcttaaccccggaatgatggaaaatgctgaatcatggctggagaaggcaattgatgaagagctcaccaagtcctcatcttaaatataattggtccccttttgtaaccaattggaagttacgatatatgtctttaataaatcttgccagcttaagctgctataattgtgaaactcatctttgcctaatgggcctgcgttgtaatcaaataaattc

SEQ ID NO: 102756 - DNA, 416 bp, Glycine max
  unsure (1)..(416): unsure at all n locations
tcagccaagaagagatcagctagtttgatcctttctccttncttcttctttggatcagcttccacatcgtttgcttccactacttcataagagatcactnggggagccacaacaatttcattattgaagcttccaaccacatccccatcatcatggttgttttcactaacaacattctcaaagttgtgctcaaatgagttgtatatcaatggattcagttcctcgtgctcagcattatagcccttttgctcctcctcatgatcatcgaccatgatgttctctccttcaccatcttcttgttcaacttcaatctccaaagcaaagtattctttgtgagggttgatgttcttcaatggatcatagccaagagtgccaatggttagaatgccatcttcccatccaccaagtgattcagt

SEQ ID NO: 102757 - DNA, 442 bp, Glycine max
  unsure (1)..(442): unsure at all n locations
ctttgtgttagtgtgatttatcaaattttatcccttntttagccactcccccacgtgcacgtttagaaaaaataacttcacataccgatctctaattgtgtacgccatataataaacgtttaattttataaaatgaaaatttatattaaataaatatctttaaatatgaaaattatttcatatattatacctaaaattataatgataataaatataattgaatatataaaatatattatttcatctcttgggtcctatctaacaaccttaaacaacaaataacaaagaataatgtattactattgcaaaattaattattatcaacatcaatgtcaactatcatgtcatcacccatcactcttatcttttggcttaattggatttttaccttcatttaccactctgtggcatccttaattgcattttaccccaaatttgtctg

SEQ ID NO: 102758 - DNA, 395 bp, Glycine max
  unsure (1)..(395): unsure at all n locations
agctntattatgccctctccccttggcggngtatttttcttcggcgaaggtgagatagttgttggcagagatattattgaccagccctccgaaaccttctaccgagatgtcttgggccacatgggcctcgttcaaaacttttactagcagagcccgatgaggctcggtgctcatgagcaactccaacaacgagaccctggccggagttttgttgagctgttcgataaccttgaattcgctctgctgaattatacggaggaactcactggcttcctctagcgacacctcctttttaccatcctttttcttcggaagacctttcgccggaatatctttattcgaagcgtggggtgcttcaccatcttgttcttcaccacttttccctttccctttga

SEQ ID NO: 102759 - DNA, 446 bp, Glycine max
  unsure (1)..(446): unsure at all n locations
cganatcanngattttggaggagtgtggcatttgttcttgagaagtctctgcatgcacaagagtctggccttggcttgaagcttttacatgtgtaggaagttctagagagagaaaggtccaagttccaaagagttttgagagatttttctatgtgaagatctgcagagatgagagctcgaagcggaagccattctgagagcttgagatgagtttgtgaatgattgtgagatcctagaggtggaggagacatcctcaccacttgtatttttgcaatctttcatcttgttcttctctgtgttgtaaaggaggctttcggactatggaaagttaaatcctctgttggattttccctgtaggtacctgatgtaaatatatttctatatatgtaatgatgctttgtgttttctctgtgctatctggttntcatcccgtatgcctttacctt

SEQ ID NO: 102760 - DNA, 413 bp, Glycine max
  unsure (1)..(413): unsure at all n locations
agcttcacacacactttcattttttgnttatgcgaaaaagagacagctccgtaatgacttaacgcaatatttttctaaacaatagttctatttatgactatttgtttcgcattcaaaccattattgattctctttcaatgattggagagcgtgtgtctgaatccgatcatgttgacatagttcttaacggtttaccgaatgaattagagttgctcgtcacttttgtgagtggcaagtttgagtcgctctctattgatgaagtctcgactcttctattggctcatgagactcgtatgactcgcaagaaatcacttgcctcattcgttacttcgattaatctcgttgaagaagcaaaacctaattccaaccctaatgtggtgcaccaggattctcatcctcgggcttatgctgct

SEQ ID NO: 102761 - DNA, 390 bp, Glycine max
tagattagatatagagatcaaattgaactattagctaggtatgtatagaacatcctctaagtatagaaactgagaaaattgcactgtgccggcatgagttgcagtgactgtgtggtcagtgggaagcttaacaattatgggagttattttcttacaagaagaaaataaatgaggacaagctgtgacatgatcagtggctcctaagtcgagtatccattcatctgaacctgtcttgcttacactacaagtaatggataagacattacctctgtgtacattgctggaaccagtgattgtactaatttgattcacatgtgaattgttgtgacttgagctctgttgctgcagcagggccattatagccttatattgttgaggagtcaacttcat

SEQ ID NO: 102762 - DNA, 396 bp, Glycine max
  unsure (1)..(396): unsure at all n locations
ctgcaagctccantcttgactccagggattcttacttttaccctacagccccttctttacaggagggcccgcgttgtgctggtccaatggatgtcgaggaatggttcctcacatcttggacggcatgctcgaagctcttgatcacgctttgccccgggctatacgatgatccttcaagcaccttgttcaaactacaacagcaaggctccgtctatgattaccttacaaagttcaaacaccttgccaatagaatttttggccttgccccatcctttctttaagttgtttcatctccggtttgaccctgggcttacgtcgcgaggtgtaaacccttcaaccctcttcgttgacacaagccgctaccctggccaagcttcaggaaaccaaactccttgg

SEQ ID NO: 102763 - DNA, 410 bp, Glycine max
  unsure (1)..(410): unsure at all n locations
aatgctattcccatatacaatatggtttggtggtacttcttantgtgcatgaagttcaaaaggaggggggctagggccctgctgctcccatgggtccatatctatctataagcaagtcatagtaaaactattaagcgtgttgtccaacactatcttctcactaaaaacaacttataaatttaataaagttttgaagtaaatatattacacaattgtttttctttattatttaagctgttatcatcgttattttactaaataagtttgatcatctctatgttctggtgttattgaaatggtaaaagcataacatattgtgggaaggactgacagatgtccctntcttcttcatattctattggatggagaccatgttcatatgcaattggtcatttgatatgtgcatccat

SEQ ID NO: 102764 - DNA, 431 bp, Glycine max
  unsure (1)..(431): unsure at all n locations
agctngaagaagtnntttggctttacatgcttctctctcttgagtaccatntgtattggttgttatcttggttgttgcatcttaatacatttgatatctatnttgcattgtgcataatcatattgtgtgtgaagaaaactttctaagttagaaaaatttctttagaggtaaaaactctttgttttaattgattacaacctcattgtaatcgattacaataagttgtctgaagtttgtaaagttaagtcttgtattggtttaatcgattatcgatatctcgtaatcaattacactgttgtttgagacaatgactgatttagtcaggagtctctactttaatcgattaccaagtggattaatcgattacttctctcttatttgagtgtttaggggtgaacaagaaatacttaattgattacttagatcatcta

SEQ ID NO: 102765 - DNA, 361 bp, Glycine max
  unsure (1)..(361): unsure at all n locations
ntgtcctcagatccctcttgttggactagacttagaccaatcatcattattgtaacagcatacttaaaaccaaaacttaatctacagatccctcttgtaagactaagtttcaattctgcttcattcaagttctaaggcaacaatacattttccaatgctaaaatcacctaactatgcacacaaatggctgatcagaccaagagcatacaaaatttaggcactgaaagaagcattgaacacaagaaacacaatcaattagatatgaaaataattacattagctgttcagtagaaatccccaacaagggtgtttagctagccattacagaagaaaccctaacaataataagcttacaaaacct

SEQ ID NO: 102766 - DNA, 339 bp, Glycine max
cgcagctcagctttatgacagagacctttttgaattatttaaacaaattcgagcctagattaaccttatgtttatcctagtgagcctagttgagtcaacacttactgaacttggtatgcatatattggcacatcaatgctttacaaaataagaatacttgtggtatctgcaaaaaggtttgggggtgaattcttctgagtcacatacattgccagctgttgcgcctaactgcagttctctatgtgtcaaaagtcttagttacgaccaatttttttgggttatatccattttatttaaagattcgcaaattggtgggcggggaaagaattcaagcaactg

SEQ ID NO: 102767 - DNA, 435 bp, Glycine max
ttcttactgtgctcaaaatgatctatataactggcaattactaacccaccactgctttccaatcaaaccctacaacacaccccctttttactttcaaaccccccaccccaatattatttctccaacaacctttttcattagaaataaccaacacttaattcttttccctcttttcaccctcccaataagaatttgtgattaaatcaaatcaaataaattatgtcgaacaaagagaatattgctttttaatttaaggtttaaggtttaaggtttacggtttatgtttaaggtttatggcataagaagtatgcattggcattggcattgacattgatattgatattgatattgtgattggctgcgtgtagagcctgatagactataatgacggctactaacattctcttcatagaacgccatttatgatgttccctt

SEQ ID NO: 102768 - DNA, 358 bp, Glycine max
  unsure (1)..(358): unsure at all n locations
caagctggatctgtgtttcagaggaaattgatgttntcttcttatcaagagcaattcttgacacgattactgattcgactgatcatggtagagagctagaaatagttcagagaagactaanagaaaaattggcagataaaaaatttctcgtcgttttggatgacgtttggaacgaaagcaggcctaaatgggaagctgtgcagaatgctcttgtttgtggagctcanggaagtaggatccttgtcacaacacgcaatgaggaagttgcttctaccatgaggtcaaaagaacacaagctggagcaattacaagaagattattgctggcaattgttcgcaaaacatgcattcagagatga

SEQ ID NO: 102769 - DNA, 439 bp, Glycine max
  unsure (1)..(439): unsure at all n locations
ntacctttctgtttctctcactagttnttccagtatttgtctagcgtgtttacaactgagcccggggccctttatatatagaaactggaaagaaaatgataaaggccccttcaatcaaaaataagtaaggtactattcatttactttggcacatggctctttttacaataaaattttataaatagacttaatatcagagtctctgccaaaatagaaattcccgcctttaatttacagttggattttggcaagatgcttctgtcttcaattctttgttgattttgtaataagaacattttcttcttcatcttggatattctcgaagtaggaaatgtctgatgagtctttcaatgagagatcagtggatgaaaaaggaggattttgttgccatgacatccactgtgcttgtaaatctcttcatctttcttctctntttgga

SEQ ID NO: 102770 - DNA, 385 bp, Glycine max
  unsure (1)..(385): unsure at all n locations
agcttgttgaaattgccatgtntggatgagttatacatacccattctgttttaaggtttttgtgatgatgcttgtgatgttcatgtgctgaaattgcttatggaaactgttagagatgaagggtagaattaacctatggttagaaagtgaaaatgtggtgttatgagtggaaaaaaagtgaatttctgagggctggaaggccaaatctggaattggtagtatttagaggttagagngagttaatcttagcttgaaatgtcatttatgacttatgagaaaggttatgctgtgctatagggaaaagcaaattaccaaagtgaaccaagagccatgtctatggcgaaattgggtgttgaggagtcaaattttgattcggtgagatttt

SEQ ID NO: 102771 - DNA, 440 bp, Glycine max
ctttgacaactaaatttcaccttatcctctattagacgaatatattgcagcagggagaatgatgaatgccgatacccgacatgttacatacgtcaccaaatgagagctctagttgaacatctacttattggggatccagccttttatttatccttttgtttcttgctcgctatccttaagtttcgaacacacctcatatttgaagactgttgagctcagatactcttgctttctttttaacattttttattcataaaaagtgaagaccaacatattcttttttaatataaagatacaatatgtattatcataaagtaaagaaaaagctgaaattgaactaaatttgtatagcagaattgtcaagggatcgagaattcatacttgctcgatctttggcaggaaagtacggaacaactagaaatgtgcaaactaatactctt

SEQ ID NO: 102772 - DNA, 454 bp, Glycine max
  unsure (1)..(454): unsure at all n locations
gacactatcatactaagctngcacaacanatttctaaaactggttttgtacttaatgaattaacaaactaactaactaacttccactaatatatagagtcactacttagaaagaaaggatggaccttgattangtccatctaatatacctaattaaactaattacacaaaactagacccaaactcgcagcccaattattgaagtgcataggttttgacttccaaggtcatattgacccttgaagtggtagaattggccaaatcttatttggacaaaattgaatatctctttcttagctttctagagactactaacatactccatttggagttttgtagtgtcctataggccatgcacaagacagataggtcaagtaagcgcataatccaaaaattagctacaattctcaatataactcaatcatttgcctaagactaaaactgaatgaaagtgg

SEQ ID NO: 102773 - DNA, 435 bp, Glycine max
  unsure (1)..(435): unsure at all n locations
acttataatttctttattgttaccgttttatgctgcttgaataaagcatgcagcccaggtcctccattgttgggagtaaaaacgganagtgtgttgaacctgtctactgtgaaggcgcctaaactgactagcaacaaattttaactcatcagcagttaaggcaaaagcctcaacctccattaatgccttaactgttctagtagaagatggaagattagaaccagatttatgatccagggcccaggttaaaagctcctccccacagaagtcagcctcttttagaaaaccgcggttgaaaaatccactcctcccaccatctgtggtaacactctcaaggcgaccacgtatgatgaacaacatctcatcaactggatctcctttccgaacaatgtaagtattctctgtaaataaacaccgtttcagtctcttacatat

SEQ ID NO: 102774 - DNA, 459 bp, Glycine max
  unsure (1)..(459): unsure at all n locations
ggttaaatatatacggccactgctcataattataagaaattttaactaatgccccttanaaaataattaatttagttaatcacattaaacatgtcaattatttgtattattattctaatattatccttttcttatctctttatccatctaattgtttctcattaatatatagagagaataattaaatgaaaacatgtaggaaaaaataataattacatttagaaattagaaaaaaaatcttaagaaaaggacaaacaaaattcttaaaagattttataaaaagagacaaaggaagtactgttaagcattttttttatcattatttgtgttatgattcatctactagttgatttattaataatattaaatgtgtaataaacgaatatgaataaatatttcacatattctatatttactcatactgaatgtnntttttattggagacaatttctactatgg

SEQ ID NO: 102775 - DNA, 428 bp, Glycine max
  unsure (1)..(428): unsure at all n locations
agctttctatctaatcaatctatctactgtctaacaattctaaatgcaagngcacattcttgttctttctttgtctaacatacacactcgtttaaactcatgaaaaggaacacaaactccatcacaatcatgcattcaattcaaaataaaagcatataaccattttcataagtcaataatagtgcttcactgccatatcattaaaaaccaagttaaactgttcaaaatgcttcaaaataatcaaaccaaccatccataaataaaactagcagtgtatataaacataaaagaaatactgtattgaaactataatcataataataataataaaccaaaaagcaaaaagtgtcatcaggaatcaaaattcctgtgactggtccttggtgcctatgtctgaacatcctcctcatctgttagatgcaatattg

SEQ ID NO: 102776 - DNA, 442 bp, Glycine max
  unsure (1)..(442): unsure at all n locations
tgaggttgttccaatgaatacacacttcaagttactacctctcttagagaaagttngaaaactcattgaaaagcttggttntaaaacttgataaaaatttgggtagagtctcctttgtatttggagctctcccaatgaaaacacaagcaaaaagatgaaggaaaatagttttcacagtgcatgcacaaccataacatagaaaaaaaatttccagaacacaacatttctactcaacaaaaatcacatgcaaagagagaaacaaatcaatgggagcaccacaagcaattttccatggctaagcctctaaggtcagccatggtattgagtccacacaaaggccccccttacctagcttggcctcaaagagaaaaggttaagagaatgatagttacataaaagtgttcctaacacttgtgatatcccatttttcgtanactaattt

SEQ ID NO: 102777 - DNA, 335 bp, Glycine max
atgatgtatgctacgccatatatatataaaggggcgtagtcatattaacaacggatgaaacaaatatcgtagaggcgctataggaatgattcccaaaattatcaagtgccggagtctagagaatattatgcgttaatattagatcgcacaatgcgtatcgctgtacccttatgaataatcatcacgaacgttatgagatggttgatgtgaagctatgagatgtcatagctcggacatgatattcgatcggaaatgagggaatgggcacaacacttgaggctcataaaaaatatcgggagctatgtaatatacaataacccgacccttgcatatgc

SEQ ID NO: 102778 - DNA, 472 bp, Glycine max
  unsure (1)..(472): unsure at all n locations
tacggacctatcatactaagcttatacattgcttagatggtgtaggtatcagattagacatttttgttttcaatatcaaaagaattcccattgtaattgacaggttgtaggctattatatcaaattatacaaatttcttttcaatatcaaaataaatttagaaacagagtaacacaagaactttgttctcttgtctcatattttttcttaattacaagtctagcagtagtctaatagttgcatatgagtatcctaacttaccttgttttttttttcttaaccctctcattcatcaaggaaaaagaatcctaactaatccacataatttatgcagtgtatacagtcatttagacatcctaaccaaatgacagcaaataacaattcaatttagacatcctaaccaaatgaaagcaaaatacaataggttatgcatcaaaattanggagttcgtgtaagttaaataccatataca

SEQ ID NO: 102779 - DNA, 300 bp, Glycine max
  unsure (1)..(300): unsure at all n locations
acatgtnctttacctcttcccaacaagctctttcaagtcatgactgtgtcgcccaaatgataaatggattgggtgaatgattgagttcttttccctctaccttaaatagacatggctttattgtggagaggtatttattttaagctctcatatcatgaaacaatatggtcacaacaacacaatactttatctaagagtctcttaagatcgaatagatcgatcatgttccatcatctcatcttatcaaatgacaggtacacgaattggagaaatatattcatttcgggtggtgtagctatg

SEQ ID NO: 102780 - DNA, 457 bp, Glycine max
  unsure (1)..(457): unsure at all n locations
ngaattgatggatctttctgtgagtaaataaatattaaaatgtccactctgactgctgcattatgcaaatgtcttaatggaggaacctcacactatatgtattggtcttaaataaactaacccttactttttcaggaaacccgaatctccaaaaccaagatcacgacctaactttgaaatgaaagacgctcttccaagaagcaaagcagtgcaattgtaacactctaaatgcttaaagctgtaagcanaactctctctctctctctctctgtggatgagttgtcaaacttgagagtttacttaaactagtggtcctctgtacactcgatttgtaaactaagtttaccccattataacacttatattaataaagactataaattacaatatgcacgaacactatactaacacataatattataattcaacattcaactctatactctatagtaagaaa

SEQ ID NO: 102781 - DNA, 413 bp, Glycine max
agcttcctcaggaggaagaaaagatatatcttattgaccttctttacccaactaacctggtaaaaatggaattaacattgtagaagtcaaactattttaataaatggatgtaaaaaaaatgagttagtattccatacagtgcaagatgtgcacaaataacagtacaaataattgggtaagcatatctttagtatatatgagcgtttcaacagccaaaagttttgtacagaatttaaattgtattttctaatttaaagaaagagaattgtgaagaaaataacatttaataagctcgcactccattattccactaccctaatgtagatgctttaacaatgttataacaagatgcttaattaatataccacattgataatgactggttttaaacatcaattacccctataatggct

SEQ ID NO: 102782 - DNA, 378 bp, Glycine max
  unsure (1)..(378): unsure at all n locations
tgcatctatgtgatcaaggtaaaggcatattggaatgnaaagcagatagcatagagaacacacaaaacatcattgcgtagatagaaatatatttacatcaggtacctacagggaagatccaatagaggatgtagtttttcatagttcggaaaccttctttactacacagagaagaacaaaatgaaagattgcacaaatacaagtggtgaggatgtctccttcacctctaggatctcacaatcactcacaaactcatctcaagctctcagaacagcttccgcttcgagctctcgtctctacagatcttcacacagcanaatctctcataactctctggaacttggaccgttctctctctagaacttctaaacatgcaaa

SEQ ID NO: 102783 - DNA, 347 bp, Glycine max
  unsure (1)..(347): unsure at all n locations
agcttctcgatacaaatcatctctgcatggtcagtggagtcccgtaactcttctactctgaaacagatattaagatataaattaaaaataaaaaattagggcaattacaaagaatgaaataataccatcacacttgcaaaaaatgaaataatatcatcacacttacaagttgcagcctcgagcaataattntcccatgctgcacaagaacagctccaacaggtacctcccatgtatcagcagccttcttggcttccaaaagtgcttccttcatgaacatttcatctactcttcgctgctcaagttcacgttgataggcttcttcccagtcatcaaacctatctctta

SEQ ID NO: 102784 - DNA, 434 bp, Glycine max
  unsure (1)..(434): unsure at all n locations
ntatntaaatgattgtcagaanatcgtgtctttgtcaaagcttcatcgtccctgacaaagcttcctataaataattgcttgaaagttgtgtctattctaagacatccaccattagtgaaagaggtgagcacctttaactgcatttctcttaatacaaacatcacacaagggctagtgttagaacatatgtgttagagttgcatagcttacttacatgaacaatatcttaatgatcttgagtataatcatgttgattatttcatcttcccaggagaccatgtcaccaacgagtcttgttttcatacagttgacaattcactaactatttcctatcttcccaaatntgacttgttgggtttcatttgcatcatttttcataaaaatctacattntgatgtntcagatgatgatgttttggntcgaataagttggga

SEQ ID NO: 102785 - DNA, 399 bp, Glycine max
  unsure (1)..(399): unsure at all n locations
agctnganagtcttcttcacaaccttctgatctatggcttgtggccggnagatcttaaagacgcgatctacgcgatcaggagcagtgctctggaaatatgattcctcaaattttttcttcacaaacctgaaaaaaagaagagtttatccaagtcaattagttgttttgattatgaacaattaatcatcgagtacttggagtttcctctttttcaggttatagtactggctcttttaagatagtagggccatttagtttggaaaaatgtgttgttttcacttttaataacaaaaacatcactttatgttcactctacttcctggtttcaaagtttgtatatgaaataatgttaacagaaaacaatttaatttctaagcattgcttattgtaaaaaattta

SEQ ID NO: 102786 - DNA, 466 bp, Glycine max
  unsure (1)..(466): unsure at all n locations
ngacatataaaanatattatntatntaaatgaatcaaagtttaactttatacttgtttgaagatagacagcctgaattagaatctacttagttgataatttaaatttttgttcctttatcaaatatttttttgaaacatttttaaatttatctaatttattactttaataaaatgaaatttcgtactaaaaataaagttaaaataagagaaaaataattagatgtaaaaattacatattaattatttataacaaaaaatataatatattaaatatatctttctcacatttaatttttttttatcttcaggcacacataacactcacactcacaactttntagtatcaagtttataaactttgaactggagtgatttttataattataaatagaattaaatttgagtttattttcttaataaaataaatcaaatttattgggacattaatanatcgaatctggatag

SEQ ID NO: 102787 - DNA, 449 bp, Glycine max
  unsure (1)..(449): unsure at all n locations
agctngccttgccccttgaatatttgggtgtattatttcactatgaatgacaaattccttgggataaaggtagtgttgccattgtttcaaagcccgtactaaggcatacaactccttatcataagttgaatagttaagggtaggaccacttaacctttcactaaaataagcaattggatggccttcttgcatcaacacagccccaatcccaacatttgaagcatcacactcaatttcaaaagatttttgaaagtttggcaacgcaagtatgggggcattagttagcttttgcttaagaacattgaaagcttcttcttgtttctctccccatttgaaaccaacatttttcttgagcacttcattgagaggtgctgccaatgtgctaaaatccttcacaaatcgtctataaaaactcgctaagccatganaactcctcacctcggtcacag

SEQ ID NO: 102788 - DNA, 417 bp, Glycine max
  unsure (1)..(417): unsure at all n locations
tgtccacaanaatcagtccggtccagtttacgaccgatgctgtctattgttttctgtgcaatccctgaagtaatttttgatgatgacgactatgaactgttcggttggcttcatccggtgatgctttttggtatacctcgaactggaatctttcttggccgatgtcgcatcggattattttcgatcaatgtttgtaatggagtcttttctctgttgaggtcggntacatttttgtttgcctattcaattaccgcagtccaatgtcacccgaaatgaacgtcggttgagtgtgcacaaaataccatangcgacctttaccgaaaactttttgagcgacaatgaataagaaaacatcctcgatggtacgaaaaatattattggccgacgctgatggaaaataaaaacattgcacaatgt

SEQ ID NO: 102789 - DNA, 466 bp, Glycine max
  unsure (1)..(466): unsure at all n locations
agcttccgttgtcaatntcgagtgcctgtatatngatgcgcctgaatcggacatccgagtgaaaagttatgaccatttgaatttctcgagagcttcctatgtttaattttgagcgtctcgatatattatacgcctgaatcgaacctcagtgtgaaaagttatgaccatttgaatttctttagagcatccgttgttcattttctagcgtctctatatgtgatgcaccttaatcggacctccgtgtgaaaagttatgaccatttgaatttctcgagagcttccgttgttcaatttcgagcgtctcgacatattatgcgcccgaatcggacatccatgggaaaagctatgactatttgaatttctcgagagcttccgttggtcaatttcgagcgtctcgacatattatgcgcccgaatcggacatccatgggaaaagctatgaccatttgaatttctcgagagcttccg

SEQ ID NO: 102790 - DNA, 455 bp, Glycine max
  unsure (1)..(455): unsure at all n locations
agtcacctgcgggctgcaagcttgaaggtaggagaatatgagtggagggatatggatataatgggcacacaatntatgcctcaaatttggtttgaaccttgaagtgtaatttctcaaatgatcaaagntgaaaaaaattcacacacaaagcctctatttatagcctaagtgtcaaacaaaattggagggagatttaattttttattcaaatttcacttgaatttgaatntcaatttgtggagcaaaatgtggagccaaaatttcactaattatgataagtgaatttcaggtatggttcaacccactaatccaagatcaagtccaagattctccactaagtgtgcttatgtgtcatgaggcatgtaaagcatgaacgacatgcacaaagtgtgactatatgatgtgacactggggtgtagcaagcaaatgctcactctccccttatgccaaaccaa

SEQ ID NO: 102791 - DNA, 401 bp, Glycine max
  unsure (1)..(401): unsure at all n locations
ngagattatgaatgggagaaagtccatcagcaccaacaactcctttaagaaagatcttattggnctcatgagattntcaagacacacatcaggtgaaattaaagaaacagagtatcttggcaattgatacacttacaaattttcaaaatgaaggaacatttagtaacttgngaagtttaaaggttatgcccacatccttatgagatataaatgatgtagaaaaaatacttacatcttcaccattgactatgaatatctgatctggtccatccaagtgggtgaattgtttaatatcctgtgagtctccaattacatgaaagctgacttcagaatctggaatccaggtggtaccagcttgcccgttcccttgagaggtataactantgagcatggcactggac

SEQ ID NO: 102792 - DNA, 220 bp, Glycine max
gttcgatctcgctcacctcacaccaaaatacattcacattcatgacttgtacgcccaaatgatatatgggatgcgtgaatgattgaattcttatccatctacttagaaacaaaatggctaacttttgtggtgggagtctctttaagttcttatcaaatgatactagagggtttcaccgtgtctcttaactgcaagcgaatgatgcaggtggtgacatcga

SEQ ID NO: 102793 - DNA, 449 bp, Glycine max
  unsure (1)..(449): unsure at all n locations
tgcttctacagatatctcatgtgtggagagatatctgttattgcagctcacatgttatcacttcctaaggtatntcatactaaagaaagattttttaatcttattattatnctttactgttactttattatgtattgttacctgtagtattcaagatagactatttcttccttaattggaaactttaaataatttatactgcatgaccctcaggtttcggatttctttacattgttaatacaaagagttactatcaagcttttggtgaagtctatgtgacacaaaagtttctagagaatttttgtggagaccaggtatatcaaaataagacatgttagtgctaaataatttatatgaaagcttactgtctagaaagagttgaatggtgtactggctcaccaattatatcatgcgatatattgaacggtcaaaagctaagacactgtgac

SEQ ID NO: 102794 - DNA, 391 bp, Glycine max
  unsure (1)..(391): unsure at all n locations
agacatcctcaccacttgtatatttgcaatctttcatcttgttcttctctttgttgtaaagaaggcttcctggttatggaaagctaaattctctgttggatcttccctgtaggtacctgatgtaaatattattttatctatttaatgatgttttgtgtgttctctgcgctatctacttnttactccagtatgcctttaccttgatcacgtaaatgcatgctttgttagggtcatacaacagttgaaactggtctgactctaaagtccttgatagtacaaggctaagttgtcgtactatcacgaggaatcggggtgcgattatttaattgtgtatgtgtgtcttaatgtggtcttggttgagtttaatcctacaagacggatctgcggatga

SEQ ID NO: 102795 - DNA, 359 bp, Glycine max
  unsure (1)..(359): unsure at all n locations
tgcttgcctctanttgacaaaagtacggatattccttgtgtatctccgaatgccacctgacttgccgcctctagatgacaaagggctgaggctaaaatagtctcgatcaataggctcgctcgcctttagttgacaaaggtgcaaataacccttgggtatctccgcatgtcatctgacttgcagtcttggatgactaaggtgtgagacttanatagtctcngtcaacaggctcacttgcctctagttgacaaaggtgcggataacgcttgggcatctccgaatgtcatcggacttgcaatcttggatgactaaggtgtgagactaaaatagtctctggtaacaagctcgcttgcctcttg

SEQ ID NO: 102796 - DNA, 416 bp, Glycine max
agcttctacaagctagaatcatatattctatcttcaacagccaatgggagagtcccgtccaggtagtcccgatgaaaaccggcctcaccgtcatataaaatgagaaggaggagctgattcctactcgggtgctgaacagttggagagtctgcatcgactatatgaggctgaactaggttaccaaaaaggaccaatttcccctgccattcattgaccacatgcttgaatgcctggaaggtaaatctcactactgtttccttgatgggttttctagttatatgcaaatcactattgctccagaggattatgataagaccatattcacctgccccttccgcacttttgcctataagaggatgcctttcgtgccgtgcaatggccttggtaccttctcaccgggcatggatcagattttc

SEQ ID NO: 102797 - DNA, 438 bp, Glycine max
  unsure (1)..(438): unsure at all n locations
ttatcaaatggatgtaataatagcattcttatttgtttttattcatgaagaagtattgtagatcaaccccctggatttgaaaactcacacaagcctaatcatgtttttaaatcaaaaaggcttttatggttaagcaacccccaaggcttggtatgaatgtctgagtaaattccttttataaaaggaattctctataggcaaagtagatactactcttttcataaagagacaattacatgacattttattggttcaaatttatgtagatgatattatttttggatctactaatgaattattgtgcaaggaattctcttatgacatgcaaagngagtntgaaatgtccacgatgggagaacttaatttctttcttggattactaattaaacataccaatactggatatttgtaatcaatccagtactgcgagaataattc

SEQ ID NO: 102798 - DNA, 294 bp, Glycine max
ccagtgccaccaccacagggaatccactggatcgcgtatctgccatcagggtgtgagttgatttctgagtggcttcccatatctgtttcgcatattcaacaaagttattacatatagagaattttcctattccaatggacagatggagtctattcaactttctgccctaagaatgcttgggtccacgtctcacatgtgattctcaccagctcaatagttataggctccacgtctcacatgtgatctcttactagtgtttcaaaacactctcagaatcacagacaatttctttta

SEQ ID NO: 102799 - DNA, 426 bp, Glycine max
gggtccatctgacttgaacggtcggatattctgagcaatgacttccatgaggagcagcgcaactttgagttgcattccattcgtgcatgtattgttataatagattcactgtgaggtgaactagtgatcgaatattctgccagatattcatttctcatggcgcccagacacactgaatagagccacctctgttagaccttttatgtataataatagcaaatgtttgattttctcaagggtattatgaataagtgtttttagaatattaattaaaaagataaactatttagtgtaatgattttgagagaaggtgatcaaagataatttatattacaattttgtgtatctgaattaaaaagtgtgttttagattttcaacccatctcttaataacacttattaacactttatgttttttttaataatc

SEQ ID NO: 102800 - DNA, 361 bp, Glycine max
  unsure (1)..(361): unsure at all n locations
agcntgtagaatggccagacattattcatgtttttggtttggcncggntcaaggataaaagggatgccccacattatttccatgacacaaatgcaaaaatgatgatttggaaattttatgcaaaactggtcatgcatgcacctatatggacgctcaagagtaatatttttatggtcatgtgatgctatggctcaagattcattccttctttttaaaataacccaatgtttccaaaatatgttcatttatcaatatgcgcattcatcctaggccatttcaggcgtgcggggaaatttcacagcattcacccttcaggtgtagacacatttttcaaaaattgggtatgatcaatgaatttttc

SEQ ID NO: 102801 - DNA, 378 bp, Glycine max
  unsure (1)..(378): unsure at all n locations
tgcttaagaatcctaagaaanatctctcacagtctacttgtatgatgagatgctccaaggcctatcagagcacaatgagcagaagaatgcatgcatgcctgcaactgataacattcacaactttagcaacatagtttgataggaaccttataaacacatgttcttttcaacatgcaatgcaatggaggttctctacatgatgggagcctcctcccataggagaccatgggctatgttcatcacaaagaactcccccttaccaagtgtttagttcagacgaaaatgaaaaagagagggtgaagatgtatgcttccttggcatcagagaggttccacccacaaagaatggatgagaaaaaattgggtctacttctccttt

SEQ ID NO: 102802 - DNA, 422 bp, Glycine max
  unsure (1)..(422): unsure at all n locations
gatccttaagcacctgcggctgcagctgcctactagatcttacttcttgtttgcctccttngcccacacaaccttttttagtccataccaagttttccacattaactttctcctattacatactcgngatataaggttaattggatcgttaataaagaaccgaaaggagaaaaggtcacgaattcaatcctctttaacaaagataacaattaacatttaccgattaaaaaaaatactgtgatgctaaataacctcttgaacaaacgatgcatcaacaatttcgtttataaagactaattgattaattacacacttaagtaaacaggaaaagagaagcatgacattaagatagtgagtaaatagtcatatataacatctcaaacgacattatgaatgttttcctgtaacacataatagttaac

SEQ ID NO: 102803 - DNA, 437 bp, Glycine max
tacggaccttaaaactaagcttacaaatggacctgggtgttgcccagtttcatcatatctttcgtaatacttatcacctctataatatctaataattgtcacatttatgtctaattgccattttacttcattgtagtaaatttctaaggcatccattgcctaagaaatctcgggcaataagtagacataaccgtaacgtgaataatcatcaataatggtgataaagtatcattcctttccgaaagaactaacatcaaaaggtccacaaatatcagtatgtacaatttcaagaagctgagtgcttcttgagctcttttctttgatgttttgcttgtttcccttatcaacccacacaatatttaatcataaatctagataggaagaattcattctttataatcttccatcattttttaaaattgacctaacgttatgcc

SEQ ID NO: 102804 - DNA, 429 bp, Glycine max
  unsure (1)..(429): unsure at all n locations
agcttggatgtngctggttaatgcaaccttatgttaatgccccctattgatgccatcaaaataattgaagatgtgttctaaccccccccccccccctacaacaactcatgggataagaggattatgaagagaggcatcaaccaggtggataaagatgaatcctaaactgaattgggaaagtagatgtaggctcaacaatgaacattgagacactcatgagagctcaagctcaagtcccaatcgctacacctccattcccaacctatgatagatgtcagatggtgcatgggccaggagaatgcactattgatgataagctagttgtagccatgcttaggggaggaacaattcttataatttgtaccccaaaaatttcaatcaaggatagggcttcaagcaaaattagggaatgtttangtctcaacccat

SEQ ID NO: 102805 - DNA, 211 bp, Glycine max
ctgaaggtgcgtagcccaccatcttttatagtagaataccgataatgtgtctaccatcacgattatcgtctccttttccatcattgggggtaccacttgggctgctagatccctccacctttgtgcgtattctttgaaagatacaagcccccttttttgcacatggtctattattgcatcctatccgaaccattatactgacactgcctaa

SEQ ID NO: 102806 - DNA, 419 bp, Glycine max
  unsure (1)..(419): unsure at all n locations
ggttaccgctttacctttatatagcttctaacatcttaaggcactgtatcttcaatcatatgtagaggaatgtcatgaacaacagctgaaaaagggtgatggccctcccttcttttgaaaacctgggaaagcatccagtattttgggttacacccgtggcccggtaaggaaattttgtaatcccccgcccaatcttatctattagacaatgattttattagaaccatagaatcttgggggttactgggatatgcatacatggttgaggtttatatacaccacccactcattcactctgaacttcctgtatattcgattattggtattcgttaacttgttccaacattctattntgagcttcttgtcaatgaaagtagaacgtgaacgttgaaaacttgatcatagtggttttacttgtg

SEQ ID NO: 102807 - DNA, 373 bp, Glycine max
acataaatattatgttctatgtagatagacaaatattagtggatatgttcaatcaatcaactaaatctcttaataatgagatattatacattatttaaattttgtatcggctattttattgctttggttgaaccgattctttcaatatatgaaatcctaaggcatgtggtccaatttccttattcccatcatgataacggtcgactctaatattaaaaagcaagtttacttaaaaaacaatactcatacataaaataaaaaacaccgggagattagaactagtcccctgaacaaaaccggccaacacagaaaagaaatctgaattccatagaatgactaacaggtggctacagatactcatcacaccttctct

SEQ ID NO: 102808 - DNA, 410 bp, Glycine max
acactatcgagaactcaagactgctattggtggagacatgtgatgaaataggtgatgaacgacatatcactctctatccaaaacagggatgcaatgtaacaaatggcaatcttaattgaatgtattaaacaagaaaatcatattttagagagtgatgagcaaattatagtttatatcaacaacagcgagctttctttgtattaatatagttaacgatgaatggaataagtagttatacagacctgaacctgagtttgaagacctttaatgtgttgaacggccaaatcgagcatgtctgcataactggtttgctacaatagaatttaagaccagaacatgagtgagagagtgagagagagagagacattagaaggagggagaaatagataaaccttatccatattgggtac

SEQ ID NO: 102809 - DNA, 364 bp, Glycine max
  unsure (1)..(364): unsure at all n locations
ctcttttatattagtgagagtgattctccttaattcttgagtgattcaagaacaccctggctgtatcaaagactttcacacctttgggttgcctctcgaaaaggatattccttctttcatctcaccttgttctttcaaaccacaatttcagaaaatccattccagcccagaattatcttgtgggcatgatttccggtttacgcatttcaattaagggattcttgagcctaaattgaatttcaaaacgagacctctcacctcgctttggaatcacctcatttggagtcctgcagcttgatgtattgccatttctattattttgtcagccactacttaacctatggtntatcatctcaatccttca

SEQ ID NO: 102810 - DNA, 464 bp, Glycine max
ccttggagtggtgctaaaccaaatgtgagccatttcagaatctttggatcactttgttttaggcatatcccagatcagttaagaatgaagctagatgataaatgtgaacagatgatcttattctgatatcactcaactggaagctatatgctgtttgatccgaaaagtaagcagattattatcattaaggatgtggtatttgataaatctagaaactgggactgggagcacaatactgaaatgaagggaccttctataatgataaggtcagaagaagaagaaacaagtgaagggaatgtgtaaaccactcacagagaagtgagaccctagataaatgcacccaaaccagctagattttaaagttttgagatgttgtctgatgctgatgtaagtgcacatgggaaacttgtacattttgctctgtgttttgagcagaaccaatatactttgaagatgctatgact

SEQ ID NO: 102811 - DNA, 396 bp, Glycine max
  unsure (1)..(396): unsure at all n locations
gatccttaagcaccgcggctgcagctagtgctcacttatattaagtgaatattttttctaatatcactgcaacataaaaattcttaatttaattttgttttaaagctttatttgaagaaatattctccaatatcattcatatactcacaaatatttatgaaatacatgcattgatactcatcaaataaaatattggtnaaacattagacacacaaggaatgtatttcatctaccatgataataatgattatgttgatgaaaactactatagaagacctcctcatgttactagtatccctaatcatagagagtattaaatcatatttgtgaaaatcattaatatttttataaacacttatatttaagaattattatgtgtgctatcaatttatatat

SEQ ID NO: 102812 - DNA, 450 bp, Glycine max
  unsure (1)..(450): unsure at all n locations
gacacttcaaactaagcttatatatagacctaganacatgtataatattgaaacatataagcatcatctcttgatgaaccaaaagtaaaaattgtcttcctcatgaatgatctgaaggaaggaatgaacttggtgttatccctataagctgacaatataattgattttactatgtaattacaaaattgtatttttatatttattttaggcttgaatatgttttttttatatatgtaacatagtatattttaattttactacttaaactttttttttttttatttcctagaattnttttatgtttaattgattttagtacttaccattgatcactaacaatttatttaatgataatgtaacaacatattataatatcatatcatcgattaaatgctaatgtgccaaactaacggaacgcacatctcttgagttaatcaccttgtgttgtta

SEQ ID NO: 102813 - DNA, 394 bp, Glycine max
  unsure (1)..(394): unsure at all n locations
agctntgagccaaaatcctgactcaccatcaaccttgattctggtgagaatgccgatccttaccctcgaaagcgaaaaaaaagaagagaaggaaaatttccaatcaaaggaaaaaggagaaggagaatttccaatctgagatgactcataaaaaggagagaatgaaatatttccatcgcgcgcactgagagatgaacggaaattcccaatcaaagagtgggagaaagcaaaaagaaaagaaagaaaattcccaatcaaagaatgggagaaagaaaaaaagagaagcaaaaaagaagaaagctcctggtcaaagaaaccagaataaatgtgccgagaggtccttggaccggacaatatctgaacaatacaaaattgtcaccaaatgaacaaaaag

SEQ ID NO: 102814 - DNA, 441 bp, Glycine max
  unsure (1)..(441): unsure at all n locations
ctatagcttnctcggcgccattcctgcgaaggcaacatttggaaagttatatttaccagtgggacactactcttaaagcaaaaatggcatataacctcctcccataaatacaaacatcaatggtaatntagagcaagcttatgcgcatatttccttacgaacgttctcttgcacaagacattctattaactaagaaaaatgcacccatatacaatcaaggcagcttcgttacctagattatttacatgtacttccaaggtgtatttgttacttacatcacacacatctccttggctaaatttacatacatgcatactcaaagcattntggggtaccaaaaattgcacatgtgcacatcttggtatttctaatacctatacatacacaaacttcatgatgaatcttgactatctacacaataaggtgctacattccatgctc

SEQ ID NO: 102815 - DNA, 400 bp, Glycine max
  unsure (1)..(400): unsure at all n locations
cacattctttttggtttatctccctcatccatggcttattccctagtagatgacgcctcctctcacctcttctcctttgtcttctgctgcatctccatggtggaaaatcaccattgaaggacctcattgaagctcatagatccaacctccatataagctccacaagcaatcttccttcacaaaagccctgctatttgtgaccaccccaagagatctgttatggtccaacaccttaacgattctctcctctcaaaaaccaagagatcgttaatggtcaacaccttattgtttctctcctttcaaaaccaagaaatctgtgattggccaacaccttaatgtttctctccttgtcacaaatcaaaagaatcgttaaaagtccaatgccttanatgactcttgt

SEQ ID NO: 102816 - DNA, 415 bp, Glycine max
ttactatgcaaggaataaccaaggaagattccttcatttgtcttagcatcaaactttcctaaggtttcttttccattgtttaatacatagcatttgcaaccaaaaacatgaaggtgtgaaatgttaagttttctaccattaaacagttcatatggagttttctttaaaatgggtcctattaaagccttattcatgatatatcatgcagtattaatggcttcagcccacaaatgttttggaagaggagtgccatttaataaggttctagcaatttcttccaaagatctctatttcctttcaacaactccatatttgtgaggggtactatgtgcagaaaagttattgtcaatgccatgaatatcacacaataaattaaattctttattttcgaattcaccccatgatcactcctaat

SEQ ID NO: 102817 - DNA, 383 bp, Glycine max
  unsure (1)..(383): unsure at all n locations
agcttatagtgctaataagggaatatggcttctctattgcattagatgtatatatgtagtataattggtgctttgattataattcactcgtaagcatcaatattttaaaaggtccctcatttcgttaaatttcttacatggggttgatggcgatgttattaatcattntacctatctaacatatccaatttaagtatttttttatcacactggttgtctggctaagttctttgttttgctacacttatctcttgtgtattcatacatagataatatgtcatttgatagtatggttttggtgtggttggggtagaaatacttgcagctgactaaagagtattggagttactatatccatnggctaaaatcaaggttatcaaact

SEQ ID NO: 102818 - DNA, 456 bp, Glycine max
  unsure (1)..(456): unsure at all n locations
ntgacaatgctngctggtaactnttagaattgtgagttctgaaatgttgcatacagaaacagatatcagaaattagaggttgcaaataaaaaatgtggtttcaatcagatcaattaattggctagctagaggaaaataatggtcaattaatggatgttgttccttcaatcacccaagataaagctcgagcagtattcacatcccacttcacttgcaaccgaaatcaagattaaagttgttgaactatgtgttgactcttactttatggcatagaagccaagaaaagacgtttaagactcaaactaaggcaagtgaaataacagcctccatcctaacaaaaatcactcagaaaacatcactccagccttcaaattctatataatgaatgatcatactgaannatggtataagccaattcattatgttcttttcattcaaactattctaccactatat

SEQ ID NO: 102819 - DNA, 378 bp, Glycine max
  unsure (1)..(378): unsure at all n locations
ctttgaactttagagacttgcttcttcatgatatctttagtcagatatttttttttaaattagaactattacactgagaagttaattacactatatctaaaccaataaaaactaactttttacagcaatataaagcatattgagaatgtcttttttatttaacaaaagaaaaaaaaattgcctaatactactacctctataaataccagtaacataggcctaagagctactacaaaatttgtttgggtnttcatatgtaatgaacgggcatgatattttaagagaacctttccttgtgaaagtacaaaaagagaggagccaaatccatacatatatttgatagttgatttatcatcgtgagggagttgctactttata

SEQ ID NO: 102820 - DNA, 454 bp, Glycine max
  unsure (1)..(454): unsure at all n locations
tccattcccgagagcatatcttatttatgcacttcagcctttactttcgtgtagcttaagaaaaacgtcatttcttcttctatctttcttccaaagccatttataaagatccaagcactttctccatcacccacaaccaccattagccaccacaaaccatcattgttctccattgaaaccccacaccgagatgaacccttcaaccgaagcggaatcttccaacttggcttgcgggttcggtagagaatgaaaccctaatctgacctttcattntctttcgaggtaaccatggttctatgcttggttcttgttagtttcatcttgtctttgcatcntttctgacttcggaaccgccattgcatgtcttatgcttcctttgaaaaaccttaaagaaagagactatgtgaacgtaatcatctttcatgaaatgcatgttatttcataacctacacta

SEQ ID NO: 102821 - DNA, 279 bp, Glycine max
ctctgattaccctaatctttctttttaaactatcctgtagtcattactctgtagacatcggctcacatactctaaaggtgatcgatggatttgatgcggacataacaacaataatggtgtcaaatgattccttcatcgaaatataagtcttctttctcaagcattaaagcaaatcatcccataacaggttataatacttaaaaattattatatctaaaaagttgcgagtatcaataagaactttgtactccattactcttggcaaaagaacccacaaaa

SEQ ID NO: 102822 - DNA, 410 bp, Glycine max
agcttgatgtttgtgttgaatgcattaaatgttaattcagaacctctacaagatattggtattgaatctcccactcaagataatttggtcgttcatgaagaacaaactcaagatcctcaagaacctatgcttcatgagtcagtacctttgcggagatctacaagagaaaggagaagtgttattccagatgattatgtggtatttctccagaaacatgagaaaaataatggtatgatagaagatgacccagtcaacttccatcaagccatgcaagattccaactcggaaaagtggattgaagcaatgaatgaggagtataagtccatgctagacaacaagaattgggaacttgtcccattaccagaaggtgtgaaacccatgggttgaactgaatattaagatcaagcgga

SEQ ID NO: 102823 - DNA, 418 bp, Glycine max
  unsure (1)..(418): unsure at all n locations
tatacgggctaggatgtggtcttgtgactaaattcaatttatacacaagtcttgcacttgccacattggtataactccctccatcaatgatcaccatgcaaacttagccattgatcaaacatctagtgtggaagatgttttctctttgactntcctccatagacttcaattgatggccaagtaaccacctaatcatcaacaattctccctccggtgttttctctacttcctcctcatcatactcactctcttctcccttttcaacttcggactcactaatgtaatctccatctctaagaatcatggatttcttgttagggcactcatatacataatgtcccaagccttggcaccgaaaacacttcacatcccggctcttttttgaggattgttcttggaatttggaggagttttgatg

SEQ ID NO: 102824 - DNA, 424 bp, Glycine max
acccgccgcatgcaagctttataaactatatttaagtcatatctctatatgacgtgagacaaacaaacccctcgaggatgcaatcaaggcaacccaaacccaaagaggctgtaatataggagggatggtgaccaaaattaaagtgattttccaacaatgaatttaagataggctctaataccatattataatttcatcttaaggcttaacttaaaaaatcctcccttaaatgctagctgtcaagaaccaagccacttaagttatccaaatactactcaaacttgatgtgggattcatgaaccccataatacctaagtctctatcacactacccttaatatcctatgtcctagtgactgcacaccacaacactatcttactcttattagccagttcctctgtgtaccttaattaaactatattaa

SEQ ID NO: 102825 - DNA, 181 bp, Glycine max
  unsure (1)..(181): unsure at all n locations
cttgttattntcagtagatgaagatgaatctatggccaccttatggactcctctaaggacaatagcatcatttcttgcggcctcagttgcttgttgtctttgatgttgctgctgctgaattggaggaagaacatattgcttgcttggaccatgatcattcttggaaggaaggacaagctga

SEQ ID NO: 102826 - DNA, 361 bp, Glycine max
  unsure (1)..(361): unsure at all n locations
gtagtggttgaatgaatctttacaattgacacactttggaaaaagcggaaaagattatagctttcaaatcccgcaaacctggagagctatattgaggttttcattcttaggaaacttcctgatgagaatnttgaagacacatcatatatgaacgcacaaatataaatatggtctaacgcaatatgaataaaaatttcttattattaaaaatataagatttatacttttcaattaaaatataggaatgtgttatataaagagaaattcaaatttcattcatattaaacatagacttattgccaacgatgtgacaaataagtattcctatatttttagaatgattaaataaattctacttgta

SEQ ID NO: 102827 - DNA, 427 bp, Glycine max
  unsure (1)..(427): unsure at all n locations
tctggtggtcgaaaggacgcacttgtttggaccattatattcttccncagagccacaaatcaatggttcaggagagacacaacctttgcccatcccatcgatgtttcgaaattcaaaggatgcaatcattgcgcctcttttttataacacatgaaagcattgaatgcgtttgaaatggatataatagttggcaagatgatactctgagtgtctctctactcgaactcgacactgactggtaaagccccccttcttacaactaagtgaaaagcttattgaaagatgacacccttctcgaattcgactacaaatctaattgacactcgactgataaatagcgagtgggctacttggactcttagaatatatagacttaattatgaaagagatattttatcttttgcaaaagataggggtacctctattt

SEQ ID NO: 102828 - DNA, 262 bp, Glycine max
cttgtattttcagttgatgatgattaatctatcgccacctcttggactcctcttaagacaatatcattaatttcttgccgcctcaatagctcgttgtcttctgatgtggctgcagctgtattggaagaggaacatatggcttgcttgtacctacccttcttgaaggaagggacaatctgatattgtttgtgaggactgtacctttctaatttggataatctctccaccctgaattgtatttgttgcttgaaaggaactaata

SEQ ID NO: 102829 - DNA, 424 bp, Glycine max
agcttgacttggtttagacatgattgatacatgatttgtgacttgtaggatttgatttgggcaagattggatgaggggaagtgtggttttcgaaatctgctctttgtgcagatttttgctgtgaaattgtgcagcagaattttgcacaagtgcagaaaaatgctatgcatttgctggttgtggaaagagcagtgcagaatgagttctggatgtttgctagtagatcccaacggtcaaaatgtaggcttatgtactagagacttccagtaaaattttggaatcgatccaacggttaacgaattagaacgaaggaattgtactggggtctttagtgaaaaagctgtgatttgtgtggtgtgttcgcagagtttctgcctttgccctgtttcttggctgtgaggttgtggtgttaaatgttgaatac

SEQ ID NO: 102830 - DNA, 400 bp, Glycine max
  unsure (1)..(400): unsure at all n locations
tagcgagaattccctaagcgcaaccttcagtggctaagcgcgaggaagaatccagaagaagatgagttgtcaagttcgttaagcacaccgctccaggtcatcaagcgcactgctttaacttatccgctaagcgaaacaaggcgcgctaagccaaaatccacttatacgcgctaagcgatccagatctgcgctaaacgcacgagcatgaacaaggtcacctatttaagcctgaaatcaaatttgcaaggggaatttggcactnttcttgagaagttctacatgcacgaaggttctagagagagaaaggtccaagttccaaagagttatgagagattttgtgtgtgaagatctgtagagacgcgagttcgaagcggaagccgttctgagtgcttgagatgag

SEQ ID NO: 102831 - DNA, 130 bp, Glycine max
gatcctctaagcacctgcaggctgcagcttgcctcagaggaatatattgatttctcttttgcgagcagcctacacttatccctaagaattaggcaatcgacctcatctaaatttacagcgaactcattat

SEQ ID NO: 102832 - DNA, 364 bp, Glycine max
  unsure (1)..(364): unsure at all n locations
tgtgaacatgaactagctgacaggccaggaggtgcatactcaaatggaagacaaanagagctgcgatagaaagctggaaaattggggctgaaaatgcagaggctgatatgttccaattgaaggctaatgaggctaaacgagaggccgagaggcttcataggatngctctttgccagcaagataaatcagaagaagaatttactagcaactacttgaaacaacgtttaaacgaagccgaggccgagaagcagtatctttatgagaagatcanattgcaagagagttctcgcgcttctcagagcagtagtggtggtgacccttctcagatgctgatctattccaaaatccacgatctactttacag

SEQ ID NO: 102833 - DNA, 243 bp, Glycine max
  unsure (1)..(243): unsure at all n locations
ntcagaactggatacgcgtgacgctctcatgtctgttcatctatgaacaccaatacctctcaggactgtgagaacctacgaccttcctttctatatataattatgagggtgcttaagcctatcatactgcggtcaactctcatgcatgccgaggctcttttagaaggaaaagccagagtctgctcacaacatgtgatttgatgataaaataggagaggtggtgtctgctctcgcggttagagc

SEQ ID NO: 102834 - DNA, 444 bp, Glycine max
  unsure (1)..(444): unsure at all n locations
gctattacgtgacactataaaactcagcttttatccaggcaattcttggtggtgaagctccttcttccttggcttattccctagtggatggtgcctcccctctcctcttctcctttgccttccgcttcatctccatggtgtaaaatcaccattgaaggaccttattgaagctcanagatccagcctccatagaagctccacaagcaagcttccatcaagtggtaatcagagcacaagagcttcaagtaggtgctccttaaacctccattaatttattgctttaccttctcttccattgttgtttcttcatttatctccatgtatctcctcatatgtcttgtgctaaatttttttaacatgattctttagagtttncaccgcataaacttgctataaaagctagatntgattntctatggctcaaatntattgttcttgttcttg

SEQ ID NO: 102835 - DNA, 310 bp, Glycine max
ttatcaatttttttctctgctcctcggaagacgaatggcagcggaatggaaaaggaatatacacaagacaccctctctcaaggagaagacgagtctagaagaagctcaccaccctaggtagccgtggataaaaccttggagaagaagactctatgaggggaggagaaagacacaaatttggctccaagagcttgtatctgaagttaatatcaatgatcacgtaaaaaatcacacactacctcttttatacctaaggccaccaatggaggaatcaattcctcgattgacttaattggggccacttggccca

SEQ ID NO: 102836 - DNA, 426 bp, Glycine max
  unsure (1)..(426): unsure at all n locations
ccttgaaaatgttgtttttcaccttctcgctaagccaattttctggcttagcgagcatccgctaaacacaacactcatgggctaagcgcgaggaagactctggaagaagatgagttgtatatgttcgctaagcgcaccggnttagtncatctgctaagcgagaaaggcacgcgctaagccaaaattcactaatgtgcgctaagcggtccataattgcgctaagcgcacaagcatgaacaaggccacctatttaagcttgaaatcagattttagagagggggtttggactgggattcagagatttgcatgcctagagattctagagagagaaaggtctaagttccagagagntttgagagattttgctgtgtgaagatctgcagagactagagcttgaagcaggagcccgtttaagagcctgagatg

SEQ ID NO: 102837 - DNA, 443 bp, Glycine max
  unsure (1)..(443): unsure at all n locations
agctntataagtgcgggtctgggagacgaatgttaagtgttcgcgatatgtgaagatgatgttccaagtacttcggatttggtccgaccatgccctcctgatttccagctgggaaattggcgagtggaggaacgccccggcatttacgcaacgagcataatgtaaacctttacggttttaaaagctctatagtagggcctaggctttatagttttcattttgttaaggctttgtgtcttttggttttgaatttataatacaaggatctttcttcatctggtcctggtctctacccattctcattcatttgcatgtttacttctttttctgaaacggcagattcgatgacgagtcccgcgaaggtactaatacctgtgacccgtctatcaacttctagcaagatatgaaccaatcgggagatgatgagatgaggatgtgtgatt

SEQ ID NO: 102838 - DNA, 445 bp, Glycine max
  unsure (1)..(445): unsure at all n locations
gctattacgtgacctatagaaactaagcttggcattgaagaaatgaaaataattgtcatagttacaacgcctatgtggcccaattccaacaaagaagaacaaagatatagactaaggctacctagacacatgcatcacacttgctccacaacaccctgtccttcatcaacagcttcctacttctccgtaacaatctcctcttgatcaagcaaaacaccatcattcacatccttgaagggatcgaagagacccaagtcaaggtccttcataaagaatttggcctgtctgacaaccttctgaaagcctttttcatgctgctccatggcctccttcttgtacaanatcaactcttccttaagctccttgctggcctcctttccttggcagcccgcaacttggactcctccaatctagactctgaactcctaagtcgggcctctaactc

SEQ ID NO: 102839 - DNA, 425 bp, Glycine max
  unsure (1)..(425): unsure at all n locations
agcttcccgcatccacacttggaaggatctgattactgccttccttaggcagtatcagtacaactctgacatggctcccgactgaacccagttgcaaaacatgagtaagcgagaacacaagtcttttaaagagtatgctcagtgttggagagacctagcagcacaagtggcccctcccatggtcgagagagaaatgattactatgatagtggataccttgcctgtattctactatgagaagttagtgggctacatgccctctagcttcgcagacttggtattcgttggagaaaggatcgaggtgggtttgaagaggggaaagtttgattacatctcccccgcaggtaccagtagtatgaggaaccaaacaagctggggaaaagaggaaggaaggagatgcncatgctgtcacttcaacgcctgtg

SEQ ID NO: 102840 - DNA, 348 bp, Glycine max
  unsure (1)..(348): unsure at all n locations
ggcctgtccgatgcagcagtaatgatggcccgagttatgttgtggaacggttacgaacccggaatgggtttaggcaaagacaacggcggtataactagctngataaatgccaaaggaaatcgtgggaagtatggtttacgctataaacccactcacgcggatataaagagaagcatctcggaaagaaagagcggtggtcaaagctcgcggttgaggcaagaaagtgaaggaagcccgccctgccacataagtagaagctntataagtgcgggtctgggagacgaangtcaagtggtcgcgatatacgaagatgatgtttcgagtacattggtattggtacgaccatgc

SEQ ID NO: 102841 - DNA, 159 bp, Glycine max
tgtaactcttcaaaaaggttgtgactatctaaatggcgtttaagattttctaaaagatataactcctcataacggtcttcttgaccacacactgagagtccataataccaacgcttagctttcatcttcaattaaacttttaacagcgcacgaatactt

SEQ ID NO: 102842 - DNA, 418 bp, Glycine max
  unsure (1)..(418): unsure at all n locations
tactggtaatgtgtctaccatcacgattaccatctccctttccatcattgggggtgccacttgngctgccanatccctccacctttgggtgtattctttgaaggattcatgctcctttntgcacatgttctatagttgcatcctatctagagccatatcagaattgtgctgacactgcctaacgaaggcaaccattacgtccttccatgagtggactcgagaaagttccaagttagtgtaccaggtaacagctaccccagtaagactttcttggaaggaatgtatcancaattcctcatcttttgcgtatggccctaccttctggcaatacatctttagatgggtcttgggggcaagtagtccccttgtacttgcaaagtccagtaccttgaacttaggaggggtgatgatattgggt

SEQ ID NO: 102843 - DNA, 479 bp, Glycine max
  unsure (1)..(479): unsure at all n locations
cactaagctnatgatgaatcaatggtgattcaaaggtggttttatgataacaataatcttatacaaaatatgatgacaaaggagatgacanaaagctcanatatcaatcaaagacaaactcaagtgaatcaaagatcaatcaaagaacaactcaagtgaatcaagaacaattcaagagttcaagataagaatcaagaagaattcaagactcaagaagaaagttaagagtcaagaatcaagattcaaggttcaagatctcaaaaatcaagatcaagattcaagactcaagattcaagaatcaagagaaggcttaatcaagataagtataataagtttttctcanaaattgagtagcacatgatntttctcaaaacatgtttaccaaagagtgtttactctctggtaatcgnataccagaattgttgacatctgataccagtagcaaaattgtttaaaaaagtttcaaattgaattacaac

SEQ ID NO: 102844 - DNA, 473 bp, Glycine max
tgcagctataaagataataacaatatttgttttgtgatcatacgccaaatgaacttaaatgttgtgtcgttgcaatccatatattgaaaatattttcttgtaaaaattaaacttttgtctcaaacagatattcgaatcattttaaaatattactcttaattatgacgacattgttgaagttgtgtgtctttaacttcattaccacttaaattaaacatgcaatgaaacttgcctattattattattgttattactattattattattatcatcactaacgagggcaacacggatttcattacctactatgtattacagctattaatctataagtatctcaaaacttacttttatcgaaacagatgatcatgcgatccatactgtatatctcataatttaactggtataagtattatttactcttgataaataatattgaaagtcgaatattttttaatattattacatatact

SEQ ID NO: 102845 - DNA, 498 bp, Glycine max
  unsure (1)..(498): unsure at all n locations
agaacttaaanacaatcaagaacaagcttgttcgcttattgtttgcgtgtatgatatccactccacaagggttgaagtagaggagaccttcaatcctattacgcatcgtggcggacaaaagtgggcagttaacttaaacggncattattgtcaatgcagaaggtattctgcacttcactatccatgttcacatattatngcaagttgtggttacgtgagcctgaactactaccaatatatagatgttgtttatacaaatgagcacatcttatatgcttactccgcacaatggtggcctcttgggaatgaagcgactattcctccttctaatgacgcatggacacttattcctgacccaactacaattcgtacgaaaggtcggccaaaatcaacaaggataaggaatgagatggattgtgtcaaccatctaacaccgacaaaatgcatatatgtggaccgaaggcatacaggcgtcctgccaagcatctgacgtggagt

SEQ ID NO: 102846 - DNA, 494 bp, Glycine max
tgaggcatgcaagcttacgccatgttaatggcggcacccacgtctctttgagactccctttgaaatttcatttaaaagagagcctgttacgtaaaacgtttttaaaagaagcccccttgtgtaaatttgctgaagctttgattgtcgtggaggttctagttgcgcggtcgaggtgaagggaaaatggagggtctcgagtgcgtagccaatgaagaccatgatggtcgaaacggtgcacggtgccttcatgatggatctggcttttctgctgtctctcttgtgttgcgcgcttataaatacacagttttgatgatttctaagataaatattatcattaaatattaatatagctgtcatgcagtggtattttatggcgcagcacatggacaacttgggagggacaacagagaagcaaattctcttaatgatgactcgttcgcgtgtgctcacagagtcacatgacgggcttgtcattggacacatggcctagatct

SEQ ID NO: 102847 - DNA, 475 bp, Glycine max
  unsure (1)..(475): unsure at all n locations
ctcaagctngttagagctatcatcacatgacgctgtattggcacagaacatgttgcttttattcaactngagaatttaacagaaacactcggtaagctgccaactaagttgtctattggtcaacctacacactcttttgttgtgcagattacaggttgtaccatctgtggtggggctcatgaaacaggccaatgtattctcactgaagaaaacactcaagaaattcattatatgggaaatcaacaacgacaaaggtatactcaaggaggatnttcaggcttcgagtatggtccctataatcaacaaggacagtggaggacacaccctgtcaaccagttcaacatagaccagagtgggccttcaaacaggccaatccaacaaggacctaacatattccagaggactactatattggaggagaccttgactcagtttatgcaggtacaatgtcaatcataaagcactgagcacactg

SEQ ID NO: 102848 - DNA, 407 bp, Glycine max
  unsure (1)..(407): unsure at all n locations
gcttgttcgcacatcgttcgcgtgtatgacatttccttcttatggttngaagtagaggagaccttctatcctattacgcaacgtggcggacaaatgtgggcagttaacttgaatggtcattattatcaatgcggaaggtattctgcgcttcactgtccatgtacacatattattacagctcgtggttacgtgagcctgaactactaccaatatatagatgttgttatacaaatgagcacatcttagaagcttactccccacaatggtggccttcttgtgactgatgcggctattctctcttctaatgacgcatggacacttattcctgacccactacaattcgtgcgaatggtttggcaaatcaacaacgatatgaatgagattgattgtgtcgaaccatctgagca

SEQ ID NO: 102849 - DNA, 451 bp, Glycine max
  unsure (1)..(451): unsure at all n locations
gagaatactagaggaaagcctacagaggcttaaaaaatactatatataatctctgcagagggcttaaaactattgtggagaagcctagagagnaatttcataagaatacttggatgaagcctgaagagactntttgaaagaatacttgtggggaacctgcatatgcttaaagaatacaatgaaagcacgaggaggatttaggagaaaggctactttgttataagtttttgtgtttggaaatcctatatgcgtaggactagacatagtcaaaggttgtgggtgaactggtataatttttgtgggtggtatgccattctttactgcttctcatttacttttacatgttagatacttgntttaagtattggaaaaacatgttttacanaagcatatctttgatatatttcttaatgattntactacaatatttaaagatcagaagcacgtctat

SEQ ID NO: 102850 - DNA, 486 bp, Glycine max
  unsure (1)..(486): unsure at all n locations
acgtacagcagcagataacagctccttcttccttcttttcttcccctaaaccctccccaacgcccccaagcttcttctccaccacccacgaccatcggtggccactgcgagccgctgttgtttgccattgaacccccacaccaagaggaacactttaatcagagtggaatcttcaaaacttatctcgaggattcggtagagaacgaaacctccaatcttaccttcgcggttttctttaaggtaaccatgattctaagcccgctccttgttagtttgagcctctctttgggtctctcttgacttgggaaccattattggatgttgttatgcttcctttgaaaaaccatagagaatgagacattgttaaagttatctttttataaacattgatgttattttcgtgaccttcactanaccccggccacattggcgttatcggaatttcaaaatgatgtgtcctttttgtagatccgacacacccctcac

SEQ ID NO: 102851 - DNA, 452 bp, Glycine max
  unsure (1)..(452): unsure at all n locations
ttacggaccttaaatactcagcttgtgaatcgatacactaattnggtaatcgattaccagtttctgtttctgaaaanatcaaaagatgtaactcttcaaaaaggttttgactntntcaaatgggtgttaagnttttctaaaagttataactcttcagaatggtcttcttgaccagacatggagagtctataaaagcaaggctgtgttttgcattntgaattaatctttctaacaacaatcttgaatacttgtgcttttccaatcaatcctttacaagccttgaaatctctntgaagttcttcttcttcttcttgtgtaccaaaagctttcatgaagtttctgtgtttctaaaccttgaaaacttgngctatatatcttttcattatcttctcccttctgccaaaagaattcgccaaggactaaccgcctgaattctttttgtgtctctcttc

SEQ ID NO: 102852 - DNA, 493 bp, Glycine max
  unsure (1)..(493): unsure at all n locations
agcttgcatttggaaatgcgaaagctccactccatcattatgattagtacctgacatctcaaacaaacaaatcaaacgtaacaagacaattatagttgctgtttgaatacctcacccactcaagtgtatcacacaattatggcttttctctaatgaaacactcttgccttttaccactctaattccccttgagttcttaggcaattcaagagattatggccacaacaaagaacaattcaccaatatgtgtaaggtaaggctagacaaggaaaaggttaaccaagaaaaaggctaacaatgtttttaggcacaaatgaaggaaacaaaattcagaatttaggaattcaagtaacaatccttcatgcaaccaatatattaccttaaagagtnnttttttttaagttcttcaagcatgaaccattcaacccaattnnttttttttttaatttgctttacgaaattctgctctttttttttataacaaaaacaaaag

SEQ ID NO: 102853 - DNA, 503 bp, Glycine max
  unsure (1)..(503): unsure at all n locations
tcttatccaaggctcatcgtggtggagaagctccttcttccttagcttattccttagaggagggggccgcctcttaccccttctcctctgtcttccgctgcatctccatggtggaaaatcaccattaaaggacctcattgaagctcatagatccagcctccatagaagctccacaagcaagcttccatcaagtggtaatcagagcacaagagcttcaagtaggtgctccttatacctccattaaatattatgctataccttctcttccattggtggttcttcatttatctccatggatctcctcacatgtgttgtgctaaatgttgttaacatgaatctttagaagttccaccgactaaactttggatagaagctagatttgattgactatggctcaaattgtttggtcttgttctgaaccatgaattatgtgagtnanggttccttgagttctcttgtatttttttgctgaacctacacataaattcttcaaaatttaagta

SEQ ID NO: 102854 - DNA, 464 bp, Glycine max
agctttcatatgtgaaatcaagttctatctttatccttacagtcctctcacaaggtggaggttgtgccatgttctcaaaatgttcaaaatcaaaatgttcaaaactataatgctcaaaatcaggatgttcaaaattaccatccacaaaatgttcatactcaccaataacataatgctcatgatgctcaaaaggtacaaaatgatgcctaactaatctatgaaatgtcctatctatctcaagatcaaagggctgtaagtcacatggattgtctttagtcatacactacattcagcatgcacaactagtttgccttttatgcaagtaacatgtaggtttgaacacaactaccctcaaatgatatccatatgacttgaaattttgtgagctacaccctataatcatgaatagatggtacaataactttaggcacaattacaaagtctaactatggtaactacctaat

SEQ ID NO: 102855 - DNA, 468 bp, Glycine max
  unsure (1)..(468): unsure at all n locations
actaagactgtaagctgcaaacatgattctgataaacgacacacatattctattttttcggctatnnaancaangattagacaatcaattatactgtaaagcatgcacttttcttcttcctttaacatgtttaagggacaccattaatatctaataacattnttacacctaacatggttcaattcagtgtataaatatcaatgactagggacggatgacaaattttctcatctctgtgtgtctggatattntaaaaataacaaagggtggataacaacatatattatctgcttgaaaaaatcaaaaaatataattatcttaagttcatactgatcataataattacatttaagaggcatatataacttgcaacttataagctaaagaactcaaccatctcaatacgataagatgtaacatgctgcttcacaataatngaagttatacatgtgtgtatcttgatattat

SEQ ID NO: 102856 - DNA, 389 bp, Glycine max
  unsure (1)..(389): unsure at all n locations
gctagctttntatagatatgaaggatgacgctctcatgcttcaattcttcccttttcttaatgattgtgagaatggaaggattcctgattctgttgaatcgaggtctttccatgttgagaagtcgcaaattgttgacgcgactagttgtacgactaaaattgatggcttgaaagagcagattggttatcatgaatgtgacatttagcctacaatttatgtgcttaatggattggtggntatgactagatataatatggtttctctttttgnctataaggaggatgagcttggttttgagagtggaagtcctaagaagcctatatcacgtgactctatttatttatatatttcattccaagcataccgattattgaattttgtttatata

SEQ ID NO: 102857 - DNA, 345 bp, Glycine max
  unsure (1)..(345): unsure at all n locations
tgctnggattgcataagatgcgtccgaaggctactntcctcattctgtttntggcataancaatcagagactaacatcagggtgatgcaccaatgagttcgactctatttatgcatcatttggataatatattcaaagacatggtccggctntattagactgatcaagtgcgtgatcaaagggatgccccgtcattataaacatatattacaatatctcctacacataatgagaatgaaatattcggctttccctaagtaccctctcaagaactaatcatatgtcaaattggaaaccttatcagctacctcacagtatattgtcctgaaatgaaaaggtctttgt

SEQ ID NO: 102858 - DNA, 305 bp, Glycine max
  unsure (1)..(305): unsure at all n locations
tacctactctaccattgtntgtctctacatatattctccattaatctccttacatgtcttgattaaaatattgctaacatgattctttaccgctttcaccgattaaacttgctatagaaattacatctgattttctatggttcacatttcttgttcttacctcttgaaccatgaattgtcttgaatttacgtccccttcgaattagacttgtaattttctgcggctgaaacctataccataatattcctaccataatatttatgctgaacgatacctcacaaatcttcagtgacttgttcatcta

SEQ ID NO: 102859 - DNA, 499 bp, Glycine max
  unsure (1)..(499): unsure at all n locations
tgaantcattatggatgcataagctaaaagcatttctatggtttttaatctttcaacaggagcatacgtatcttcataatctataccctattcttgattatacccctttgcaactaacctagccttattcctaatgattatgccatgttcatctaacttattcctaaatacccattttgttcctatgatggggtagaattcaagtttctctactagttcccacacattgnttctctcaaagtcgattagttcttcttgcatagaacctatccaatgatcatctattatggcttcatttcaatttttaggttcaatcatagacacaaaagctatattattgcataaatctttaagagaatgtctagttgttaccccttttgagatatcacccataatgttgtcaaggcgataatctcttgngctttcattcttcgaagttattattgattggttcactgaagacttcatgcttctttcttttcttagatctggcataaat

SEQ ID NO: 102860 - DNA, 334 bp, Glycine max
  unsure (1)..(334): unsure at all n locations
cagctggngtaattaggatcactatgattacatatgatccacgattggagctgagacatgagggattcttactaaaccatgttatctctctaactctcaagcatttgagagaatatgaggactgatgaagataatggcggcatgccttttaaacacattggcacatcttttcctgctacactccacattgatgactagtagacgaagtcggtaatatttgtaaccatggaaggtgttgcattaatgagagacgtaattactgctatgattctgtgttgcatcaatgacagatgtactactgctatgatttggggttacataacttttgctggat

SEQ ID NO: 102861 - DNA, 409 bp, Glycine max
  unsure (1)..(409): unsure at all n locations
tacggaccataaaactcaactgaaagggtttggacttttcaagtattgnacttgactatgatattaaaatataagctgtaatatattactgctttactcctctccacaaatgttgagtggttatggaacattaccagattgacaagaagtcgcggctaagaggctttgacatacatctaagcaaggatcaaaagaatttatgattgtggttatgttatgtgccgaaccccaacatcaaaatcttgtcaaagtcttggatgttgcattcaagaagatgaaaaattgctcatatacgaatatatggcagatataagcttagaggtctttctttttgttagtttctctaaatttaactcgtaattaatgtaggattgcattttgttcctacaattgttgcaaattaattaaa

SEQ ID NO: 102862 - DNA, 172 bp, Glycine max
attgttctaggcaatgttcatatattgaatgtccttttctataatgctctggttaaggggattcttattaccaaccacaatatggtatggatgacccctatcatgatgctcaggatgttaactatgtacatgttgatgcacaacatttatatgatttgacctatctatctca

SEQ ID NO: 102863 - DNA, 453 bp, Glycine max
  unsure (1)..(453): unsure at all n locations
cgcttgtggagcttctatggaggctggatctttgagcttcaatgatgtccttcaatggggatattccaccatggagatgcagcggaaggcaaaggagaacaggagaggggaggcaccatccactanggaataagccatggaagaagaagcttcaccaccaagaatgtgccttggataataagctngaagaggatgctttaatggaggaaaagaaagagagaaggggggggggggagcactgaattcaaggaataaacaagggagagaagtggaactttgaagtgtgtctcataagactttcattcatcaaagtaacaacaagtgttacacatgcttttatttatagactangtagcttccttgagaagctttcttgtaaaacttccttgagaagcttctttgagaaaactttcctgagaactagaccttactacacacactcctctaatacta

SEQ ID NO: 102864 - DNA, 295 bp, Glycine max
  unsure (1)..(295): unsure at all n locations
tctgnnggcttagcgagcatccgcttagcgcaacactcctgtgctaagtgcaaggaagaatccataagaagatgagttgtacaggttcgctaagcgcactgcttcatctctctaagcgcaccgcttcagttcatccgctaagcgagaaaggcacgctaagcaaaaaatcactaacgtgcgctaagcggtccatacgtgtgctaagtgcacgagcatgaacaaggacacctatntaagcctgaaatcagattttgtgaagagagnttggagtgggattcatagcnttgcatgtcta

SEQ ID NO: 102865 - DNA, 465 bp, Glycine max
  unsure (1)..(465): unsure at all n locations
ngaagtgagaaagtgtggaagagtcagtcttcctaactttattcgttgactatcaaagtagtacctggagatatgtcngcggggtcaggagaccttgtggacgtcaggtggggtgctattgcccaaaaccaagcttgaccaatcccgacccaacccgggcatagtcagtcagtgagaacctgtgatgtacctaaacaggcgagctcctgacagtcaaccgataaaagaacaaagaccacaaagcaaggaggcttgtgtggtggctggccagctatggatcttgagtngatattggaatatagcctctggtaatcgattaccaagggtgtgtaatcgattacaaggcttataaatgaagacaggaagttaagatggtctctggtaatcgattaccaagggtgtgtaatcgattacctggcctaaaaatgggatcaggaagttgagatggcttcttgtaatcaatta

SEQ ID NO: 102866 - DNA, 437 bp, Glycine max
  unsure (1)..(437): unsure at all n locations
gctgagctttactgtgtgaaagattttatcatataagagaagatgtncaagctctttgatgaatatgttattgtaaagtcaagttcatctattgcatcaagttctcaacaacctactggttaagaagatttcagtatagaagaaaatcaagagatggatgatccatataatgttagtcttttgtttaactatttaattgttttatgattcaatttattntattntaattttctcatatattgtcataggaatatatcaattatgtgagccaaaatgttaatgtcaatggcaactctgaattagatctctatttggctgagacaccgcttgagccaaagttttttttttccctaagttggacattntgagttattggaaggatcgccaagaacgttaagcattcctataacaactggtgctagttgtcgcaacctacc

SEQ ID NO: 102867 - DNA, 437 bp, Glycine max
  unsure (1)..(437): unsure at all n locations
ggggatggtgggactgtnttatatgtatagggacagcatgattaatttattatgagtgcccgaatgcgattctaggcctaggaacccaagcttttgatttcaatacaagaaagcataaaaatgagggcgttatgatagggatttccctttaggccagtggctgatttttggggctgcaccatgatgtttgcttagtttgcgtaaagatgttattcaccatgtacgtatatgtataggataggtagctagagaaaggacccttcaaataaaatgtgtatatgttgaataggtggtcaagcgctntataaatgtacgcacgttngaatgcttcccaaaatgaatatgtgatgtggaattgcatatgcacgctggtaaatgttccttttaaggaaatgtgtgcacaagtttgttctaaatcgaaatgaatagcatgaaaa

SEQ ID NO: 102868 - DNA, 449 bp, Glycine max
  unsure (1)..(449): unsure at all n locations
cttgtagcttcaatgcatggtatcatgcttatggctaggaatccaaaatttggttttagagttagaanaacatgacaattatgacttgcttgtgagagttcttgctcgaatttgggctgccccatgtttgatactttacatagaggtagcgtggaaaacaccttgcaatagtgtgtatacataggtaaatataaggagtatgaaattcctagcanagtgtgaatggttgtcttcctaaatgaatgtatgatagtgtggaatgcctttnttgaatgcgaatatgtgcaggatgtaattagctttccaatatacatataagtaaatatgagtgaaacagtccaaagttgtgtggtgtatttcaaatgtatgtaagtagtttgtgatagcagatgtttaggatataaattaggtgtaaagtttgacgcaacactttgagcatgaaagtgtgt

SEQ ID NO: 102869 - DNA, 450 bp, Glycine max
  unsure (1)..(450): unsure at all n locations
ctcaagctagtctgcaatatcatgaggttattagttgtgaaagcattctctgtttaagataagataagattgttaatttagtctgtccatgccttgattaactgcaataacatctntgttgcttagcaattcttgtgtggtggcatccagtgctctaatgtcacaaccaatcaacaaaggagcctatatacacagaagatatgtacttaatgtgcaaaatacattattatatggaaatgcctaagcagcacgtgctaagtttttgttgcaacttaattaccttagctaatgaccatatgctgaaatancacgatattcttctgttgtcatgcctccatttccaacttctagcatgtcaggatctatacaccaaaaaatgaaaatgtgaaccttagtntctttaatatgatgtagtaaataggaattatacatggacctatttctttatta

SEQ ID NO: 102870 - DNA, 500 bp, Glycine max
  unsure (1)..(500): unsure at all n locations
gtcacctgcggcatgcaagcttgagagacaaaggcattgagtntggaaagtgtgttctgcttaatgccccacagcagcatggtcttctccgcagaagattcctctcaaccaaccatggaccgaacctcaccattcgaaggacccaacttcaccattggtgccactcgttgttgatggccatggtgtcctcgctctctctgtctctcggattcaattgggttattaatttgggtttaataaacaatttccttcccaaattatnttaaaatttcaatttcatccttaaaatattaaaaagtttaatttaatgtgtttaaaattgaattaatttgatctcttccattaaattggcattggcattgagggcgttaaagcttccggccgcttcattcgcaaatagtgtgaactaaaaaccgccactaatnttctctttttttcctttcaccctacttcatagtccttcgctctgcgctctcttcgcgcgaccataccagggccaa

SEQ ID NO: 102871 - DNA, 513 bp, Glycine max
  unsure (1)..(513): unsure at all n locations
gctaacactgcacaacaatggtgctgttctggttagagatgggtgagtatatatgaagctagtttaatgcttaagtcaaacagcgagacagaataacgataactgtctttgtatacaaataagcgcacttaagaacatctcttaatgtatggatggtatgcttatctaagtgtttaggctcaacaaggacatattgaccacagcctcccaattatgcagctgatattatcaattcaatgtgggatgagacaagtgattaagaattccgtacaaactccccctttctttatgtgtggatntgaatccttaaagcttttatgccactctcttgcttggtggacaactctctccaagcagatctcctagtgcctagtgcctaaatgagtaaatgcaatcggatagaaatacttatgattcacacttgttagtaatctttaagtgacatttgtgaagttcagcgtgtattgcactntcttatggactgcatgctctcatttatcactttttcatgtt

SEQ ID NO: 102872 - DNA, 444 bp, Glycine max
  unsure (1)..(444): unsure at all n locations
agctngaccagtccacataagggtgatttcttctttctttggctntgttaatctaatatcaagaagattgatttcttctttctttggctttgttcatctaatatcaataatattatgatccataatcaatttccattcaatcatatagcgtactgaataaaaactaacccgataaaagcctaacatgtgtagcctttcttgacatgcctttcttgaaagcctgacagcttgcgcgacttttattcaatgaaatttgtgttagaccaatgaaatttgagtgaatgaaatgggtgattgaatttgcgtcactcgtttgcagatcatgtgtaggaccagaggattaggttgtgccttaggtcaggttactggcagaggtatcggcagaggagatcgtgatgattccgatgatgctccacagcgttgacggcctactgcatccgcacg

SEQ ID NO: 102873 - DNA, 455 bp, Glycine max
gggtgtttaagaaacgaagataactcaaagagaggaagaatgtgatattatctcacctagggatagtcaacaaccactataggggggagaaatgagctcctcttttgcacaatacaaaaattcaaggttctccaatgatggttttcatggagaagtgtgttaggagagagtgtttcaccacaacaagaggattttagggagatatatgactgaaaaggggttttttccttcctacacctaagtatctgctacactcacacccatttcactaaccataacaagctcatctttcttcaagcccaaactcacaaaaaactaactaaacacaataaacataagcaaagcaccattacatcaatcattaattaattataggccctcaaatgcaatattaattactcttacaattaattatatcacttgacaatcaatagataaacataatgtacacaaag

SEQ ID NO: 102874 - DNA, 475 bp, Glycine max
  unsure (1)..(475): unsure at all n locations
atcatatgacacatatgcnctagatctaggtttattatcactactagaantaatagatgtaacatcatacagttaacatcggttattggaacaactgatgttaacaaacacaaggtggcattttcataaataagtttgggtaactaacagcggtttttaaaaaagaccgatgttaaccgtacgctttctttataaaacccaaaggccaaaaaccctttttcccccgcgcgctctgttgactgacaaacaaaagctttctcttctccctctgcgttcatcactaccatgactgtgagcatcaacccaaggtacgtgttaactgcgtgttttccatggccatgcttgcgatgacaatgttgttcttgttgaagtttcaggctaagttcgtgttttcatgcaccatgcactagatctctaagggtgaaacacccgacagtacgtcgcacgagtaactcacgcaggttcttttgtcatt

SEQ ID NO: 102875 - DNA, 409 bp, Glycine max
  unsure (1)..(409): unsure at all n locations
tagactaagttcagcctaccatcctcagattgatggtcaatctgatcagaccattcagtcattggaggaacctttgagggcgtgtgtcttatagcananaggaagttgggagagttttcttccattgatagagttcacttataataacagttttcattctacgattggcatggctccctatgaagctatgtatggtagaaggtgtaggatacccctatgttggttagagctcggagaaggcctcaccttatgactggaagtggtacaacaaaccacagagaaggtcaagttgatccaagaaaggatgaggactgctcagagtangcagaanatttatcatgatatgagaagganagaattggaattcaaggttggtgatcatgtattcttaagagtcactctatggact

SEQ ID NO: 102876 - DNA, 462 bp, Glycine max
  unsure (1)..(462): unsure at all n locations
caccatttttccggcgtcttctccttaaggttaaactaacctaaggttcaactaacctaccctaaatgctacaaatatagtgcataacaaaaccaaagctaagaagaaggccacctacctcgaatgcaaatgggtctaagggctggcggagaagcctcgcggagaagaagaccaccaccgagctcgtcacggaagagagaagagaaaggaagctttcgcggaagagagaaatgaagaagagagaatgcttccgaaagagggaaaaagttttttaagtttttaaatgaagggcaaaattgacctttcaataaattgctgggtgcaccagcaatattgctgggtgcacctagcatatccccaagttggcgcatgttgctgctgcacctctaatcttaatatttttttctccatcactctancgtgtgcaagtccaataaatgaaagcatcgttgtcgtatcaac

SEQ ID NO: 102877 - DNA, 473 bp, Glycine max
  unsure (1)..(473): unsure at all n locations
tctgaagtgcgtggtcgatgagctcngaccttctatcttgatctatgctggtatatngcgaggacttcaataataataaaagggtctgtctctgatctcacccatcggccaccgacaagagccaagaggtgtattattgaatgaaaaccacaagagacgtggcgttctggttttggttgttgggtcttctcctcatctctagcatcatccaactgtgggaagtggcgttagtgcttcttaccttttcatgggaaacttgtctatacacaacacgatgacttagcctcaccacataataagtgggagagtgtggtccttatgttgactcttgcatatgtggttcttaacttatatctatattcaaataaatatcttggagaagaagatagtactcgcgtaaaaattgatcatacactacagatagtttttttttttaacatagtgcaatatagatgctattctnttgatttata

SEQ ID NO: 102878 - DNA, 500 bp, Glycine max
  unsure (1)..(500): unsure at all n locations
gactcttgagtcgcccgctgcatgcaagcttccagcattgttgtgatgccatgactcatgtcatgaatcaagattcaagcaagtttcaagaatcaaagatacattccaacaagattaaagaaatcaagaagattcaagtgaagattcaagagaagactcaagatatgcaagaacctcaagaaaaacattaagataagtataaaaagaatgtttcacagaaaagattgaatagcataatttgtccaaaataatttttcaaagaagaatcttttaccagagtttttattctctggtaatcgattaccataaggcagtaatcgattaccagaagcccaaaacagttntataactgttntacaaagtagtaatcgattaccatgggcatgtaatcgattaccaatggttntgaacgttgaatttcaaatcttaagagtcacaactggtgacaggaatatttcataatagtgtaatcgattacacanatatttggtatcgattac

SEQ ID NO: 102879 - DNA, 425 bp, Glycine max
  unsure (1)..(425): unsure at all n locations
actgctcaagaaagagacggcctcagcaaaagacttatgtccagaaagtgaattctatcaatagacctccaatctttaatggagagggttaccactactgganaacccgaatgcaatattttatcgaggcaatagatctaaatatctgggaagccattgaaataggtccttatatacccaccacagtagaaagagtctcaatagatggtagttcatctagtgaaagcataaccataganaaacctagagatagatggtctgaagaggatagaanacgagtacaatacaacctanaagccaaaaacataataacatctgccctaggaatggatgaatatttcagagtttcaaattgtaagagtgctaaggaaatgtgggacactcttcgattaacacatgaaggaactacagatgttaaaagatct

SEQ ID NO: 102880 - DNA, 478 bp, Glycine max
agcttaacatcagaccacttccagggtgctggttctacttcacatggacttgatggggcctatgcaagttgaaagccttggaggaaagaggtatgcctatgttgttgtggatgatttctccagatttacctgcgtcaactttatcagagaaaaatcagaaacctttgaagtattcaaggagttgagtctaagacttcaaagagaaaaagactgtgtcatcaagagaatcaggagtgaccatggcagagagtttgaaaacagcaagtttactgaatactgcacatctgaaggcatcactcatgagttctctgcagccattacaccacaacaaaatggcatagttgagaggaaaaacaggactttgcaagaagctgctagggtcatgctttcatgccaagaactttcctataatctctgggctgaagccatgaacacagcatgctacatccacaacagagtcacacttagaagagggact

SEQ ID NO: 102881 - DNA, 380 bp, Glycine max
  unsure (1)..(380): unsure at all n locations
ntccacaatcacggctcgaagcacgtttgaatatattaacgtgtcttatntcgccaagcatctacatatttttctacanattcagttattttgatttcaaatgcccgactagtctccaagtccagaatntatatgacatcagcggatgaatttgtcanaaacgaaccatgttgcttccccaacatatcgatcaataccaaatcaaccctataaaaataatactacacacaaactcaaccttcttacccttaatttttttcttcaacaaacgccacaatggccgtcacgaaaagcctctccatcttcctcttcatcgccataagctgcgtggccgtagctcaggcagcgaacttcaacatcacaaacaattgcacctacac

SEQ ID NO: 102882 - DNA, 411 bp, Glycine max
cccaaattctatgaatacaccacaccaataattaaatgaactattagtggatgagttataaagcttaaggcttggctcatttaaataaacgagcctaatctcaaacttgagtttatgtattcaaataaacaaatgagctcgatcgagcatttaaagagttgagctcgagtagttcacgaataactcggatcatttacaccccaagttgagccaatggcatttgactgatgggaaaaaagatacgatgtttcctagctaacataagaaaatagtagtagaaaatctaggaaacatgttcatcatttcatcacacgcgaacaactcaatagttcaattgatgtatttgtaaaagattagagcctatcagatatcatacctttagatcattgcgtgtcatatataaatattttg

SEQ ID NO: 102883 - DNA, 459 bp, Glycine max
  unsure (1)..(459): unsure at all n locations
tccttgagaaacttccttgagaagattcctagataagctagagcttagctacacacacctctctaatagctaagctcacctccttgagatgaganactagagcttagctacacanccccttantaatagctaagttcacccccatgccaaaatacatgaaaatataaaaaaaaggtccctactacaaagactactcagaatgccttgaaatacaaggctaaaaccctatactactagagtggtcaaaatacaaggtccaaaagaaggaaaaacctattctaatatntacaaagaagagtggacccaaccttggcccatgggcttagaaatctaccctgaggttcatgagaacctcagggccttctttagcagctctagcctaatcctcttagagtcttctatcccaatacccttgggggtaggagtgcatcaactttccttacttncttttcactgata

SEQ ID NO: 102884 - DNA, 441 bp, Glycine max
  unsure (1)..(441): unsure at all n locations
aattntnggtactattaggaaacttgcatattttatccataataatttatccattaataaatacaaaagttgaagtaaaattttccaaaaaataaaaaattaggaaaaaaattgtcaaaaaaagttaagtacaaaatttgtcaaaaaataaaaaagttgaggataaaaaaatataagttaaaagtaaaatgaaagatgataaagttcataatttttttaaaaaattggaagtaaaatacattcaattaatttattaagagtaaaattcgaaaaaaaaattaacaagttgaataaaattcacaattaaacctataaaataaaaaataaactaaactaaaataaataaaatcctctttctttccggctctcccgtttctagggttagtttctgcctcaacccagacacagccatggaagaagtaagcaattaccacctttctc

SEQ ID NO: 102885 - DNA, 263 bp, Glycine max
  unsure (1)..(263): unsure at all n locations
tgatgaattggtgcctgctgcatngatcaaacttatgcttnctgttaattcattgctattgatctgtctttcctgctgaacaacatatgagaaaaccttggctatgtttgggaatgggtccatcatcaatacattggatctcacagtattaaattgatcatttaaacctctaaggaattgcatcatacgatacttgtgctttctttccatcacactagtaatagcatcagatacacactttggatcacatgaacatattggat

SEQ ID NO: 102886 - DNA, 474 bp, Glycine max
agcttctacttatatggcagggcgggcttccttcactttcttggctccaacgcgagctctgaccactgttcttccttcccgcgatgcctcttttcatgtccgcctgagtgggcttatagcctaaaccatacttcccacgatttccttgggtttttatcaggctagttatgccgccattgtctttgcctaaacccatcccgggttcataaccgttccccaacataactcgggccatcattaccgctgcatcggacagacaaggttgcccaaagagggagtccacggaggaaatgctgaccacctcaaaagactggaaagcggtttctaacgattcttctgcggcttccacataaggcatggaggatgggcagcttaccaagatatctttctcgcctgacacgatgaccaagtgcccctccactacgaatttcagcttttggtggagtgtagaaggcacaactcccactgagtgga

SEQ ID NO: 102887 - DNA, 301 bp, Glycine max
  unsure (1)..(301): unsure at all n locations
ataatcgtgtatgaaatataggagtaggacaagttatatagaccaatattttgntcgagtggttaaattgaattatttattgaattgggttaaggagtatgaaaatgatatgcaattcatatcatgctttgacaacatgtctagtattactaagttcgtttgcatgccattttataaagaaaaaaaatataacttatcttccatcaatgtttttcagcgtttgcaatctatctataatgaatctctatactgaagctagcaatcatgtttttttttagaacacatggtatcattgtctcta

SEQ ID NO: 102888 - DNA, 340 bp, Glycine max
gaacatgcttctttctagcagagatgcttcttggatccttcgccagcattaggttcttcaaagctaaaggtccataacctacatagcgtctcttccatgattgagctttcttcttgtcatataccctggatgctgcttgaaagacaaattcactcaacttctgcaatgcctcattatatcaactgctggaagaactatcatcctctgactcatccaaaacaggttgtcacaaccatgatgcttccataatgttatcactaccaccaactccactcaaatgatcttctgctacctcttcatcattgtctgaatcactatcagatgagtattcatagtcatt

SEQ ID NO: 102889 - DNA, 468 bp, Glycine max
  unsure (1)..(468): unsure at all n locations
tcgtgacacgagccacttgttgtacacgaaatctcataagattaaaacagtaatatatggtatagctgtattgcattactagcgatttcacacgattgcttntagctagtttcttgagggaaagaatctgatttaatttcctagtatattaactgtcattctaattaagtaattattctgtcaagaggacggtggatatgacaaggtcattgctttagacctcttatgcattcacttcttattcattatattatatatgttattgatagttggtgacttgcaaattgaaatatgcagcagttagcattcatccaatggtntagttagtagttagtggccatcataattgataatagaaacataagtgccaagattatttataatttgaaatttaaatgtattgcttattaatggagaaaatcattataatgtcacgtaaaattgattaatatgcttaactatgtgacc

SEQ ID NO: 102890 - DNA, 492 bp, Glycine max
taagtcacctgcggcatgcaagcttcatctgctcgtgtggaataggcaaagtttgtattaatggaggctgtcgttgttgttgcgccacaagagagggatccccaacttgtcttgcttgagcttctccaagtagcctcctcctcttttgtgactccaaacattgaagaagttgctccaattccctcacaaactctatatcccctccaattatagaagcttgatcaccctatacataaacaaaaaatgaaggaaggaaaaaataggacaacatatgccagatttgctatggtattcagagaaatcaaagagttttggtataattggttttttgagtcaatatatagttgaatgagtttctttttgtcataaaaattaaagacatatacaggaggactttaacaacaatttatgcactttgcttaattaattgagttagactttctcaatataattgaatgagtgtaaatatatgacagaagaaagatcgagaat

SEQ ID NO: 102891 - DNA, 321 bp, Glycine max
  unsure (1)..(321): unsure at all n locations
gtagtctcacttagaatcatagaattaaagtgtgtaaatagaatgaataaaaagggatatttcagactacaaaatgtacacatacacancaatttagtatcggagggtcacactcctcccgatctgcaatacaatgtaatntaaaataaatgcatcacacacatcatttaaattgttgatggaaatcacattttttcngatctttcaattaacttaaaacaacaagctaaatatttaatcataagtcaattataaaacaatgcacttatagaataacaattaaaattcatagatatagaagttatctcaatacttaaggtt

SEQ ID NO: 102892 - DNA, 433 bp, Glycine max
  unsure (1)..(433): unsure at all n locations
agtcacctgcggcatgcacgctngagatgaggaagtgttgaagggtgaaacttcctgctcntattgttgaccatagagcggtacctggagatatgtcgcggaggtcaggagaccttgaggacgtcatgtggggtgctattgcccaaaaccaagcttgaccaatcccgacctaccccgggcatagtcggtcagtgagaacctgtgatgtacctaaacaggcgagctcctggcaatcaaccgatgaaaggaacaaagaaccacaaagcaggaggcttgtggtggctggccagctgtgaactctgattgatatgtgggttatggcctctggtaattgactaccaaaggtgggtaatcgattacaacgcttaaaaatgaagacaggaggctaagatggtctctggtaatcgattaccacggtgtgtaatcgattacc

SEQ ID NO: 102893 - DNA, 423 bp, Glycine max
tcttcgtcttagcttctagttgtttcatgtatcgcgtgaaatgcaccatcctaaaactaatgtatataaatgaatcaatgagaggctcttgacagagtcaatcttttactcttcaattaattagcacatatacaatactttcttcgcaccaaaactatcttatgttttaatgatttacacacgatccagcacatacataccacacattcattaaatgaatggattgtttgctctttactatataaaaataacatagctttatttttgtccaaacacgaaactcatagtattgtaacatcaaaaccatatattttatattatatagacaacatatataattaagcctaataaaataaccttctcatcattctcatactctcacatgagtatagttagcaattcatacctctatttctctatata

SEQ ID NO: 102894 - DNA, 488 bp, Glycine max
  unsure (1)..(488): unsure at all n locations
cttgactngagtcatcaagagattataaatatgtgaccatggtatgagntttcgaaaatcaaanaacaattatcataataatcatctatcatctatctttcaatctatctttcaatatcttctttgatctctttctacagaattttctgattcatttctcttcttctttctaaaagttttttatcaacactttttctttcaagaaaagttctttgttcaaaaacttgtgctattcatcttttttcattctcttctccctttgccaaaagaacgaaggactagccgcctgaattctttggtgtctctcttctccctttgcaaaagaacgaagggactaaccgccggaattctttgtgtctctcttctcncttacaaaagattcaaaggactaaccaccttagaattctnttaattcttcccttccnctnntagcaaagatntcanaggactataccgctgagatatctttggttccccttacaaagatc

SEQ ID NO: 102895 - DNA, 477 bp, Glycine max
  unsure (1)..(477): unsure at all n locations
agctngatgaaccttccttgatacctatcttgcttgctagcttatttcatttgtgttgtttaatgaacatgttcatatctttgaaatactgcatatctttatgaagggttattggttgaagtattttgaatcacctctattcatgcaattgaatattttggagcaaacacatttctggttaaccactgggaatttcgtcacttgaggacaagtaacatattatttctttgcttgaggacaagcaaaactgtaaatttgggggagtttgttagtcactattcatgagttacgtttatgttgaatatttgcaaggaaatagcgccttacctccaatttatggttcttnttgtaggaattgtacatattnttctatttagtatgattctatagagtagatactcccattttgtgaattaatgttgaatccacttcacttttacgccatagaagagaaggttcatgtatttgatgactcac

SEQ ID NO: 102896 - DNA, 423 bp, Glycine max
  unsure (1)..(423): unsure at all n locations
tgagcaggtngtgatggagactgtttgagattatattgatgctgacatcgnntgggagggaatttctgttagtgatcatcgatgtattctggcctctatgagtaaggtgttccatgaattattcaagagagagaagggttcatcagataaagaagggaaattgaagtataacatgagtgatttgttgccttatggcacggttggatatgaagccttcctcatataccttggctatgtatatactggtaaactcaagccctctccaatggaagtgtctactcgtgttgacagtgtgtgtgcccatgatgcttgtagacctgccattaactctgctgtggagatgatgtatgcctcttaccattttcaaataccagagtttgtatcacttgttcaggttataactctgtgtatgatgacacaaaa

SEQ ID NO: 102897 - DNA, 427 bp, Glycine max
  unsure (1)..(427): unsure at all n locations
ttaagtcacctgcggcatcaagcttgcaaaggtgagagctcaagantctgatgttatgttgtcatgaaggagaatattgaaaaggtacagaggcactacttanttgcattaatttaagaggataataccatagaaactgaaaagatcagttggtacaagaatcatttgtgccaataaaataaataaatatgattgtgactgtttgggaaaaaaagatggccaaggcacgggagtatgaatgaanatcagaaaccaatatgtnctccattcccattttcatattgaacacagttcccatgtttgatctctactgtctaggttttaagaatctgtgatggttntaatacgctgagccaagctacaataaagaatgtttactaaaacacttctaactgagtgctgtcacataattacaataagacagata

SEQ ID NO: 102898 - DNA, 430 bp, Glycine max
  unsure (1)..(430): unsure at all n locations
gagataacttgtcagttatgtaacccatatgctaanggacaagtgtntgtgctcttattgcanngatggcgtgaatggttgacacgtgtctcagagtgccatgtaggatgtcacatgtattttgngggtcttggacagtacataagctccctaagctctgagccggcttgcaagagaaagagatggtccaatgcccaaggagattgtcccctgtcgagggagtctgtctgatgtccgaggtagtagtcttaacaagtagaggatgacgagtttgtcgagcccnncagtgtggatgaatattgtccagtgtcaagtgtggtaacctcaacaagtgtgagagaattgcaggtcaatgtagctttgccagcccccgagcttggacaagtgttgtctgggctggttttgtcaagtgccgngatggcatgttttg

SEQ ID NO: 102899 - DNA, 428 bp, Glycine max
  unsure (1)..(428): unsure at all n locations
ttaagcaccgcngctgcaagctgaagcttgcttcccatttctattattccatgaaatctttctaaggcctcactcagagattcatctggaaattggtgaaaaaaagagatggcagcttttccttccgcagtcttagactcaggaatatatttctttagaaatttctccacaatttcatcccatgtcttaagactgttacctttgaatgaatgaagccacctcttagcttctccagatagtgagaatgaaagcaagctcaatcggattgcatcttcaggcacaccagctagcctaatagtatntcatatntcaatgtaagtggctaggtgtgcatatgggtcttcatttggtaaaccatgaaacatattattctcgaatagctgaatcaatgatggtggatatgtaatgggttgtgctcaaacttctag

SEQ ID NO: 102900 - DNA, 430 bp, Glycine max
  unsure (1)..(430): unsure at all n locations
actcaagctctaataggctctgaattcgcgacattgggcttagcgccaccctcgcgcttagcgcgggtatgtggagttgagcttagcgccaattgtggccttgatgttgatgctctgccagattctccttcgtgttaagtgcactgaagctatgcttagtggtggatgcgcacttagcccaattgctgagctaagctcaactgtcactttttgcacttcatgacttagcctctttttcacctgaaattgcacatatttcatcattaaatccaatggacatattctagagaccgctttatccataaaacaagatttatttacaagattactccaaaacaatcataaattggggaactatacaagtgttggaaaantaattctatacaaaagttagtcgtataaggcgactaacacacctcacaatcactca

SEQ ID NO: 102901 - DNA, 368 bp, Glycine max
cacagtgtttactgtatttattaatgctaagtctctgtcagtcacatataactacagggagatgatcttgttttaaaaatagacctcgataccatttcaaagaccatacaacattattaacatgttcaccctccaaatatgcaaatccaggtagagaatgtcattctcgttggtgtctccccaacaatgtcaagtagaggaagtctgtacctatatgtcttgtaagtattgtctatcaaaaacaccaaataacatgcatcgcataacttcattgcataagggtgacaccaaaatagatcatgtaccacaaattcattctttaatctatgctactgaatatattgatcacgttcaataagcttcatgtt

SEQ ID NO: 102902 - DNA, 437 bp, Glycine max
  unsure (1)..(437): unsure at all n locations
tatatatgtgtaatcgattacacagtgcaaactttgaattaaatnttatagctgttgtatatctagtttggccactggtaatcgattaccagagagtaaagttgttgaaaaatacttgttaacttaaaattcttggccaaaccttgtgctacatcaattggaattcccttcctatttaatataccctttctaagactctagagactgtcttgatcattcatcttgaatatatttaatttcttttgattgaataaagctatgagactttgagacgcatgtgaaacntttggcatcatcaaacatctagcttgatcctctgcttccattctcccctttttatgatgacaatccctgaatcaagacaagctgctatcatatattctcattacacaaccttattttccttcttgtgcatgtatcctacttactaatgataa

SEQ ID NO: 102903 - DNA, 452 bp, Glycine max
  unsure (1)..(452): unsure at all n locations
agcttcaagcatcaagaagatacaataccaatgttcatctcttgagcctttcaacctggcgacctagtgtggagagtccaaggtgaagcaaggaaagacccatgagtagaaaagctggggtcaaactgggaagacccatttagggtcgtggcaagcttagacaatggagcatataggctgcaggagctagatggtaaagcaattccaagaacatggaatgctaccctatataaagttctattttagttgaattgcaacaagaccaagtgttgtactcttttcctactcaagtcttntgtcccaaaatagaaaataagatttttntggctcgagaggttttaacgagacacactttgggaatgaagagaattngtactcaaatgatcaaattgaatagaattctntcgccctcttaggttttataattcttcttgggatgccatgaccttgaa

SEQ ID NO: 102904 - DNA, 442 bp, Glycine max
  unsure (1)..(442): unsure at all n locations
tcatcaatggttgtgcaaggaggaagtcatgttactcatatcttaaaaagtctatgaaggctcaatatatgtgttgaaattacagggttatgntttaggtattgagggaggaaattgagagaatagaaacttcagatgatattttattgcgtattatcaatntgtgatgtgttgcagtgtgatacaaaacatanagcactaatcttcataatcctaactaaataaaaaaacaattcacatttttttcaagaaatatcaaagatagtgttggatatttttcatgtagaaatgtgttggctaccttttgaatgtgtcaacttaaccactctgtangccagtgttattaatggagcttaactctcctgctaaacgccacccccattgggtagtacgagtgtagatttcttctaacaaaccgctgattatgatgtatattatcatg

SEQ ID NO: 102905 - DNA, 221 bp, Glycine max
  unsure (1)..(221): unsure at all n locations
actcagcttactcactcaacataacaagtttatcatgctttcgtcaaatctcttcacanataactatcacacagcattaaccaagcagaactacccatcatatctnccanagccccatacccacgaaaatcaagtgagaaagaagtctacccaaacctgaaatttcgaggtcccacacgtagagatgcgctttacgacttccgaaatgccttctttcgcga

SEQ ID NO: 102906 - DNA, 485 bp, Glycine max
agcttggctgctgctggccatgttccccctgatacacttgcagccattcatgctgagctcttaggtcacccgacaaataacataatgtctacagtggaccaaactaccctactgcaagcatcaatacaggggctaaaacattcccatgctggacatgctgtggcatatggtcagcctctagtaatatgtccttcgaacattggcaagaatttctctccatctatctcgacttgaaatgatacgtcatcaagatatggtgcatggctgtcatctaataatacaattggtttaatgagacccaataatagtgttgaaagggtgagtattcagaataacaacatgctgatattataacaccaacaaaggcagcagcctcagcaaaaacaacagcagcaacagctaaagcaacagctacagctgcagcagctgtcatgatacatgatcgatattgttcatcaatgttcaaccatctgctcggggttcct

SEQ ID NO: 102907 - DNA, 443 bp, Glycine max
  unsure (1)..(443): unsure at all n locations
tgaaggacanactcactacagcacctgttcttgctctgcctgtattttcttaaaattntgtgattgaatgtgatgcgtccggaggaggtgtaagagcgatactgatgcanagagacccatagcctattttagcaaggccctgngaacacggaacttggttaaatctacttatgaaaaggagttgatggcggttgtgctatccatacaacactggagaccctatcttttggggaggaagtttgtagtatccactgaccaaaagagtctgaaacaactgttgcaacagagggtggttaatgctgatcagcaaaactgggcttccaagttgttggggtatgaatttgagattgtgtataaacaagggagattgaacatgggggcagacgcgctgtccagaattaacaaggggctggangtaacactataattcttatgnaaatgga

SEQ ID NO: 102908 - DNA, 403 bp, Glycine max
  unsure (1)..(403): unsure at all n locations
gtcacctgaggcatgaagcttataattagtgcggtcacattcaaaacttgtttcgnggttcttttatttaggggggcacaaactctttgactaggtcaccaatgttgaagttactgaccttacggtgcaacttggtatcacacactcatgatctctgcggcaactatcacgttttcacgtcaaagatcttacacagctatagttgcagcgacacaaagaacatgtgcatttccatagcttanaagtctatgtcgcaagagataatctgaacaactaaactcagatttatatgaacgacgtaaaaatgaagatacgtaactgagagatccatgacttacctgtcatgttagaattaatatattattgaccctcgaactggagagtatgctatgacgtctatctc

SEQ ID NO: 102909 - DNA, 463 bp, Glycine max
ctcaagctggtagtgcagtacagaaatgattatgcacatgcagatatgttatgggtgattatgctcaccgagatgtatatgaacctcttatatctatctttaggcttcagtgatatctagtgaagaagactccttatagaatattgccattacctgtctctatatcatagaattgaatagcgcggagatgtcagtatgtaatttcacagaagatgatattattaaaggaaattcctatatcttacttcagtgtgtcatccatagctggattaaaccggcttttcatgtataattataatcatgaatgtacagtggaacaattattaacaattcttgagtgtagctatacaagatctcaagccagcctaggccttgtgcataaccacaaacctatatgcttgtatcatcaagaatctacatcataccgtgaagctgatttataacattacattacatgaatatc

SEQ ID NO: 102910 - DNA, 494 bp, Glycine max
  unsure (1)..(494): unsure at all n locations
ctgcagcttaatggtcaaggaaaggaaggaactttcttctctaaacttatctggattgattattccactactttatttgttagtcgcttattcaatgcatgcactctattttgttatttcattggttagtatccattcttctaaagtagaggcttcacaaactcaaatataactaattattttattntatgagacttgggtagagacttcacatctaggatatgaaatcctatatgactcagatgcacttgaaaatgagattgctcttctttaggcaatggttaattaccaatataattacgactactagcaaacccaccagcatcaccgttactggaaccacaatcatccttagcttgagacatatatatagagagagatgtttctacaaaatcattatataaagggtaaaatacgacgactattgaaaaatcattgtgaaattattatttgtatatacaataatattatgatattatttgtatgatatcatt

SEQ ID NO: 102911 - DNA, 472 bp, Glycine max
  unsure (1)..(472): unsure at all n locations
atgtgaagagattgtaagacaattaaggttntgaagagattgtatgcactatgactgantctgggcgnntcgagatttctctaattgttagcttcaatagtaatgtnttttntattcttaatgcatgacttagctgtaaatgtactttatcgggacactaggggtaaaacctgtgtgaggtaattgtaaaagtgaacctaataattacactaattttcttaaagaggcaaatgaccgctttgctctgtttggaatctgttcttggaactgggcaaatttggtgatgtagcatctgattntgcattgngtgactntgcataggacacctagaaaggtgtgaatatttctggtacttaaatatttcatcttggaggcttggacaaggctcctcaaaggtgagcttgtcttaaagcaagcaatggtgtatcacacttatttatttaaagagattggatcttactactaaattaat

SEQ ID NO: 102912 - DNA, 376 bp, Glycine max
  unsure (1)..(376): unsure at all n locations
tgcttaataaccatgagttggatatgaaggtgattgattgtatttgagtatggcccccgggccaactaatgggagcatgttcattgttcatccatgcttagcaattacagaataaaaagatcaaatctccttttgtgaatttgtaaatagtaaatgttgaaagcattaaaggtactcactccatttatcaacaagcacatcaagcagtcatagtatacatggtgggtcaaaaagcctttacattgctgctgcaggagtggttggaaacatttgtatcaatgattgtacaatactaatcctagaatccattgcccggacataaatatgggaaatgtgagttnattttggccagtactcaccagagtccttttcacat

SEQ ID NO: 102913 - DNA, 528 bp, Glycine max
  unsure (1)..(528): unsure at all n locations
aactcaagcttatatatatacactgagaattctgcgacgtgtgtctcaagtttctgtgtaacgctgntatataatgtgtctgggagaaggtatccctatctctattcctctagcacttctctttctctacaattgagaacaaattgacttgagtcaacatggaaaaagcatgaaggaaggttccacctgtacaatcttcctgctcaaaaacttgattcggtgtaactnttcattacaccatattagctgttcttttctcaattnggacatgtgtaccacccttgaaatcaatctcaaccccacctgagcaaccaattgctcatgatcaagttgatcctcatggtgcttttggaacttcttaactatgcaatgcccggttcttactatgtccttgagccttctgtccttctgcaacatgaaaaccaagattgaagccattgagagcatttatctaaagaaatgctataaacactttaagtctaccactcttatgactaatctttattgttgaattattgtaatgatata

SEQ ID NO: 102914 - DNA, 503 bp, Glycine max
tctgagtcacctgcggcatgcaagctagtgttgatctcaacataaatgaaatattatcctatgatcgcaatgggctccgccagcgagaagaagagctaaaagcctttgagaatgccattacaagttatggattcttaccaagataaggctgtagctgatattgcttctctttagaacaactcgtgtgaagaactcatgttgaattcaatcttattagggtaggacatcagttttctagaatattgtgttgcaatctcgcgtgattgaccttatacgtaagataaactgtgaaacatctaacattctttgtgccataatatatattgattggaatcctaatctggacataccctatcaaaagtagttgcctgttctacatcaatgatttacttgggtggagctagccaaatttattgctttggagagggacaaaatattattcgagagttactatcttaaattttgatcaatatgagaagattcatattcattgatgtttatat

SEQ ID NO: 102915 - DNA, 388 bp, Glycine max
  unsure (1)..(388): unsure at all n locations
tcagctttgtcctgaaactggttccagaagacacagggagtgtttatngtctgaaaccctagccttgcaacaagtcctagggaagtagacacggagatggacaagaaaatccgcggtattgtgagtagcattctgaaagatgctcctgtgcctaatgctgagaaagatgttccaacatcttccaccccagatgtttctgtgcctgatgtcaataaagatgttccaacatcctccgctccaaatgctgaagccctcccttcatccagtgaagaggaatcaacagaagaagaggatcacgcctcagaggagactcctgcaccacgggcaccanaaccggctccaggtgacctcattgacttagaagaagtcgaatctgatgaagaaccca

SEQ ID NO: 102916 - DNA, 394 bp, Glycine max
  unsure (1)..(394): unsure at all n locations
actcatccaaatcgatgtcaaaagtgttaaaatggagaatattctagtgaatttggcagccactcaaacaactctttctacttcactacaaactttggtaaccttctcctcttcagcacttttgtcctcgattcagatgagtctggtaggtggctaaggctggcataaaagccatttttcaaccactcttgaaactcattggtggatgtctacctctctgatagtctccggtttatagatgatgacgattataaagaatcatcgggttaagtggatattacaaaaggaggggcaaacattcccacccatccacacccacatgtgtgcatgtngtgttataatgatgtactatatcaatgcatctatatatgcttataacctcataatattaaac

SEQ ID NO: 102917 - DNA, 493 bp, Glycine max
  unsure (1)..(493): unsure at all n locations
cttctgcccaggaaacaactaataatccatgtgctggtgctgtttgtttaggaaaaacagaaaatngatgaccctgganaatgataaagatnttgcggagataatagaacaggagggagctagtactaaattaacttaagatagttactatgtggtgctcanagcaggagctgaatgatcaacgaattatcgtaaattaacttaagatagttactatgtgggttccttgtttagctcaaggacatatattgaaaataaaatagcgcatcaataaccaccattataaaggtttgtcaatatctcgtatagagttactgcatttatctctaactagacatagacccgcacgatccacggatnntataaataattttaaaaatatttaaataaataatntgatggataaataaaaaataaaaatataattcttaatgatatttatatcattgacagtaatgagtaaaaaaatatgtatattaagataatatattat

SEQ ID NO: 102918 - DNA, 457 bp, Glycine max
  unsure (1)..(457): unsure at all n locations
gatccttaagcaccgcggctgcagctgagaaaatgggacttaactctcttanaactatcactactacaacaatagttttctaagtcgattttttaggacattctacaacagttttcacctgtcttaaaaatgggtgttgtaaaatggttcaccttatactaaaacgattttggacccgtcttagaaaggaatgtatactaataactgtcttagaatatttcttccttcgaaggctgttttaggtcctaacccatcttagtaaactcgattttctaagacggttatttcgataaccgtcttagaatgttatagatactaagacggttattggtttaatcgtcttagaatgtaagaaacatatttgactttctaagacggtcattcgcacaaccgtcatagaatattataaatactaagacgattgttggcctaaccgtcttagaatgtangaatcgta

SEQ ID NO: 102919 - DNA, 501 bp, Glycine max
  unsure (1)..(501): unsure at all n locations
cttgagaatntcccanactcctcctccatttctgatttcaggattaaataggtggccttggtggtgcatgcacgcttagcgcaactctgtctcgcttagttcacattagtgaatttcggcttagcgctcgtcttttcgctcagcggatggactcaagcagtgtgcttagcgggattagcccttgctcagcgaacatgcacagctcatccttcttccaaattcttcctcacgctcagccaaaggaatgttgcactcagcagatggctcgctaagccagaagattggcttagcgagcggatganaatcaacacttcacaaacttgcctaattaacttgaaattgagagganatgattattaaacacacaaaatggaagtactaagtatttagtacctatctttaacanaaagtaattacaacacttacaaataaccataaattggaggagttngatacanattacacagggtttatacacaaaaagtagtcatattcatcgac

SEQ ID NO: 102920 - DNA, 502 bp, Glycine max
  unsure (1)..(502): unsure at all n locations
ctaagctcgcgatgcttggtccatggatgaagctggtgataactttatctatcntgggtaaaatctgaagcattgtccaatggtccggcanagtaaattctttatacatgcggctctaaggagggcagaggatatgcctatagctatcantttgcctnnttttttttcttttcatataacaataaaacttgagtggctcctcaatattntntatattntgttcaggttggaatgtagcttattgttaaactttgaaatttgatagtgagattgttgctcttgggaaaggcttcccatgccattcgattacctttaccgngactggttgtgttggttccatcttagtcatcatgtcatgtggtttaaatctaaaacttanaaacaggcagaatgactgtctctgaccgaattatctctgtcctcctttttcacnatatttntatatagtttatagaatttaaacatttgatggtaatataattaataatatataactttaaaa

SEQ ID NO: 102921 - DNA, 477 bp, Glycine max
  unsure (1)..(477): unsure at all n locations
agcttcatgatgatgaaccaagcatatttgtttatgccagaatcccaagtgatagattcaagattgattcatgacttcaagatcaagcatcaagaatccaatccaagattcaagattcaagagaagaattcaagatgcaacaagtctagacttcataaaggataagtgctaatatattttctcaaaaaaccaaatatcacagttgtgtttacaaaagaatttctcaactttctaagtaccagagtgattactctctggtatcaattaccaattatcagtaatcgattaccaataaccattgtggtntcaaaatatttttaaatggtttgcaatgttccaaaatgattttcaaatattgtaatcgattacactatattagtaatcgattacaggtgaatctgaacattggattcatatccaattgtgaagagtcacaactcttcataacacacatcgtctaatcgattaccagtgaac

SEQ ID NO: 102922 - DNA, 426 bp, Glycine max
  unsure (1)..(426): unsure at all n locations
ctcnttggaaacataaatcctctatcataacagnatattttcttagaagaaattatctataacttcaaatgtgaaggatgccaaaatccaatcagaaccaaactatcaaacaagaattctcttggccaggagacaacttgaagagtttatntaatcaatgtcaatcatggcaaagggtgaggaatggctnggattaaatgggatttggttgcttcacccattgacatggggggttggggattaaaaatttagaaacatttaacaaaactttgttggggaaatggatgtggagattattgagtgaggatgagggtctttggagaaaaatggtgttggaaaaatatggtatcgaggatctagatagattcatccatgaaattgttgtctctgaggggtcccaatggtggaatgacttaatactcacat

SEQ ID NO: 102923 - DNA, 417 bp, Glycine max
  unsure (1)..(417): unsure at all n locations
ancgttattccttcattaatttacactcatctgtttcgatttacaggaaccaaattgaacatcttcctctctaacattgtcaaagacaattaaatcctaacatagactaaatggagtctaacaactaaacagtttaatcggtgaaacaaatggtaaataagttagatgtaagcctatctatccacaagggagtggagaaagaggtaattattctctaatacattggatttagtggctaatggctgctgcacaaaataagtcctagctcttttatttttacactcattagtcttcgatcttaagagagacacaccacttgtgtttagttcgctagaaatagctagagatgacaaaagtgaatatacaaatgatatggatacaaaaattattctttatacaatatatatttagtctcaa

SEQ ID NO: 102924 - DNA, 419 bp, Glycine max
  unsure (1)..(419): unsure at all n locations
tctanactntgtacaagaatgaagctctgataccacttgttagacaagtggcctcagatatcttaagaagggggggtngaattaagatattccannactttctcctaattaaaaatctatcttactttntacttaagttatgaattcccttaatgacaatcttcttaaatattaattcaaatgaagcaacttgaattatgaatataaagcaataataaataaaggagattaagggaagagaaaatgcaaactcagttttatactggttcggccacacccttgtgcctacgtccagtccccaagcaacccgcttgagagttccactaacttgtaaattccttttacaagttctaaacacacaaggacaacccttcctttgtgttagagattcttacaacaagagatcacagtctctaatc

SEQ ID NO: 102925 - DNA, 452 bp, Glycine max
  unsure (1)..(452): unsure at all n locations
aagctttggcaaagctttatacatgaggctgtatccacatatctgcagcttcttgaggctagatgcattcctaccgaagatacttatgcncttcttataaaggcctactgcatatctgggctgctagataaagctgaagcagtctttgccgaaatgcgaaattatggacttccctcaagtatgtctctgaattaacttgttcgtccacacatgctgaaaaagaaatataatcaaagattgtggacttgacatgataacgctgatattgaaatggggcttgttattctcaaaatgttaaaaaatttccaactctgactttgaggacctggacaatgcaggtaatcttatttttaaaactataggacactgcaaatacactataattatttattataattatatacacaagccttcttgttttccctgatctaggtcatggtagtaacatctac

SEQ ID NO: 102926 - DNA, 477 bp, Glycine max
  unsure (1)..(477): unsure at all n locations
agcttaccataacacttctgcatcatcttntgtttgttccccaactaaatcggaccaatgttggaaatccatagatatgatgttttgtgatcctctagccaagacttggtgtggggatctacacaaatgagaacataaccagatttattttatgtacaatgttaattggaatagacatggcatgagatagaatcacatgtcttacctccaggatatccagatcaaaaattcctctgcatgttttcagcagtctcatcaagcacccagtataggactntataccactagttatttcttaagggagagacaggtacctttgcaactatgctngcaccactgacaatggggtaaaggctatcagccttctttgctaccacatattngatagatggagaactattagacagcttcatttcatatttccctgcatctccaactgtatcaatataaaccggcaaggaacaaattatgcacttc

SEQ ID NO: 102927 - DNA, 336 bp, Glycine max
  unsure (1)..(336): unsure at all n locations
atcctgactcaccatanaccttgtacccaggtgagaatgtcaatccttaccctcggaagcaaaaaaagaaggaaaggaaatntccaatcaaagaaagaaaaaagaggagaggaaatttccaatcanagagaaagaaaagaagaggaaaggaaattcccaatcaaagagtgggagaaagaanaaaaaagaaaagaaagaaaagtcccaaccaaagaatgggagaaagtaaaaaaggaaggaaagaaagttcctgatcaaggaaactagaagaaatgtgcagaaaggtctttttgaccggacaatatctgaacaatacagaattgtcaccaaatgaac

SEQ ID NO: 102928 - DNA, 464 bp, Glycine max
agctgagccttataatgagattctacagattaacattttctggtatataactagaaaacatgcatccaattctaattgattctgaaatctgtgtggaagtgcttgcacatgtgcaaacaaaataataataagattatattattcatttgatctctataattacatgttattcttttagtctttataattagaaagaggtgtttttagtctatatatgttacataataattatcttagaccgtgtagtttaaaagtaatcttgttagtctttatacgttatatttgaattctcttttagcccttataatttataagtgatattgttacgtcttataattgatattctaattaccttttagcctgtattacaacaactatacaaataattacctactacatacttatacattatccaatatgtcttattataattatctccgataaatagtgacaataactactaa

SEQ ID NO: 102929 - DNA, 412 bp, Glycine max
cctatggttgtctatgtggctttgtctattggaatttccattttcacctctgccaaagcatttcttgctgtgatagctggatacatgacaaccactgtgatctttaataaaatgcatttgtgcattattcgagcaccaatatcatattgtgatgccaccccgagtgggcaaatccttaatagagtatgtcatactatgttgacacatttcatgggttaattttaaaagacaccttatttacctgatattcttaacaggtaattgcattgttagaaagtttgatcctctatttttgattttattctacaatgaccttattgtggtttccggaccaagcgcctcatataacatttaaatctagtagggcattgcttcatctggtcacatttgggaaattgtttgatgctcagct

SEQ ID NO: 102930 - DNA, 401 bp, Glycine max
  unsure (1)..(401): unsure at all n locations
gctngctngtacatgtgatgacccgaggaagaaaggtaaccgtggttgatgagtataagggggaggatgacaaacaacaactggtaattgaaccagcacctgaaccagtgcaacccttttttgaacttatagaggaagaagaagaggaggaggatgaacagatgagagagacgccaataattttgagtgaaaaacaaataaatgaaaaagaaaaatagganaaagaataagaaaaagaaaatgaaaaatatgataaagacaaagaatatggaaaagacaacaatgagaaaaatgaataagaaaaagagagataagaagagaagagaaaaagcaagagtgggtgtgctagagagaaaaagaaagaagcatcttcagctgaagggagagatgtaccatatcct

SEQ ID NO: 102931 - DNA, 438 bp, Glycine max
  unsure (1)..(438): unsure at all n locations
agcttagattctaggagaccattcatccatatattatcttactnttaattcatgcctaccccatacttgccttgatttangcattcaactttcattcatgatatcacagcatacatactgattaaattgatccatatttacagttttttttaacacatatatacagaaacaatttgtgtatgtacataaatcagtgtgtgtatgctgattactttgaccacttcaattcttacccagtattttccccaagattgtaacaaatgttccttgataattactcccccaaatttgggacaaatctacttcgaaccaagcttcctgtggatgatgctctcctacaacctaagacaaggtagcatatgataacactgtatgggctcaaggttcaatcaatcaataatccattcaactcatactgtgtgcaaaggataaatcatt

SEQ ID NO: 102932 - DNA, 272 bp, Glycine max
attatgtttcactaagctgtatgacttaaactcaaaggggaaaagctaaaggctgtctcaataatcaggtagtcattggctaaagatataaacacatgcctaatctttcaatatctggaataggagcttcaccaaataacctagctttggcagcatcttgggcaaacacccagaaatatatatggatgctcatctccaaggaaactatccttcaatggctttaactatatactgaagaaaacaaattcaatcaaagtcaaacttatttaaca

SEQ ID NO: 102933 - DNA, 473 bp, Glycine max
catgcacgcttccattggtgtcttgacacctaaggctgttgaatggcctctattattcaaatatgctggcgtggttgcagcttctctctaaaaggtctctggcagtcctacacttagtagcatgcacctcactctttccaaaaaggtcctatttatcctctctacttaaccattctgttgtggtgtgtgagggactgatttgtgccttttgaagcctattttcctataaaactcattgaactgcattgaaacaaactctaagccattgtcagaccttataatatttaattttgaccaagttgatttccaataagagtatgcctttcttcgaatttttgaccagattctgacttatttatcaaaacatacaaccatactctttctgagaaatcatctatgatgaagagaaagattgagcttccaccatgagttttcactctatatgggccgcataaataagaatgcacatactc

SEQ ID NO: 102934 - DNA, 451 bp, Glycine max
actatcaaactcaagcttctaatgactgatcataatcatgtacctcatagtttcattgtgtatctgatgtgtgattgccttctgtatgttaagatcttcattctggtccagcattacaggttgttcttcagtggttctagcatgactgttcagagcatctcggatgcaaatactggtcctctctgtgaacttgccatgtgaaacaaatagaataaggaagaaaaattattgtagttaatcagatgccagggatttgagttcttagtcacttcacctgtccaattaccatctcaagatccttcagtatgaatttctcaagtgatgatgactgctcacacatgccatcatctctgctacactgctcatatatgtccaagaccttggtcagtggtgccttaaagaaaaatatatcgatgatattacactgtaagccttgaaagaaatctattct

SEQ ID NO: 102935 - DNA, 390 bp, Glycine max
  unsure (1)..(390): unsure at all n locations
agctggtctcgtggtttcgatagagaacgaagcctcaatctgaccttctgcgatttcatcaaggtaaccgtgattctacgcttgttccttgctagtttcagcttgtctctgcatcttttcttactttagaaccaccatngtatgtttttgcgctccctttgaaaaaccctagagaaagagactttataaaagttatctttttatgaaatgggtgttattttcgtgaccttcgctgaacctcgatcacattggcgtgatcggaattttaanatgatgttccttttgtagaatctgaaacgcccttagccttttcatgtaaagacatgagtagttgactcagaatattatttgtaaccttatttctgaaatccatagtaatttccttcattt

SEQ ID NO: 102936 - DNA, 524 bp, Glycine max
  unsure (1)..(524): unsure at all n locations
ctcaagcttcaccttgtggtcctcctcatagttggagcgtgagacaacatgttctatnntttatctcccgctccaagtaggcctgcatagtgtgtattactataaagggaggaatgttgagtctaataccatcaattcagttctgtctacgaataccatcattccctctactcctcctttcttcttcattatgatctctattctccattggatccaacctctcatggagcgcatcatctcggtgcttcatgagacctctcaaatgttgcgtcaaagcttgcagttggacttgcgaaagccccactccatcattaggaatattacttgccatctcaaacattgcacaatatcagcgagcattggttataattataaaacattgcacactgtctgctgataacaaccattcttgagacatgatcttcggtgatgtttcttgaccaatatcagcgggtctatttatgaccgcgtcgctatggtgttgtgctcatcggtgggaccatttcttattacatcaggatctt

SEQ ID NO: 102937 - DNA, 394 bp, Glycine max
acaatgggcgcataaacccaccattccttgttgtccaccttcaactgagctcacgtacttccacgtagcccatatcctcgtatttctaacaccgggtccccttcaattctcccaagcttccacaacattcgaagcaaacaactttctcacagcccaagctatctcagcctagctaaacatgcgcaaggctgaatactcttgttatcacactaaccacaatcacgacttctctcacttaaagaccccagtaacaatcccttcatccattttgtaaccagtggatcactccaaatttactgaagtctataggataacctactttaaccgttggactactacaacatcagaatcattttatattttctcatcagcaaacatgattgttgccttggca

SEQ ID NO: 102938 - DNA, 331 bp, Glycine max
cacttctttattgcactgaatggatatgtggttctacatagagagtgaaggggcacaccattcatctctccatgtgcgctgccatctggaccaattgcgtcctgctattctggaatacaacagatcacactaatctgcttgacttttatatgacaccacagttatctctattgatatgatggatcctacccgagctgctgtgttaagatatatcaagatgtacaggagctcatgctatatctttgtaggtttctgacgttgctcatatatgagttcgcccttacatcccgatgtttagataacatgctttcctccttatttactaaaggcc

SEQ ID NO: 102939 - DNA, 410 bp, Glycine max
  unsure (1)..(410): unsure at all n locations
gggttntggcgcacagcaccaacatcaccacaagttaagagatctgaccatgctgctgctcctacagaatatggaataagtgttgctcattctctgacagagaaactagctccagtttctggaaaagttgctggtgtatgaagtggtgtgaagntcaaagtttctggaactcaaactagtagtgtgggtgtggaacacgacaaggtggtttctgtgaaggactatttggtggacaaactgaggcctggtgatgaagacagggctctctctgaagcgatatcagagactctgcacaagaaggaactgccctcagtggaagttactgaagatggtgtgagaaaggtggtttctgatgctgtgcataagagagaggattattctgagagaataatggaacatcatagaatact

SEQ ID NO: 102940 - DNA, 431 bp, Glycine max
taagaattgcaagatcatcttccttgttctcattttgaaaaagaatgctcccattataaagagatgaccatttacagagtgatccaagactttcaaatggatttccactgaatttattattatacagatcaagatattttaattatgaaagtttccaaatgatctaggaagagcaccaccaattgagttgttggaaataagtaacgtgtcaatatttctatatgccccaatatgatctgtcagatggcctgaaagtcgtgaactctgaactgcaagtcttgtgagtccatgtgaaatacaaggagcaagaatttcttataggtcatttacctgtcggttgagcgttgagatttgaaaaattaatgtcccttaagtagcacagattacccacagaagttggaatgtttccttcacagtgattacctgataaa

SEQ ID NO: 102941 - DNA, 503 bp, Glycine max
  unsure (1)..(503): unsure at all n locations
gtattcattcctccttcctagttgcatcttctctaagtgcttgtgaaanagcctatccgaacaaggccttaatgaactgcatatcatactaggcgatattagcaataagcaatccatgcaatgatcacagtcagattacttgattgcttggtttatctattgagtattttaatattgaacacctgttgtttctagagagttaccagctattcattatggaataagcagcgtttctctggattatgtgcgactgttctgtgttatattttcacacaaaggaaggttttgtattgccaattcataccttactcacattccttaatccttattgggttagtatatatatctgaatggaacatctagtaaactttttggaaaaattcaattctgttggcgctatgatagtcatacaaggaatacgagaaaagctaactgttgcttgattactttgaactttattgttaagatgtttttgaacactaatattgaatttctgatgaata

SEQ ID NO: 102942 - DNA, 369 bp, Glycine max
  unsure (1)..(369): unsure at all n locations
agctctatctatgacatgattactatcaatgtcgcccatttttatgcatcctctaaggtgggctacgggagaccgctagtaaagaggctctcctacattatccctcattagtgtattccagcctacaatgaagactgaccatgtggattaaagatccatcaattctgttcataaatcttgcttctcgtattgatatgcgtgcaactntgcgtctcaactctttggatttataaaattggatgtatagtggccaacacacatcttattttagcacctatctcctctataggggtgaaatcatgggtccatataatagaacacttatattaccctctctctttccttgactaagtaaatggtgataattat

SEQ ID NO: 102943 - DNA, 163 bp, Glycine max
tgacttattaccaccctactgcataatctcatattgatctttagtgtattcattctgaatcagattcacacagactggaataagagcgatacatttgttggatcaaagacacccacccatgtaatgtcaaatgcgagttgtgactggatatttacattagcct

SEQ ID NO: 102944 - DNA, 322 bp, Glycine max
  unsure (1)..(322): unsure at all n locations
tttgctgcttgacaccctctttttctgtctgcagcgtatttatttcgttnttctatttgacaccctctttatactatagacagtcccatctttaattccttgttctatttgacaccacaatgtttattttttttggttagtcccctcttaaatggctgaaccatcattcgatgctgctactgcaagtgcaacgaggaataataaggcatacccacgctggaaatattgtcattcactggtggaaggagatacaaacaccattgtttgtaatttctgtggaaaaatcacaaagggaggaataaccagagccaaacaacacctg

SEQ ID NO: 102945 - DNA, 430 bp, Glycine max
  unsure (1)..(430): unsure at all n locations
agctnttccaaggtggtatttggcatcacattttaacttgaaccattatcgatgagtaccttagcggcgacatggtccatgcatctgacaaacacatgtagagctttgttgtgccctctcccctcaactggaatctcctcctccacgaacgcgaggtagttattggaagttatgtgattaataatgccttcaaagccctcgacggagatgtcatgtgctacatgggcttcgttgaggaccttgactaatagtgcacgatgaggctcggagctcatgagcagttcgagcaaggagatccttgctggagttttattcaattgctcaaccactctaaactcactttgttggatgagacaaaggaactcgtgagccttctccaaggtcaccgcccttccttggagatacttcttcttttcagcccnctttacta

SEQ ID NO: 102946 - DNA, 468 bp, Glycine max
  unsure (1)..(468): unsure at all n locations
ggagcaacaacatatcaggttcaattccaatttctatctcgaacttgataaatcttgagagactggacatttcaagaaatcacatattgngaaccatcccttcaagtctaggtcagttgttgaaactactatggcttgatgtatccataaacggattaacagggcaaataccaagtagcttgtcacagataactggtcttaagcatgcaaacttcagggcaaacaggctgtgtggtgaaataccacatagtagaccattcaacattnttcgaccagttgcttacatccacaacttgtgcttatgtggcanacctttacaaccatgcaagaaacaatggagtatgggtcagtgagatgctgactctatcatagtaatatgctcatgccttgtgaccattgttacatgagcaanatagaatagggactaccacatctgaatattcttttcaggtcgacaagttcaattta

SEQ ID NO: 102947 - DNA, 491 bp, Glycine max
  unsure (1)..(491): unsure at all n locations
agctngagggacagcctgctgaagacatcgtatttctttctgataattgaagaaacccatgaaccagatatcgaaattatccacagttactatttctatgtacttttgtgaaggcttctccacattctgacttttgttgacagactttaattttgtaaggggaattgagacctgaaatggcttagaaattgaagtacatatcagcaaaagtatgaagaaagattaaggagatagctcggaagcactcgcatgatagacactatataaaaaaaattaaaaagaaagtcaccttataatggactctaacatcatctccatttggggaagagatcttgatggatctatcacttgcaaaggcaactttatcagtggatatgaagagaagaccagcaataggaccagatgtgggtgataagtagcattgtgatgctttcaacagcttcttcccttctctcacactataaagttgcatgaaaactttctctacttca

SEQ ID NO: 102948 - DNA, 481 bp, Glycine max
  unsure (1)..(481): unsure at all n locations
gaatcaagatcaagattcaagactcaagattcaagaatcaagagattatttaatcaagataagtatgagannatttttttcataaactgagtagcacatgtgttttctcaaaacctttttaccaaaaagtttttactctcaggtaatcgattaccagattattgtaatcgattaccagtagcaaaatggatttgaaaaagttttcaattgaatttacaacgttccaattgatttcaaaatgttgtaatcaattacaatgttttggtaatcgattaccagtgtgcttgaacgttgaaattcaaattcaaatgtgaagagtcacatcctttcacaaaaaagctttgtgtaatcgattacactgatttggtaatcgattaccagtgatagtttctgaacaaatcaaaagatgtaactcttcaaatagtttttgatttttcaaattggtataagcttttctaaagtctaactcttctatggtatc

SEQ ID NO: 102949 - DNA, 496 bp, Glycine max
  unsure (1)..(496): unsure at all n locations
agctntaggtngctcattgactccagaatgctgtaaagaaggacatagatctgtatggtgatctatagaagaacatagaccatagactcttgcaacaggtgtagacttctgattcatggcaagttgagttactaggttgaccaaggcatcgagttttccttcaagctttttattttcagtagatgaagatgaattcatggccacctcatggactcctctaagaacaatagcatcatttcttgcactaaattgttaggagttgaaagccatcttctcaatcaaattcctagcttcatcagggctcatatcaccaagagctccaccactggcagcatcaatcatactcctctccatgttgctaagtccctcatagaaatattgaagaaggagttgctcataaatctggtggtgagggcagcttgcacacaatttcttgaatcactccctccagagaatgaggaaaagcctttagaaagatatgatcttcttggacatc

SEQ ID NO: 102950 - DNA, 486 bp, Glycine max
  unsure (1)..(486): unsure at all n locations
tgccgccacggagttttccgactatgctcttgcgtggtggatctatctacatattgagagagcacgaaatgaagagccaatggttgatacatggacggagatgataaagatcatgaggaagcggtatgtttcggctagttactcaagggacttgagattcaagctccaaaaactaacccaaggcaacaagggggttgaggagtatttcaaggaaatggatgtgctcatgattcaagcaaatatcgaagaagatgaggaggcaactatggctcgatttcttaatggtttgactaatgatatccgtgatatggttgagctgcangaagttgttgaaatggatgatatgcttcacaaagcaatccaagtggagcaacaattataaatgaagggagtggtaagaggagtttaccaactttggttctttagttggaaaacaaggtaaaaagatgggctgtacttctagagtcctcacctatccatcaaaac

SEQ ID NO: 102951 - DNA, 393 bp, Glycine max
  unsure (1)..(393): unsure at all n locations
gatgaggaagtgttgaagggtgaaacttcctgcttttattgttgaccacagagtggtacctgcagatatgtcgcgggggtcatgagaccttgtggacgtcatgtggggtgctattgcccaaaaccaagcttgaccaatcccgacccaacccgggcatattctgtcagtgagaacctgtgatgtacctaaacacgcgagctcctggcagtcaacatatgaaaggaacaatgaccacaaagcatggatgcttgtggtggctggccagctgagaacattgatagatatgtgggttatggcctctggtaattgattaccaacggtaggtaatcgattacaaggcttaaaacngaagacatgaggctaacatggtctctggtaatcgattaccacggg

SEQ ID NO: 102952 - DNA, 459 bp, Glycine max
  unsure (1)..(459): unsure at all n locations
gacactatcaaactcaagcttaagcaacaccatgaattcattgtttgatggtgttgagagacctgaagacttatcaacaaattgagcattcatgagagttcgcatgttctgccaactattgaacccattggtgcccatgctgatcagcattttctcaggaattggcacctcaaggaccgtatccaacccatcttccttgtcaaaattaggacacaacttcctcgtggttaatttggaaggaatactaatattaatttggcccagttaaatgaataatatatataaataaatgacgaagaaagaaggaaaggaatctctttgagaaaaacggaacctctcctctttctgggcagtgggcaccccctgtgcctggaaaggcttannggtaatttgctaagaccaaatgattttgtgtctatggaattgtgttcctagcgaaaggggaagcataacacacag

SEQ ID NO: 102953 - DNA, 414 bp, Glycine max
  unsure (1)..(414): unsure at all n locations
aacatgcctaaccattcatccatgtcttccattcaatangangctgcttcaagcccttgcaacacctgccaggcacagattattagtatgaaccacttcataaaaacatgttagaataattntaaataactaatgacgagaaacacaatgtattgtaaagtgaagtgatgtttccttttatcacaacaactctaatggttgaattgacaataatgagatataacaatagcttaaaatatcaacatgaggttttgaagtattaggagggtgataaaatcaagcaaaatgtgttatcttgataagaaggcaacaaatgtgtattggcgctcaaatacattgtatcacagctcacgaaacataaatggtgtgttcagtctataatctaagggaagaacataagccacaatgtaatac

SEQ ID NO: 102954 - DNA, 498 bp, Glycine max
  unsure (1)..(498): unsure at all n locations
cactaaatactaggctgagagggacaaaagatatagaaactctatatgtatatatagagaccaactttgtagtganagacatacataatatctggctcanacgtgattcattgcgctgaatatctcatggaaaaataatcacccatgatgttagtggcatgtacttcatgaattaattgatatattttagaaactttatatataactacgataactataatattggatacacaaataaaagtgtggaaatattgagaccattccacaaataagtaatatgcatcttgaggttccaagtatttattgatggcaagacagattcattcgttgaagttaaaatactaacaagcgacttgaagatcaacttttccagaacttttgatttataatcttgccttctgaacgtaaacagatagcgtcttattttatgtaatgacataatcaatattgaattgaatgcctgctttgttgtatatctgggaaattaacatcccatca

SEQ ID NO: 102955 - DNA, 434 bp, Glycine max
  unsure (1)..(434): unsure at all n locations
atcttaagtcaccgcagctgcagcttgcttggcagattaggggatatctttcatagagaagacaactttatagaattccagagcacaccacagtgcctatttctggatatagagcattggaggcagcacgaggagcatcttttgctaaaagacctangttttgtcattagagagagattattgagttgctaagtgattgtgacatgctgagaagagcaggagggatccctcttcttatgtaaggagcaggtattctctactcttaatctcattattgctagggttcttctacaatggttggctaaacacccttgtttgggattgttgaagaacaacttaagtaattccttcaatatctaattggttgtgtttatagcgctcaatgcttcatttagtgctgaaatttctgtggctcttggtctgatcacccattt

SEQ ID NO: 102956 - DNA, 389 bp, Glycine max
  unsure (1)..(389): unsure at all n locations
tctcccncaattntctatatatagggggagaagtgaagtgaattanggtcattctcttngcacttcttctcttcgaattgcttggaaaattgttctgtgaagaatatccaagccgaggcgcttctgacacattttcgtaacgtttccgtgaggaatttcacgaaggtttcgaccgttcttcgacgttcttcattcgttcttcatcgttcttcgatctgcaacgggtaagtacctcgaaccaagctttttgattcattctatgtacccgtggtggtccacattgtgtttcgtgtatttatattctcgtatcatttactatctataccctcttttgatgtgcttaagccattgtattaagtcatttctcgttaacctataattaaaaaaat

SEQ ID NO: 102957 - DNA, 485 bp, Glycine max
  unsure (1)..(485): unsure at all n locations
agcttgtctcagcgtctatgcgagacagtatcttacatgttagctatcatcgccaagtaccaagaagagttgggtctagccacggcccacgagcatataatcgcggatgagtatgcccaagtatatgcggaaaaagaggctagaggaagggtgatctactctttacaccaagaggcaaccatgtggatggatcggtttgcccttaccttgaacgggagtcaagaacttccccgattgttatccaaggccaaggcgatggcagacactctactccgcccncgaagagattcatgggcttctcggctattgtcagcatatgatagacgtaatggcccacataattagaaatcgttaggaaacttgtatggtctctcagaccttgactagatatgacttcctttttgaataaaatgagttggtcccatgtatctactctcaaaagcttgtgcaatcaaatcactccacatctcatctctacatgcatt

SEQ ID NO: 102958 - DNA, 463 bp, Glycine max
  unsure (1)..(463): unsure at all n locations
ntnntgggtaganacatgggaccaactcattntatttcagaatgtcgtatctagtcaaggtctgagagaccatacaagtttcctagcgatttctaattatgtgggccattaagtctatcatatgctgacaatagccgagaagcccatgaatttcttcgggggcggngtaggtgtccgccattgccttggccttggctaacaatcggngaagttcttgactcccgttcaaggtaagagaaaaccgatccatccacatggttgcctcttggtgtaaagagtcgatcacccttcctctagcctctntntccgcgtatacttgggcatactcgtccgcgaccctatgctcgtgggccgtggctagacctaactcttcttggtacttggcgatgatagctagcatgttggtctctgtctcgcataaacgctgagacaagctcctttggaccttgacangcactaactc

SEQ ID NO: 102959 - DNA, 449 bp, Glycine max
  unsure (1)..(449): unsure at all n locations
agcttcacaattccacaattccttaaaatatgcctaactctcaaaaagtccccagtggagtcgccaactgtcgcaacatgcccttttgcgggcgagcgaggcgaggctcatgggtgcgctttccaaaggaggaaagatgcgcggagtcgccaccaacgtttatttgtgggaaacgtccgaaaaactgaaggaaaccagtcaaaatgaaaattctaagttcgggagttgtatttacgtttgaggaaggtattagcacctctcactgttgtctcanaggaaanaagcctattttttagaattgcggaaattgtgttacattaacctttattctttttatttttgagggcgacaaagcggtgctntgctcctacgtccctccataaagaggaatcagacctacgtnttcttttttagagggaatcagcgatctttacttgacaggatcactt

SEQ ID NO: 102960 - DNA, 474 bp, Glycine max
  unsure (1)..(474): unsure at all n locations
ncatgccgtgctattgggctatatatatctactgtcaagtgtcatacaacatgtatgacctcaagaaaaagaatgtctggngcaatataaatatggcagaatcctacaaataaaanaggatntcaagattaattaatgccttacaatcggaatatatatatatatatatatatatatatatattcaacttcatagaatagatgatgtttgcctcttcaattggccaggctccactacaaaaaagacaatagttcatatttttactacattatcaaagactcgagtttacttaaatagttcgaagagagcataggtacatactaagctatgcagtcccaccccttcttgtggcctctagaaagattccnctatacccatctttgtggaccctcatttataccgaaaaaaagacatattaagatgctatnttgtaatgccacacctacaagtattttttgttccctacgattctca

SEQ ID NO: 102961 - DNA, 397 bp, Glycine max
  unsure (1)..(397): unsure at all n locations
tttgcgagaggccaaatttgtcttgaaccaaattaggctggtatctcaccaagcctaaatagttcgatcgaacacctgcacgacaagacaggatctgtggattcatgataaatgaccatatntcggtcacttctttttcattgtccggatcgacagcaggaaaatagtcagtgaaccaggccgggccaacctctcgactaatgaatggagcatgttggggaagaaaactgcaaaactcagaataatcccatgttnttaagaatagctcttgggggtttgatcgaaggcttgggtgtaatcaagtgctctctggcttcatcgagcgattcgaacttcttacataatttgtgggatattaatccctttcttgttgaaagtggctttagccgcactggag

SEQ ID NO: 102962 - DNA, 368 bp, Glycine max
  unsure (1)..(368): unsure at all n locations
gtataaagatatgctagatagagatattcagcctgattcatgcacacatagtgccctattaaagcatctagacaaagactatnaatcgcacgtcgttcggcatcttgagaatgttattgcagctggtgaataaactgatgatgtaaggatgaacgaatggctatttattattctcattttggcattctcacatggctaatgagtaaaagacaaccctacattcgaatgggttttgcctttngaggtgtaaactccccagacagaatcatgtatatgttcctgacagtcatggtaagagtccctcttttttctttgatcgacaatgccttatataactggtgtactcctctcctctggccctgatacat

SEQ ID NO: 102963 - DNA, 491 bp, Glycine max
  unsure (1)..(491): unsure at all n locations
gcttgcataacactttagctatggggcaatctttttggatgtttatcttgaggcttgggaaatactgtcgaaaatgttgagcaacattgaccaatgctaatgccactttctccattacttgatactgaggttctggatcttgtaatattcagcagacgaagtatattggtcttagctcattattttcctcttggaggaggactgcacttatggcttcggccgagaccgagaagaatactatgagtctcttactagtgcttggtttcaaaagcactagagggtgtgcaagcgtaactgtcaactgctgaaacatttcttcacactcatcggtccattgaagtgttttctttctaagaagattcatgattggctcggtatctcgatgatccttggtaagaatctggataatgaaggtattcttctagctaacctttgtgcttctttcacgttcttaggaactctcatnctcagagtggcttgacatttattat

SEQ ID NO: 102964 - DNA, 233 bp, Glycine max
  unsure (1)..(233): unsure at all n locations
acttatatgtgaagcaaacaaaatcaagtactgtcgatatcatcgagtcgctagncacaacacgaaagactgcactggccttaatgaccaaatataataattgacccacaagggggaacctatagaagttcgtccaagacccatcacatgatcaagattgtgaanaagagcaagatagaagccaagaacacacgaggactcgtgaagcaatagatgcacaacaacaggggtga

SEQ ID NO: 102965 - DNA, 459 bp, Glycine max
  unsure (1)..(459): unsure at all n locations
agcttaacgagtaggactcacattctcgatatatctatgcagaataaaaaaaaggtctgttattcacaaggtctgtgggcttaacgcgtcgttccatggatcttggtccatatacccacccttattaatagtggaccaaaattgctaaattttataaacatgtaaaacactataattatagggaccaaaagtggatttaatcctaaattatatatttttcacaaataatttatattgtgatattttattatattaaattattgatatatttttatgaaaatattgaaattcatgtagttgaaaataaaaaggctaaaataaaatttggtctccctatttttntcaatccacaattgtgaccctattagaaaatagacacgtttagtccctgaattttaaaaatcaagaaattagcctgacttccaattaattcttgatataagttttgatgtgacatgc

SEQ ID NO: 102966 - DNA, 327 bp, Glycine max
  unsure (1)..(327): unsure at all n locations
ntaaccttgagctggtcctgagctatcgtatactggtgcgaattattggtatgggaggatagactgcattatcttgctgcacaacgaggatattatgctgcattggttgagaacacattggtgagattatttggcttgatgtgcttgagggaaatatactgaagctctcatcaatatatgtgttattggtgctccaggttagatgcatatcaggtgtggtgtatatcagatgtgcatatcagtataccgagtagtgacctatcangtgaggtgtaggtgaaattgacattttgccaatacatgtaagaatggatgtggtatatatga

SEQ ID NO: 102967 - DNA, 465 bp, Glycine max
  unsure (1)..(465): unsure at all n locations
agctngtggtagaacttgcatgtggtagagcttgcatgtgcaagagctataagngacactaaacaatacttgtaactatgatagcttaatacaaatatgatggattgtcaataagtgaacgtagtctccagtttgagatgaactaatacaattctccgtgtgctttctttttcttgttgtaattgacacagaatttaaagactgtgtttctaaatcttatatatatttttgtttcacaaagaacacaatttctctcattgtttaacaaagtctgtatcaaaaccttctttcatctggttttatggttatctatatcagacgagaaacatgttgttatctgtaataaaaagtaaatgtctaacaacacagctgaatctgttatgtatatccttctacaagaataatgcatgtactattcagcatgtgactttcttttcttaatttggggatgtccgattaatgatt

SEQ ID NO: 102968 - DNA, 442 bp, Glycine max
  unsure (1)..(442): unsure at all n locations
gacatggtatatgttagggtttggccagcttttcggtgtataaggagacatcccacattatttccatgatacacatgcaacaataatgattaggaaatnttatgcaaaactggtcatgcatgcacctatgtggacactcaagcatcaaactattatggtcaagtgatgctagggatcatgattcattntctctactatagtcaacccggtgtttccaaaatatgttcttttatcaatatgtgcattcatccgagtctattttgggtgtgcgaaaaaactatcacagcatctacccttcaaatgtatacacattngttttcaaanacatggttatgatcagagaattctttcatagaatagttggcattatctttttcacagcatgttggttaagctagaaacttttattttatatttcttttttcttcgtcttttctttata

SEQ ID NO: 102969 - DNA, 381 bp, Glycine max
gatgaggaagtgtagaaggatgaaacttcctgtctttattcatagaccacagagtggtacctggagatatgtcgcgggggtcatgagaccttgaggacgtcaggtggggtgctattgcccacaaccaagcttgaccaatcccaacccaaccctggcatagtcagtcagtgagagcctgtgatgtacctaaacatgcgagctcctggctgtcaacagataaaagaaacaaaaccacaaaacacggaggcttgtgtgtggctggccaactgtgaactttggttgatatagtgggtatggcctctggtaatcgattaccaagagatgggtattgattacaaggcttaaaaatgaagacaggaggctaagctggtctctggtaat

SEQ ID NO: 102970 - DNA, 483 bp, Glycine max
  unsure (1)..(483): unsure at all n locations
gcttctaacctacatcggcaaagcttctctgatggctngttgttgttcttgttgatagtggngatgagcgaacaatgaagttngttgttgctcgatgttgacatcgcaacaaactacacaactgtattgngagcagtaggggcaaagatccattttattttctaaatcatagtggcgtccaactacacaccctcgagtgtctaacaacaaactatcgagtgtaataaatcctaaacacatgagatcagtgtaatttgctcaaatatataagatacataattcctatagtggtttagggccaacctcactacctacaattaaattccatacccatgagggagaactctaactctcccttacctaaaaaacatgaatatgcagcacaagggtgaagatgtcttcacgacagtccttngatatatctattcacanttaatccaataatccttgtgaatgtccccctatggctctagcaatgacaca

SEQ ID NO: 102971 - DNA, 426 bp, Glycine max
  unsure (1)..(426): unsure at all n locations
agctntgtgtaatcgattacacttatttggtaatcgattaccagtgactgtttctgaanaatctaaagatgtaactcttcaaaaaggttntgactttttcaaatgggttntaagtttttctaaaagttataactcttttgaatggccttcttgaccagacatgaagagtctataaaagcaaggctttgtttttcattttcaattaattcattgaatcaatctttctatcaatctcttacaatcctttacaagccttgaatctctntaaacttcttcttcttcttttgtaccaaaagctttctgaagttttctggttttctaaaccttgaaaactngtgcctattcatctttcattctcttctcccttttgccaaaacaattcgccaaggactaaccacctgagattcttttgtgtctctcttctct

SEQ ID NO: 102972 - DNA, 361 bp, Glycine max
  unsure (1)..(361): unsure at all n locations
actaagcccgctctnacttacatggatggtcgtatttatgggaggaggttatatgctcattttgctttanagagtaatgtcccactggaaaactaactatccaaatgtttgccttcgcaggaatggccccgaggaagcttgcctcaaagaggtccaggaaggacaaggcggccgaaggaactagttccgccccggagtacgacagtcaccgctttaggagcgttgtacaccagcagcgcttcgaagccatcaagggatggtcgtttctccgggagcgacgcgtccagctcagggacgacgagtatactgatttccaggaggaaatagggcgccggcggtgggcaccactggttactcccat

SEQ ID NO: 102973 - DNA, 387 bp, Glycine max
  unsure (1)..(387): unsure at all n locations
aacaatttcactataaaagtgtgtcccatttggcgtcacacttatcggctttcctatgtggatgtgacatcatggcagttaagccccatacttccatcgtggattcagtcacaaaacaaactacaatatgttggactgtcgaacacggagatgntagattctattcccacctggctctgggaaacactntctcagattttgacttaaacctctctcatagtcatatccatggtgagatggagactacatctacaaatccanaatccatccaaactatggatctaagctcatatcacttgtgtgggtagataccctatctttcaagtggtgtgattcaggtcagatctttcaagcaagtcatcctctgatccatgaatgacttttatg

SEQ ID NO: 102974 - DNA, 362 bp, Glycine max
gattgccatcaatataaagagatgacaatttagagagtgatccaagactttcaaatggatttccactgtatttattattaagacggagtgagaaatcttaatgatgagaagtttccaaatgatctacgaagagccccacccattgagtggttggaataatctagcaacacaatattgttcaatgccccaatatgatctgtcagattgcctgaaagttgtgaactctgaactgcatgtcttgtgagtccatgggaaatacaaggagcaagaattctataagtcattaacctgttgggtgagtttgagatatgataaacgtatcacccttatattgcacacattacccaaagaagttggaatgt

SEQ ID NO: 102975 - DNA, 326 bp, Glycine max
  unsure (1)..(326): unsure at all n locations
gcatgtctagagatgggatatgctaggtgcacccagcaatattgctggtgcacccagcaatatattgaaactaccattgtacccttcattaaaaaagtctaaaatattgaaatagtgttcttctcctctcccggaatcactaagccttcttcttgcttctgctattcttgcttccgcgagccttcttccgcgagccttctcgttcttcctttgcatacctcttccgcgagccttctccttcaccgcgagcccagctgctgcttctgttggacgccatatccgttcgaggtaggtgtncctaatcttccctttgctttaatatgcac

SEQ ID NO: 102976 - DNA, 424 bp, Glycine max
  unsure (1)..(424): unsure at all n locations
tttccccaattttctataaatatgttggtgaagtgaagtgaanaagggttcagccccttagacatttctctctctttncgaattgcttggaaaaattgtttccgtgaagaaaatccaagccgaggcgcttccgaaacgtttccgtaacgttttcgtgaggaatttcgcgaaggtttcgaccgttcttcgatgttcttcattcgttcttcatcgttcttcgatcttcaacgggtaagtacctcgaaccaagcttttcgattcattctatgtacccgtggtggtccacattgtgtttcgtgtatttttattctcgnttcatttnagttttataccccttttgacgtacttaagccattttatttaagtcatttctcgcttaacctataaataanaataaattccaccaatcgttngaattgtatta

SEQ ID NO: 102977 - DNA, 459 bp, Glycine max
  unsure (1)..(459): unsure at all n locations
cgatcaagtccctcacgttgttatagtttatgtaattaatntttttccgaacgctantaattcttatgccaacctttgttccttatctctactgatataattaattctagcattcagtacaaaatattcaactngaatgtataaaatattcaacttgaatatggtctaaagaggttacaattaaattaactatatacgagagattgaatacaataatacatattggacttttttntatcactagaatacatatcggacttggaaaaaataaatnttaaaataagaattacatatcaaattatagttacaagaataatgagaacaaataaaaaactacacttactataaagaaaagcacaagtgttttgtgtgtgtgtttaatgggcaatggacatgaatgcgcgtatgagggatgatggagccactgaactagctcgtagtgattggtattgtactttt

SEQ ID NO: 102978 - DNA, 443 bp, Glycine max
  unsure (1)..(443): unsure at all n locations
agcttctaacagttagctgccagctgtcactatttatctgggtcactaactcccacactcttttctcactttaccgagtacaatactcacatattgcctgcttagtctttgtaataattgatattataaattgagagccagttttgtggcttacgggtaactatgcaatttcatgatgtaaatngaaactaaatagggagatccatttattttcctacctgatcattctctttaggtttgcctatcctatctatcatnttttaagcattcattggatattgtctgctagtcttccttccatgcaatagtgcataactgcatatgcttattagaaatccagaatccctgatttcttgctgcccctngttgttgttgagttacactcctaattttcaagtgtctctgaatcagtctcttgcagaatctgttcttatatgctttct

SEQ ID NO: 102979 - DNA, 435 bp, Glycine max
  unsure (1)..(435): unsure at all n locations
ttggtgttatgcttatgaaccgatctagtctccgcacttaatgaataacaatattcaaatgcaattaagtcatccatctatgcccatggtcaatgatagagtgaatatgatagccacatacaatatacaagataggagaactagttttattcttttctgctcaacatttcttctattgtttttaatcttctaaagacaatgttaaaatattcgcgttcttaaaacattaaatgtntntaatttgaatattaattnttctctaatgtatattattgtaaataacttanaagatgttaaaaggatttctcattgataaagaaaccagcgaatatacttagtattagtaaaatattactatgtaataaggaattaaaagtatataattttatcatcagcacccatcatcatcataatactataaggaatgtactatgt

SEQ ID NO: 102980 - DNA, 449 bp, Glycine max
  unsure (1)..(449): unsure at all n locations
aacacaaattgaacagcactaccagctacctctctcaacacaagcaaccaccttctttgtcaccttcaccacacannatttacaaggaagcgcaacctggtccctctctacacttgggttgttaaatctcacctgaagctgaaagcgctaaccccactggcgccttcctctcacgcaaatcaccagctcgagtggcgccttccagctacaaactgagcagctgcaagtgctgtagcctatacctgcagctttgcaaagctgaagtcgctggtcaaaccagcgcttccatgcacctatggacgcgtcaatatgaatggcgacatgcagtcctttgtcgtcagttacaatggtgacatgtcacgtggctcgtccctgtcgaaggcgccatgagcactgacgctatgcatggtctggtatgtaaanacacacctggggaataactcaaaaca

SEQ ID NO: 102981 - DNA, 466 bp, Glycine max
  unsure (1)..(466): unsure at all n locations
agtggaagccattactgagttttctgagacataaacaacatgccctatttaacaacttaccttttcaagaggccaatctagattgcaccttctccacaacatcatcagagtcaaatttagtcactcagtcagttagaggtttgaaacccaagtacttcccaagtgattagtgcaactaatctcaagaatgtttgaaatctcatcttgaatcctttgaggaactgcaagagagcaattganaatataattatctagattcactttaagaccaaaagccctacaaaattcatgcaaaaccaaattcacaactctagcttgatcaattgaggccttacaaaaaaagagaacatcatctgcataacaagatgagataatggaggaccccccgagataaggaaatagggttccagtctcctctattaactcgatcatggatgcttagagccaatctttccatgcacatgac

SEQ ID NO: 102982 - DNA, 431 bp, Glycine max
  unsure (1)..(431): unsure at all n locations
tatctggcacgtgtgtggcccaatttgaatcgggagatcgatctctcatctcacgtcatgtcggctaccatcaaaagcccttaccaccatggagcttggcctcatgtgcgatgcgtcaaatgacaacttatccaatgtagttttgggcatgacattngagggaacagtgttgtcaatgagtactttggccactatatggtccatgcattngacggacacgtgcaaagccttgttgtgcccnctgccctcaactggtatctcctcatcggcaaaagtcaggtaattgttggcaatgatgttcgtgattattcccccgaagccctctactgatatgtcttgtgctacaatggcctcattcaaaattntgactcacagtgcccaatgatgctcgagttcatgagcaccctaatagagagacctagctgagtttg

SEQ ID NO: 102983 - DNA, 436 bp, Glycine max
  unsure (1)..(436): unsure at all n locations
gcagctatgcgccatntccatactactttttttgccaagacactaaccgaaagagtgcgcctattacaatcaaggcagcttcgtacctagattattacacgtacctccaaggtgtatttgttacttacatcacacacatctcctcggctaaagtcacatacatgcatactcaaagcattttggggcaccaaaaattgcacatgtgcacatcttggtgtttctaatacctatacatacgcaaacttcatgatgaatcttgactacccacacaataaggtgctacatttcatgctcttcttntcaagtattggctacctaaagccggatgcaaattcaagcatatgttcctttgctgactaaaattgcattcaaantaaaaggtagtacattcttgtggtgatgtatcttctgtacataacatgcaacatatatatgt

SEQ ID NO: 102984 - DNA, 273 bp, Glycine max
  unsure (1)..(273): unsure at all n locations
cgaatctcacctatngaactcntcattgtctatctntatattatacatacatgattcttatatattcaatgttattggatatatggattcatctcacgtgaattcctcaactatgaaaattataaggatttcaagatcaacaaccaattcctcgatcatcaactcaaaacacttgcattaaattcaagaatcttatcaaccatcaattctcactctattcctagcaattataaccattgggtgacttaattgagatttgtatttggataatac

SEQ ID NO: 102985 - DNA, 483 bp, Glycine max
  unsure (1)..(483): unsure at all n locations
atccttagagaacantcgacgcatgcaagctnggagaaggtgcttcaatggaggaaaagatttagagaaagaaggagagagggggagcatgaaattgaagtaagaaaagaggaagagaagtttaactnttgaagttgtcacacaagactctcattcatcaaagttacaacttgtgttacacatgcttctatttatagactaggtagcttccttgagaagctntcttaagaaaacttccttgagaagcttctaatacaacaagtccctactacaaagactactcaaaatgccctgaaatacaaggctaaaaccctatactactagaatggccaaaatacaaggcccaaaagaaggaaaaacctattctaatatttacaaagataagcgggctcatacttagccaatgggtccaaaatctatcctaaggctcatgagaaccctagggccttcccttggatctctagcccaatctacttggagtct

SEQ ID NO: 102986 - DNA, 284 bp, Glycine max
  unsure (1)..(284): unsure at all n locations
ngttatactaggctcatcttggtggtgaagctccttcttccatggcttataacctagtggatgacgcctcctattacctactttcctatgtcttacactgcatctgcatggtggataatcaccattgaaggacctaattgaagctcagagatccagcctccatagaagccccacaagcaagctcacatcaagtggtaatgagagcacaagagcttcaagtaggtgcttcttaaacctccattaattatatgctttacctactattccattgttagttcttcatt

SEQ ID NO: 102987 - DNA, 447 bp, Glycine max
  unsure (1)..(447): unsure at all n locations
ctcgaccgggatccttaagtcaccgcggctgcagctgaatgcaanacttcttntatgaccacatcgcccctatgatatgcaaatatgcacccaaaaaaaataaaactaaaaacaacctaatcatttcctaaactatatttttacttttttattcacaaaacaaggaattaaaggtaaaaaatactcaaaaatactatgataattgtgcataaaataaggtttcaaacacaattattataacactacaagtagttgtgtatgtccagtagcatgcgttattgaaggtgaaccctagagaggtgaaagaatactcacgtggagcatgtagaggcttagaaactactatttttaagagcctaggaaggcttcaagaacaacagaataccacataatgtttggtcttagtaaatcatacaagtataggtaatggacataacccatgttggg

SEQ ID NO: 102988 - DNA, 437 bp, Glycine max
  unsure (1)..(437): unsure at all n locations
gataacaaggtgcagacatgagacttcgggaggtgtatgtgataccactagaggaagaacttcaggtccttgtaagatatgatngatgaatcccaaaaatagttgttaaagcagaaactaacttacatggaggcataaaatagtgccaaaaatatactcatgacttgagctggtgtatagcctttctctagtaccatctttgctccaaacctctgttggttacaacttatataccccacttgaaagcagttgctgaaaaaggatcacttgtttgagttagcaacttatatttttagtatttccatcaaaagtcaccccctgaagtgacttatgactgtttagacgtgaaaaattacaaaaaaaacaacttatattnggaaatgcatgacttacacaaattcaacaatagatagaaatgaagatccataagtgaaaga

SEQ ID NO: 102989 - DNA, 487 bp, Glycine max
  unsure (1)..(487): unsure at all n locations
agtcacctgcggcatgcacgcttgttcgcatatcgttcacatttatgatatccactccacaatggttgaagtagaggagaccttcaatcctataacgcaacgtggcggacaaaagtggacagttaacttgaatgaccattattgtcaatgcggaaagtattctgcacttcactattcatgttcacacattattgctgcttgtggttacgtcagcatcaactacttccaatatgaagatgttgtntacacaaatgagcacatcttaaaagcatactccgcacaatggtggccccttggaaatgaagcgacaatttctccttctgatgactcatggacactaatacttgatccaagtacaatccgtgcgaaaggtcgaccaatatcaacaatgataatgaatgagatggattgactcttacaatcgcagcaccgaccaatatgtagtagatgtggaagagaaggacacaacatgcgtcgatgtcaatgc

SEQ ID NO: 102990 - DNA, 480 bp, Glycine max
  unsure (1)..(480): unsure at all n locations
gctctgagactcggcgtgtcttttctttatgcttcctactccttaataagcctatggtagcttacttttcatgtggacttcgcactaagcgtgtatcttctgggcttagcgagatggtcacgcacttatcgctgagtgtcctgctatgtgtgcctttggacttcttcatatgccttcttcgcgctaagcctgagcttgcctgctaaccgagggtgcgcgctaagcctagcctatgcaccagtggagctgttcaatcctttcaactattcttcaacgctaattcttatagtttgtttatcaattttgctctagagcccttatagtcgtctattctgctaataaaaaatcgcacaanatattaatttctttagtcttctattaaacaaacagtaaaataaagacattgagtattttaccaagattgctatcaaataactcagattgcattattatacctacacatggctatcgccactcttt

SEQ ID NO: 102991 - DNA, 350 bp, Glycine max
  unsure (1)..(350): unsure at all n locations
acctgacgcatgcagctngattacaatgaagggaacttggntatatgttttcatctttcatatgttaaaagtctggaaaaagctcatatccattggaagataaataatgaagtatttattgtcctattgttatttgttaaaaatcaatttttatctaaccacatttttctccttcattattttcatgtaatggtttactctcgtaatcccctcaattatcccacttccttttattgtatataatattttttagtacataacctactgttagaaaaaaaaatttcggcatacatttagaaatttctatactactgcctgctntntggttggctttattgtgagcctcttac

SEQ ID NO: 102992 - DNA, 514 bp, Glycine max
  unsure (1)..(514): unsure at all n locations
agagataatgattattaaacacacaaaatggaagtactaattatttattacctatacttaacagaaaatacttataacactacaaaataaccataaattggaagagtttgatacaatttatacaagttttatacacaaaagttagttgtattcaccgactaacaactcccccaaatttacagttttgcttgtcctcaagcaaaaagagaacaactcacttgtcctcaagcgacaacaacatgcagtgactatgtacaaaggtgtatgcaactaaagttactgatggcatgataagagaatgaagtaaaattccctcatcactttgttttcacaaggtatacagttatccaaagagaaaaataaaatgtatcctgacacaattgatggagttaggcataagacacatatcaaggaaagtagcttanaccatagtctcacagctactgtntcactcaagcacanatgtntaagctatncattaataacaactagcaagaaggtcaatctttgaatt

SEQ ID NO: 102993 - DNA, 467 bp, Glycine max
  unsure (1)..(467): unsure at all n locations
agctntataagtgcgggttcgggagacaaaggtcatgcgttcgcgatatgcgaagatgatattccgagtactttggatttcgtacgaccatgctctcctgatttccagctgggaaattggcgagtggaggaacgccccggcatttacgcaacaagcataatgtaaacctttacggttttaaaagctctatagttgggcctaggctttagagttttcattttgttaaggctntgtgtcttttgtgcttgaatntataatacaaggatctttcttcatctgttcctggtctctacccattctcattcatttgcatgtntacttctttttctaaaacggcagattcgatgacgagtcccccanaggtactaatacctgngacccgtctatcaacttcgagcaagaaatgaatcaaacggaagatgaaggagatgaggatgtgggacttccttcggaactagaaagaatgg

SEQ ID NO: 102994 - DNA, 371 bp, Glycine max
  unsure (1)..(371): unsure at all n locations
ngttgtggaggcctctggtaatcgattaccaggctgtgtaatttattcacataggaacaagccactggtaatcgtatactangtatgtgtaatcgattacacagtgcttttttaggtattcatgtcctgaggctgtgtaattcgagtttggcctctggtaatcgattatcaatgaggtgtaatcgattaccatagatgaaaagccttgagatacccctctttcttgcatatagtgttatgggaagcattatgttgctactgtagtagatatcgcgtganagagtctacccctctcttttatttctcgtagatcgcgatggcggcgcaactaatccatgatctagtggagatggagtgcctatagggagctt

SEQ ID NO: 102995 - DNA, 378 bp, Glycine max
  unsure (1)..(378): unsure at all n locations
gtttcttgactatttgtccttaagattgtactatntctttttgctaatatgtaaatataaatggtataagggtattccgcaaaaacatggtctatatttacttctaagattgttaggggtaaaaatgaccatgtccttaagaaagttgttctcagaagatcccaaacatcaatccctcttattactagatatatttaattcttttaggtcctcaatgtacaaccttcaaattgttgctcgttcccctctttctcttttgcaaaaaagaaaatcaaatgctgtgaaaacatggatgaagtcctaatacaatcaatctcatagaaacaatggatgatatcacaattgataagcacaactacctatctttcagagcccttg

SEQ ID NO: 102996 - DNA, 370 bp, Glycine max
  unsure (1)..(370): unsure at all n locations
ttgaatgctctattcaatggagttgacaagaatatcttcagactgatcaacacatgcacagtggccaaagatgcatgggagatcctgtaaaccactcatgatggaacctccatagtgaagatgtccagattgcaactattggctacaaaattcgaatatctgaagatgaatgaggaagagtgtattcatgacttccacatgaacattctcgaaattgccaatgcttgcactgtcttgggagagaggataacagatgaaaagctggtgagatagatcctcatatctcttgcctagagatttgacatganagtcactgcantagaggaggcccaagacatttgcatcatgagagtggatgaactcattggtt

SEQ ID NO: 102997 - DNA, 422 bp, Glycine max
  unsure (1)..(422): unsure at all n locations
tgacccaggtgagaatgtcaatccttactcctcgaagcaaaataaagagagacggtaaaatttcaatcaaaggaaaaaagagaggaaaggaaattcccaatcaaagagtgggagaaagcgagaagaaaagaaagaaaattcccaactaaagagtgggangaaagtaaaggaaggaaagaaagctcctgatcaaggatcgaaagaaatcataagaaatgtgcagaagggtctttggaccggacaatatctgtacaatacagaattgtcaccaaatgaacacaaaatagggagaggaaaccacgaccttgaagtggtcttctccctttgatnaccaaccaaaatcctgtgcgtcggtgacttgttcgcctcgcgcacaacagaaacagaaaaggaagaggcctataacacacaaaagccgggaa

SEQ ID NO: 102998 - DNA, 55 bp, Glycine max
gagctctgatgactcggggtgtgattgttcttagcttcctactgcatagataaac

SEQ ID NO: 102999 - DNA, 190 bp, Glycine max
tccacattataggatagaacgcttggggactgggacgattctcactccataatattctagacgggcagaagctcttagctagtggtctactctcttgcaagctgaggcgtgtatagaaagaactgctaagctgtgctgcactcatctcatatcattctggaataagtgggctgtttcaagctcgcgcgct

SEQ ID NO: 103000 - DNA, 232 bp, Glycine max
  unsure (1)..(232): unsure at all n locations
agcttgtctcaattctgggaagcagacaacttctcttgtgcagactgtgcgtaccaccctattaatgaggaactcccctttctatatttatatattggccttatcagcatgaagaagagtataatctgatctactaacggctcaactatgggttctacgacccgagctgacgctacgaatccgttatanaatagtgtgaccgccttacacctattgactgtaaaaattgatg

SEQ ID NO: 103001 - DNA, 442 bp, Glycine max
  unsure (1)..(442): unsure at all n locations
tgcacatgtagagaagaaatgtaccatatatcattcttagcgtgcaaagaagggtatgtttcttactttggtctgttctgaggtcatattagctctagtacctgtaaacacttgtgggctagattctggtgccactaataacatcactgtgtcaatgtagggttgtctaagctaccagaaaccaattgattctgaaagatggatctatgttggagatgtgaaatcggtggaagtggaagctatagagcactctagattatttctatgtactagtttttatctggatatgaaagacacttttgttgtaccgacatttagacagatattggtttcagattcctatttggacaaattgggttatttgtgtcatttggaaacaacgctgcttanggtgtcttcaattcaaaatagcagaactggttactcttgttatgatatcata

SEQ ID NO: 103002 - DNA, 406 bp, Glycine max
  unsure (1)..(406): unsure at all n locations
gatgccttggtttacctggtaacccaactggccatgaataanaaatctgcacctgtcgccagactctgtggtttatgctcctctgccgaccaccacacagacctttgcccttatgtgcagcaatctgaagcaattgaacagcctgaagcttatgctgcaaacatcttcaatagacctcctcaacctccgcagcaaaatcaaccacaacagaacaattatgacctctccagcaacaggttcaatcctgtgtggaggaatcatcccaaccttaaatggtcaaatccttcacaatagtagcagcaacaacaacaaccttattttcagaatactgctggcctaagcagaccatacgttccttcaccaatccagcagcaacaacaacaatagcatcaaccccagaaacaac

SEQ ID NO: 103003 - DNA, 486 bp, Glycine max
  unsure (1)..(486): unsure at all n locations
taggctcnttaaattcaagtgaccaaatctcaagtgccatagccatgattncattaaccactttgtagataaacactgantttcataaaccattaattgaataagaaagggtcttatttntgccaaggaaacccttaagatcttcctttgattggagtcaagtgcctccaagagatcatcctgcatatgcatagtaaagcctttttctagtagctgtcccatgttaagctgattactcttcatatttggcacatatagaacattagaaatcactacaaatttctgatcttcactccttcagcaggtaatgttctgttgtctatgaatctaaccttgctcttcttattaccatcaaagccagttaaccattctctatgactaatcatatggttagagcaacttgagtcaaggtccaagttcagaattttccaatcagaattgtgtcacataacacaactgattgaactcaatcatcatctatgccag

SEQ ID NO: 103004 - DNA, 475 bp, Glycine max
  unsure (1)..(475): unsure at all n locations
gtcacctgcggcatgcaagctnggacacatcaagtcaaaagtccaattctggataaatccaaggacaagtataagcattacaggtccaaggataagaagagtctcataagcacttggagaatctggacaacaccacctccgatgaataatgtgaagaggaagccaacctatgtttgatggttgatacaactcttgaagaatcataatcaaaacaagaggaggtacatcttgatgattctaaatctttaagattaccttatcatgaactactttcaaactcacccattctttcaaaagctnacatgagaacagattaagaaactctccaaaggtcatactatgctaaaaaaatccatcaatcaaaagatatcggttctttgacagaaactacttaaaacatngatacttatgaaaacttgaaaaaggagctctgtctagaatatgagagagctttcatagaacgagatactttgat

SEQ ID NO: 103005 - DNA, 473 bp, Glycine max
  unsure (1)..(473): unsure at all n locations
agaggatgcttcaatggaggataagaaagagggagagaatgagagaggggggagcaagatattgaaggaagaaaaagggagagaagttgaactttgagttgtgtctcacaagactctcattcatcatagttacaacaagtgttacacatgcttctatttatagactaggtagcttccttgagaagctntcttgaganaacttccttgagaagcttctttgagaaaacttccttgggaagctagagcttagctacacacacccctctcataactaagctcacctccttgagaagcttccttaagaagattcctaaagaagctagagcttagctacacacacatctctaatagctaagctcaccttcttgagatgagaagctagaacttagctacacacnctctataatagctaagctcacccccataacaaaatacatganaatacaaaanattccctactacaaagactactc

SEQ ID NO: 103006 - DNA, 433 bp, Glycine max
  unsure (1)..(433): unsure at all n locations
agcttgtaggattatggngtacccatcacatgtggtactaggtggcggtcgggcgatggtgcacaacaagtttttccacatccacaatgcgcgcataaacccaccatcccctgtagcccacctccaactgagctcacgtactcccacgtagcccatatcctcgtttctctcaacaccgggtccccatcaatcctcccaagcttccccaacatcaaagtaatacaacattcaaacagcacaaactatcacagccaagaaaacagagcaaaggcagaaaactctgccaaaacaccaaccaaaatcacagcttttctcacttaaagaccccagtaacaattccttcgttccaattcgttaaccggtggatcgactccaaatttttactggaagtctctagtacataagcctacattttgaccgttgggatctacta

SEQ ID NO: 103007 - DNA, 395 bp, Glycine max
  unsure (1)..(395): unsure at all n locations
tctcttcatgcctgcatcacgaacattcgttccaaccttaagtccaaacttncctctactaccttggccatccaaactagccctaccctagtttccaccataattggtacagatgcttcgacttcccttccctcatgcactggcccgatttatacttccctcaccctacccttattgatccctatacaacccccatctttactatgacctcgtccacaacaatgtctaccatagcattttccaccacaaacatgactagttttgcccaccaggctttattctcccatgtcatgttctgctaaagtttatgccttaactangtcattctcgtttactttcccaatttcaatttaccctcactcaaacctcactagcctaccctaccctttcttaca

SEQ ID NO: 103008 - DNA, 360 bp, Glycine max
  unsure (1)..(360): unsure at all n locations
gatttctattcaaagtgtacaggagccgcattatanataatggaatgaatcataatattgtcacaccttagagacatatgaaatgagcttatcaagagacatagaagaattagaagacaagaaaacatgtgatggatagtagggtgttagaataaaaaagaattgtaacgaaacaatttcgtaacaatagtgtagaaaattagaagttttcatgcgttgattttagtctgcaaatcataaaaactaaaagaatataaatctatttacatgagatacgtcctcataaatatcagttgttttgtagaaaatatatacttcttatcacacacaatatactcaattctattgctaaaaaacttt

SEQ ID NO: 103009 - DNA, 486 bp, Glycine max
  unsure (1)..(486): unsure at all n locations
agctngcatgaccaaactggcagtatgaatctctattttacacacttctttattatttatcattaaccctaaattaaatccccaatgatcaatgcagtatttatttaggggaaagagtatnttgagaccttgaccacagactgataattaaaataagaggtattagacaattatgaaatcataatccgagtcactttttattcatacatattttttctttaaaaatattgtcttgtctttagttttctcaatgcaaacataaacaatctccaactcaagataaaaatccaaatttatntagtttatgcgatttagattatttgagaacacaactagtctttaggatacgatattgaaactatcgagtccactgatactacaacataggatacattngtccttaacgagtacatatttcacgcatcaatcatacatatgagaataaaacaagagatgaataaaatgtgcaatggatanacaaaaata

SEQ ID NO: 103010 - DNA, 315 bp, Glycine max
  unsure (1)..(315): unsure at all n locations
atctctcagtcacctgcggcatgcagcttacaacagcttcatagtctatttcaccatgcttagctataccagcagcatgaatcttaagaatgtccatccttgattgttcattacgcagagggatttctatntttctatccaatctcccaggacgcangagagcaaggtcaagtacatcaggtcggtttgttgccattatcattttacctacagcagaaatggagacagtagtgtcatcatgaatccaccattaaatttttgttcagcagtcattcgtagaaaaaatcaaaatatccataagaatacatgaatgag

SEQ ID NO: 103011 - DNA, 335 bp, Glycine max
ctttttttttgaatggaatgatgttgagaatgttgatgaaaatgtattgcccattgatgattaaatcattcgtgtctatataactgtcaattggtcgacccagaaaagcagaaatatctaagtggaaaagaacatgcttccatgcattattattatggatcggtgaaattggatagacattaatgccgaagactaactgctgtgtcagagtctgagtgctcgtttaatatactaatgatatacgattggatatatatccttcaaggaaatcaaaccaggcaagatttctattaataaatatattatttgccgataaaacataatatgcgataaaa

SEQ ID NO: 103012 - DNA, 449 bp, Glycine max
ctagctgtcagctgaaagataaatgatcagggcaaaaagtttctttatatgatgaaatggtgcctttgtcaatttttaaagctcgcgccacgcattttgtttaacatgagcttgagtgctcaacacaagttgggcgcacgactctcgatggccatgccatacaaacattctatagatggcagtagtattgctttggcttggaacctaaaaagaagccacctcatggttcttatcatcattaaattgagtggtggtatcagactttgaaccacttcacttctgcttcactcaagaaactcccttccatgatctattcatggcaatgggatttctatgctacgtctaatcacaccttctcttttatgatgatattttcattctctcgcttcttcttcacccatcatgtagaccccatcattgaagagggtgacttatacactgatgctatg

SEQ ID NO: 103013 - DNA, 289 bp, Glycine max
  unsure (1)..(289): unsure at all n locations
tgcccgctctatgatgatngattaatttactcttttgattgattgtttatatgttancttgattgattntgtntaattcttgttattatgatagaatttatgtattcctgtgtgttttatagttgaataattgatttaagtgcattagtagttataattaatcatattggatgtgttttagcataaacatagatactctcttaagaaactagcctaggataggctctggtaatcgattaccatccagtgtaatcgattacacatgagcaggcaacctgtaatcgattac

SEQ ID NO: 103014 - DNA, 372 bp, Glycine max
  unsure (1)..(372): unsure at all n locations
ttagactaacttaaactgagtttcatccgcagatcccttatgtaagactagactcagctcaagtagcttacgaaaagttagcctaatttagcctaagcttcgtccgtagatccctcatgtaagactaggcataaaataaatagcattattgtaacaacataattaacaccaaaacttaacctgcatatccctcctgtaagactaagtttcgatcctgcttcaatcaagttctaaggcaacaatacatttcccaatgctaaagtcacctaactgtgcatacaaatgggtgatcagaccaaaagcatacaaacatcaagccttggatgaagcatttgacacagaanacacaatccattagatattatgtattta

SEQ ID NO: 103015 - DNA, 166 bp, Glycine max
cttttaacggggtcctagtttgactgattgaagaaccttttaacgaaggttgattgatcctgttactaaggaacaaattacgcgatcagactcgacttatatgggggatggaaatgctgaaaaatgcttgacacagatctactataatacgagccgaaaaggctct

SEQ ID NO: 103016 - DNA, 389 bp, Glycine max
  unsure (1)..(389): unsure at all n locations
actcagctttagccaatggactaccttgattaattcctttgatgagccctttgagccttgnttccctttccttgttttgaagctcactacaagccttaagtgaaaaaccatgatattaccatatccttaaggaattttggagctttggaattgttttgggaataagtgtggggagtttttgtttcattggacaacttgttttgttggctatgcttcatgatgtattttgggccatacttgatgtacattgtatattggttaaatgttggacatgctgaatgaaatgttgtttctcaaaggctaaaaaaaaaaaaaaaaaaaaaaaattctaaaaaaaaaattttgtataaaaaaagaagaataaaacacccataaaagaaaagccctaa

SEQ ID NO: 103017 - DNA, 445 bp, Glycine max
  unsure (1)..(445): unsure at all n locations
aaactccgctggtgactggtaaagcattttttagtatagagtatgagaaacctttatgaaagataatcttacttgaaccaataagattaccatgagtgataaaactatcattctaaatatttaatgcagtacatacctgatataagtttaaatctattagcctacctatttctataatgataattaaataatttcaataaaacttatttcttttaaaaaaaatccacccttatatcatatttgaatccttaatcttgaaagtaaaataatttcaataaatactctccttcctcacgtgtctntaagctntaaataaataatttttattaactaattattcattcaaagaaaatagtggtataaattggagaaaatgcattgaaaatggacacaaataaaactttntacatgggtaattgacattatctcttgagcctcatgttat

SEQ ID NO: 103018 - DNA, 210 bp, Glycine max
tcactttaagaaatgtgactcttggaaatgtactttttgaaatcagtcactggttatcgactaccattgaacgggtatcgagcacacatcaacatatgcgactcttccttttaaattctgaaaagcagaacgtttacaagctctggtaatcgaatacaagtattgtgtaatcgattacacaagtttaaaataatctgaaaatgtttaaac

SEQ ID NO: 103019 - DNA, 313 bp, Glycine max
  unsure (1)..(313): unsure at all n locations
atctatatacaattgnttgctgcttgcttgaatcttgatttcacgtattgtatcgtcatcatcaaaaagggggagattgtagatgcaattggctctgatgttttgatgatgatcatgatgatgtgttgcaattgatgcaaatgggcttttcaagattaaaattcaagacaatacttcaagattacaaggcacaacatcaagatgatcactagaatattangaagggaattcctaattgaattagcaaaggtttggccaagtgatttaaaataaaaagtgttnttcaaaggttttactctctggtnatcgatta

SEQ ID NO: 103020 - DNA, 284 bp, Glycine max
agctcgtccttcctgctgagatgctgtgcatttaatattgctagctaacaaattggagaactgaagctattggaatagagggctcacacggggcaggcatggcaaagtttggtattccaatcatgttattgctggcagctagcttgcttccactatctggggaagctatggctcgctactacaagttcaatgtaagtgtattttattatttacatactatcatgtcactcacacatgctaagcctaagcatatatagtatgaattgcgctacattattgtaaca

SEQ ID NO: 103021 - DNA, 298 bp, Glycine max
  unsure (1)..(298): unsure at all n locations
gatgcttctctcatccccaatgagctaagagatatttctctggaatntctgccaacaagcgtgaatgccacaccataaagttgaacaagtggtgttcaagttaatggaaggcaaaagattattcgtgcatccatacttagccctgacaacttgggcccaaagggtgtccttattgttacacatgtctcgaatgaccttcagctagcatatatgctttgttatgctcatcaacatcatcccatttggaaagatgagtcaatngatcaaagttatcgcatgtggattttgggaggaaaga

SEQ ID NO: 103022 - DNA, 249 bp, Glycine max
tgtgtgtagctaaccggtagcttctcaaggaagtgttctcaaagaagcttctcaacgaagttatctgaagaaagcttctcaaggaagctacctactctataaataaaagcatgtgtaacacttgttgtaactttgatgaatgagaggcttgtgagacacaactcagaggtcaacatctctcccgttttcttccttcaatttcgtgctcccccctctatctttctctccctctatcatttcctccattga

SEQ ID NO: 103023 - DNA, 461 bp, Glycine max
  unsure (1)..(461): unsure at all n locations
acctataaaactaagcttctgtaagagaataatcangaaatcacctcatttcctctgctcatttntgagcctttgtgacttgtgtctgccattaaaaatatgttgacttcttcatttccttcctcttcagaggaattatcatctaggtcttcccatgttagcatgagactcttcttttttcaatatgatcaaagttatcataatattttcctagagatctaatttcgtttaatatggtttgaaacctatattatactcttgtcaacatgatcaaagttatcataatatgtgtctaaagacctaagttcatttaatgtgatttgaaacctaagaaacgtactttgtattctttccgtttattccatattaaacaactcatattgacagacaaataaattgagtntatntctttttacctcattggaaccctaatacgttaaagcaagagtgtctcacatata

SEQ ID NO: 103024 - DNA, 285 bp, Glycine max
  unsure (1)..(285): unsure at all n locations
agcttctntgagaaaacttccttgagaagctatagcttaactgcacacacccgtgtaataactagagctcacctccttgagaagcttccttgagaagattcctaaagaagctagagcttagctacacacaccccctataatagctaagcctcacccccatgccaaaatacatgaaaatataaaaaaaaagtgcctaatacaaagactactcaaaatgccctgaaatacaaggctaaaaccctatactactagaatggccaaaatacaaggcctaaaaaaaggaaa

SEQ ID NO: 103025 - DNA, 96 bp, Glycine max
caactttttatagaaagaatttgaatatgagtgttttagtttttttcatgtcttcaaagtttttggtatttataggtcttctccaccaatggttgg

SEQ ID NO: 103026 - DNA, 312 bp, Glycine max
  unsure (1)..(312): unsure at all n locations
gcttcgccggatgaatgccgatctgaacattttctcaattgacatcagtccaattggttggtcagtggatgggaatagaaaataaaacaatgcgccggtcgtcggttcgctattatgtgtctccgactggatatctcttccagccgaagattgcacacattttcttttacaaaccgctcggtcgataataatnttnttacggtaagaggaaaggttttctgttttggtgttgccaaaaaaatgtacaatgtaggttggctaggtttttccgcgcgagctcaaccgaggttgtgtttccggcgacactgacat

SEQ ID NO: 103027 - DNA, 335 bp, Glycine max
  unsure (1)..(335): unsure at all n locations
gtatgagagagtcanagatcaaatggagaggataaatatattctatgctaaacaagccaacaaagggagaaagaatgttgtctttgaacccggagattgggttngggtgcacatgagaaaagaaaggtttccggaacaaaggaaatcaaaacttcaaccaaggggagatggaccatttcaagtgcttgaaagaatcaatgacaatgcttacaaagttgagctggccggtgagtataatgttagttccaccttcaatgtctctgatttatctctttttgatgcagatggagaatcctatttgaggacaaatccttttcaagagggagagaatgatg

SEQ ID NO: 103028 - DNA, 258 bp, Glycine max
  unsure (1)..(258): unsure at all n locations
ttgtatgacatacttggnagactccttacaaggcgatgttttattagctctgagattaaccttcagctagtatgaccaatgtttttgccacacctggggatcttctttgatagaaagaaagcaagatacattntgatatgacagctcatctagtctaatcttgtaaagattacctttcctcttggtagaaaagaggtataacccatcattgttgttgacaatagtctcatccatgttaaatgaaacatcatatccatt

SEQ ID NO: 103029 - DNA, 389 bp, Glycine max
  unsure (1)..(389): unsure at all n locations
cttccttgagaagctagagcttanctacacacaccccctctcataactaagctcacctgcttgagaagcttccttaagaagattcctaaagaagctagagcttagctacacatacctctctaatagctaagctcacctncttgagatgagaagctagaacttagctacacaccccctataataactaagctcacccccatgacaaanaacatgagaatagaaaaaaaaaaagtccttactacaaagactactcataatgccccgaaatacaaggctaaaaccctatactactagaatggccaaaatacaaggcccaaacgaagganaaacctattctaatatttacaaagataagcgggcttatacttagcccatgggctcgaaatcta

SEQ ID NO: 103030 - DNA, 279 bp, Glycine max
agcttgttctagaagagaactcacttgaatatatgaaattctggaaacggtggggtacaaggatgatgaacatgtggcaaatgaggtaatgcaatgtttccccattttcctttttcatgtgacagaatttactaacaatgatacaatatgattggatttactttacttaattttcttttcttggtctatacaacattacaatagcttcttcatgccaaatgtactaataggtaatcctacgtgttttgcctcatagtcttttatccaccagcttcattt

SEQ ID NO: 103031 - DNA, 443 bp, Glycine max
  unsure (1)..(443): unsure at all n locations
cgcttgtggggcttctatggaggctggatctttgagctttatgaggtcctttaatggtgagtttccaccatggagatgcagcggaagacacacgagaagaggtgagaggaggcgccatccactacggaataagccatggaagaatgagcttcaccaccaagtgagccttatataagaagcttggaaggattgcttaatggaggaaaagaaagagggagagaaagagagagggggggagcacgaaattgaaggaataaaagagggagagaagtggaactctgaagtatgtctcacaagactctcattcatcanagttacaacaagtgttacacatgcttctatatatagactaggtagcttccttgataagctttcttgagaaaacttccttgagaagcttctttganaaaacttccttgagaagctagagcttagctacacac

SEQ ID NO: 103032 - DNA, 281 bp, Glycine max
  unsure (1)..(281): unsure at all n locations
actagacaccttggntaatctagtaacttaactggccatgaataaaaaatatgtacctgttgcaagactctgtggtttatgctcctctgccgaccaccatacagacctttacccttctgtgcatcaatcttgagcaattgaacaacctgaagcttatgctgcaaacatctacaatagacctcctcaacctcagcagcagaatcaaccgaagcagaacaattatgacccctgcagcaacagatacaatcccggatagaggaatcgccctaatctcagatggt

SEQ ID NO: 103033 - DNA, 407 bp, Glycine max
  unsure (1)..(407): unsure at all n locations
actcagcttgtctcgcggtctcacacagaaatctctcaaactctctgatttctacccttctctctctagagnctctcacatgcagaacctcttgagaaaatggctaaaatcccagaacttgaacctctctttgtagaatctctcacatgcagaagctncttgagaaaatggctaanatcccagaacttggacctctctctctctagaaatctctaaaaaatacataagctcaaggaaaagcccaaactcctctccaaaatctgattcaaggcttaaataggtggctttgtttgtgcttgcacgcttagtgcaactctgaaccgcttatcgcgcattagtggattttggcttagcacgtgcttttctcgctcagcagatggactaaaagcggtgcgcttagcgggatg

SEQ ID NO: 103034 - DNA, 310 bp, Glycine max
  unsure (1)..(310): unsure at all n locations
tctcaaccaccgcagctgcagctcttaacccctttaaatgataggctcataatgcagataaagaagcaaaaatcaatttaataatgtttttaaaacgttcaagacaaanatgatcgcaataaaataaataagataagggaaaagagaattgcaaactcgatttatactggtttgtccacttcccatgcctacgtctgtaacgacccgcctcgncatacgatatcaccactctaaaccgtgagaatttcaatttttaatgaanaatccattaatttgcttatgaaaaatgaaagtaatttttttttctcaa

SEQ ID NO: 103035 - DNA, 308 bp, Glycine max
accccaaaattgggttttcaaaaccttaaaatctcacactttttcactcatattactaaccttctcacatttaacccctaggtaacttctcccatcatctctaccaggtttctaccaacaatttcagaatacaaatgtcacaaagcatcatcataaaaccctaaaacagaatgggtagctttactcacatcaaacatggtaagtttagcatgctttcaacaaattctttcacatataactaccataaggcattaacctagtagaactacccatcatagcttccaaaacccaatatccatgaatttcat

SEQ ID NO: 103036 - DNA, 272 bp, Glycine max
  unsure (1)..(272): unsure at all n locations
ctgcagcttttatccaggcaattcttgggggggattcttcttctttcttggcttattccctagtggatggtgcctcccctatcctcttctcctttgccttccgctgcatctccatgatgaaaaatcaccattgaaggacctcattgaagatcaaagatccagcctccatagaagctccacaagcaagcttccatcaaagtatgaccatttgaatttctcgagatcttccgtggttcaatntcgggcgtctccatatgtcatgtgcctgaatc

SEQ ID NO: 103037 - DNA, 369 bp, Glycine max
  unsure (1)..(369): unsure at all n locations
taaagtacgcccgagtcattcattcctatgagaatgtggtgaagtattggtgatcagaattgccattccttggattatatggttgaaccaagctcatgcttttacaaaaaggttcatcaagtcaagttgaaatatggaagtaaccgtcttggcaaattggggccaaagattaatcgagtcacatcactgcttcatctactgccaaacatatttaggattattgatgtccttgntacttccagtttcaccttgacaaagatgtcatggaccattgttgaaatctaaattgattcaaccccatatctttgcgtaaaattcgcaatacttcaattgtacatcattcgcatgcatccatgcttttcattgggt

SEQ ID NO: 103038 - DNA, 239 bp, Glycine max
actggtcaaggattgcaaagacctgattggaaatcacgatgctaatactcttggttttattcctagaactgttaatagagctgcaagatactctgcctaggctagcttttgatgttcaggagattccttcgaagattatgtccattgtgactgacgatgtaaggcctgtggcccttgttttgcgaatggaaatagttattatcaaaaataagattgtaggttcctcctaaatagtcatg

SEQ ID NO: 103039 - DNA, 464 bp, Glycine max
  unsure (1)..(464): unsure at all n locations
tatctgctgcagacacatcacatttcttatactatctgttgtgtctgccttgntgcttggttgatcaattgtgatatagaaacctttctctcttacagcttataggcactggatttgtacatagcttttggttgaaaaaaacataagggccaacttggttaatttcttgtgcaggcacaagtttcaagctttcctaacacaacaacagtggcggctcatacagcaagaagggtcttcaagattctcttctacttgcatntgttcctagttgcagccttggtgactntccttaccatatatggtcttgtctctgattctcacacccaccatttccaccccaagaaatggtaccctccacttcttgcatcaacagcatgtgctggaattgttggtttcacatggcaatggatcacttgcagccactctcacaagggtggtagggtggtattttggcttagtcccct

SEQ ID NO: 103040 - DNA, 242 bp, Glycine max
tatacaacgaaacaataggttgagatttgaaccgcactaacaaaaatactctctgtcctctcattactttgtatatttatttagcttttcttctctagtctctattctttgctgcactggttgtgatgctccaatgtgcttttacgctcgcgtttatgaatacaaatatgtcattcgataaaacttaagataatcaaatgaatatcagatctcacataatatccatcaaaatttacttatag

SEQ ID NO: 103041 - DNA, 449 bp, Glycine max
  unsure (1)..(449): unsure at all n locations
actaagcttaactacagagagagtaggcttncgcaacagcgtcttnacgctactccggcatttacagaaagaaggaattggcgcttancgcattctgccactaaacccaactcgtgaaagttcactttcagaatggatctggggcttaactcaagacagcatgcttagcgctcctataataaaatttttcaagagaaggagtggcacttattgcatcatctccgctaagcccaagtcatgaaggtcaattccagagatgaagtggggcttagcatagtgatgtgtgcttagctgaaccatctatcccactgatgaaaggtcaaagcgcttagcgcgagccagctcaagcatnagcgtgtaagacattgtgcttagtgcaacggctgtgcttaacgaatggacaactgntaaattttctaagtctttttcttgtcatctcttcacaaaag

SEQ ID NO: 103042 - DNA, 285 bp, Glycine max
gcttctatggaggttggatctttgttcttctataatatccttcaatggttatgttcagccatggagtcgcaacggatgataaaggagaagaggtgagaggaggcgctatccactagagaataagccatggaaggagaagcttcaccactaagagagtgccttggataagaagcttaaagaggaagcttctatggaggaagagaatgagagagagagagagagtggcgtggaaattgaaggagaatagggagaaaagttgaactctgaagtgtatctcataagttt

SEQ ID NO: 103043 - DNA, 381 bp, Glycine max
cctcagcatgctatctctcaacaacagaataattatgacctttcaagcaacagatataatccaggttggaggaatcatccaaatctgagatggacaagtcctccacaacaacacagtctatcccttctttccagaatgttgctggtccaagcaagccatatgttcctcctccaatacagcagcagcaacaacaacagtcacaacaaagacaatcagcaactaaggctcctcctcaaccttccttagaagagttagtgaggcaaatgaccatccagaatatgcaatttcaacaagagacaagagccttcattcagagtctgacaaatcagatggggcagatggctactcagttgaaccaagctcagtccccaaattcttgac

SEQ ID NO: 103044 - DNA, 288 bp, Glycine max
agcttattcatcttatcgagtgatgttgtttatcttcatcgcaactacgatgaggagacgagtcttgataagaattaccatatcagtctcaggatgaggagggccgcaagaagaagaaagatccaccgcattggcatcctacaagaaagatagccaagacttatctcttagtagggcattcacaaggtgtgtctcgatcatgtctttagacttagaatgtgtagaataaatctttcttaaagcttcctgaaaatagtatgtttacatttttggaaaatgaatatttga

SEQ ID NO: 103045 - DNA, 444 bp, Glycine max
  unsure (1)..(444): unsure at all n locations
gtattctttgtcctaccaagccactgntgattctaaacaaaccaataagaattgttgaaagtttgtacaatgactaatatgaaatcgtcttacagaggatatctctcaacactttaatcttttcttccaaggtataccaggtgttttgggagcttagtatcgatacaaagatttacagaaaactttacaagaaagaatgttttcacgcaagttgattcaaatcttgtttcttcaaagcttcttctatttatagctntcatcttcaagtattcattgtctcaatgagtgaattcttcactttgttcttcatgcaaagtccatgttgataggttgacgtgtcttatacttagcaggaaagtcacttcttccatcatagcangtctgcaccaacaaaatgcacctnttgatgaagataacactntcagactatggacttcgttattc

SEQ ID NO: 103046 - DNA, 286 bp, Glycine max
  unsure (1)..(286): unsure at all n locations
agcttgaccaatcccgacccaatcttggcatattctgtcagtgagaacctgtgatgtacctaaataggcgagctcctggcagtcaacagataaaaggaacaaagaccacaaagcanggaggcttgtagtggctggccagctgtgaactttgattaatatgtgggttatggcctctggtaattgattaccaagggtgggttatcgattacaaggctcaaaaatgatgacaggaggctaagatggtctctggtaatcgattaccacggggtgtaatcgattaccaggc

SEQ ID NO: 103047 - DNA, 419 bp, Glycine max
tctacttatgtggcagggcgggcttccttcgctttcttgtctccaacgcgagctctgaccgctgtccttccttcccgcgatgcttcttttcatgtccgcctgagtgggcttatagcccaaaccatacttcccacgatttccttgggtctttatcaggctagttatgccgccgttgtctttgcctaaacccatcccgggttcataaccgttccccaacataactcgggccatcattaccgctgcatcagacagacaaggttgcccaaagagggagtccacggaggaaatgatgaccacctcaaaagactggaaagcggtttctaacgattcttctgcggcttccacataaggcatggaagatgggcagcttaccaagatatctttctcgcctgacacgatgaccaagtgcccctccacta

SEQ ID NO: 103048 - DNA, 330 bp, Glycine max
  unsure (1)..(330): unsure at all n locations
aaaataatttaagtaaagatgtttgttactcagaacacacaaatcataaatagttaaattcaggaaggaaaatataatgtctatattcttggatacagaatcattcaagaaattatatctaatgattcttgattaaaaacacttacttcttaagaagtattgaattactccactccttaaggtcctttgaatgaaagggcaagataattggctacctgaagaggctgtcacaaccatataatatncttgtgtgcagctatcaattattgtacgcaaaaagtacaagggtgaacacatgtcaagaaataggatgatatctgccttttctat

SEQ ID NO: 103049 - DNA, 334 bp, Glycine max
tatattattatatcataccccctcatgcctatagacgacacattacagatacatatggtagtaacctctacacgttctatgcattgactgcatcgtcattctgtaaggacatatatcgggatgagttgaaaaaagagagaatgtctctctttgatatccaactcgccatttgcgatatttgcctaacagtgtcgttgacaccactttctaatgaaaaaaatgaatgaacttttatgctggaacaaagcaacacaaaatgctatgttgttcatatataccatattcgcgtgcgtaaatagccttgtgtatctaacgcatatatatgattaataat

SEQ ID NO: 103050 - DNA, 286 bp, Glycine max
  unsure (1)..(286): unsure at all n locations
gcttgggattggcttcccgcaaatgtattaagcgggtctgaaaatangcaaaggtgatcatcctactttgatgagtgagaaagctggggcaaatgaagaggatgagaatgagggagaaacccttgatatgactgccattcctacacggncaaatttcccatcagcccaacaatgtcattactcagccataacagtctctcacccaatcatccacaaaggccatccctaaatcaaccacaaagtctgtctaccgcacttccaatgatgagcaccacctttagcacaa

SEQ ID NO: 103051 - DNA, 237 bp, Glycine max
  unsure (1)..(237): unsure at all n locations
tatatcttcttctaaagaattatcttaagccaataaagtagtttcatcacaaactacatgtaccaaatcttcaacatttagagttcgtttattgaatactctatatgctcaagaggttatactttagtccaaccacatatagaacatntttatttgagttttgactgacttctaatatttccttctccattatatttccttctgacaagcatctnacttttggtagcctactacata

SEQ ID NO: 103052 - DNA, 295 bp, Glycine max
gctgcaagctgagaatttagggaactacaagagacgccactatctctgtccgactatatacgtgagcccatttaaaggtaacggatgagtttattgtaattgtggttaggatgaacatgtgtaggaatccttagaggattaaatttggtttattttgggatgtttatttaattataatttttcctttttgattataaatatgatattggtgtgttattacgtcttgactcgagtctgtgattcacgtgtaatgggattggtgattgaaaaatgaattctaaatgataaagtggtt

SEQ ID NO: 103053 - DNA, 288 bp, Glycine max
  unsure (1)..(288): unsure at all n locations
gcttcaatgaaggaagagaatgagagagagagagagagagagagagagagaaagtggcgtggaaaattgaaggaaaaaagggagacaagttatactttgaagtgtgtctcataagtntctcatttatcaaagntatgacagatgttacagatgttacacatgtttctatttatagcctagcacatgggaaacttccttgagaagcaagganggagcttnctttgagagctagaggggggctactcattacaccccttccatagctaagctaccccatgacaaatacct

SEQ ID NO: 103054 - DNA, 289 bp, Glycine max
gctatgctataaacgtcctattcgatacttattcaaaagaataataatcacaaaaaaatcaaaaaataattagatcaggtgtttataatttaattaaatctaaaataacaaaataaaaaattatataaataataattccttttaataataaaattcttgtaagtatctaacaacaacagtttcttcaaaatcttaaaatgaaatatttttattttcagaaaaatgttacttacagttttttatgtttcattttttttattggtttattatattaaattttaaaagataa

SEQ ID NO: 103055 - DNA, 293 bp, Glycine max
  unsure (1)..(293): unsure at all n locations
agctaacgngaagtaatttaaatgaaatggttatatatttttaccaatttcacagaanaacgtttaactaagagatagtgtagctcagttggttgatagtgtgggtgaaatgatggtaaccactaagtatgaacagaaatatggttatcggcttatgcatctgcgcccaatgctttctctgcaataaacaaaacaaaaggttcaacgcgtcagccattttatgctaaactcgggctgaaattgttcccagggtttagtgctagtaactacctttcttgccctaatttctatgc

SEQ ID NO: 103056 - DNA, 408 bp, Glycine max
  unsure (1)..(408): unsure at all n locations
gcgcgtactgatgggtaccatgagaggtcttttgtggcttgacccatgcnggcgccgaagtgacgacatgagtatctccttccttccattctttccctagttgctccgatcctcctagcattggtacttgtggaggagacgtaatcgaacttccctctcatcaaacctacttcgattctctccccagcaaataccaagtccgcgaagctggagggcatatagcctaccaacttctcatagtaaaacaccggtaaggtgtctaccatcatggtaatcatctccctttcgaccatgggaggggccacttgtgctgccaggtctctccaccgctgtgcatactctttanaggtctcactntccttcttaaccatgttctgcagctgagtgcgatcgggagccatatcggaa

SEQ ID NO: 103057 - DNA, 297 bp, Glycine max
catgcaagctctataagaaaatattgtaattctagttgtgggtaggtgctaggaagtgggaattgggagatgggactaacaagtcacaaggacattttttttttctatttttaaaaaaggaaatattgatacttttgtgaattcaatggtgtcatttaataatgttcacttgttattgttgttcataactttgagaattggatagaatttttttttgtgttattgataggaaatatttttttactttaccaatgactattcacaaggtttaaatctaagacttaaagagatcaaatt

SEQ ID NO: 103058 - DNA, 395 bp, Glycine max
  unsure (1)..(395): unsure at all n locations
ataaacatgtacctgaccaactgagaactaaacttgatgataaaggagaaatgatgatattgattggatatcactcaactggaggttataaatngttgaatccagtgaacaacaagatagtgataagcanggatgtagtggtggatgaaagcaaggattgggagtggaatgccacaccagagatagaaaaacagaatcaagttgaattgcaacttgaagacagtgacactgtgactgtgcaagaaaatgaaactggagaagcagtgcagaggggccaagaagatctttgagatagagacaagtccctcaaagataaatgattttgaattgtgaatgatggtgcattaatgatgaaggtagatagtgatttttgactactacttgatctgaccact

SEQ ID NO: 103059 - DNA, 288 bp, Glycine max
  unsure (1)..(288): unsure at all n locations
tgcaagcttcccattatccgactaggtatgatctgattaccgccttcctaaggcagggtcagtacaattctgatatggctcctgaccgcactcaactgcagaatatgttcaagaaagagggtgaaacctttaaagaatatgcgcagcgatggagggatttggcggcacaagtagctcctcccatggttgagagagagatgatcaccatgatggttgacactctgccagtgttctactatgagaagctagtatgttactgtcgcaacctaccctttggngggagggcga

SEQ ID NO: 103060 - DNA, 419 bp, Glycine max
  unsure (1)..(419): unsure at all n locations
ntatcactctgtctcgcataactctgagactagtntcttttggaccatgagcaagcagctcactcctcttttaagaccatgctatgtgctcgtgattggtctctctcttcccttcgaagcttgagctcactggtgctgcctcataaagctccatgaaatttgtcacagccatgctcttccttgcgagccctcttggtttcttgttcaagggctcttgcggtagctgcattttcttctcgtaacccggcacactttntccggacgtctgtagcaaccaacctgaatttttctttggaaagtcttgcttttcctagttctggttttagagctcggacttcttcatcctcttccggagcttcgaagctctcctctttgataattntcaacttggagagccaatctaaccctggtgtacagac

SEQ ID NO: 103061 - DNA, 241 bp, Glycine max
tttttttggataatctgagttgaggagaagaaagagaatctgagccttttatcccttttgaaatactttatttaaaattgtttgaaaaaatacttttaattaagagatgaagtttttattcctttattaatatatatgtgaggggcatagagtggcccaaaatgggaattggctttcttgttgggattcatgaatttgtccgcattgacaatgaaacaaaccttcttatttgtttcttaat

SEQ ID NO: 103062 - DNA, 418 bp, Glycine max
  unsure (1)..(418): unsure at all n locations
ctaaattcgatgtacggcatattctcatgcgtgatcagttggcacatggatgccacagtggcaacggcatcggccatctaattctccactctggggatgtggtgaaaggatacgtcatcaaagtactctatcagttttctaatgtangcctggtagggtatcaacttatgatccctggtctcctattctcctttcaattggtggattaccaaggctaagtccccatataccttgagcaacttgaccttgaagtcaatttccgcttggatcccaanggcatacgcctcatattcagccatgttgttcgtgcagtcaaagcccaacctagtcgtgaanggtatacatntgatcgtgngtgtaaccaaaagcaccccaactccatggtctagtgcattagacgcaccgttaaccacacaat

SEQ ID NO: 103063 - DNA, 315 bp, Glycine max
atcctctgaggcacctgcggcatgcaagcttagataccaccagcatcattgttttatgtgcggcgatggaacctctctaaatgcaagctttccgcaagacttaccgaaagatcttatagttgaccttatcagaggtatccatagaagccattgcatcactcacccaatactacgaccagcctttgagatgcttcacattcggagacttccaattagtaccaaccattgaagaatctgaggaaattctaggatgtcctctcgggggaagaaaaccatatctttcatccaggtgtctcccctctttgagcagaactg

SEQ ID NO: 103064 - DNA, 456 bp, Glycine max
  unsure (1)..(456): unsure at all n locations
atcttacanatctctgnaggaaggttntctatgtattgatcccttcaactatccattntaggatacttttcctgaataggaagaatgagcactcggattgtatggaaaaagacaaccagttctcaaagacttcccatcagacacactattgctnccaatctaaatagtctaatctttgagcataggccaactaaaaggaaggtttatccctctgatgccaccatatggagaggcatggaagcaaaactttntaagatgtccttctccactccactagacctncaacaacttcttaggtgatgtacttgatgaatgtagttcttccttaagacaaaacaaggattgaagaaatttttctgccagaggatatcactttggaggatcctgaatatagtcaaagggtttcagaatgggagaaaactgactatgaacctgaactgagaatgaagttgtcat

SEQ ID NO: 103065 - DNA, 288 bp, Glycine max
  unsure (1)..(288): unsure at all n locations
agctnggttcgaggtacttacccgttgaagatcgaagaacgatgaagaacgaatgaagaacgtcgaagaacggttgaaacctttgcgaaattcttcacggaaaacgttacggaaacgtttcggaagcgcctcggcttatattttcttcacggaaacgatttttccaaggaaattcgaaagagagagaagtgccaaaggggctgaaccctnttcttcttcacttcctcccctatttatagcaaaataggggaggtggttgccgcccagctcgcccaggcgagccaggtt

SEQ ID NO: 103066 - DNA, 184 bp, Glycine max
aaagtctttttcaagagatttactctcttggtaatcgattaccagtggcaaaaatgatttacaacagctattaaaatttgaattcaaaattgcattgtgtaatcgattacacatatatggtaatcgattaccaacagttattgaacgtttaattcaaattttaaagcttgtaatcgattacaca

SEQ ID NO: 103067 - DNA, 288 bp, Glycine max
  unsure (1)..(288): unsure at all n locations
atgcaagcttcacaagcaagcttccattattcaaccttattgctaatttgaacctgagccacccctatagccttagtagcttccttgaaagttttgttgaggtctagcttggntctatagataatggtcctcctcttcttgttgtccgtcaccaggtgttgaacagtggccattttgatggttgcctccacaaaaatcacatctcaaaatttgttgaactcggtgtgttttctgtggtccaccttggtgatattgctgaagaagttggcctatctactttgttaaggc

SEQ ID NO: 103068 - DNA, 317 bp, Glycine max
  unsure (1)..(317): unsure at all n locations
atctatttgttataaacatgtacctgaccaactagatcgtnctctgtgcactcccaccgcacatttctcaaatgaagcacctttgatggtggctgcgtgtaaccgaactgttgctgagtagacaccgatgccatttcagataataatcctaaacctgttgaaggaaatcaccaaatacacattcccttagaatattcaaaatgacaaataggtgttacatcctattaagaacggacacctctcttggtggaagtgttggcgtgtcaaacacctgtttgacaccgacacacccaaacatttgtacacttgttcgacac

SEQ ID NO: 103069 - DNA, 276 bp, Glycine max
tagctgtagagagacgagcttatgcagttatatattgattgtaccctttaattaaatcttctctagatacaaatattacctcttcaccatcaaagttgacaatgtcatcaagctaaggatcctcatcatctaaacttgcgtccaatgctggttcaactttactagtggatgcatcaaccatcaaatactcggtgtcttctttctcattgtcctcatcagacgatgaatcatccaagtcctcgcaagtgctcatgaggcttttcttttggacttgaa

SEQ ID NO: 103070 - DNA, 362 bp, Glycine max
  unsure (1)..(362): unsure at all n locations
gagagagagagaaggggggctctatctngaaggagggaaagagggagagaagttgaactttgaagtgtgtctcacaagactctcattcatcaaagttacaagtgttacatatgcttctatttatagcctaggtagcttccttgagaagctagagcttagctacacacaccagtctaataactaatctcaccttcttgagaagcttccttcagaatattcctagagaagctagagcttagctacatacacccctctaatagctaagttcaccttcttgagatgacaaactagagcttagctacacacatcccataaaatagctaagctcacccccatgccanaatacataaaaatactaaaat

SEQ ID NO: 103071 - DNA, 266 bp, Glycine max
cctaactacatgactacgtagggtaaataaaataatacatatacagacgatcatgaatgggcgggaagtcaaggatggcgagagataacttcccacacgcaacctaaaatcctgtattgctcctcgcacagaacattcttctattcatattattggagctaaaatataaacaaacacatcgcactagggtttttgtgtaatagatatgtgcacatagcatgcacttgcttgctgagctagcatacaataattgcactggttcatgt

SEQ ID NO: 103072 - DNA, 252 bp, Glycine max
  unsure (1)..(252): unsure at all n locations
tacaagtggcctcagatatcttaaagaaggggggggtngaattaaagatattccaaactatttcccctaattaaaaatctatttcactttttactcaagntatgaattcccttaatgacaatcttcttaanatattaattcaatgaagcaactttgatatgaatataaagcaataattaataaaggagattaagagaagagaaaatgcaaactcagttttatactggtttggccacacccttgtgcctacgt

SEQ ID NO: 103073 - DNA, 428 bp, Glycine max
  unsure (1)..(428): unsure at all n locations
gctctccacctgcctttggatctcgctngtctcttccagattgcctctatatgctggcttatttggtaaagacgctcctagaatgtgatcaatttggtactctatccctctcaaaggaggtaacccatgaggggtgtccatgggaaagacatccccaaactccttcaataatttttccacacctataggcaaagaactagcaatagaagacaaacaataatcatgaggcattagtaaatacatangttgtctagctagcatcactctcttcacctctttttctctcatgaacaagctatgnatntctctctcttgattttttcttttttcttttttaagttcactcttcttttatctcactcttttcttattttctctcttttcatcaatttggtttctcttattttctctctgggtctctttactct

SEQ ID NO: 103074 - DNA, 293 bp, Glycine max
  unsure (1)..(293): unsure at all n locations
agcttcttagtttcagatgatgcanatgggtttgtatctacttcatgcactcttctaatgactatggcatcatttctggtgctaaactgctgggagttggaagccatcttctcaattaaatntctggcttcagtaggagtcatgtctccaagggctccaccactggcagcatctatcatacttctctccatattactgagtccttcataaaaatattggagaacaagctgctctgaaatctgatggttggggcaactagcacataatttcttaaatctctcccagtactcata

SEQ ID NO: 103075 - DNA, 177 bp, Glycine max
  unsure (1)..(177): unsure at all n locations
tattcctaattattaaatctatttttataaatttggttaaaaaagtcttttttctaatgatacattaaatattttttcttaaaagccaattaatagagataagaaaaggattattttagaataataatacanataatttacatatttaatatgattaactagatgaattatgaatta

SEQ ID NO: 103076 - DNA, 224 bp, Glycine max
  unsure (1)..(224): unsure at all n locations
gaaaagaggagagaagttgaacatttaagtttggctgacaagactttcattcatcaaagttacaaccagtggtacagatgcttctatttatagactaggtagcttccttgagaagccttcttgagaaaacttccttggttgagaaaaattccttgagaagctagagcttagctgcacacacccctctaataactaagatcacctncttgagaagctttcttgag

SEQ ID NO: 103077 - DNA, 312 bp, Glycine max
  unsure (1)..(312): unsure at all n locations
ttggcatgatttttcatgctctaaaggggatgtcaattttgagctatctgactatctcttgagataactgggagagagctgtttcttgnggtgccataggtaacaattgtcctttgatctgctgcccttcattagaacttcactcttctcatttgtcaccaagcattctgactttgtgaagttacattgaacccttcatcacacagctgactgatgctgatcaaagttgcagtcagtcccttcaccagcagtactttgttcagactangaagtccatcatgagctagctnntccattccaatgatcttttct

SEQ ID NO: 103078 - DNA, 282 bp, Glycine max
  unsure (1)..(282): unsure at all n locations
atcctcattccagcgatcagttttgttnttgcgtaagagtttgaacaacggctcataaatggtggtgagctgcgatatgaatctggcaatataattcaagcgtcccaagaaacctcggacttgcctctctgtacaaggttctggcatctcaaggatagccttcaccttttcggggtctacctctatccctttctggcttacaacgaaaccaagcaatttcccttatttgaccccaaaggtacacttagcggggttcaaccttaattgatatttcttaagcct

SEQ ID NO: 103079 - DNA, 340 bp, Glycine max
  unsure (1)..(340): unsure at all n locations
ccatgaggaatatcttgcacctatgtagcatggaaaataccttttaacggtatgtatatatatgaatatatgtggcataaaaataccttgcaaagtgtgaatgaatagcaaaaaatgcctttcaaaatatgtatatttgtggataggtagcataaagagccttttaaaaaaatgtacccatgtcaaaaatggcacaaggatgctctccaaatgaatatatgatgtgaaattgcccctcaagtgtatatagatggcatgaaagttccttttcanatgcaagttngtgcatgacgtgagaatggctccccaatgtgcatatatgtataaataatgtgaatga

SEQ ID NO: 103080 - DNA, 255 bp, Glycine max
acaaatagttttaacttttggtaatcgattacatgcattgtataatcgattacactgttttaaattcaaattcaaaatttataaaactgtttcaaaaattattttagttattagtaatcaattacatcctctagtagtcgattaccaaagagaaaacatcttatttttgaaaacatatatttacttacaagtttttgtaagatattttcctctgtcaaacttgtgcagcatcatctaagaaattcttttcaagat

SEQ ID NO: 103081 - DNA, 237 bp, Glycine max
  unsure (1)..(237): unsure at all n locations
gtgtgtctcacctcagagtgtttggatctatttgttataaacatgtacctgaccaactagatacgtctctgtgcnccnccacacaaaataaggtatattgtcaaccaattacgataagaatttgatttgttctaatgggtagtccaattctcatctcatttgtggtgacttgtggatttaacgattaatttcttctcttattgacggacatacactcactacatgaattctaaatct

SEQ ID NO: 103082 - DNA, 285 bp, Glycine max
  unsure (1)..(285): unsure at all n locations
gcttgtgcaatctanagcaagttctttatatccaattagtcctgtctctccaccaacgacttgtgcagacttggaaccaactttaagttacatttcttgcttccccatgtnttccctgttcattcacttccttttttgactgtatatatgattgataatgaaaaattaatgagtaccatgccactgtttgttctgtatagattatgatgcttttgtattttgtaanttggatgttcaccatattattaatattagatatggtttatctttaagctaacattaacc

SEQ ID NO: 103083 - DNA, 452 bp, Glycine max
  unsure (1)..(452): unsure at all n locations
attagcccgtataggacaggccccattaccatttgttggtgcattccngtcttttctaactaacaaatcttaattatttatttgttaaccaaataattaaattcatgatctttcttttttaatcactcaaacaatttatatctcctcattcaggtcatggttaagggaatgacaccagcattggtcccctccaagatacaagatcttccccttatgtgccacaccaccctcagctttcccatctctgatagcatcgattgctccaagtaagcaaattcagaccaaccattaaaaaaaagtgtacagatttttctttggcttattgatcatattatgttgtctcaattgaaaatgaaagtgctcaattatatttgattgactgaatggtggagcttctgtttttggcagggttggttatgatatattatgatggtattggtgcgcaataatca

SEQ ID NO: 103084 - DNA, 287 bp, Glycine max
  unsure (1)..(287): unsure at all n locations
agctttacctgtctaccgggcaacttgttaattcaattcgcatcttttttttgctatattttatttttattactatttatacagagactcaaccctcctctattaattgccattacgcgccaaaatatcttgcttccttcgtcaattaaaagntttggcagagaatatcttcagttggtcttcattatcacaagaagaattgtccttctgcaagtcaccgagtcttttcaatttgccccctgctcctttagaaaagacgttaatagtagaatggggattctaatggg

SEQ ID NO: 103085 - DNA, 275 bp, Glycine max
gcacgcttcgtttgggttaggattttttcttttatgttgcacgcaacggtgtctgaattaggataatgctacatctgtccgcattataagaatgacaatcaggtgtaacaaacaacttcacatggtttgatgagatagcttctttccatcctgcatgacaattgttataattagtcaatgaaatttaaaccaagccaagccaagccttaatctcactgtgagtacagtcaaacacaacaaacacagaaatgtataataaaatagcaaagctcact

SEQ ID NO: 103086 - DNA, 284 bp, Glycine max
tccaacaaatgggtgacagagaaagccaaggaatagggcagtgttttgtgatgcatgtaatatgttgagccggctttgcttatataattgattaattttaaaaaggatgtttacacaaataagagttgtgtaacctactgactaaaacatatgtggtttaatcataatccctttggtgaattatatgagtgaactgtagatgacttttgaaactatgaacacaaagaagatctttggagtgggtcaacgtacatgtactaagagtgtgggtcttttccggttga

SEQ ID NO: 103087 - DNA, 163 bp, Glycine max
atagcttcagcgtataaggctttagcatgcataagagagggttacccattaagaggagctcctatcaactattctgttggccatccatggcaagccgatgacctgagcttgagctaagagagtagaaaaagctgtgacacacctagttgcagatattcatact

SEQ ID NO: 103088 - DNA, 311 bp, Glycine max
  unsure (1)..(311): unsure at all n locations
atggagggatcgcacgcaggaatcatccangtgacataatgcacgaacaaacattttttatgtgcttcatagatatagtaaattaataatattttcttcaaaagaaggaaggaaaaccttactttctaaatagatgcacatgtttacccagatatggtttacccacatttttttcataacagaacataattcatgaatcatgagtattagatgaaaactgacctttacagaatttggcaccagacccctgtattatgcgccaaatccctcataccgaacagtttttctattagcatcaaccatgccagtgt

SEQ ID NO: 103089 - DNA, 299 bp, Glycine max
agagtcaccgccgctgcagctatatgcacaatacgacttatttggtatatttgcacgatagagtacagtagcaaaacaatatcggttttggcagaattgatgttgtatggtgcattacaatattggttttgttagaattgatgttgcttttacgttttttttttatctatttggtattatacccacatcgattttaggaagaatcaatgttgaaaatcgatggtgaatgtccataaaaatttatgttaaatgcttattttttaatagtgtagatagcattccaaatatgacttttgaaa

SEQ ID NO: 103090 - DNA, 270 bp, Glycine max
tcttcagacatgcatatatttctgaatcatataagggagtagggacaaatcttctaaaaatgaaccaacagccctattatagcttgcaatcagcaagcaatatgtagacaaacctattgtccttaaggattgagacattttactgattagtaattaaatttgatggtgattctcttatgggcatagacttggtctacttagattttaactagtcctagctagctcctaataatatatcctaaccttccatggaacttggaagtgcttaca

SEQ ID NO: 103091 - DNA, 283 bp, Glycine max
  unsure (1)..(283): unsure at all n locations
agcttctatataagctgatccattntatcaattaacacaagttgagtgttattcagaaaattagagtttatctcttttatcttagtgagagtgcttctcctaagttcttgagtgattcaagaacaccttggctgtatcagaggactttcacaacctttgtgtgttgccctcgccggaaattgattctttccttcctttcatcttcaaccttgttctttcaaaccacaattccaaaaaatccacttctgtccagaattatctcatggccataactcccgttata

SEQ ID NO: 103092 - DNA, 390 bp, Glycine max
  unsure (1)..(390): unsure at all n locations
tttaactatgatatttatttaacgtatgccttttatgcatgatattggtggaaagaatattatttatttgtcagggttcatgatatcaattatcgatacgtgaaaatggtaatgttcaaaagtgtgtgattagtgttattttgagatgaagcatgaacaaanagtgaatctgtcccctacgtgaattgaccttggtgaaaaggatctaccatcagcagatgcaaaccannatgccaacaatctctccaacttgggtcaaatctataatggagaagacccttcaacagatggctttggtaggatgaanaccctttaataagtttatagtaccaattcatacaaaagcaaatataattggtgtttagttntatatgcttagtgagttacata

SEQ ID NO: 103093 - DNA, 252 bp, Glycine max
  unsure (1)..(252): unsure at all n locations
aataaccatgtacaccttttcattcaagtcaccatgtaagaaagcattgttcacattcaattgcttaagataccattgattgatagtagctaaggccaacataagtctcactgtggtntaacttcgtcactagagaaaataatgtctagatagtcctatccttccacctgagtgtagcccttggctattagccttgccttatatctttctatatgaaccatggatttgtgcttgatcttatacacccactta

SEQ ID NO: 103094 - DNA, 341 bp, Glycine max
  unsure (1)..(341): unsure at all n locations
tcattatgtttcttgtgacctaggctattcttcaaaaaaatattttagatgatattgcagaatctttagaacaaatgcacattcatggacaagattctaaaggaaaaggagaaggaagcaatgaagatccaccagtagaagtcaaagcaaataatgattntccaagagagtggaaaacttcaagcgatcatccncttgacaacatcaatggtgacatctcaaaaggggtaacaactagacaccctctcaaatatttatgcaataacatggcttttgtatctatgatagaacctaaaaatttaaatgaagccataatgtgatgaaaatggataatagctatg

SEQ ID NO: 103095 - DNA, 288 bp, Glycine max
  unsure (1)..(288): unsure at all n locations
taccttgtgcatgattgatatatcccttgctcccattttgagctgaaagtatgattgtgtaattgaaccttgagcctatacagnttatctccttctaccttgtcttaggttgtaggagagcatcattcataaaaggaaattttggttcaatgcatattttcccaaatttaggggaattatatggtgaaagcttgtattgtaaaaaaagagcgacacacacagtcatctaataagcagcaagtattaaaaaaaacaaaattgtaagtataaaataaaagtgtgtgtgct

SEQ ID NO: 103096 - DNA, 338 bp, Glycine max
  unsure (1)..(338): unsure at all n locations
ggtaccactactggaaaacccgcattgcaaatctttattagaggccaatagaattaaatatttgggaagccataaaaaaaagacccttatgtccctctatagtggcccggaagtgcaacaatttgaaacctatagcagatnggactgaggaagaaagaagattantacaatataatttaaaggccaaaaatattattacatctgccctaggaatagatgaatactttanggtttcaaattgtaaaagtgctaaggatatgtgggatacactacaagtaacacatgaaggcaccacagatgtntaaagatctaggataaacactttaactcgtgaatat

SEQ ID NO: 103097 - DNA, 321 bp, Glycine max
  unsure (1)..(321): unsure at all n locations
atctctgagtcacctgcggcatgcaagctngataagcaagaagaaagtattatgcaatatcaacatatactatgcgtgactagtaaagaaaataagctatgaaagtaagcaagaaattaaagtgcaagaaatgtaaactaggtggatcctaagagtgttaggatgaccacatttaaggttccaaacaaaaaactcactatcctaagggaaaatcgcctaaaattattacacacaaatggaagtttggtaacctattggaggctcccaacatacttccaatgaaaggcctttttgttacaaaatttgaaagcaataaaggta

SEQ ID NO: 103098 - DNA, 167 bp, Glycine max
  unsure (1)..(167): unsure at all n locations
ttggttttgaatttataatacaaggatctttcttcatctgttcctggtctctacccattctcattcatttgcatgtttacttctttntctgaaacggcagattcgatgacgagtcccccgaaggtactaatacctgggacccgtctatcaacttcgagcaagaaatg

SEQ ID NO: 103099 - DNA, 285 bp, Glycine max
  unsure (1)..(285): unsure at all n locations
agctttaatatatatacaagaatgaagctctgataccactcgttagacaagtggcctcagatattntaagaagggggggggttgaattaagatatcacaaacttttcctaattattaattctattttgattttaacccaaatcctaagattcctttcaaaatgaacccctaaataataatgcaaattaatcttactgaatagaagtaataagcaataatcaataaaagagtttaagagaagagagattgcaaactcagatttatactggtttggccacaccttgt

SEQ ID NO: 103100 - DNA, 432 bp, Glycine max
  unsure (1)..(432): unsure at all n locations
ctaacctaatccttttgttccttgtgaaggagactacctactccttctcaccaatccacggattggctatggtcgccctcattttgatacgtcatggtattgcaaaggggatgacaaattcacgtgattctggggttggttggactttctttgctctttttgggggtaggagcaaccagagcaactgctttctatttctgaacaacaacttgtacgaagccttcatcttcttcatcaatctcactcagntttttcaacctttatgggactgagattgtagccattggatgcacatgggtgggaacaatagactgttcatgtcttttctttgtcttatgttcccttgcatgtaactcctcctcttcttcccctttctgggattgctttcttggtttctctcttttattgctcaaccattctcttttaaatctt

SEQ ID NO: 103101 - DNA, 288 bp, Glycine max
agcttgaaattgaacaacggaagctcctcagtaaattatatggtcataacttgtcacacggaagtccgattaacgcgcagactatatcgagacgctcgaaattgaacaacgaatgctctcgagaaatacatatggccataacttgtcacacagatgtctgattcaggcgcataatatatcgagacgctcgaaatttaacaacggatgctctcgacaaattcaaatggtcataacttgtcacacggaagtccgattcaggcgcataatatatcgagacgctcgaaattg

SEQ ID NO: 103102 - DNA, 311 bp, Glycine max
  unsure (1)..(311): unsure at all n locations
cagatttagtaatgacccactaacctagaattattataacttaatgccattaacctagggaattaaaaaaaacttaatggctgagtgtaactgaaactgtggcaaccaaaagtcacccccaacagccaacaagtcagccaccatttggtctcccaaaaggctgatgcctatgttgccaattgngcccttattacaacttgaactaaaccaaactaaggctcttttagttgattaacccanaacatatttttggtcagccaactttacaaggattgggccattatttaaaaaaactaaacactctaaaattg

SEQ ID NO: 103103 - DNA, 289 bp, Glycine max
agcttatgacaattaactaactctactcttatgtataatgagaggttctattataatgtgtatttaatataagcttctggaacagtatatgaaaattggatatgtcaaaatctccgacttaagggcaacaaagaaaaaggaaatatattaactggtagtaaatacaagcctagtgcaaaatgagctactgtaattacttatacctattttctaagtgatctttgaagtttaaacaaacacttttgagatggcttttttcaatttattctaaaacatcttactccataat

SEQ ID NO: 103104 - DNA, 317 bp, Glycine max
ttcattaatattaacttcagctgctgtagcttcacttttaacattattggtgggttccagcccaactcttttgcacactgggcaaaagttcctgcacaaaagccactgtcggatgcagtgacggtgatacttgtggatacaagaatgaagcttcccaattaagtttccctcttcaaactcttcctgcatatggaaacaaatttcgtaaaagaatgattaacagaacactaagacgtgaacatgcacgcgatatccataaaaagagagtatatataatgagacaatgacattaataataattaagcagaaaaatacta

SEQ ID NO: 103105 - DNA, 288 bp, Glycine max
  unsure (1)..(288): unsure at all n locations
agcttaacaaacttagaaatcaagtggtcatattattctcaaatatagggggagtaaacgcacattntatctatatacaatngtttgttgcttgcttgaatcttgatttcaggtattgtattgtcatcatcaaaaagggagagattgtagatgcaattgcctttggtgttttgatgatgatcatgatgatatgataaaattgatgcacatgggcttttcaagattaaattcaagacaatacttcaagattacaagtcacaacatcaagatgatcactagtaaattagg

SEQ ID NO: 103106 - DNA, 405 bp, Glycine max
  unsure (1)..(405): unsure at all n locations
actatgagtacttactgacagaggtatactatntccatgcaatatgaagtatgaaacatgggcattatcaatgcactaatcatggatagtaaagattaaagccatctcctcccctctccaaggatacttaaaactctttaaccactctatttccccctctagggatatccaacatggtcattccccctacccctatgtacgtacacaacatacatcatgtcatctcaatatcattatcaacatcaacatcatcctcatcaacatcaacatcatctcatatcaacattatcatcaacggtaatatcatctcatctcaatatcatcatcaacatcatatcatataagcattatcatcaacattaatatgatctcatctcattatcatcatcaacatcaacattatca

SEQ ID NO: 103107 - DNA, 291 bp, Glycine max
  unsure (1)..(291): unsure at all n locations
gtgcaagcttgatgcaacattnggagagattaatgaaacaacgagatgatgcgctccatgagaggttggatcaaatggagaatagagatcataatgaagaagaaaggaggaggagagggaatgatggtgttcctagacaaaaccgaattgatggtattaaactcaacattcctccctttaaaggaaagaatgatccagaggcctacttggagtgggagatgaaaataaaccatgttttctcatgcaacaactatgaggaggaccaaaaggtgaagcttgccgccacggagt

SEQ ID NO: 103108 - DNA, 283 bp, Glycine max
  unsure (1)..(283): unsure at all n locations
agctngcttgtggngcttctatggaggctggatctttgagcttcaatggggtcctttaatggtgattttccaccatggagatgcagcggaagacaaaggaaaagaggtgagaggaggcgccatccattaaggaataagccatggaagaaggagcttcaccaccaagatgagccttggataataagcttggagaggatgcttcaatggagganaagaatgagagagagaaagagagaggggggagcacaaaattgaaggaagaaaaaagagagagaagttgaac

SEQ ID NO: 103109 - DNA, 439 bp, Glycine max
  unsure (1)..(439): unsure at all n locations
cttcctctagcttnccaaggaagctaccttccttgattctcaagaaagcttcccatgtgctaggctataaatagaaacatgtgtaacacttgtcataactttgatgaatgagaaacctgtgaggcacacttcanagttcaacttctctccctattctccttcaatttccacaccacacacactctctttctccctctcattctcttcctaaatggaagcttcctctctaagtttcttgtccaaggcactctcttggtggtgaagcttttccttccatggcttattatctagtggatggcacctcctctcacctcttttcctttatcttccgctgcaactccatgactaanaatgatcattgaaggaccttatngaagctcanagatccagcctccatagaagcttctcaagcangcttncataatctatcccttaataa

SEQ ID NO: 103110 - DNA, 284 bp, Glycine max
  unsure (1)..(284): unsure at all n locations
agcttcccaagtttttaagttcttcctcanaactgtcctaagcaaggttcccaaagtcctattaacagcttccgtttgcccatcggtttgtgggtgacaagtggttgaaaataacaatttagtgcccaacttgctccacaaagtcctccaaaaatggcttaggaacttagagtccctatcactaacaatgctccttggcaaaccatggagtctcacaatctccttgaaaaacaaatcagccacatgggaagcatcatcaacttttttacatggaataaaatgag

SEQ ID NO: 103111 - DNA, 403 bp, Glycine max
  unsure (1)..(403): unsure at all n locations
tactcagcttcttataagctgaacgcatttatctataaacacaagttgatgtttattcagaanattagagtttatctcttttatctttgtgagagtgattctcctaaattcttgagtgattcaagaacactctggctgtatcaaaggactttcacaacctttgtgtgttgccctcgctggaaagagtgattctttccttcctttcatcttcacccttgttctttcaaaccacaattccagaaaatccacctctgcccagaattatctagtggccataactcccattntacgcactcaaattaagtgattcttgaggctaaatngaatttcaaaacgagacctttcacctcgttttggaatcacctcatttggatccctgtagcttcagttattggcatttcta

SEQ ID NO: 103112 - DNA, 279 bp, Glycine max
  unsure (1)..(279): unsure at all n locations
tgtttcaccttctcgctaatccaatatgctggcttagcgagcatccgctaagtgcaacactcctgggcttagcgcgaggaagaatctanaagaagatgagttggacaggttcgctaagcgcaccgcttcatctctctaagggcaccgcttcaagtcatccactaagcgagaaaggcgcgcttagccaaaaatcactcacgtgcgctaagcggtccatacatgcgctaagcgcacgagcacgaacaaggctacctatttaagccttaaatcagattttgt

SEQ ID NO: 103113 - DNA, 293 bp, Glycine max
gctaagagaatactaatcaaataacctaagatagaagtataaacacttagtttatactggttcactcgaacatagctatgtccaattctccttcacaaactagtgaaggattccacaaatcaaaacttgactacaaataagtattttgtcttgccactcctggttacaacagtattatctaagtcattactgacacacccttagactcccattgaacctaagacaccaaagtattgtttaacactaagtcattcctagttttcataaacaaataatgtttggatgaatacata

SEQ ID NO: 103114 - DNA, 321 bp, Glycine max
  unsure (1)..(321): unsure at all n locations
gcgatcctctgagtcacctgcngcattgcaagcttgtcagctttgcttgatgaaagttgaaatttatacatctcttaccatttaatgtttcattgctagttgcaagaatatgaatttttaagttatgattccattaatgtgatatctgctaaataatcatagattccctggtgattattaagttaccacaacttttgatttgcctgtaaaattttgacatctcttatcttttaatgtttcctggctagttgctagaattagggttgggttccaatcccattgatgttgtatttgtatttgtatttctagccattaggatga

SEQ ID NO: 103115 - DNA, 255 bp, Glycine max
  unsure (1)..(255): unsure at all n locations
agaaaataagatcacataacttagagaatggatcagaaaacaaagaattacatacttgaattttacttctatccctcaccagatggaaatntagctcanataaaaccttcaaagatgaatcataatggaagaaatgagacaaagattaagagagaatttcgagattttatttatgtaaaataaaaaaatgaactaaaattcctttacaatgatgttacaagctcttatataagagctgggactggtattattttt

SEQ ID NO: 103116 - DNA, 291 bp, Glycine max
  unsure (1)..(291): unsure at all n locations
agctagttgaaattgccatgtntggatgagtttatcatactcattctgttatagggctcttatgatgatgcttgtgatgttcatgtgctgaaattgcttatggaaaactgttagaggtgaagggtagaattaacctatggttagaaagtgagaatgtggtgttgcgagtggaaaaacactgaatttttgagggctggaaggccaaatctggattctgtagtatttagaggttagaatgagttaatcctagcttcaaatgccatttacgacttatgagaaaggttaggctgt

SEQ ID NO: 103117 - DNA, 217 bp, Glycine max
  unsure (1)..(217): unsure at all n locations
atccttcattttctcttcttttttgttgaaaggaagcttcccagttatggaaagctaaatcctccgttggttcttccttgtangtacttgatgtaaatacttgtatatctatttaatgatgttttgtgtgttcactattgtcgcaacctacctttcggcgggatggcgacgcgtgactcgcgggtgcgtcttccaagaaaggaatacgcgcggagtc

SEQ ID NO: 103118 - DNA, 312 bp, Glycine max
  unsure (1)..(312): unsure at all n locations
gatccttacagncacccgccgcatgcaagctcgcaacacttatagccaattttctattcttaacaacatgccttgatctggtattctgagaaatagttctgaacaattatccctctcgaatcaagcaagcgcctagtcaataggccatgatttcagtcatcttgaaaaagagaaagatagggtaaccagatgagacaatcattatgctgtttataaacactcaagaaaaagtggctttgaaaactctatgctgtgtaaaaaaaacactcagaagacctagagtgcaactaccacttagaatgctagatcaca

SEQ ID NO: 103119 - DNA, 399 bp, Glycine max
  unsure (1)..(399): unsure at all n locations
ccgtagagacgatgtttctttttcttctacacgcgngagccctcttatgggaatgaacatgtgtggagatccttacgaaatcaaattgagatttattttgggatgtttattgtattgtaattcttcacgtgtgattataattatgagattgtaatattgagatcatgaaattgtattgttattcttcacgtgtgattataattatgatattgtaatattgagatcatgaaattgcgattaacattatgtgtaagtgataaattgaatatgtgatgaattgtgagataacatgttactttgagatcataacatttgtattgggatcgagtataagtttaaagttgaacatgcatcgattcgtggatgtatgagtctaagtgtatcaattgtgaatgtatg

SEQ ID NO: 103120 - DNA, 309 bp, Glycine max
  unsure (1)..(309): unsure at all n locations
atcctcagagtcacctgcngcagcaagctnaaggagagtttcttttcttttgatgatggtggaaaatgtagagactgtttaagaaaaggttattggtgtgtggagtgactatgttgcccttggttgttggtgatcaactttcttttcatttcattnttattttttaaatccggatctacttgggatttcttatttctaattcagctgattcaaaaagttgagtcagtgttacaaacatttgttgtgttcacacgtgtgaaaattatttatttaacaaaagaactatgtttaattctcagtacatataaa

SEQ ID NO: 103121 - DNA, 433 bp, Glycine max
  unsure (1)..(433): unsure at all n locations
tggctcaatttcagattacatagtagatatctagaatcaagtgactactacggntgttgaaaacaaggaaatgactattgcggctaccaaaatgggagaaatgactactgcagctgtcaaaatcaaggaagcagctacaacgaccactaaaatcaaagatgatgtaactccgtggaacttgtaggccttggatcttcttcatcaatggattcctttgcttcttgtggtatgaatgcagcaaaatagagaaggagaaagatgaatggagatgccacttcaagtagaagatgagtctagaagaggcttaccaccataggaagccatggataagagctttgaggtagaagaagatgaatgaagggagaggaagagaagaccatgaatttagtgcctctaaagaagtctgaactttgaagttaattctcanatgatc

SEQ ID NO: 103122 - DNA, 281 bp, Glycine max
agctatgctgaaatattacaatataccttctcaacctcaacagcaaaatcaaccacagcagaacaattatgacctctccagcaacagatataaccctggatggaggaatcaccctaacctcagatggtccagccctcagcaacaacaacagcaacctgctccttcgttccaaaatgctgctggcccaagcagaccatacattcctccaccaatccaacaacagcaacaaccctagaaacaaccaacagttgaggcccctccacaaccttccctcgaataac

SEQ ID NO: 103123 - DNA, 317 bp, Glycine max
tagatgctcatagcctctacaagtcctaggatgatctcaaagcatatctggcacaccctagccatgacagcatcatcaagggaaacatgctccccatcatcaacgatctcactgacctcattacattggcaagttttggtgttcatgtcaacttcttgaaattgaaggaggacacggataaggatgaggtgttgggtgtggccaaaggaattcccaagagttctaagcatattagtgatcaagttcagcttttggggagaatttctcactggggagagccaagggtttcttgattgcttcacttgtgggttttttgg

SEQ ID NO: 103124 - DNA, 286 bp, Glycine max
  unsure (1)..(286): unsure at all n locations
agctngatctttaattaatcttgaagcaatgcttgtttgttgaagcaaccttgtattaatcttgaagcaatgcttaacctttgaatgtttgttgaagtaatcctgaaagcaaccttgtttgattattctttggcatcaccaaaatcatgtattcatacattcacacttggtagggtctatcttcaggtttccaattcttctacacattgacaggggcatcaaattgatgcttgcccctgagtcagtgagagccttcccttctaactcattccctatggcgcaaggg

SEQ ID NO: 103125 - DNA, 282 bp, Glycine max
gatctaattctgtgaaggactcattttcgcaatgttggctatagagttggtgggcctcacaagaaatattgatggcattgaggaatgactctatttcctcatgaagctcatcaactactagatcattgaatttaaaagcctcaatgatttcttgttgaagctttcctttgtagtatggatttcgaaagagtgtccttcaaggttctgatcaaaaacaagtttttcgaaaggagccacaacttctttgaaatgggtaaaaggcatgttgttactcgatttgga

SEQ ID NO: 103126 - DNA, 298 bp, Glycine max
acctgaggcatgcaagctagaagatcgagccatgcagttcttgcgttgcttgaatgagcaatatgccagcattcgatctcacgtgctcctcatggaccccatacctgctatatcaaaaatcttctcgtatgtggcacaacaagaacgacaactgctaggtaactctacccttaaccttaattattgaaattctgataccaggggacagatgtcgtacaggatgtcacgacatcacgcttcagaacatgcagtttatgtgtgtctgtatgaacagattaaacaagtaaataacacaaga

SEQ ID NO: 103127 - DNA, 409 bp, Glycine max
  unsure (1)..(409): unsure at all n locations
tgtgtctcacctcagagtgtttggatctatttgttataaacatgtacctgaccaactagatcgtnctctgtgcccccccacacaaattacggtatattgtctaccaattacgataagagattgatttgtccttaagggtaattattattcaagctaattaacatatcatatatgatgatttatgattgatcgacagtgtaaaattactttggtaaatgttcaatcatatggaaacaatttcataaaacctataacacactctgtattgtgtcacaagcttaattttattctaataattaatgtagaatttatttaaaaaaaatgctcgcataacttattcatgcaattcatacaacctaccatcatatgaataacatccctaaatacttatactattagggatatttcc

SEQ ID NO: 103128 - DNA, 283 bp, Glycine max
  unsure (1)..(283): unsure at all n locations
agcttagtgagtaaaatttatctctataaaatatgaataattaaggaaatcaaagctaattaaggaaagctaattgaggaaagaatgactaattgaggaaattagagctaattaaggaaaacaaactaattgaggaaagaatggttatttgaggaaaatagggctaattaaggaaaaaagattaattaacgaanacaagttaattaaggaaagaagaataattgagaaaaaacatgattaattaaggaactaaagacagacttagtgcaagaagcccactaat

SEQ ID NO: 103129 - DNA, 395 bp, Glycine max
  unsure (1)..(395): unsure at all n locations
tctctaagctgtagtatttatggataatttctgtccatagctttgatgtcttagaggtacttcctcgttgacatcttttgtcttgaatggaatngccatgacaagtntattggtactgtctttgatatttggtagttgatattgcgttgtgggaggtaattccgattggattaactcaccatccttcacttgccagtttgttatgacatttgttgttggatcacctatgatgtcttgtttccaagggtaatctatatcctttctgatggcataaacatganaccaatcaaagaanaggacattaattttgactctttcgacaaattcgtagaacttgtcttggaccttgttttctgttgtacccttgtaatgttggaaaaaccatctcctttgag

SEQ ID NO: 103130 - DNA, 274 bp, Glycine max
  unsure (1)..(274): unsure at all n locations
agctnttatgcagacaatataattcataaattagacaatntgcttggaaaccttgttgctgcccttaaagtgcgatttgcagaagatccacaaattaatcgagtcttaaaagctataggtcaacaggtatgaatttacaattcaacttattcaaagatttaactatgatatgatactttacaaagaagaaacattattttaatttaggtacctacaaatggttctactagtaaaaatcatcaaaccacaaacgatcccaactagaggtgagttg

SEQ ID NO: 103131 - DNA, 344 bp, Glycine max
  unsure (1)..(344): unsure at all n locations
atgagggacccttgttgaaataacatttttgtctcgtgggagacgtgagctcgntgaagtggcaactggngatggggtttatctgtgattgtggatgggagagtgacttgcccatcgccgattccacctataccatatatgatgggtccccaaatcctacagcttgagtgaaaagtgtggaaagtcgtcttctactttattcgtaccacaagtggacctggagatatgtgcggggtagaaaccttggacgtaggtgggtgcttttccaaaccaacttgacaatccaccaaccggcatatcagcgtagacctggcgtcctaacagcgactctgcagcaccgataa

SEQ ID NO: 103132 - DNA, 258 bp, Glycine max
  unsure (1)..(258): unsure at all n locations
gagttcataaaantatgngaagatgaaggcatagcaagggataagactatggttggaacccttcaatagaatggattgactaaaaggttcaacaaaactatccttgaaagagctagagcaatgctatttgaagtatgcctacctaagagctttaagtgagaggcaatagtggcaacaacatacctgataaacatatgtccctctagagctttgggtcttaaagctttaatagaagtttggtcagatcaccctacaaac

SEQ ID NO: 103133 - DNA, 240 bp, Glycine max
  unsure (1)..(240): unsure at all n locations
caacataaatatatatgactataatggnttatttcaatcagatacattttgctctaaggacttttccaccattatcaaatattatactcttaatttctaaatgtaagtttcttttatatatgggtgatattttaaaactaattttcttaaaaacttaattatataacaaaattgtgtcataccattcattntatcatactaatactttttcaaataaatttttcatatatatatatatat

SEQ ID NO: 103134 - DNA, 209 bp, Glycine max
gaaaggcgggagcacgacattgaatgaagaaaagagggagagaagttgaacttcgaagtgtgtttcacaaaactctcattcatgagagctacaaagagtgttacacatgcctctatttatagccctaggaagttccttaacaaacttcctagagacgcttctctgagaaatgtccctgacaagcgagagcttaggtacacacacccctc

SEQ ID NO: 103135 - DNA, 292 bp, Glycine max
atcgagatgcgctgatcggaacaatatggacattttcacaatgtttatctaaaccaataaggacaaagaattatacaaataacaaacataagtgatgtatataagtacaaaaaaattaacacatactacaatacaactctatttcacttgtgcttatgtttataataaatttacaattactgaaaactatctactaatttaatctaaaaattactgtttaaaggtagtttcaatgtcaaataccaaagaatggaatacatgtgagacacaaacagaatttgctttccttaat

SEQ ID NO: 103136 - DNA, 384 bp, Glycine max
  unsure (1)..(384): unsure at all n locations
aacacatatacttccatttctatattatatgagctaccaaataatccctctagttgtatttattcaattgaatggctcatatttgtcaaagtttgtcaatcatgtgcaaatgatagcctgcccttgtgactccttaacaaataggggaaatggcactagtaattaaagtggctagtaattaataccatttcttcattattattgcctgatgataaaaattcttttgcactgactgcaccttcacatgactgtgcatccaaggcaaagcaccttcagccccattttttttctcatatttgtaaatngaggacttctggaaaagaataagccaactgtgcctcattcactaggccacagctgtatgcattacttttaataataaat

SEQ ID NO: 103137 - DNA, 293 bp, Glycine max
gcgcgcgtgcatgctagtagaggctccgcgctttctctggctttattagtgacacagatgatcataagtacgtctaccactcgacatctggacctacttgagactatataatttccgatacttgggtgactcggacataacaacggctggcaagtgactgtacatgaatctcaaattgatctaaggagaatgaagagacctgttcttgatggtgatgtggagagaccactcttcaatctccgcgagaagtgggtgtgagcataaccaacttttgcctgaactttggagcatga

SEQ ID NO: 103138 - DNA, 406 bp, Glycine max
  unsure (1)..(406): unsure at all n locations
gtgtgtctcacctcagagtgtttggatctatttgttataaacatgtacctgaccaactagatcgtnctctgtgcnnctcaacattcaataaggtatattntactatacatatctaaaatgaatgatttgactataaatataatatcaagctataccaaatattaattattaaataaaattttgtattaatatacaactattatatgcttcccaaactttatatattaaaatctttcattatatattggntatcacacaaattattcaaacttcatcaagtataattctctctgtataaataagtatcattaattcgtgaaattttaaaatttttcttgtaaattgggttagactacttaatatcttttaaaataattaattggagttttaacacacatatattaat

SEQ ID NO: 103139 - DNA, 242 bp, Glycine max
acattcataatcattttgttccaataatctttgcacgcatccatctaattaataagacctataccatttcacttcaaaaggaaactaattaagtggccggctaatttacttgacagagtctctctctctctctctcaatccttttggtggagtgcttgtagatgacatcgatgtattatttgtttttcgtatacatggtacattttcatttattgatgagctgcaaggccataacgcgtgca

SEQ ID NO: 103140 - DNA, 415 bp, Glycine max
  unsure (1)..(415): unsure at all n locations
gatgancactcagtagtggagagttttggtgaaggagggaagacaaacatcttgtctcgggtttatccacagttagcagtggctaatcaaggtcacttgtttgtgttcaacaacggaactgaacccatctcggtggaaaacctcaaagcattggagcatgaagccggctgatataaaataatcagccagaaatcaatagtaggcagaaagtaatatggcttattactcggtgaattagtattcatcccaccactcttatttcaatagattaagggttctagtgagttaggcttttattttatttcaatagattaagggtttcaaaccatgctaccactttacgatttacgatatagtggataaatnggctntagagtctgattctgaatattaaaaaattgatatcatgtgttat

SEQ ID NO: 103141 - DNA, 251 bp, Glycine max
  unsure (1)..(251): unsure at all n locations
cactgatgntagattaaggcgcatcacatatagagacgcacgataatgaacaacggcagctctctagaaattcaaatggtcatcacttttcacactgaggtctgattcgggcttataatatattgatatgctcgaaattaaagatcggaagctctcgagatattcaaatggccataacttttcacacggatgtccgattcgggcgcataatatgtngagaggctcgaaattgaacaacggaagctctagag

SEQ ID NO: 103142 - DNA, 308 bp, Glycine max
  unsure (1)..(308): unsure at all n locations
ggaatcgcacatccgtgtgaaaagttatgaccatttgaatttctcaagagcttccgntggtcaatttcgatcctctcgacatattatgcacccgaatcggacatctgngtgaaaagtcatgatcatttgaatttctcgagagcttcgaggtttaattcgagcgtatcgatatattataaccctgaatcggacctcagtctgaaaggtatgaccatttgaattgacgagagctttccgtgttcaatgtcgaatatcactgtatgtgatgcgcctaaattggacattcgacgtaaatgttatgaccattt

SEQ ID NO: 103143 - DNA, 291 bp, Glycine max
  unsure (1)..(291): unsure at all n locations
catgcaagcttctagtagttaggcttctgttccgggtgtattgtcntaatccttttgaagtaacctttgcagggttttctgaatgtggcggnggcgttgggggtgttgccatcacccagcggaaaataacaaaattgagttacaacaaattcagttatgtaatagggtgcatgaagttgaaaaaataacttataaatttatgcttgacaaataaaacacagttacataatacgtatatggttatgcttacacagttacgtaggaatgttctcccataaaccctcatcatga

SEQ ID NO: 103144 - DNA, 323 bp, Glycine max
  unsure (1)..(323): unsure at all n locations
gagttgctcagcctgtgttgaggtgtggataacatcctgcaacatggtggtggtgaatcctcttttgcacagaattaaggaggcaataatgaaggtgaaacctcaaatatatataaaacaaaatctatgtacacacatacacacacttagaaagaagtggaatttggtgtggtgatcacaaacatatgtgtatatgtatgttcctcgacttgaaggtgactaattaaaaacaatattgcatgcttaattagaaaattaagccttaaagggattaattnttctaaaaaagaaaacaagaaagtgacatgaaacgaaattaaagt

SEQ ID NO: 103145 - DNA, 282 bp, Glycine max
  unsure (1)..(282): unsure at all n locations
gctagcaacagtcccacaacttcaatttttctctatccaagtgtcatgagntctatattaccaagtntactagctgttaatgctgcatcatagttttgctatgtcatctacctttggtctcatctctttaccttacaattcaatcaattctatcattaccctttttcaatataccaaattagcaacatgcaaacatatctaatccaggaaattccaccactaatagtcagcctataatccataaccaatgaaatgcgtcatctccgatttattccatcttct

SEQ ID NO: 103146 - DNA, 284 bp, Glycine max
  unsure (1)..(284): unsure at all n locations
agctntatagctcacctatcagcttacatagattataataagatacaaacaactactatggccgtcgaaaacaaagaagcgactattacggctattaaaatgaagagaaagatggatattgaagccatcaaagaaaagaagggaaaatggatattgatgctatcgaagaaaagaagaaaaagatggatgttgatgccattgaagaaaagaagaaaaagatggatgttgatgccattgaagaaacaaaaaggaaaagatggatactaaagccatcgaagaaaaaa

SEQ ID NO: 103147 - DNA, 322 bp, Glycine max
  unsure (1)..(322): unsure at all n locations
atatatccgcanacgggccccacttctcttggctcgccatatcccttgccttgccttccaagtatttccgtggcaggcctactacgccgctgcgagtttgcttcatgcgatccaactcttttgccgaatcctcaaccacagctacaatcttgctcaaggagggaagaaaaccggagaaaagatacggntttcttcccccaagagggcatcctaggatttcctcaaactcttcaatagttggtaccatgtggaagtccccaaacgtgaagcacctcaacggatggtcatagtattgggcgagggatacgacagctcccgtaat

SEQ ID NO: 103148 - DNA, 283 bp, Glycine max
  unsure (1)..(283): unsure at all n locations
ctgcagcttcattgttaatttgagtggtttatatattatgcgcctgaatcggacctccgagtgaaaagttatgaccatttgaatttctcgagagctacctttgttcaatttcgggcgtctcgatatattatgcgcctgaatcggacctccgagtganaagttatgaccattcgaatttctcgagagcttccgatgttcaatttcgagcgtctngatatactatgcgactgaatctaaccttcgtgcgaaaagttatgaccatttgaatttctcaagagcttcc

SEQ ID NO: 103149 - DNA, 438 bp, Glycine max
cctcatcgtctctcacagtctttagatttgggagcctatccatccttggttcggactctcagccacttatgatagccgtcgatgatcccattactggcttccctaagctctctgtcctttcttcacgccgcatcccatgccttgcgaactccttggagtaccctcgcgttgtggtcactgaaaccccgtgcgatgaaaggcgtgatgctttcgtctaatggcgctcctctcatggggtagccaagctgtcttatggcgagaacgggattataattaatacaaccccttgttcccatcaagggaacatttggacatccttcgcatgaagatagaatcttgattcttccttccttctagcgagggaaccaattaacagaacgccccccatgctagccaagagttggtcccaattcggcttttctttttaacgcacgagcg

SEQ ID NO: 103150 - DNA, 285 bp, Glycine max
  unsure (1)..(285): unsure at all n locations
gcatgcaagctagagactagatattcttttgaatactttatgaaacagagagnggtctaagctacagcgataaaaaaaatgtcatatactaacacaaaaataatgttaagcattaggattaggattgcctctatattatgtaacaacatgatatacatacagngtaaatctattttctatactaatggaatagtccattaacatgaaatgatgcatgatgctcttaacatatacctacattctactttgttggaattgaaagtaattccaataattgaaaaaaaa

SEQ ID NO: 103151 - DNA, 410 bp, Glycine max
  unsure (1)..(410): unsure at all n locations
tactcacacncccctcataacaaagctcacctgcctgagaagctcctttagatgaatcctaaagaaactagagattagctactcatacctctctaattgctaagctcacctccttgagtttagcttcacatacctttcaatacgtaaagctcatgagaaccctaaggtcttcccttggatctctagcccaatctacttggagtcttctacccaatgcccttgcgggataggattgcatcagctaatccataattaatcaaaggtataaagatcactagacataaaactttattatttgaaaataaatcatattatgcatctcaagatcaagatataatacaatgatgaattaacatctcatatataatttcataatcgaaacatcatattatgcagttgattgcatatat

SEQ ID NO: 103152 - DNA, 246 bp, Glycine max
tgattctactaaatattgattgccattgtttgccgagaaaacaattgttgagggcacagtgtgggggcggaacggacaaggctttaaaaaacctgtggacatgaacaaacattatatcatgcgctgaccgtccaaacgaacaacgaagcattgataattggacactaactatattaatgacctgaacaaatgatttcaaacactgaccgaacatatgatgcgggggcaaaagttagtggggtgact

SEQ ID NO: 103153 - DNA, 377 bp, Glycine max
  unsure (1)..(377): unsure at all n locations
tataacattattaattttttactgaattctaaggcctataacataacaagtgctataatttacaaagaaaatcatttaataataataaaattcatttcaaagtgttaatgaattttagagaaanatatatctttatcctttaactcttcattanacgggtttgatccttatatttttctttttaaaaaatgctacaaacacactcttttggatacatattctnttaatgatttactatcttaattttataggtttcaataaaatttaatcaattaaaaaatatatttaaaggaatacattcttaggactcatcatctctaaatgacctaaatatattgtttgccatagcatatttttatatttgaatcttatccttc

SEQ ID NO: 103154 - DNA, 293 bp, Glycine max
  unsure (1)..(293): unsure at all n locations
ctaaagtatgcccgagtcattcatccctatgagatgttgttgaangaatggcgaacagaatngccattccttggattatagggttgaaccaagctcatgcttttacaaaaaggttcatcaagtcaagttgaaatatagaagtaaccgtcttgcaaaattggggcaaaagatgaatcgagtcacatcactgcttcgtctactgccaaacatatttaagaattgttatgtccttgttacttccagtttcaccttgacaaagatgtcatggaccatgttgaaaatctaaattgatt

SEQ ID NO: 103155 - DNA, 264 bp, Glycine max
  unsure (1)..(264): unsure at all n locations
ttagatatggattattaatatacaatttaagtatttttgccacaagaaagtgtcacattgtacttactaggggtggtctttgtacgaaaaagcatgccctaataacaatgtagcagagtatgagaacaaagccttttatgtagtgagaagttcaatcctacaaagatatacatggaaaagaaatagtgaatcaagatatataccaaatctaattgtgatgtntcaaccaatgaaatgatggtatacaaatatacatgttatatg

SEQ ID NO: 103156 - DNA, 340 bp, Glycine max
atgatgacatatagcccacgagaatgagttcaagattgattctcgaacacttctataatcaagaggaaatgtgatttggagaatccagaatcccgaaaagactcaatccagataagtactaagaaggttttcaaagcatgaggagcacatgatttttttcacaaaaccttttaccatagaagttttactctctggtgatcgattaccagtttattggtatcgattaccagtagcaaagattgttttcataaagctttcaactgaatctacaatgttccaattgatttcacaatggtgtaatcgattacaatgatttggtaatcgattaccaatgtgtttg

SEQ ID NO: 103157 - DNA, 312 bp, Glycine max
atctctgagcacccgcggctgcagcttgtaaactcgatattttgcctacttagtcattgttgactctacataaatcaaatgaatctgttgtttgtttgtacaatggctaggttttaatcttcttacagacgaatatacaatcttattagcctttatataaatcaaacacatttgttatttgtgtgcacaatgacgggctcttaattgtcttacaaacgaatatacaatcttataccagagtctgaaattacatttcttgattgcagacatattgattaaatctatttataactaagacatagtagaagacat

SEQ ID NO: 103158 - DNA, 395 bp, Glycine max
  unsure (1)..(395): unsure at all n locations
tactcagctggtctctcggtgatgatcataccacattctgaanatcagtggatattatactctggctgttcctttcatatgtgtcctaacaaaacttggtttgacacctatgaagagaaatcgggtggaaatttcttcatgggaaatgatgtcatatgcaagacaattggaattggcacagtgaaaatcaagatgcatgatggaattatccaaacactcactgatgttaggcatgttctanagctgaagaagaacctaatctctataggtattatggatgaaaacgggttcaaatgcagcactaacaatggggtcatgaaaattcataaaggctctacaatggtgatgaagggtataaagagggataatctctatatacttcatggtacaacatg

SEQ ID NO: 103159 - DNA, 279 bp, Glycine max
  unsure (1)..(279): unsure at all n locations
agctttagattgacaggaaactggtctaactgacagtgaggacttcagnttatggtgttacctttgttggggcacgacagctaatcacgagaagattagaggagaaaggtcttattactgatgaaaaacttttatttgctgcagcttgctatgctgctaaagtaagtttaatttcagccatgttataggaacctatattagctgttagaaactgcaatggctgacttgatgtgtatttttcatcattgcatcatcaggatattattacctgctggaata

SEQ ID NO: 103160 - DNA, 273 bp, Glycine max
  unsure (1)..(273): unsure at all n locations
atctatttgttataaacatgtacctgaccaactagatacgtctctgtgcncnnccacacaaaataagggtatattgtctactcaattaacgataagaatttgatnttgttctaatgggntagtccaattcctcatctcattttgtggtgacctgtggcatttaaacgaatattttcttctcttattgacggacatacactcactacatgaattctaattctacttgcttaagagagaacattgactataataatgcgttaacgtaataatata

SEQ ID NO: 103161 - DNA, 310 bp, Glycine max
  unsure (1)..(310): unsure at all n locations
atccttagagtcacccgcggctgcaagctggtcttcgaanaagcggtgtctattttactcctcgtctntcactggaacaacaacacagcacgtatgtgataacacacgtcgaacatgaatgaacacagtggtgcgaaagaaaaaatacctaattgaggttagaccgacaaaacgacgacgtcggtttcgcgaacgacctgcgagagcgagggaaaaggatataaacacggcgtcgcgtttgtttgtgtttcancgagaaataataatgagagagagagaatctgaatacctctctgtttgaagggagaac

SEQ ID NO: 103162 - DNA, 299 bp, Glycine max
cttgtagcatgaatggtcttttggtgtgtggcaccttctccagtatggtacaataggaggcaagtgacaattatccctttaaaaaggtacatgtcatacaagattgataggtcgcgaataaatcaataatagcttatgaacagaaattatatctttatgggacaatgtattcattctcaaagtgatctgcatcgacaaattcaattgcaataaaatatgacgctatggggggacgaattctatgtggaagacaatcctactatggaggctagataagcggacccattcaacattatttt

SEQ ID NO: 103163 - DNA, 285 bp, Glycine max
  unsure (1)..(285): unsure at all n locations
agcttctcccncaattttctataaatagggggtgatttgaagtgaanaagggttcagccccttaggcacttctctctctttcgaatntgcttggaaaaattgtttccgtgaagaaaatctaagccgaggcgcttccgaaacgtttccgtaacgtttccgtaaggaatttcgcgaaggtttcgaccgttcttcgacgttcttcattcgttcttcatcgttcttcgatcttcaacgggtaagtacctcgaaccaagcttctcgattcattctatgtacccgtggtgg

SEQ ID NO: 103164 - DNA, 318 bp, Glycine max
  unsure (1)..(318): unsure at all n locations
gctaggactttgcttactgttttttttcttcggagacgctcggtattccaccatctcgctatgtccggaaataacttgatgggctgctatacttgtgagtgattggttggatcgaggacattatgattaaatagcgctctaattttgctaaaaccttatatcccttaccatacggtattttggctttctgaatgcagccaaccgggaagagaaattcataaggtagactttatacatgaacttacgcntcaaagataatcctaatgcggaccaaaggttggagcaccatccacaattatatatcactatcttatttca

SEQ ID NO: 103165 - DNA, 286 bp, Glycine max
agcttatggtaaaatctgcgacctagccatgatagatgtctctacagaggccattgcctccctcgcccagtattatgaccagccgttgaggtgcttcacctttgggacttccagctatcacccatggtggaagaatttgaacagatcctatgatgccctctaggggggaggaaaccatacctcttcacagggttctatccctcattaactagaatttccaagacagtccaaatctcggcgcaggaattagactacatgaagcaagtcgaaaatggggtggtcggga

SEQ ID NO: 103166 - DNA, 319 bp, Glycine max
  unsure (1)..(319): unsure at all n locations
ctgcacatccgacnaatctaaacggagacagcctgaatgtcttgactacacttgatgaaatgaatatctctatggttcttgttggcaattacttcacgatgtgcgatgaactttctcaaatcatgctcaataccagcatagttagcttaataataaatgtcgtgccttggaattagaaaagaatgcaactcaaatgaaaaatcatgagttacgcacaaatgtggatgaacttcacaaagatcatgaatttactttattccaacttacatagggctctccattagctgttgagaaattcaaatttggagttcaatcggaa

SEQ ID NO: 103167 - DNA, 281 bp, Glycine max
  unsure (1)..(281): unsure at all n locations
agcttcttctntgcattctctctctccaaaatttcacccattctgtatctgcgcttccctttcgtattttctacttccaagatataaccattcaccatccaagtaagttccttgttgtttattctcttttacttgtctaaactttagggtagaagactttacttggagttttagattattagggttctaatgttttgttagaattagtttaagaataggattatatatacgcgtatatcgtattgagtatgttgcacacattgcatgtctgatatgccttt

SEQ ID NO: 103168 - DNA, 285 bp, Glycine max
  unsure (1)..(285): unsure at all n locations
agcttctntgaataaagttctccagccttacttttatnacaaattgcatagtgttctaggtattcagccaaatattgaaaatgattctaatgccacatatcacattagaaaagagagtaatgaagcaagaattcaaggatagagaagttataactattacaccatttcaaccttgcaacaaagtccttgaatttattatctaactacctttgtcttccctcagaaaccaattgtaccagatacaaactcttctcatcgtgcactacatcctacaacctgcattcc

SEQ ID NO: 103169 - DNA, 438 bp, Glycine max
  unsure (1)..(438): unsure at all n locations
tgcactgagagacctcttggaagagaatcgatttgatgacgtacgagatgtgaaaaagaatacggaatggaacctcacaatgtatacggtgaaagattgagtggactatatagataaccatcgacctgctctatattgtgggcagggtaccaacagaatcgatgcagtgtttattgaacataattctggattctaaactnggccaaagcatgaagagggttcttcttatgctgagttagtcctggacaccatttagagtcaatgtaatgttttggcattcctgatggcaatgtccattcatatgaatacacaagatcatccagaatataatcccatgaagccattgccatgtgcatgccaaggcatattctacgagcagcaccaaatggagtcacctagaatcttgcctcgaaacttatagaatatctagaacctttc

SEQ ID NO: 103170 - DNA, 281 bp, Glycine max
  unsure (1)..(281): unsure at all n locations
agcttagccaaattcatatcgaatngaagttttcttatctcaacattggccagcttagcggaacaaatcagcctcagatgcaagggttgggcgctaagcgcttgagactcacaacttagcgcattaacagagttgcgcttagcgcgaggcttgtgcttaaggaaaggactatttttcagaaaaaagttttctgagttatttttcagtcctttttccaagaaattgaaacccttatgttaaacattcaaagattggttgatatactcctatgtacagattat

SEQ ID NO: 103171 - DNA, 432 bp, Glycine max
  unsure (1)..(432): unsure at all n locations
tactcagctgtcgtctacanacagcanaatagaatgtttatacngatttttcctcgggtgtttccgctcatcagcgtgactcatatgtgagtatgacagatcttttgagcgcggaagatgacgtanatctccgcgtgtcaacgggcttgtcggccgcgattgacgacgtgcgcagaacactacgttagtctttgcgtgctatcatgcttttcgtcttacagacagcagaaaagaatgtttatacggataaccactcgggtatttcagcccgtcagcgtgactcatatgtaagtatgacagatcttgtgggcgcggaagatgttgtaaatctccgcgtgatcacgggcttggtcgccacgactgatgaagggcgtagaagacgacgttagtctcttcgtgctgataggctttctgcttacagacaggcataaa

SEQ ID NO: 103172 - DNA, 378 bp, Glycine max
  unsure (1)..(378): unsure at all n locations
agctttcccacaagtcctaaataacatnttaaactatgattaaatctctttaacctccaattaccactaaatccagatttagcttttcaaaccctcagagcatcacacttttccactcatatcactacattcacaccttttaaccctaggttaactctacccttcatctctatcagttttctatcagaaatttcaacacacaaacatcacaaaacatcatcataaaaccctaaaactgaatgggtaagcttgactcacaccaaacatgacaaggttagcatgtnttcaacaaatttcttcaaaaataactaccataaagcataaacctagtaaaactacccatcatatctcccacaaccccatacccacgaaaatcat

SEQ ID NO: 103173 - DNA, 457 bp, Glycine max
  unsure (1)..(457): unsure at all n locations
gcttatggtgcanagaagaaattgatgaagttcttatagtttcaaggcttgtaaaggatggatcaaatgaatgtgaaagtattgaattgattgaattaaaatgcaaacaaaaccttacttttatagactcttcatgtctggtcaagaagaccatttagaagagttataacttttagaaaaacttaaaaccacattgaaaaagtcaataaccttttgaagagttacatcttttgatttattcacaaacagtcactggtaatcgtttaccaaattagtgtaatcgattacacaaagctcttgtgtgaaaggatgtgactcttcacattcgaatttgaatttcaacgttcaaggcactggtaataattaccacaatatgaatcgttacagcttttgatatattggacgtcganattcatttgaaacttttccaacaatttctactgtatcgatacacatc

SEQ ID NO: 103174 - DNA, 422 bp, Glycine max
  unsure (1)..(422): unsure at all n locations
tctgacattcaccacatattctggcttcnttctatttcagaatgggaatgcctctaacagcacctntgtcaatgattttcttcatgcctcttaagtgcagatgtccacaattttgatgccatattctgacttcatcttctttggaggatagacatgtggaggagtaactggtttcttgaggtggtccataggtagcagtgcccttgatctgcctgccttcatagaacttcactcttctcatttgcaccaagcattctgactttgtgaagttacattgaatccttatcacacagctgactgatgctgatcaagnttgcagtcagtcccttcaccagcagtactttgccagactaggaagtccatcatgggactagctttccattccagtgatctttccttagagccatcttccaatgtgacat

SEQ ID NO: 103175 - DNA, 447 bp, Glycine max
  unsure (1)..(447): unsure at all n locations
gatctctaagcaccgcggctgcagctgattgtgagttgatttagacttagtttctctttggtcattattcaattgatccaaggaaacttccaaagaaaaacgtccgattganttttnttgattattntattcaaagatatcttgattattttattattattcttcaagaatatttgattattttattattattttactttttttggcttaaccgaggttacagtgtgaacgatcggttagaattattttaacagtgatnaaacgagattacaacacatatgatcgggtgaaattcattntatcatttattaggtgagaaaacggcttaaacgatcggttaaagcgcgttaaaaactgaagaaaagaaaatcgataatgaacgaaatgaagatgccagctacaaaaacaagaaatgaattgaagtctcggatcaaaaacttacccctg

SEQ ID NO: 103176 - DNA, 379 bp, Glycine max
ccttaaaccagctgatgaacaaagattcactgagaagactgaattttctaacatataacgcccactttctcttatacctttcgacactctattatctattgtaaataatattgcgccaaaatataagggtgaaatactgctctgagctctgccccgtaaaccccctctctcgtgtactgaaattgacgtttctccaatctggtaggatctactctactcattggatctttggcctccactttcatctactgcgacgccgacctggaaatcctgtttggagtcatctaatattttacatgccggccataccgtggtccgcacatccactttcatgcctagattccacctgatctcccccttaatataccggtcaatgctc

SEQ ID NO: 103177 - DNA, 405 bp, Glycine max
  unsure (1)..(405): unsure at all n locations
agctntgaaantattatctccatttaccttgcttcttttntaagacaacacattggtttaagacaatttttgtcccaaatttgggggagtttgtggatggataaatttaaaggtaagaaactacaacacacatagcaaattaattaaatgttatgtcttacaaaaaagaaattcaaatgagtgtgtgctgttaaaacaaagtcaagtgaaaggctagtgaatgggctaagtggattgaaaagacaaactgggttagtctaggatttgtgcactcttagaactcaagcttttgcatcctagaaaaaccaatatatttgtagcccagcctcattacaagccaataaaagtccttctgattcaattatgtatttctgactctatagcatgagatgaagtacaaagatt

SEQ ID NO: 103178 - DNA, 227 bp, Glycine max
actggctgactactacgtgctttatagtggccttttttgttataataaatgaattctctcctatttctaatttcatcggcgaactcctccctctttcttttccttaccatttcatctctagattatctacagataactagagggaactcaacgtcatgaagattctatataaagggtctctatgactacgaccctcgcccttagcactagatgaatgatgactcgcg

SEQ ID NO: 103179 - DNA, 162 bp, Glycine max
  unsure (1)..(162): unsure at all n locations
tccagatntaagcttttcacaccactgaaaggcatcgcactattccactcatatcactacattcacaccttttaaccctaggttaactctacccttcatttatatgaggtttctatcagagatatcccacaccgactttgcaacacatcatcataaatacct

SEQ ID NO: 103180 - DNA, 452 bp, Glycine max
  unsure (1)..(452): unsure at all n locations
tctcaaagtgannaaatcctattaacaaatgttacttgtcattatgtttttctcggcntatatagttaccatcgccgacatgtcggcatagtcttcggaggcaggcagatccgatccaaattaaggaaatttaatcttcttcgtattacttatgtgtgatatcttggttcttaagataatcttagattggttagattttattataatacagtataaaagaaccaatgcaatgcttgtagccgaccatatatattcactattttcttattgatctgtataagagccttcgtggtcctatgaatgaaacaataaaatatacaagagaagttagcacctttctcattatcctctcgcacacatgtaattcacattagtctataagtaagaaaacaagtcacgtttgctgtgttgatgctattcatgtgagctaacaatatcgtcataaatggttt

SEQ ID NO: 103181 - DNA, 334 bp, Glycine max
  unsure (1)..(334): unsure at all n locations
agcttgcatcttctggcttcaccttttggccatgtcttcatattgntgntactaatggagtaatggtcatgttatgattggattaagttgagaccagaatttctcttatatgtacaaattgaaacttcatattagccataaattntcatgagttagttattatatattacatatcgttcatgttatcacatattaaccagttgctcagagagatgaatggactatgctntgtgacacacttgcttcaaaactcatgggggctggcaatacattagctgcaactctgtgttatatatgtgctgganatattgataaaactgttgaaatttggtca

SEQ ID NO: 103182 - DNA, 475 bp, Glycine max
  unsure (1)..(475): unsure at all n locations
agcttatgctcatatntaactacattgtggntatgtttaatattctgngagatgaaactctgacttccttttaacatccatntggtttggttatatagatagttctgcaccgtgtaatttaccacctcttggaagacataggcaatttgataatagagagggcccctgggacttctgaaacccatgttgctgggcaagcagaagtgctgaatatctttgaaatcaaagggagcaagtccaaggcgcctgatgttaagatagcgggttgtcgtgttatcgatggttctgtgacaagatcagcaaccctgaggcttcttangagtggngaagttgtgtttgaaggactttgtacatcgcttaagcgggagatacaggatgtggattctgtganaaagggaactgagtgtggagtagtattcaataattggtgtgatttccagatcggagacgttattcagtgcttggaacaggtcat

SEQ ID NO: 103183 - DNA, 449 bp, Glycine max
  unsure (1)..(449): unsure at all n locations
cttcttactaattgtggttattcgatctttgtattacattactttataataaactcaccccttgcaatttatgtaccgtgtggttggtacttgtgatgatcatgaacctttgtttgtaggagcataatgacaacaatagagtatgagaagtgagattattntgtggagccgacgagccgacgtgatgacgttgggattattttgggagagagttgtgtcttgttaatcaactactccatagttggatccataaatctttgttgtgctgaattggggatgtcaatcacaccattacattccattatgtgaatgatgtgtactgaattactatacctatatatatatatatatatattcatttacttaagtaatggtgcatnggttggtgaatgtatatcgagaaataaattactttcattcttcatagccaattaatagagtcttcattt

SEQ ID NO: 103184 - DNA, 352 bp, Glycine max
  unsure (1)..(352): unsure at all n locations
atgaagcttatattatcgatcgctcaaagaaacattgatactcttctgacattcaaatgancacgactctcctcacggatgtccgattctggtgcataatatgccgagaggctcgaaatcgaccaacggaagctcttgagacattaaaatggtcattacttttcacacggatgtccgattcaggcactttacatatcgagacgctcataattgaacaacggaagctcttgataaattcagatgggcataacaattaactcggatgtcaacttaggcgcaccacatatttggacattcgatattgaacaacggatgctctctacaaattcaaatgcgctgaccttgcacactg

SEQ ID NO: 103185 - DNA, 329 bp, Glycine max
ctaagacacatgctacattcaattctggtttagaccaaacaacagccggcttggcacaatcagggcaaacacacaatatatagaggaggtcaatctacaagaaatatacttaaatgacttcaaacatagaatgaagaaatcaagattaagcacaaagcagaacttatttcaaacatacccatttgacaattctgataaaaaacatcaagcgactccagaatgaccaaaataactgaatcacaactacacataacaatacacactacaatacaacccaactacaaacaaaacatccaactaacaaatgcctagaccataaaataacataa

SEQ ID NO: 103186 - DNA, 310 bp, Glycine max
tgggtttatagacgcgcctctaatcccatgcagaatgcaattatacatggactgccctagagatgatctctgagctacttgctcaatatactctgaggtagccactttcgacctgatagaaaaccggtggaataataccttgttttagtgaaacccttaaccacaagtctagccttggtattttatactggagagtctagctctagctatcacccacctattctgaatgcctttttcttctggaatctacttaagactccgctttttttatgaaggttgtatttatctttattcgatctccactctatat

SEQ ID NO: 103187 - DNA, 377 bp, Glycine max
agcttagatataaacattgaacagatgaagataattctatatcgatttttttagatgctcacatcaagcgctcagtataaattcccacaaaggatgttagccctccattaaagggagtagcttttagaaatatgagaatggttttttagatattaccacatgacaatagtagggggatgtctcctccactttaagaacctagaaaataaatctaacacctagaatctacctaaaagctaggacctttgcttactagctcagcttttcctgtgttctttgcacacaattcatagacaattcaaacctctttcacattgtcatactctcttcacgctctctttttttttctgttgcaatcaagcttaaaataggctttt

SEQ ID NO: 103188 - DNA, 496 bp, Glycine max
  unsure (1)..(496): unsure at all n locations
tttttccatcagaccttggatgcaatngtattcatatgctctactcagctagatcttgatgggtattcaaaccatctttcatcttgccctgaatgttaagaagcgtcccaatgacattatcacataccattttctccacaggcataacatcaatacaatgcctaatgtcatgttagaccagtatgcaagatcaaagaaaatcgacctcttcttccatatgcaactcttacttatttccttcttttgggtctttccaaatatagtattcaagtgttgaactcgctgtaagacttgctcaccagtcaacggtatcggtgcagtttcatgctcttgagatccattaaatgctnttttttcaattgcttgtaagggtgatgagggtttagaaaatgccgatgcctagtgtagactggttttctaacatcggttcagtgtatgtagcttgtgtcttcttcacaaatagggcatgcatgatgacccttaacactataaccac

SEQ ID NO: 103189 - DNA, 463 bp, Glycine max
tgccgcatgcaagctttgaagttccttattcgccatcaaaaggagctctcttctgcacttacttgctcaaatgtaaaaggaagtgatttcctgtggtattgttcaagatgctagcgacaaggactggtttctcagcatgaagaagaacgtgcatttaatgcacatatattatgtcccaacaaccaaattcttcaaatgcaagcttaagagaagaaacatattcttttataaacaagtgatacttgtttgaagacaacctataaataccctaagcctctgagaccaagagaatcaattgaacactcattattcaagttcttttcgtaataagctctctgtgtaaattcttgcatgtttaaaaaactcttaaacacttgattatcttggaaggaaactattactgaactgtcattctttgtaaaacataaaggtagactacagtggttgtagataaaaattttgt

SEQ ID NO: 103190 - DNA, 417 bp, Glycine max
ggctcagcagtctctggtctactctgggaactctcctcaacgtggcctccacacttgtcgaatctatatagaaagagatcatgagctacaaagcatcagatgctgaggcatcctgatcaaaagtaatggcaacaaaccataatatccacatgattacggccatcaactgtggtactcaccctttccagtctctgaattaccatgatcccctttgtttgatctgaagcaagccaaatcctatgttctcctgctatacatagtcttgttcagacaagatactggtcaaactacaacaaatatcatattttatcataaataccacaacatctgatacgatatgattccaaataccttggcgcgactaacaagttctgatgtttatccctatccacttactaccaaatgactaactgagct

SEQ ID NO: 103191 - DNA, 171 bp, Glycine max
gaaccagctgatccaagacacatctataattataattgttatgacgtaaaactttcataatcaccaacattcttacaaaccctaacttctgagactgctggtacattataccgacgctgacatgggttttaccaacaatgcatagctcatatacgcatgcgcaatatagat

SEQ ID NO: 103192 - DNA, 394 bp, Glycine max
  unsure (1)..(394): unsure at all n locations
atcctcagagtcacctgctgcatgcaagcttgatcataaatggtaccatcttaatgagcttgttttacaagacaacanactacaaaatataaggtgttgctacgtgtaccaacggaattattggtacacccaacaatntcacatttttccaattttcttcttataggttattagcatagtgctctaaccaattgagctaatgaaccaattatattataaaataaataatgtcgtatacataatgtatatttaatgcgcatgtaaaattaaataatagattgtgtgataattaatttttatataactcatatgaattatctaatccgcatattttttttataaaaaatatttactatctaaacattaatgtatattaaactttgaataagaatta

SEQ ID NO: 103193 - DNA, 424 bp, Glycine max
  unsure (1)..(424): unsure at all n locations
gcaactcanaatctaggtatctaagacccctcaatttattggatnttcaagggttgagaagtgaaaatgagaatggggtataatttggagcaaactctcacctcacacaagtctataaacttaatctagacttgctcanactggttgttcacctaaaattccaccgaatcaaaatttgactcctcaacacccaatttaccctagaaatggctcttgccttcactctggncattcatttatctcctttgcacacgcccaagctttctcacagtcctaaatgacatttcaaactatgattaactccctttaacctccaattaccaccaaatccagaattaacctttcaaactctcaagcatcactcttttcactcatagcactacattctcacattctaacactngttagctctacccttcatctc

SEQ ID NO: 103194 - DNA, 485 bp, Glycine max
  unsure (1)..(485): unsure at all n locations
agcttcaccaccaagagagtgtcttgtataagaagtttanagaggaaatttcaatggaggaagagaatgagagataaggggacgtgggaattaaagaaatcagggagagaagttgaattttgaagtgaatctcacaagtttcacattcaccacatttatgacaagtgttgcacatgtttctatttatagcctagcacacgggaagcttccttgagaagcaaggaaggtagcttccttgggaagctagaggaagaacacttccttgagaagctagaggggggctactcacacccctccaatagctaagctcacccncatgccataaatataattggaagcttcctcgagaagcaaggaaggtagctttcttgggaagcaaggaagaaagcttccttgagaagctagatggcggctactcacacccctctaatagctaagctcactcctatgcctangtacatgataatacaaaaaatgtccctact

SEQ ID NO: 103195 - DNA, 433 bp, Glycine max
  unsure (1)..(433): unsure at all n locations
tgtggtactangttgttttttggcgatggtgcacatcaagctttccaggtcggaatgcgcgcataaacccaccatccnntgttgtctactcccatggagctcacgnactnncangnngcccatatcctcgnttcttttaataccgggtccccatcaattctctccagcttccacaccatccaagcaaaacaacattcaaacagcacaagctatcacagccaagcaaaacagagcacatgcagtaaactctgctcaacacaataaccacaatcacagcttttctcacttatagaccgcagtaacaaattccttccattcaatacgttaaccgttggatcgactccaaaatnttacttggaagtctatagtgcataatgctacattgtgaccgctgtgatcgacttgcatacatccaggactcattctgtgctac

SEQ ID NO: 103196 - DNA, 320 bp, Glycine max
cgcggcccacgagcatatgattgccgactaatatgccctagtatactcggataaaaacgctagaagaagggtgatccactcttacaccaacatgcaccctgtggatggatcggtttgctcttacctcgaactggagtcaaaactttcccgtttggtttccaagccctagcgatggcagacatctactcctcccctgaagagacttacgggcttctctgctattgtcagcatatgatagacttaatggcccacatatattgaaatcgttaggaacattgtatggtctcttacaccttgactagatatgacttcccttttga

SEQ ID NO: 103197 - DNA, 296 bp, Glycine max
  unsure (1)..(296): unsure at all n locations
cttggttagtggatatgttacactaacagcatattgtgtctatcattatcaggcactattgagtttcaatcaatcattagtgcatatgtacactaaagcatatatcgacatgatcgacctattggtttaacaacataagcatatgtccctaaagcattattggcctgataggttcaaaaatccttagcacatgttacaatanacgtgatagtgggctttattggaccatattgagtgttaatcaaacagtatgcaatggtatcttaagtatgttggaaagtggtgaatgcataagt

SEQ ID NO: 103198 - DNA, 386 bp, Glycine max
agcttagcacgagcatgtcatctcgatttatctgtgtctggacgcgacgacccgcaagaggccttggccctctcccacagcttgcgaacactatagggggagtgagagtgacaacgagagtcagaatacatagcgctagagaatagcgcgagctacatcttacataaagagaactactaacaaccgtcttacaacgaaagccttctaagacattgtcataaaccgcctctcaaaaacccattacggattgcccgcctaaactagacggatttgagaccgttgcgtctcctgacataaaaaactttcttatagagagccccactattggtctccatttttcactggaaaatgaatcctatactcatatgccaattccctccaacatg

SEQ ID NO: 103199 - DNA, 398 bp, Glycine max
  unsure (1)..(398): unsure at all n locations
gtcctacactgtctttggcctactgtgaagtagtgtttatggtacattcttaggtattcttaattgtctgaagtttttatatttgacattaattttaagcattacatgtggttatatntcaattggcataccaattgtgactatatgcaataatcattgacttctataatgtgattctatgaatacaaaaacccacaaaataaaatgtcgaagttgttgaggagatggtctaatcattaggatgcattttttttaatgaaagggatatttgataaaattctatacttattaatttgtaacaaggccaaacaaagacaatgcattagcttgaatatatgttatcatgtacataataaaatgaccatcatatttaataagatattaaatatctttattac

SEQ ID NO: 103200 - DNA, 474 bp, Glycine max
  unsure (1)..(474): unsure at all n locations
cttacatactcagctncataacatgtgtccacacgaaccctatggacttctcgatatgtggtttgcctctctggcatctacgcatcacatgagggtcatgtcatggtctcatctgcacaggtgcggtccactcacaaataaacctgtagccaatctccttacattctcttgtcattgtccgaaatccctggtggatattctttgttctcgacatactgtttgatgtcaaaataccacagtatctcatcttgctcttcctctatcgcacaacaatgtgccggcttgccccgagatctgaattcaaattacgtgagatcctcatgttgggcatggtgaaacatggatgccaacgtgtccaatgcatctggcttttgttctcttccaatgtatgtggtggaaaatatgtctcaaaaatttggctacttataattacgttgaagagtataattttgactctatttccattcctctcac

SEQ ID NO: 103201 - DNA, 470 bp, Glycine max
  unsure (1)..(470): unsure at all n locations
catgcaagcttattggattatggtgcacccgtcatatgtgtgtctaggtggttatcgggcgatggcacaaatcaactatcacatttccacaagccaggcataagcacaccatccccagctgcccacctttaaaattagctcacgtgcatgtacgtagccttctcctcgttcctctcagcaccgggtccccatcaacccctccaagctttcacaatatccagatcaattaatcccatttgtcatgaaactaccttaaacaaagaataacagagtggaggcagaaatctntgcacaagattcattcaaaattccacagagtgtttcctacccacatacctcaggaacatctctttttgttcgattcgttaaccattggatcgccttataaatttaactgacggttcctaatacagaaatctaagttctgaccggtgggatctactagcacatgtctagaacatgagatatac

SEQ ID NO: 103202 - DNA, 491 bp, Glycine max
  unsure (1)..(491): unsure at all n locations
tttcctggaaatatctaattatctcaccaaatagtggtccttctccttcttggaaggtaccacaacatatggtacttccgcactntcattcacagctttatgtcttttcttttctctagcttgttcacttctactcctctcttcattcttaatttttcatctttttcatttttttcatattctttntctttttctacttcttttatcttttcttggtcaatttaattctttttcttgaccattatttngttttctttttcctgatatcttcacctctcacatcatctttcttttcatcattacctttcttttcagcagctttcttcttggatacaacactatcctcatcctccaccttcacaaacctcttactcattttcatcacagctttacattccttcttgggattcttttctgtattcgacaccaaactgttggatgacttgtcagctatctacttggccggttgtccacttggacctcaacgtttc

SEQ ID NO: 103203 - DNA, 364 bp, Glycine max
  unsure (1)..(364): unsure at all n locations
taaatacctanataaaatgataaaccaaagtaaaactcccccaataaaaataatattattgcttcaaaagctgcctttaaaataacaaattatgttatttcacataggtaggttttcacttttcagtcataggtgaagtgacaaaaataccaagggggcaggtgggaattggggttttgcaaactttttataatttttttaaataaccaagttttatataagttcanaatgagacagtttagaataaagaactgttctgagatcataatgaaaatgtaagcagctgcagttcacaagttgtggttcaaaaaggttgnttatttgaaatggcattgataaacttttagttcatttttatgtgtat

SEQ ID NO: 103204 - DNA, 385 bp, Glycine max
  unsure (1)..(385): unsure at all n locations
tactaagcttatccgacacgtatcatnagaccctanggcaaacaagtatgtttatgtattctacagataattcaccacctattattatgggttggtggtgggaggaggcttacacgtttccatccatctggatctaaaaacgaagtggttcttgtattaacgccatcaattggccctggttgccgagtaatcctccctccaacctcttttatgacttggctactacctcagcactcttatatacatcatcagtaccaatggcaatctgttacacagggagcatgaatnttatctataaggagtccacagactgtatatactcataaaagtgaagaaagccttctatgcttaaagatgtcacgaanacaacctattaactaacctg

SEQ ID NO: 103205 - DNA, 290 bp, Glycine max
  unsure (1)..(290): unsure at all n locations
ntaggcaatacnggggtgggggaatgatagagtgactnatacntatatgatgatcgagtctactgaatgactcaacaacatctgcatcacaccagcaatagcagatgcaagacccaagagacaacacagtacccctacatacctaaaggagtctgtgtaacgacatagtgctgagctggcattcctgactgccactaccttaacgaacctgagctaccaatagtcatgttgataggatactagccatcatagaataatacaaaaatcaattttgcgaggatagaagcatt

SEQ ID NO: 103206 - DNA, 454 bp, Glycine max
agcttggacatatgatgcccttctttaacaatatactttaacctgataacaaggagcaacacttgaaaaaattaacgtccatcaccattcttaataataacaacaaattgcatccaacacatgggaaatatatagtagaatttagcaattaatggcattatttaaataaatccaagtcattggcgtgacatctcatagattcaataatgcaaaaaaaagggtatagtattaaacgtaatgtgccctattgcttgacaacatgttctccttttccgtgtaactacgacaaagcttacctcttcttcctcttaattttcgaccttatgcacacacatatacttactatatagtattatcacatcactccctcactctcaccaattagtagcacactctctttatctatatggatcaagaaacaacatccacaagcaccatatatgaactctcttca

SEQ ID NO: 103207 - DNA, 288 bp, Glycine max
gagttttttttttccacacagggcaaaggaacgattaataacgatcattcgctacctcttgtaaatatgtccatgtattgcattgactcctcgaaataccagtatccacttagataccggctaatgtatcggctcatagagatctcctgaccaaccgctctgatgggatatggttaactgggggcattcccctacctatacacgccccccctgctaaaaggtctcttccctattgcctctcaccgcgcagactacaaatgcctatacggaaacttatttctcatcttc

SEQ ID NO: 103208 - DNA, 525 bp, Glycine max
  unsure (1)..(525): unsure at all n locations
tctacaaccggattatttgaacttgctacaacatctnccactaattcaacatggccaccatcaccttcaccttgaggttgctcatcctcatcattattttcgtctttagttatccattcatcatcatactcaatctcatcaaatggaagagcaataattnttctattttgcttacttttcaacttcaagttatatacatcacaaaaaataaatgttcattcattntttggtgatgtaagtggtttcttctcattgtatgaacctataattagaaatacaattctaattactatctacaccaaataaataaaattattaaacaaataaaataaagtcataagcttaaattgaattaccatctcaaatgagctacacgtcaagctcataacatggataacaaacctcctcaactttggagttccatcaccaaacatcgtcctncattctccaagttgcataacctttctaatgtcctttgatcttacatatagaanattccctctagcaaatgaaactcaacaagtt

SEQ ID NO: 103209 - DNA, 456 bp, Glycine max
  unsure (1)..(456): unsure at all n locations
agcttctcatcctaaggtttctttgttgacaatatttaatttgatgatatatagggaaaaaggagtgggatgaaaattttattcattcactgctgtcaaagcatattgcggactacatcaagcatatgtacatccccagtctgaatgttggagacagattgatttgaaacttcagtaagaatgaggtatattctgttaagtcttggtatagattgctctatggattagttgatgaaattanggagttcgaggtggaacgagaatggaatttggtgtggaaccttatattcctcccanagtgagagtagttctttggaggcttgccgtgattacctctcaactcgtataagaattgcaaacagaggtatttcttgcctgtagctgtgtttttgcagtgtgctatagaaagtattggaaatgtgtttttacttgtctagaacgttctatttgcaacat

SEQ ID NO: 103210 - DNA, 481 bp, Glycine max
  unsure (1)..(481): unsure at all n locations
cctctgcacaagcaaacaaacaactacattactgaaatgtatatgttgaaatttaaagaactgaaacataaaagctgaaatttaaatgacataaatcataaaataactaanaataaactaaagtgttcagaatgcanaaatctaaacatcctgctcctcctgtggttggtcttcattcaaatccagtgttgaagctgctgatgaatcctggataggttgttctggctctgcaactggtgtagatggttgggtctcctcatgagcaggtgcagaggattgagatggctgtggggtctgatctggagtaanctcctcctctactgctggtggtgttggtgctggtggctcctcaatcacaggctcctgtgctgtagaggcctcaccctctccaatgaaaagggttgtctcctggacaggcacctgagcataaacacctccatgccctgaagctcttcatgatgatggnacttgccctgtggat

SEQ ID NO: 103211 - DNA, 246 bp, Glycine max
  unsure (1)..(246): unsure at all n locations
agctngagggtgattgcttctaaattatatttccttctgcctctctatgatgtcataagntataggattatatgcgcgacgtgtatttattttcttgatgcgaacaagataaaacaagatgatagtttatgccgttgatcaagctgtcaaagacttgaaagatntactgaagtgttcttgactggtttgcacaaagctacttcattttgccatggtcgatgatactctagattgctgtgaatataa

SEQ ID NO: 103212 - DNA, 395 bp, Glycine max
tggcccttctttacttattgagatcatatatccgcaagcatgtatgcccagctggtgatggacactctccaaaacaagactcagaaaatgtatcttccgctttgcttgcctctgaatatgatggaagaataaacactggagttgttagaacagtgaatataccataatcataatgccactgctgccacaaattcaaatgatttccacccgaatccacattgctggctattgaattcaactcttgacccttccaatgggttgacattattaccacgactcttgctagttgccctgcttctctcatgttgtttaacgaggagagcatctaaatgtgactgatgatgaatgagtctccctttagtcgcacatgaatccaatagactctgttctactta

SEQ ID NO: 103213 - DNA, 477 bp, Glycine max
  unsure (1)..(477): unsure at all n locations
agcttaaatagaaatatacaaaaattctcttttatgtgtcgttctcaaataatagaatattagtatctaaaaatttattatatttattaacaatttcttagaatttatttttgatacactatagacgtaaattcttatatattatctataagctaattagaaatcatcgagatataaaagcgggtttatgttctacattctgaaagaaatttggtggacaccaaaattcganagtaacatgcactgctattttttattatcactaaagatataatatgatttgacanaacgacaaggacagaaaaataatacgtgttgataaagggcttgatatatatatatatatatatatatatatcctaactcactataaaattatttaaaagacataaaaataagattttatttagttcaaaacagcttaacatttatgctatttatatatataaaactttttacaagttctctagatacatc

SEQ ID NO: 103214 - DNA, 474 bp, Glycine max
  unsure (1)..(474): unsure at all n locations
attacggacctatgaatctcagctcgttatgagttgatnttagctctgagttcacttgattatttttcaagtcattaacagaaaactttcggagtaaatgaccggttganacttcatttttgatgattaatcgaggttacaacacaaacgatcggttgaattttattntaaaggctgataaacgagattacaacgcgcaaacgatcgcgtgaaattcattataacattgattaagtgaggttacggtttaaacgatcggtcgaaactcacttaacacanaagaaaagatcactgatgatataaggatgaagatgaagacatacaaagcatgaatggacccctaagggtgcatagaatgaattcaaagctccaanatacaatactaatccgttgagaaccaagaacgatgaatacgaatgaagaatggcgaagaacgttcatggaattgatcacgaaaacgttacataaacgtta

SEQ ID NO: 103215 - DNA, 322 bp, Glycine max
  unsure (1)..(322): unsure at all n locations
tcccaccttctaatagcaagctcaccccctgccagggacatgagaatacaaaaatagccttactacacagactactcatagtgccctatgtcagaccctaatttcgtctggcgactatcattcactgatgttttgattctcgctagccgaattgcggtgttcgacaccagttaccacacaaagcagaggatcactatgtgttttgatcaagactacaaaatgatactaaggacaggcgcacaagggtccttttcttgattntgctagaccccagctcacccaggctagcatctggctggcctgcgccatggatattacctct

SEQ ID NO: 103216 - DNA, 391 bp, Glycine max
  unsure (1)..(391): unsure at all n locations
ccttagtntcagatgatgcagatgggtntgtagctacctcatgctctcctctaatgactatggcatcatatctggcgctaaactgctgggagttggatgccatcttcctcaataaatttccggctttatgacgagcatgtctcaagggcttcagcatctatcatagttcctctccatactactgagcccttcatacaaatattggagaagaatgctgttctgaaaatatgatggtgggggcaacttggcacatagttacttaaatctcttccaatactcatacaggctctctccactcaagtgtctaaaacctaagaatccttcctgaaggctgtggtcctagaagcagggaactcttttcaaataaactctttaaggcatcccagctcgt

SEQ ID NO: 103217 - DNA, 485 bp, Glycine max
  unsure (1)..(485): unsure at all n locations
gaaaacagggcatccttgccttatatatgctatattacanaacaacacaaagatagcanaatactcttccatatggatttaggtcacaacccaacagacttgttcaatgaaagaatgaggttaagcctacgttattatggagtattctttcttgtgtaaaccatcgtggaataaggataaatgcgaagaccatatcatcattcccatagacagtgctaatgcgcaatgacatatacaaaggaagtctcttgacaagcaagagtcctacaagagcattatggtctcacatgaagagatgctgcatcatgctgaactgagcaacactagtgtcacttgacaacaatttgacgctgatgtcaatgtgagcacaatggagtagagaatgacatataatacacatatctctatgactacaattaccactttatgtaatgtcatctgacgtcactaactatacattaataatcgtaaattgtatgcaattg

SEQ ID NO: 103218 - DNA, 210 bp, Glycine max
ctagaagaaccacacaatattggaactaatacagtaccccagtcatgctctctatgcttaaacacactggcagcaatcatgttgtttgaagtagcttgcacttacataaatggcagcacacacagtgttctggtaattaattggcagaatcagcttagagagataataaccgagaagaagaactgaatgaatgactgactgacttggaat

SEQ ID NO: 103219 - DNA, 390 bp, Glycine max
  unsure (1)..(390): unsure at all n locations
ctgagcanattcaatcgacaataacctttttactcagatgtctgatcgagtcccgtnatatatcgagacgctcggacttgaacgccgaagctctgagcaaattcacacgactataactctttactcggatgtctgattcactccagtaatatgtcgagacgctcgaaattgaataccgaagctctgagcaaattcaaacgacaataactttttactcggatgtttgattcaggcccgtgatatatcagaacgctcgaaattgaatgctgaagctctgacaaacttaaacgacaataacgttttactcggatgtctgatgagacccgatattatcaagatgctccgaattgataccgaagctttgacgaacttaaacgacactacatttac

SEQ ID NO: 103220 - DNA, 390 bp, Glycine max
  unsure (1)..(390): unsure at all n locations
ctagcatctcgatatattttttgactcaatcagacantccgagaaacaggggtggccatctgaaggtgctcagagtctccacattcaatctccagcatttcgatatattacgggactcaatcagacatccgagtaaaaaactgaatgtggtttgaatttgctcatagcttccacattcaattttgagcgttgtgatatattacgatactcaatcggacatccgagtaaaaagttattggtcgtttgaatatgctcagagcttcggcatcaagttcgagcctctcgatatactacgggactcaatcacacctccgagaaaaggttattgtcgcttgaatttcctcaaagcttcgtcattcaagtccgcgcgtctcgattattacgggactc

SEQ ID NO: 103221 - DNA, 377 bp, Glycine max
  unsure (1)..(377): unsure at all n locations
tagtgcatatatatatatttctctatttaatcatgctctcacgnnctatgtagagggctaaattactaaacctcgatccctcgtcagaccgaatcaatccaagcttcgtcctcaaatccctcttgttggactatgcccaactgagacagccctcttaaggtcagactaacttaaactgagcttcatccgtatatccctcttgtaagactagactcagctcaagcagcttacgagagtttcagctaatttagcatatgcatcatccgcagatccctgttgttacaacatactcaacaacatttttgttacaacataattaataccataacttattccgtagatcctcttggaagactaagtcgcgatcctgcttcaat

SEQ ID NO: 103222 - DNA, 414 bp, Glycine max
  unsure (1)..(414): unsure at all n locations
tgagatgaggaagtatagaagggagaaacttcctgctattatttcttgaccacagagtggtacctacagatatgtcgcggtggtcaggagaccttgcggacgtcangtggggtgctatagctcacaaccaaacttgacctatcccgactcaaccccgtgcatagtcggacagtgagaacctgtgatgtacctaaacaggcgagctcctaggcagtcaacagataaaaggaataatgaccacacacccaacgaggctttgnggtgggctggccatcatgagacaaccctacagtatggtattactgacaaacccttttgagttaactcataatgactcaagacactcatcttttctttcattaatcttctggccggaatatttttatttatgagctcaactcatacaagagttga

SEQ ID NO: 103223 - DNA, 391 bp, Glycine max
  unsure (1)..(391): unsure at all n locations
agcttgaatgtatgtacaccaccttttttcatacttatacactnggaacgcgtctactattattgcgatcatatctttctccgtcattggaggtgccacttgagctgccaggtctatccacctttgggcatattctttgaaagattcgcgcccatctttgcacatgtgctgtaattgatgctatctggagccatattagaatggtactaatactgcccaatgaaggaaaccattatgtctttccaagaatggactcgggaaggttccaagtctatgtaccacgcagcagctaccctagtaagactttcttggaagaatagtatcagcagttccttttcttttgcgtatgccgccatttcgcgacatacatattacatgttcttacggaaga

SEQ ID NO: 103224 - DNA, 392 bp, Glycine max
  unsure (1)..(392): unsure at all n locations
acaaggtacacttcaatgtggtgatgtacaagagaagacagctttagaatttgaacaatgaaaacaaagtacttaagcataatcattaaatattgggtgtcataatatatgctaacctacctangtagaacggttcatgaaatgtataggcatcattgctgaacatcacctgccatgcaaaacttacttcttgtgagacattatctcccgatttacacgtttcatttgactagtcatcaagttcatgtataatttcatcatagcatgacaactaactttaaaaccattgcttttatatttcagatatttcataaagtgctcattcatgtacatctatctttcttctgaaataatcgtaggaatttaagaaaggtagtttttattttttacat

SEQ ID NO: 103225 - DNA, 324 bp, Glycine max
ccggacctcaagacaccgcagctgcagctaattagccttgttttttttcaaatttgatctacaacaactaatctgttgataaaaaaaactatctgaactctgagaatattcttaatataaagaaatcagaatactttgtttttaataataataatcgtactagtaatacatataataataataataatcacaatacttcaaacatatttaaaatatcatttatttattactataaatcatgaaacattcttctttgtgttattgggaaaccctcgtagtccaaagatctattacaacatcaatgagtctaatggaactacctat

SEQ ID NO: 103226 - DNA, 337 bp, Glycine max
  unsure (1)..(337): unsure at all n locations
cttacaacagcatcctatccctcttacactctaacctagagcaattccaaatatcaaatggaagaagtgggacaggagatcttggagacctttatgaaaatagaggtaaacatacctctgctggatgcaataaagcaaattccaagatattgctaaattttgaaagaactgtgcactcataagcggaagcttagaggaagngatagaattagtttggtcaaaaatgtctcatcattgattgagaaatctcgtccccaaatccttgtaaaatgtaaagatccaggtacatttaccataccttgtattataaggaacactatgtttgacaatgccttgc

SEQ ID NO: 103227 - DNA, 477 bp, Glycine max
  unsure (1)..(477): unsure at all n locations
agcttcaacctagaggagacggatctttccaagtgtttgagaagatcaacgacnatgcctacaagattgacttgcctagagagtataatgtaagcgccactttcaatgtgtctgatctatctctttatgatgcagatggcggagccttggatttgaggacaaatccttttcaagaaggagggagtgatgaggacataaccaaggaccatgaagcacttgaaggtcccatgaccagaggcagacttaaacaagctcaacacgtcatagagaccaggctggtcatttgtatatctgccattgatgatgattgaaggcgcaagtggagaaagatgaaggcccatgggcagaggcactaccaagactactaatcgtngcagaacgccaaacttacgtgaaggcccagttaaataagtctagttatatttattttattgactttcgccaaactgttacaagccctgtcaatttatcttttgt

SEQ ID NO: 103228 - DNA, 376 bp, Glycine max
gcgtacccaccattattataatagagcactggtaattgtgttactatcactgccatcatttctgtctccatcattgagggtgctacctatgctgccatgtctctccacctttgggtgtatactttgacagattccatgcccctttttgcacatgttatgtagttgcattctatccggagccatatcagaattgtactgacactgtctaacgaacgcaaccattagtgatgctagtttcattggagctttgacgcctaggatcttcttcatcaatggattcctttgcttcttggaagatgaatggcagtggaatggataaaggaagagagagaggagacgccacttctaggagaagatgagtctagatgaagctcac

SEQ ID NO: 103229 - DNA, 437 bp, Glycine max
  unsure (1)..(437): unsure at all n locations
agcttagaattatacaataacactgtgtgcccaaccatgaagtccttcttaattatcatgctatcatggaacttcttggacttttctttgtagaactcggcattctcatatgcttctaggtggatctcatctaactcactcagttgcaactttctttcctcaccagcttgatccatagagaagatgcaggtcttcactgcccagtatgctttatgctcaatctccactggaagatgacatgcctttccaaagacaacctgataaggagacatttctatgggtgccttgtaggctgtcctatgtgcncaaagagcatcatctagcctgatactccaatctttcctgcttggctgacaatcttctctaaaatttctaatctccctgttgaaattctgctgcccattggttgggggggtatggtgtgataccctgtgaca

SEQ ID NO: 103230 - DNA, 441 bp, Glycine max
  unsure (1)..(441): unsure at all n locations
cgtagaattcaccccaattccagtgtgctatgctgacttgatcctatatctacttgataattcaatggtagccataaccctagccaaggttcatcaacctccatttctccgagaatacgactcgaacgcaacgtgtgcttgtcacggagaagccctggagcgttccattgagcattgtagggctctgaagcgcaatgtgcaaggtctaattgatgcgggctggctgaaatctgaggagaattgcgtgtcaatcctgacattgacaagagatgccacacatggggcaatnttgaaagctgttgttaggcgtccctaatgacacatcaggcgttccaacgttatgccattattggaaaccacaactacaatgttaaatgaaatggataaaggtgatatctttgtccctcatcctcttacaagcgcatgtttgcttattcaact

SEQ ID NO: 103231 - DNA, 353 bp, Glycine max
  unsure (1)..(353): unsure at all n locations
catgcaagcttataggcccntttcgatgtctccatttctgttgagctataaattgaacattcttttgactgatttcctaaattcataaaaaaaatgttttagctcaatgcaaccagtataatacacaataatatatgtatctatcttacttcaataggttcaagtctgcattattccattaactctttaaagcgagcttacgatatctcttgaggacaatttttcaatcgctcacgcaatgggtcatacttgagaaaatagcttctgtaatgtagcatctatattacctccaaacatcatttgccttacagaacacaaactttgtttccttctttggaacgatatagttttgc

SEQ ID NO: 103232 - DNA, 300 bp, Glycine max
atactcatggaagggaattaaagataagctgttttgatgagttttcacgcccgcccactcatctccagatgataatcacaacacaccacttatcttgtcgctatgaagttaactataatataagcaggggaagttacatttcaatagaataatggtcacgtaaacgtaatatctaatcgcacattatactgatcgaatatgctgaatacagtcgaaaactcaaatactaccatgtgccatggataaactacgaacactcataattgcgaatatatatatatatatatctatacatatata

SEQ ID NO: 103233 - DNA, 333 bp, Glycine max
gaccttaagcgacctgcagcatgcagctctagagattttatcagcgatatcttttatttcacaacaatataacattaaaagaaaatatgatcatccaataatcaacgtattctaaaaggcgttattatacaaaaaattgtctacgcctgaacatacgggatgggggaaatatatcccatttatctatatggtgaacgccataatctcatatatgagtaatatttaatcccgacggacgggtataaaatatttattttcatgggacaaaaattatacctggtgaataaaaatacacgcatactctgcttagtactcgcaatcctataaccctct

SEQ ID NO: 103234 - DNA, 298 bp, Glycine max
ctaccttggaatatcctgggtgtcgagctctataaacacgaatgtatggcaacctctcatacacaaatatgacacttagcctgcaacaatggaagcacctacgtctctctatggagggcatgataaccctcattaattatgtccaacagccctccctatttaccttttctctatctcagaaatcgtaaaaaagagatacataaggatgtttcattcatatgaactttttggggtggggtggttctaaacaactaagatccatgggtgattcgggatattgttgtcctcccaacactaa

SEQ ID NO: 103235 - DNA, 407 bp, Glycine max
catcctgcttggacgaatgatataactggggcacatgaataacgtgagaatgagggacaatcccatgctgtgactgacattcctattcaaccaagttgctcacctacccaacaatgttattacttatcctataacaaaccttcttcttaaccagcgatcagttatccacataggccatccctatgataaactacaagcctatctatccactttcatgacataaccacttagcgtaacagaacacaccaaaatgaatttgcaggaatacctttaattaccccattcagagtctatgctactgtcctttcactgatattaatgtacctaacctcccaggtcatcacctcattttctaaatacacttaacgcacgtggctgtatgaaaatcccatgcttcactgacattg

SEQ ID NO: 103236 - DNA, 393 bp, Glycine max
  unsure (1)..(393): unsure at all n locations
agcttccttctcaatctgtccagaatacctaaaatgtgagtgccatctcattgaggtcgggaaagtagtgtcaaggacctcaaccagtagcacctttctcattcgcaatgaacctgcccacacttactctactccagaaaaagatcatgacanagatttaaagagtaagttacctaacaatatctgtgcaggtgaatcttccactgttaattctgatttgcagaagcagcatattcctctttcattccctccaagagcagttccgaacanaaatatggatgagacagagatagagatcttggaaacatttagaatagtagagggaaacatacctctgctggatgcaatacagcaaantccaagatatgctataatcttgaaggagttgtgcac

SEQ ID NO: 103237 - DNA, 476 bp, Glycine max
tctcccctattgtgctatacatagggggagaagtgaagaagactagagttctgtcccttatgcacttctctctctcttgaatatgctgaggagaatatttccgtgaagaaaattcaagccgaggcgcttccgtaacgttttcgtgagtaattacgcgaagaatctcgaccgttcttcaagatccatcgttcgttcttcgttgtcttcagtctacaacgggtaagtacctcataccatgctgttcaattcgttctatgtacccgtggtggtccacattttgtccatgtattatattcttgttttcgctacttttatactcactttttgaccggcttaagccattatttaagcatttctgctaatctaaaatatataaatctcccgatcgttgaatgatcatcgctattaggttaaatgattcaccgtcggcggctggacacgtggaatataaagagtaaatacttatatataaaata

SEQ ID NO: 103238 - DNA, 399 bp, Glycine max
  unsure (1)..(399): unsure at all n locations
agctntgaagagcatggattgaacttacttgctctcgttcaaattatttctataaaaaagctntatgtatanttgtgtatagttctaacaagctcttaaaacaacttgaacaccttgagagaaaagactaagtgatgaaattgtatatctgtcagtaagatgcttgagagttagtcattgtgcaatcaaacaacaaatctacctggtttgtatagggccaataacggcttggtaggacaaagaatactgtgttgtatcaagcttagggtagagcttgagttgtagagccgaagaggaaatgactaatatctataacttgttaaagatagtggaacttggtggtttgtcaagagctgaacatagtctcagtggtagagacaaaccaatataaaatcttat

SEQ ID NO: 103239 - DNA, 416 bp, Glycine max
acatgtgatactagaaacgctcataaacccacatccacgaatcgcgcatacactcaccatactctattgcccacctccaactgagctcacgtactcccacgtaacccatatcctcgtttatctcaacaccgggtgcgcatcaatcctcccaagcgtccccaacattcaagaaattctacattcaaacaacacaaactatcacagccaataaaacaggtgcaaggcagaaaactctgcccaaaacaccaaccaaaatcacaactctgttcacttaaagactccagtaacatttctcttgttgcaattcgtaacccgtcgatcgactcaaaaatgttactggaagtctctatacataagtctacgtttgaccgttggatcactagcaacatccgaactattctgactactatttcaca

SEQ ID NO: 103240 - DNA, 399 bp, Glycine max
attacctgctgttcgactggcatcattcacagctatccaagctactctctaatctgtacaagtttcaaagggctatcttgcactgaatgtagcggagaaacaaaagcggattgtggctcctgtatcatacttgaatcatctctcattccaagaacttctgttcaagctgaagaacagttggatatgatcatcccttgggtggcctcacaattccatgcagtgaagatgttttccaacataataactatcacatgaattgagaccacaaacctatctgtgagagactcacattgatttatatactatttccaccatacgcatcttctctacttgtaaagattaccactttttgactatgactacaaattcaattccatgcattccttctatcactacatt

SEQ ID NO: 103241 - DNA, 377 bp, Glycine max
  unsure (1)..(377): unsure at all n locations
atgatgtgaatctcttctgttgtcctaaatgcctgcattcatgaacatatatagaacaaataactggagaggaatcgttggctacatgaatcactgaggggggaggaactatagacaacactggttggatgggaccaacagggaggcatgggcatatggaccgcctcggaggactttctcgctgatgctgattccgtgtgaaataaaatagacgtcacacatcagaaatatttaaaatgatatatgacctctcgctatgcgctgccctatatttcatcagccacaaaataccttgcagttgtacttcgatgtaacgagaacagaacatgtccacagcatgtntactaaaatatggaatatcaattaatgcatgaata

SEQ ID NO: 103242 - DNA, 470 bp, Glycine max
  unsure (1)..(470): unsure at all n locations
atctcagcttagcaggacaactgctcttggactggttgctacattcagccgattggcgagtgtgatcttatgaactntgattcttctttctgaccgaatgaagngatatctaacatctatatgcttggctctatcatgatgaacctgatccttggtcaagcatatagcactaaggctgccacagtagatgttagcatattctggattaaattcgagatcatttatcagaacctctcagccaaattacttcctttgcagcttcagtaagagccatatattcacctcagagttgagaggcatcaaagggtggagtgtggcttctaactcaccaagcagccaccaacgggtgtacgcataccctggttatgaccttctcttgatagatcaacagcataatctgcatcataatagccagtgagacaacacattgagtgagatccatatatcaaacctacatctgcagccccttt

SEQ ID NO: 103243 - DNA, 395 bp, Glycine max
  unsure (1)..(395): unsure at all n locations
acataactttgtcaacttacaacaacctgtgtaatcaattactgcgaggttatgattgattaaaacacaaagctttgccttctgaataaattttctaactttagaaatttctccttactcacacatgatgatgcatgatgcacaaatgatatgatatcgactaagatacaacatacaatataacaatcattacaaatgccactcataagagttgggcatgtaaaagatagcacttcttcagctcttcttcaagattcaaggctaagtcttcatgctgctcattatgctccccctgtctctaacaagtgatattgtcaaccattattactgtgcactccgaccagaagatgactagcgaattctatattgcangccttatgtatgtcctcatgaaa

SEQ ID NO: 103244 - DNA, 404 bp, Glycine max
  unsure (1)..(404): unsure at all n locations
agcattgagacgcaagtcagcgttgtcgtcgtcgtgtcttacactcacctttggatacactgaagattccaaaacacaccaacacaaacacacatatcacaaaaagtatgtacatagacgtaagtgggcacaacacgaatatgaagaataaaaaaggatcgaaattacctagcgacttgtgtcgtttgatggttgcgtggtagctctgggtggaactggaaactaaaccaaggccgaagtaggtgtggacaacgaggattaaagtgttaatagagagatagaataagagaaagcgtgcgatcatgaggaatgatgaaaggaggaagagaaaggaatgaatgaatgatgcagtcaaggagagattgatngatttctattcggtcccttctttccgcgctgacctg

SEQ ID NO: 103245 - DNA, 411 bp, Glycine max
  unsure (1)..(411): unsure at all n locations
aggacgtgaagtcctatgaatctcattgacaattatatngaagtctatgagatgaagacattgggatcttcgaaagcgtaaatgaaggcactgcctcctctgaaagcatgatatgattgaagacattgtcatcttataaatgataatgaaggtattgccaccttttgaaagcatgatgtgactgaagacatcgtcgtctatgaaatcgaaatgaaggcattgtcgcctttagaagacattctcatctatgaaacgtaaatgaacgcattgctgccttatgaagaaactttcgtcttcgaaatgtaaaagaccataattgtcttcgcatgccaacggactcgcttgtctctggaaggctaacgagactgcatagtctcganacaacataaaaaatggtgacctgattgctcg

SEQ ID NO: 103246 - DNA, 479 bp, Glycine max
  unsure (1)..(479): unsure at all n locations
atactcaagcttggaaataagcatctctcattgctagatgtaacagcagttnttattcattcagttgcagagtacaaaacatcttccctagttatctactttaatacttatggnnttgggttttcctgtttcttacgagtcaaacataattaacatattagaatgtgtatctgacacattgtgttaagactgagagggaggggtcgtattagaaaaagcataacaattgatatgaatttcggttgggagtcacacattaaccttaattttttgcaaaagtatacatttattcattcattataatttctcgtatcatttcttataattatataaaaattctcttggcattaatattctctcccccatacaggttgattgttttcatgtgtngcggaanagtgatcctccctttgttcatctacaattttcatcaagcgagggcttgctccatttgtatgcatcatcctttcaatctctac

SEQ ID NO: 103247 - DNA, 407 bp, Glycine max
  unsure (1)..(407): unsure at all n locations
accttgaaactcagctcttgttctgcttagcaccaaaggattgtccatgtcctcttctataaagagcttggctcatcacagattgctctcgccatggctcttgcccattcaaattcatctcataagatggattgcccttcatgtagtgactgtatcaacctggattctctttaatattacgaagagtttaattagctgggacatttatacaaagaataacataattctcgaacaanaatgtaattcaaacatatggcaggcatggaaggcaagccaccaattaatgcacatcctcggcaggggttcataccaagctganacacattcagatgagagaacagtcaccaacttttcctttgaaatagtagaggacaatttagtgaatttacataagaatgcatttctaa

SEQ ID NO: 103248 - DNA, 425 bp, Glycine max
tcctctaagtcacctgccgcatgcagcttggcaaccttgtaattattggcctgaacatctcgctagcataatttggctagagcatattcttttctctttaaaatctaatattacatttaacgcataataatattatattaaatccaacctcgatcaagcccaacaaaacatgggcctatatgaatttccggtcagactatgccggtctatattcaccatttggtccatcggtgtgtcaaattctgtgtgtccattagacaattctattgatctagtcatggtggtccaaacaaaattcaatatttatctatttattaacatgactaaaatacaactttaatttctcatctttatttttcaagccgaaagtcgctttaagattaaaaagctttctaatcgtatcaattaagtatctctatctgacc

SEQ ID NO: 103249 - DNA, 461 bp, Glycine max
  unsure (1)..(461): unsure at all n locations
ctgagcagtgcatanaagggtgccacanagcagtatgacgaacatgatctctcgatcctcaatattctcagttctagacatggcaacggaacgagacatatactagtatgcgattctccactccgcacacctatcccaattcttgtcctcattcatggcgggtatggatggttttcccattcatgtccccattaggaatcgggtatacttgcctcatactcctctcgtccaataattacaaaaattacgaataaaccataataattattctaatttataaaaacactaaatatattatttattcaatgaggcaagcttatacaacctacttgtcgtaaccaatatagaattctatcacaataacagagttctcatagaaatcatattcatatcacctacaaactatcccgaatcatgagacttgagagagaaaccatcaatccttttgacctatgtttgtc

SEQ ID NO: 103250 - DNA, 423 bp, Glycine max
  unsure (1)..(423): unsure at all n locations
cgagcttggttcaccncgtaatccaaggaatggaaattctgattgtcctatacttcaacaacatctcatagggatgaatgactcgggcatancttaagcttatgcacggaaaatgtaattatgaaattgagatgcccgaagaaacaccatttcctagttaaccatgcattagggaccatgttcaattattttggttttaagtgaaacgggcttatgatcccaacatggttggctcctaacacatgaaactaagaatgtagtgtgaaggttcacgcttcccccttctttgttttgttttganaggataacgcaggatgagctacatgataacaatggttgcaatcttgagatcacaaagttgttgacgcatatgatgatgatgcctgactcatgcaatgtgagctggatatgatatggacaatg

SEQ ID NO: 103251 - DNA, 411 bp, Glycine max
  unsure (1)..(411): unsure at all n locations
agctntaacctcatcgtctctcacagtctntagatttgtgagccaatccagtccttgtgttcgaactctcagccacttatgatagccgccgatgatcccattactgcttaccctaagctctctgtcctttcttcatgccgcatcccatgccttgcgaactccttggagtaccctcgcgttgtggtcactgaaacctcgtgcgatgaaaggcgtgatgctttcgtctgatggcactcctctcatgggacatccttcgcatgaagatagaatcctgaatcttccttccttctagcgagggaaccatttaacagacgctcctccatgctatccaagagttggtgcacaacaaacaattcttgcgccgctcttttcacatccccggtcgaacgtgtcatacatggccaaaatggc

SEQ ID NO: 103252 - DNA, 409 bp, Glycine max
  unsure (1)..(409): unsure at all n locations
tggacatcagaaagttcatcatgcanagatgtgaagcagttctatttgatgcttgcattacctttcactcgcccctagttcttactcaaattagtgtggtgctgacaatcacccacaatgactcttctttcatttatcgatttgcacggctctttgatgataagatgcagatgcatgcatgcttatgattgaatgttaaatgtaacaattaaacatgtgttatcatgttcaattntacttaaacgctactgcacccgttgaacgagctgaatggctcctggattagcgagcgagatcgagagtgtatgttcttaaagacaatataaagtaaaggacacaacattgcaagtagagatgcaaatatttacccctatttataatgctgcgattatggtttacaaaagatttg

SEQ ID NO: 103253 - DNA, 295 bp, Glycine max
atcgatgtttagtaatttagactacaggatagaacacataagcatgattgattagagaacatcttacaacatcagtggttggtagaaagaccaacatatcacctactctgtaagtttactcacctgcatttttattgtctttagcctagacttagtttaattgtattgtacaccatcaattatcaacgtctctatcaaaacgcccttatactgaagataactctgtctatactagatccctgaggtcgaactcggatcatccggctaatttaaatacttgaggatcggtgcgctt

SEQ ID NO: 103254 - DNA, 307 bp, Glycine max
tctcagcttactgtcattctgtcccccacacggagttgcttttttagggccccattgaataccggagatcatgttcaaagaaaatatcaagggctagtgcctcgaatttagaaatcaatcatgctagccctttagctgtgtgacgcctaaacagagatgtaacattgtcaaaaaaaaaccatcagcatcgctctattgtgactgaaccactttccaacatacattgctgctcgtgccaaacattgcccatatgacactctgtacacaaacacatctgaaacatttcaccaaaaaagacttttcatat

SEQ ID NO: 103255 - DNA, 380 bp, Glycine max
actgcatgtgaatgcatgtgtgcattcacaggcctaaaggagatatattggtgcattcgataagggaaatataaagtttattacttctgaatgttctgccacacgttttgtggcaacattattcttgttagttctatctaatgatattgagaaagcactagacaaaagactacttgaaaatacttctgtcttaatttattctacacaacatccattacgaaaactgaaatttttatttgcaattgaattgatatttgaagctaagtttctagtctgatttaacttcttcaggtcaacaaactgataaatgtgtgttcgatggaacactctgggacatcatccttttgtgcgatgaactattatttgacaaagacttttct

SEQ ID NO: 103256 - DNA, 354 bp, Glycine max
  unsure (1)..(354): unsure at all n locations
ntgtataatgagaatctatccttcacacaagcgttgagatntggcatctgatgtctgagagctctaggcagataagtctgctaaagctggaggtggtgctaaagtaaaagatgcaaggatgcgcactattggtggtaaggaagagggaatatcagctgctctgagcttggtctctcttgtctctggaacattaactatttggtcattcgcattccaacagttccttatgatataagctaagtcaatggccggtcttatggtttcataggagggaagggcatcagatcccactcccctcgatctacacaaagcctgtattaatgctgggaagcctaatcgagaagagttggactg

SEQ ID NO: 103257 - DNA, 299 bp, Glycine max
  unsure (1)..(299): unsure at all n locations
attcagtagtggaggaaaatgagagaattatgagagaagaccgaaaaagatgaggaaacgaagctgaggcgttgccaaatcacaagattgatcaatccctacatcgttccttgtgtggtgttcttcgtgcgactatcggntagttttgtttataagattggaatgtgatctatgaaaccctagggatccccctttgtttttattcataatcatttgctcctctatcatcggtaatctcatattgttgtgtgaacgttaatccaaaacgatcactatggtcggaaagctatctttagaga

SEQ ID NO: 103258 - DNA, 435 bp, Glycine max
  unsure (1)..(435): unsure at all n locations
acactctcaatactcaagctcganagctcttnanatgtgctgtgatattcaccatccatatggttgttattgagatacagatattcaagcatgttgagattgccaagctgaaccggtattcttccacaaaggttatngtaactgagatccattgcacatttgcaagtttcaagagaaccctaatggggaggtatttcaccaaagagataattgccatccattaacaaccatgtcaaatgagacagattgcctagtgctgcaggaatatatccagacagcttattgtctgagagcttgagaattttcaaatgctcaagtgttccaatctcatctggcaaggaaccagacaagttattctggctgagatcaagccgctgtatcctttgacaagatcaactttccggtgcgattcttccagtgaaaagacttgatgaa

SEQ ID NO: 103259 - DNA, 375 bp, Glycine max
tttcttgctacacaataaaaactcaacttgctaacaattataaataattattaatctataacaataatacaataaaataatatattatttaaatatggagggttgacaggctggccgaccaacccacgggttgagcccacctaacccatgggctaagtgggtcggactgaatatttgacggtatcgattatattttaaaaaaattgaacccaactcacctctggtccatagtgggctgggttggaccacgagccataacccattatgacgactctagatacatgtacagaacactagtaaataatattaaatagatagatagagttcttatatatagagtgctcattggaatattcttcacaatgaagtgttagc

SEQ ID NO: 103260 - DNA, 253 bp, Glycine max
tatactactcagctctttttattcacagcatctcgatatattattgtcttaatctgacatccgagtaataagctattgtacgctgaaattgttcagacgtttctgtttcaatttcgagcgtctcgatatgctacgggacacaattagacatctgagtcattgtaatcgtctcctgaatttccttagagctttcggtatcaatgacgagcgtctctatatattacgggactctatctgacatccgatttaaaag

SEQ ID NO: 103261 - DNA, 505 bp, Glycine max
  unsure (1)..(505): unsure at all n locations
catatacaatgaggctataagctggacactaactaactntgtgtttctactaacttctcccaaacgtggtaagtatgctaagagttactgcgcaaatcacgacaacttacattcttgtctaaggaacgacaatatcttttaacaaaagttggttaacaattttatatataacacatgtcgatatatataattctctcaaatatatacttgtagaaaatgctgataattgacctgaaggattgtatcgtgatcatgtcgagaataatacgaatcccattgagaanacccattatgctntgatcttgcttcgctgggtactccacccaacttgactgcatcttctattcgtctnttcatatctancgtatagttctacaacacaataaaagcacactgttgtgagaaggaaataggcaaccttcacaaaataattagagtatgccacaccttttatctgattcttaaaaaattatctcatgtcatattctcggtataccaactttta

SEQ ID NO: 103262 - DNA, 441 bp, Glycine max
  unsure (1)..(441): unsure at all n locations
agcttgattctagtgatattaaatgagtaatggagttctagtttagcgaccctattggaagcattctactgggttgacagaagttcttcaatttctttctgtctctcccaccgcttacatataaatataagcctcagctttctatacattctgaaacatttcgaccattggtctaattatttatattttaattcgcgattaaaaaaataggagtattcggaatgttcagattgtctgcttgaagagaagagagtatagttcttctgttcctattaggtacatttccagcacatcctgcaaggtgaaaatactagaaactgcactgccagcgacaagccttggatatttgatctgtcctgatgttaatgtgctcaagataaatggcgggaaagatgtgcaggcaacaatngcacatcgtgaaatttctcaagacccgaatga

SEQ ID NO: 103263 - DNA, 416 bp, Glycine max
  unsure (1)..(416): unsure at all n locations
cacatatttatcttaatgtgtttcgcctctataagtaacagaaaatgtntntacaactggatggattattaatatcacatcaaatacgaaccacagttaaatggttaaaccataactaaaaaaaatagttaacatctttaagtaaactgatcttatgtaaatacatttttcaattctaaataaattattaacttaaatatattcttaatcctcataaagttatgtctttttctcaattttaattattctatttataatcctatacgtcatactatagagataaaattaaaacgtaattatagtatgaaaattaaaaataactcgacaaaataaataaaatattaccaagaataaaatctcatttattataaaataaactcgaattgtttttttttctatagtaaacactgaagtca

SEQ ID NO: 103264 - DNA, 429 bp, Glycine max
  unsure (1)..(429): unsure at all n locations
catgaagctngaatcccttacactagagcgctaagcacgtgtgattgtgttttgcatgatggtcttgtgtgttgagcttgatatggtcatgcttatcttgcgaccactggaacaagataaggctagtttggttaaacttatatgttaagaaaacacttattgtaataaaataagctataatcttcttcttatgttgagaaacaaaatctatttgcttattatataagtacttttttaaaaagcacttatctaaaatattaatcaaatcgacccatagtgtggttagcgcatttccattcacataaccaatgcttntactttttatgtatcacatgattgcttgaggatatatatgcacaaattcatgaattgtaaaatggtccccatnggagagaggaggaatagaacctctctggactccattggagg

SEQ ID NO: 103265 - DNA, 441 bp, Glycine max
  unsure (1)..(441): unsure at all n locations
tgagatgaggaagtgntgaagggnganactatctgcatttattgttgaccacacagcggcacctggagatatgtcgcggcggtcaggagatcttgtgacgtcatgtggtgtgctattgcccataaccaagcttgaccaatcccgtaccatcccgggcatagtctgtcagtgaaaacctgtgatgtacctaaccaggcgagctccctgcagtcaacctgatataggaaaacaaagaccacatagcatgaggcttgtggttggctggccaacctgtgaattntgtgtgatatgtggagtatggtctctggtaatcgattaccaagggtgggtatcgattacaggcttaacatgaagacggatgctaagatggctctggtatcgataccagtggtgaatcattaccagctaaaacaagtatgaacctaggagccttggatcatt

SEQ ID NO: 103266 - DNA, 371 bp, Glycine max
tatctaagagggcaagataggacaacacagtataaggatctattgcggctctacaagcaaatatagaatttgacggacaccgtttccgaagtgaggaacatcaacgtcgctttgaagcgatcaagggttggcctttcctcatagaaagacgggtccaaaagagagagggggaatacacggagttccttgaggcagtctccacgaagcaatggacttcactcacagggcccatggctaagtatgacctggaaatagtcatggaattctacgtgaatgtgtggcccactgatgacgatagtatggataagcgctcctatgtactgtgccaatggttccctatgatgaagatgccatcaccagttcttggggca

SEQ ID NO: 103267 - DNA, 417 bp, Glycine max
  unsure (1)..(417): unsure at all n locations
tctagcttggtcaaagatgtgaaaggggagtttttcacttggagcaaaaaaactgttgcatcttaaagggaaaggatgttgttcatgatntgagaggaaaaagaatcaacagggtgctcaaatgattaagcattgcttcaacaaacaaaagctctggttcatagattcacttaaagaccaaaccctgccttaaaacagagtgccttcaagatatgcaggctctggtatcgattaccaaagacaggtttaaatactgtgaaagatataattgattttacatgtatcattccgcactaaactccgaattaaatcaaagcatgactctcaattatactgtgaacgatactcaacttgtatccaaccagggaagtttcaaaatttctacagcactctttattaattggatggcatcaagct

SEQ ID NO: 103268 - DNA, 271 bp, Glycine max
  unsure (1)..(271): unsure at all n locations
gttgatcatatgagctgactataacaatatagatctccatggataacatcctctccctaacacagtggaaggcaaactctatatgcttggttctttcatgagacactggatcggaagcaatattgaacagattgtctgtgttgtcacaatataccacatctatatatgttttgaccttcacacaatactgcaccttctcagaagaagttggttgatccacactaactcacaagtggncgtggtcatggtcctatattctgctcctgcaatg

SEQ ID NO: 103269 - DNA, 368 bp, Glycine max
  unsure (1)..(368): unsure at all n locations
cataatgttataagtaatagaagctaactgcaatgagttataaattacgaacaaatactatcagtcagaacaacaatgctgcagtcaacatcatctataatcacattatctataagattggtacctgagggtacctgtaacagtagcatattaacatcccgcggaacaccactcagcagggcagaaatgttccactcccacccctcttttaacctgcaagtcaaagcatcataaagtagccacgacctgacccttccacatactttaatgaaatcgagtaactctcttctattcgaatgcagtgcngcatctagtcttacaaatctatataatccctaatttacataaaatacataagaaatgtgttg

SEQ ID NO: 103270 - DNA, 295 bp, Glycine max
tattcgatgaccacagagtgtgtcctggagatatgtctcgggggtcatgagaccttggggacgtcaggtggggtgctatttcccaaaaccaagcttgaccaatcccaacccaaccctggcatagtcagtcagtgagaacctgtgatgtacctaaacaggcgagctcctggcagtcaacagataaaaggaacaaagacctcaaagccaggaggcttgtgtggtggctggccagctgtgaactttgattgatatatgggatatggcctctggttatcgattaccaagggtgggtaat

SEQ ID NO: 103271 - DNA, 275 bp, Glycine max
  unsure (1)..(275): unsure at all n locations
gagggcgatgctatactcgcgggatgcgtgttcaagatatgaatacgcgtggagttaccacccaacgtttatttgaggaaaccgctcggaaataccggaaaagacgcgatctacgatcttttaagttgaaagggtcgggagtcgttttacccacggcgtatgattaacactctcaacgtcttnccaagggactgtagcctttaatcaatgtgcaacatgacgtgattttacgtccctttatggcttatatcgttatcgcctatatatttcccttt

SEQ ID NO: 103272 - DNA, 430 bp, Glycine max
  unsure (1)..(430): unsure at all n locations
aatgagcaccaaatattacatagaacatttgcaacagtctanttctcatgctaatcgattaaatcttgttcgaaacacaaactaattatacaaaaatggttctcataacacggggagtcaatacccactagaaataaactcattgtatatatactatttgcagacaatctcatgaatcatgcctacatgaaaccattggatgtctagaggtctagctacattacatcctactaatagaaaatattattagcttagagagtatattcattcgagatattatagcgtcacactgctatatacaatactatcacgttgtagatttataatatctatatggattaaatacatttctaattagacacatgctaaccaatattcttatgggtaaagaattagaaggaatagtaatgtgaccattgaaaggtacatt

SEQ ID NO: 103273 - DNA, 208 bp, Glycine max
agcttgagatgaggaagtgtggaagggtgaaacttcttgttcttattgtttaccacagagtggcacctggagatatatcgcggtggtcaagataccttgcggacgtcatgtggggtgctattgcccaaaaccaaacttgaccaatcccgacccaacccgggcatagtcggtcagtgagaacctgtgatgtacctaagcaggcgagctc

SEQ ID NO: 103274 - DNA, 384 bp, Glycine max
  unsure (1)..(384): unsure at all n locations
cgatatgtcagtgaatgtgaatgtgttgagggtttgatggaacctgttattcgtaggagtggagcatagctacgggtccttggttgtaggtgttgctatagcctttggagataattcccggcttatagataatagccaggagcttatagataatgttagagataaactatagcttatatataaaagctagaagataattgtaccttgtagataattttgtggctntgtagataattaactacctgccaatagataaagatattaaaatatcaataggttagagataacttgttatttgtggagcccgactgctaatggctgagtgttcgcgcttctattgcagggctgacatggagggttgacctgtgtcttatagtgccatgt

SEQ ID NO: 103275 - DNA, 143 bp, Glycine max
ttaagaacccagctgcactgagaaatttttcccttgcgttcagggggggctatggacattgtttcccatcctagcgccataacctcctttcctgaagacaccatgaactgagcctacgtacttccacgtaacccatattctcg

SEQ ID NO: 103276 - DNA, 384 bp, Glycine max
  unsure (1)..(384): unsure at all n locations
atctctgcaggatttgcaaagcaaattcaaattaattgaagttatgtacgagcactgtagtctttacaaaaataagcactacagcttatctaaggcataaattctgtagcatctgcagtatatgggtggaaaaagagtgggagtggaatattaaatggagaagacacttgtttgacagagagctngagatagcatattggttccgctatgatgttgctggcagctgtattcatattcacaacaaaagatgactggagaacttngacaaggactctgccttcacctacagctattggtcatctaacataacatcgggattcgtcttggctgataaaaaataaatgtggggtgacaaataacactgcagaaggtttttgttcctta

SEQ ID NO: 103277 - DNA, 240 bp, Glycine max
  unsure (1)..(240): unsure at all n locations
cctatacatactcaagcctctggcgactgggaagcacgttattctgttgatatccagatcggttcctttcccaagtatgtgtatatctatattatatntagtgttctggttgatgatcgtatctcgttttgtgcacacgatacaacacagaagttgagatgagagtcgtcattgcgaaaagggcaagactgactatatcagngtcctatctttgctttcctcttatctccgatgagaggt

SEQ ID NO: 103278 - DNA, 413 bp, Glycine max
gcttctttgagaaaacttccttgagaagctagacttatctacacacacccctctcataactaagctcacctccttgagaagcttccttaagaagattcctaaagaagctagagcttagctacacacacctctctaatagctaagctcacccccatgacaaaaaaacatgaaaatacaaaaataagtctttactacaaagactactcaaaatgccccgaaatacaagggctaaaccctatactactagagtggccaaaatacaaggcccagacgaaggagaaacctattctaatatttacaaagataagagggttcatacttagcccatgggctcgaaatctaccctaaggctcatgagaaccctatggccttcccttggatctctagcccaatctacttggagtcttctaccc

SEQ ID NO: 103279 - DNA, 456 bp, Glycine max
ccggcatctgtcaaagaatctccagcattttctctgggtgcaattcgctgtctggaattcaatccatttgcagtggaaatgtcaccattactgccactggtactgcctccaagacgaaaagagatccaatcctcaatgaagacaccttttgacatgtctgcatgatctctcagttcatgctgcataaatgattctgctggttttggagggagaataatctgaagggatggatcttctcttggaaatgccagtggattgtcatccaagccaccatttaaatcatcatcacgtcgacctgctgaggaatctggtaccagagtgctagatcccatagcagtatcaggagccaacatataaccattcaatgatgaggaacaattaatattgccatgatgcaaatcaatcaatgcatctgaaacatcctccacttcagaactgaattattggaatcctgag

SEQ ID NO: 103280 - DNA, 360 bp, Glycine max
  unsure (1)..(360): unsure at all n locations
gcaagcttgcaaatggaaataaagagcgaggtctacattctacttatatnttatgaaagnttctntgttcgtctttttntgaaatatgaaatatagaaccactaagacgttccataaattactatggccctataaaaggcagaatntttatattcatctctttatccaaatcctaccatatatcaaaacgtcaaaagagagtattcaaatatgaaaaagttgtataaaagaaaagttggtcaacatattttaaaaagcacggttaaattgtaggaatatacttaaatggtacgtcttatatgtacaataaggagaataagcgaaacatttaagtttggtaaaaatattaatattttcatt

SEQ ID NO: 103281 - DNA, 289 bp, Glycine max
  unsure (1)..(289): unsure at all n locations
tctctcctattttgataatattgctagcgctccttgcgtgggtatccctggatgatgtatcaacccaatttcatatatagacttatagatanttatgtgctgacatattttataagaggattgagaaatgaaaaagttatggatgttacataaattgtgactacacatggcctatggtgttattggtttaattataattaagtatagttctacttgtgcattgcgatgttattctataagttgaattcatgatgcttgttaattaatgttaggagacattgacattatg

SEQ ID NO: 103282 - DNA, 410 bp, Glycine max
  unsure (1)..(410): unsure at all n locations
aatactcagcttgctgccaccctatttaagcccggtgacggatcatttatgtactttgatatagtagcctttctactcatatctaagttggtggtggtaattgaatattaatagatccaaatttctaaaggttactcgatctcactcaattttaataaaagaggacacgtctagctattataatgagtaactaatcttaataaataatgagaatgaaaaataattggatctcttatcttatattaatatcataatanaagtcatacaacatgatatatattacttaacttttcttttgtgaacttatcgaatanacaagtaggagaattctccttcctttntcttgtcttgaccanaaaatggatcttctttttctttttttcattaaatctcttcctcttttcttacct

SEQ ID NO: 103283 - DNA, 361 bp, Glycine max
gcttctgtgagaaacttgcttgagaagctagagtttagctacacacacccatctaaaaactaagttaacctccttgagaagcttccttgagaagctagagcttatctacacacacccctctaataactaagttcacctccttgagaagcttccttgagaagctagagcttagctacacacacctctctaataactaagttcacctccttgagaagagaagctagagcttagcttcacacccctataatatcttagctcacccccatgacaaaaaacatgagaatacgaaataaaagtccgtactacaaagactactcacaatgccctgaaatacagggctgagaccctatactactagaat

SEQ ID NO: 103284 - DNA, 273 bp, Glycine max
  unsure (1)..(273): unsure at all n locations
cgtgcttgnttatttaaattcctaggatcatgtgcatctatgtgtgtcctactatgacttgagaaacacaatgtgatcaaataacaagcagatatttaataggtactagtgtgcctcttagtagctcttctttaacgtcttgagctggacgcgcgatgacttgtttgtcacacacctagtacatttgcttacctttggctttggacttggtcgcctgctggttgaccacgggtcgtaggccacgctctatcttttgtatatgagatgaagggc

SEQ ID NO: 103285 - DNA, 308 bp, Glycine max
  unsure (1)..(308): unsure at all n locations
agtttctcattganatattctacagggggtgttgcatgaatttctaatcgccataacatatgattcatggatatgatctaagcattctttctttctgtacatttttagccactagccaaacaactatcccaatgaatattattttatcattngcaagctctttgagccaaacacttgatatttttgtggaacactaacctaagataaaagtctcctaccttaccttangttacgagagcaaacgcgtgtagcaggggatgtctatcatttggtggctaatatgatgtacatattctgtctttaatatg

SEQ ID NO: 103286 - DNA, 401 bp, Glycine max
  unsure (1)..(401): unsure at all n locations
cgtcngagtagctgagtctgccgctattaagtaacatattgtctttactctcaggagattctccatgctccaaagcccacataatccgagttatatgacatgttcttactatgtgcttccacaaaagatctcctatgaaagggatcttgttctaatacaggcttgagatctctagctcaggtcctcaattcatcacatgaggaaacccatgaatatgcagcgtcagttctagctgattcattcattgcaagacatgacatctgtgatagtcttgcgactgatgagattgacttccttgctgaaacttttgactatcaaactcaaattgtgccactcaatcagctcgagtgttaatgctctgcttcgtcacaagaacaatgctgcaatcaattgcttatatt

SEQ ID NO: 103287 - DNA, 509 bp, Glycine max
  unsure (1)..(509): unsure at all n locations
ntgctatctcttctctcctaacatcatggttgatttccattccgattcnccaagatgngcatgcatacttgcaatttgtttggtgctcggcaaagaaaggccaacaaatcatangcacacctgcagatatacctttcagtgtagaattccaaccacaatgggttagaaaggccccaactgatggatgagaaagcactttctcttgaacacaccaactcgttatatatcccctgtccttgatcgcatcaaagaactctngtggcaaagatatagattcacccattactacatctggccttattatccataagaaatgttgctcgctatttgctagtccccaagcanattctttcaagtgatgctctgtcatcacctgtatacttccataattaacatatatgactgagntagggtcccatttgtctagccatgctaagcantttgaatcatttttcataaacttgatcactagccttgaagccctttctttctcagacaatgctatcatc

SEQ ID NO: 103288 - DNA, 384 bp, Glycine max
  unsure (1)..(384): unsure at all n locations
agcttctcaaggaagttntcttaagatagcttctctgtgaagttttcttaagaaagcttctcaaggaagctacctagtctataaatagaagcatgtgtaacacttgttgtaactttgatgaatgagagtcttatgagatacacctcaaagntccacttctttccttcttttattccttcaatttcgtgctccccccttctctctttcttttcctccattaaagcatcctcttcaagcttcttatccaaggcaattcttggtggagaaactccttcttccttggcttattccctagtggatggtgcctcccctatcctcttactctttgcctccgctgcatctccatggtgaaaaatcaccattgaaggacctcattgaagctca

SEQ ID NO: 103289 - DNA, 511 bp, Glycine max
  unsure (1)..(511): unsure at all n locations
agatactcagctgatgaaaagtgtcaacaataggagagagacgctttagttgaacatacatcatctgaggggagccctaaattcaaagaaatgatcacttcatgaggattttttgatgaatcaaagtttaaatgtctgtccagaaacaatttattttgtactaaaaaatacattntcttgatgtgaaaatcttatatgaaataaatgagatatcttctactatctgttcatgatatatactcctctgcatatgatataatcgactaacgctttaatggaaaatcttataagtttgccttcaaccttcaaatctgtcgttgtttgacatcataaacaagagggagatggttaagtcaaacgacatntatgtcctaagatgaatcaaaatcgcttactattttgattagatgtcaacatattacaaaggttaaaagatgtgtcttatgcgctattacaacatattttcgcgatgtcagtgtctgacgttcacatgatagcacgacggatcatg

SEQ ID NO: 103290 - DNA, 365 bp, Glycine max
gctgcagctaattcctcaagcggatataaagtgtctttttaatcagttcacctttccagcgaaaccaaatttgcaaagcttgaagctgtacccacatttttatatagaacaccgaatggtctactacattgaacatctccttcaatattgggcgctctgagctgccaatccctcaccttgggcgattcttgaaaattatgctcctcttgcctgtttgtactgattctttggaccatataaatgtactatctgctaatgaagcaccatatgtcttctaaatggcccggaaggtccgatatatctagggacgtatccaagacttctgaaaaagctaccatttcttttgagatgccctttctactgac

SEQ ID NO: 103291 - DNA, 326 bp, Glycine max
  unsure (1)..(326): unsure at all n locations
tcacggaaacatattttccacgcaaatttgaaagagagagaagtgccttaagggctgaacccatttcttcttcacttcctcccctatatatagcacaatacgggagatgggtgccgcccagctcgcccatgtgagctcagttcgtccaggcaagccaggttgcttcctccagaagcaacagccttctggaggaatcntctggagggcccaagtgggcctgggtgctatatgcacccccatttctactaagtacactctcctctgctgttttgggtgattcttttcttggaaagttacggaaacttacgaagttcgtaacgatactt

SEQ ID NO: 103292 - DNA, 403 bp, Glycine max
  unsure (1)..(403): unsure at all n locations
agctngtgtctaagctgactttgtagctgctcaatatctaagtagnttatgctttcatggngagcaagagcaattgatggagctgaggtagaagctgaagcacagatgatgatnttaataattatctgcctaatgtcaaagtcatcagagacacacacccacatctttaattggaaaagntcatcaatcctcttatcattgaacaccaactttgcaagtgtagtcttccacatgccttcaagacccactatgggaataacacacacacttttatcttcatcaccattcccatgaaggtgaggttgcatcacaagctttgataatttttccctatcattatcccttccaatcactcctgaagcatcaatatgtgaataagtcatttctcttcttgcacaagtct

SEQ ID NO: 103293 - DNA, 466 bp, Glycine max
atgagtaccttcaaacaacaataactatatacttggatgtctgattgacacctgtaatatattcagacgctcgtaattgaataccgaagctctgtacatactcagacgacaaatagtttcctactcgtatgttcgattgactctgcgaatatatcgaaacgctcgaaattgaagaccgaagctttgagcaaattcaaacgacaattactctttagtctgatgtttgattgactcccgtaatatattgagacgcttggacttgaatgccgaatctctgcgcgaattcaacgacaataactctttgctcggatgctgattgagccccatattatatctagacgctcggacttgaatgtcctacctttgaacaaattcacacgacaataaacttttactggcgagtctaattgagcctgaattattctaaacgctcgaatggaataccgatctctgaaaaattcatcga

SEQ ID NO: 103294 - DNA, 416 bp, Glycine max
  unsure (1)..(416): unsure at all n locations
tatacctctgaaatacttaggctgtacttgattaacattgcctttgttcaatgcagaagtaacatctttcttcagtcacatttgttgtttaagaaaatgaaagtttgtcttagaaaacgtaaaatggtgtttctaactaattcccaaacacacactagtcatggagaatttgattgcatattgtgaatcaattgcccaaangtttaaattgttaagacataggtcttatattatatttgtaacataacaaaagagattgatggcaaaaatacatatgtctgattaaataataatagtccgactaatttctggttaatgtatattacataagatcttcataattggttctctataaacttccattaaagaattaacaattaggaagttttattagatattagtatgtattaataaaa

SEQ ID NO: 103295 - DNA, 357 bp, Glycine max
  unsure (1)..(357): unsure at all n locations
gtgaagataggatgtatctgtcgaatgagaaattctgatttcgttcttggtgtgcactatctggcacgaccacaagagaaaaatggttgcatctgcttttgaggaaaaccatgctggcgcgtctggaactctccttacacgagatgatctgaagtatctttttatggtgtagactttaaaccactccttgcttgtcttcccatgatggattatttgaagattcgttttgtgtgtttggcattgagttaggatggttcttaaggaggaggggatgactgttttttgagtacctgctgacatcnngtgcacaagttggcaggcactgcgaagcttgtttatccacatcggtacttgatc

SEQ ID NO: 103296 - DNA, 412 bp, Glycine max
  unsure (1)..(412): unsure at all n locations
cgagagagagacctctaagtgatgcaaagaggagccgactgtgagctcacgataggtgaggtgagttattataacaattaccgctttgacaccatacatagggtcagggaacctaactatgagaatatccgcctgttcctgtngcatgctgattttctttcaagaaaactatgtnttaaactaatgggatgcgatatatatattgctgatgaataacattattggatattaaacttgtgtcgtttgaagacttggggagtgtggacctcgggcatgaaacatatatttgtagaagcaaatgactctcgtgttgtgataatgatcatgatgatttgatgcaaatgggcttntcaagtttaaattccagataatgattcaggaatacaagccaccacatcaagatgatcacttg

SEQ ID NO: 103297 - DNA, 346 bp, Glycine max
  unsure (1)..(346): unsure at all n locations
ccggatcctcaagtcaccgcggctgcaagcttttggttttgttntctggctaanataatctctggttatcgattacaagcagttatttttggcaatggtgctctctagtaatcgattaccatatttgtgtaatcgattacaatgcatccctacacctatatattcagatttcacattctttaacctgcaactgttcttctctcgattaccctcgcccccaaatgttcttccagccatatctcactcaattcttgttcaaatcactccacaacaagcccaaacttcttccttttccactctcctttattngaaccgactgaaatctcgaaaaatcccttcaatggat

SEQ ID NO: 103298 - DNA, 450 bp, Glycine max
aacacagctatcaaacccggacaacacgtactctgtccaaggctcgttatacccatatgttaccactggagagccctcccgttgctaatttacatctacacaggaactcaaggtacgcaaagtctaccttcgacaatcttttctattcctaactgatacctgtgaagaaatacaactctactggaacaacaaatacccaaggtccgcccttggcaccaaaacacaaggtcagcccttgttacacactcttacaagacccaaggacaacccttggtacgtactcctacaaaacccagggatcccttgtttcgctcactcatacacaacgaaaccaccgcaaggccaagtcaacaaacaactactaccaactatacgaagacttcataggtggagcaacttactccttaccatagagagaacttgagaaaaatacccataccaatgaggaaa

SEQ ID NO: 103299 - DNA, 303 bp, Glycine max
aacccaccatcccttggtgcccacctccaactgagctcacgtactcccacgtagcccatatcctcgtttctctcatcaccgagaccccataaatgctcacaaagctcctcaacatacagggaattcaacatcccaatcatcacaaactaaaaaccaagcaaaacagggcaaaggtagaaaactctgcccaaaactcaaaccaaaatcacagctgtttctcacttaaagaccaccagaacatttccttcgttccaatacgttcaccggtggatcgactcgaaaatattactggaagtctctagt

SEQ ID NO: 103300 - DNA, 479 bp, Glycine max
  unsure (1)..(479): unsure at all n locations
cacttcaaactcagcttctaaggaagttntctcaagaaagcttctcaggaagctacctagtgtattaatagaaacatgtgtaacactggttgtaactttgatgaatgagagtcttgtgagacatacttcaaagttccacttctctccctctnttattccttcaatttcgtgctcccccctctctctntctctccctctttcttttcctccattgaagcatccttccaagcttcttatccaaggctcatnttggtggtgaagctccttcttccatggcttattccctaatggatggcgcctcctttcacctcttttcctttgtcttccgctgcatctccatggtggaaaatcaccattaaaggacctcattgaagctcanagatccagcctccatagaagcctcacaagcaagcgttcatcaactgggaccttctttcataaaggaatggggtcatacctcgcgaacatatcttctttac

SEQ ID NO: 103301 - DNA, 393 bp, Glycine max
tgagatgaggaagtgttgaagggtgaaacttcctgcttttattgttgaccacagagtgttacctggagatatgtcgcgggggtcaggagaccttggggacgtcatgtggggtgctattgcccaaaaccaagcttgaccaatcccgacccaacccgggcatagtcggtcagtgagaacctgtgatgtatctaagcaggcgagctcctggcagtctacagataaaaggaaaacaagaccacaaagcaaggaggcttgtggtggctggccagctgtgaatattgtgtaatatgtgagatatggcctctggtaatcgattaccaagggtgggtaatcgattacaaggcttaaaaatgaagacaggacgctaagatggtctctggtaatcgattacca

SEQ ID NO: 103302 - DNA, 448 bp, Glycine max
  unsure (1)..(448): unsure at all n locations
taatactcacttgctgatataatttgctaaggactatctttcttgttattacaagtagaatcttcatcaacatatattggaatgaaaaatcttgaattagttgtcataccacctgtaatcaacaatcttgttattccacttaaggaaacaattagaacaatttatcccctaccatctaattgttgcaaaaaatcgctctccaaataaaaanaattcttattctcttgtatccatacaagaagaaaagtctaccaagattttgattaacatttaacatgattgtgtcatatatttacttttgtttaaaagtcattgtagaagtcaaaaatctatgttctttttctatactttctcattcataattaagctcatcataaatgagtctattttggagattccaaaatcaatgtcatatatgccctaagcatacattcaaaatcactcaaac

SEQ ID NO: 103303 - DNA, 474 bp, Glycine max
  unsure (1)..(474): unsure at all n locations
acctataaaactcagctccagattgggagcaaatccctgctgttcttcttgtagtctgangaaacactgctatcaattaatgatggtttatgtgttctctgtgctatcagattgtctttcaggtgcttggcttgacatgtaaagctgcttgtaagatattcaacagtggaaactggtttcattcttaaaacttgataggacacggctagtttatcgtattgtcacgaaggatcggggtacagtaacctatttgttcgtatgtttggcttaatacggctctggtcgagtttagtccaacaagaggaatcagaggacgatgcttgatcacgattacgctagattatcacgaggaatcggggtttagcatttcatgagacactatacaacacatgagcatttgttagtagaatatccttagaacatcatgcacctattaagaagaccaacacgttgtctactcatctntatacatca

SEQ ID NO: 103304 - DNA, 431 bp, Glycine max
  unsure (1)..(431): unsure at all n locations
ntctgaaatgctcattacaccacttcgaccaatagtaccaatagttgggcgcaacgctgtcactccacatcgagctgcaggaaaagttatggatccagctgtttctgtaccgaatgcaaatggaaccatacctgtaatacaataaataaaatcacttanacaggaaactaaaattttaagcacattcttgtttttttttttggtgtgcaataattgataaagataaaccatgaaatggaaaggacctataaagataaaaatgaaacaaagaaagacaaaaataagtgcaggcattaatggaagataacctctgaaaagtacctgctgaggtgcttgctgcangtccagcagatgacccagtagaaaattcctcaatattccatgggttcctagttctaccaccaaaccaaatatcatcatatgccantgat

SEQ ID NO: 103305 - DNA, 478 bp, Glycine max
  unsure (1)..(478): unsure at all n locations
ngctaacccatggaagctcctaatatctcccatactttctgttgtgggccattcttggatggccttgattntctcaaggtccacttggaccctatttctaccaactaccaaacctaagaagactatattatctacacaaaaggtacacttctctatattcgcataaagggtgttnttcctaaagactgaaagaacttgcctgaaatgtcctatgtgatcatctaggctcctactgtacactaaaatatcatcaaaataaacaactacaaatctacctatgaaatcccttaagacatgatgcataagcctcataaaggtgcttggtgcattagtgagcccaaaaggcatcactagccattcatacaaaccaaacttggtcttgaaagcagttttccactcatcaccctttttcattctgatttggtgataaccacttttaagatcaatttctgaaaagatattggcacaatgcaactca

SEQ ID NO: 103306 - DNA, 469 bp, Glycine max
  unsure (1)..(469): unsure at all n locations
gggttcgagatacttacccgntgtatatcgaataacgatgtataacgaatgaagaacgtcgaagaacgggtgaaatctttgcgaaattcctcacggaaaacgttacggaaatgtttcgggagcgcctcggcttagattttcttcacggaaacaattttccaagcaaattcgaaagagagaaaagtgcctcaggggctgaaccccttccttcttgctttcctcccctatttatagcaaaataggggaggtggttgccgcccagctcgcccaggcgagcagggttgcttcctccagaagcaaccgccttctggaggaatcttctggagggcccaagtgggcctgggtgctatttgcacccccatttttactaagtacacccacctctgctggtnttcggtgaattctttttcgtaaagttacggaaacttacgaatttcgtaacgatacttgttttctttccgtaatggta

SEQ ID NO: 103307 - DNA, 470 bp, Glycine max
  unsure (1)..(470): unsure at all n locations
tgcccttcagctgtggcaacactagagacacagtcttggctttcttagcgctgagtgggacaaagttcagtgctggcagacctggctcttctcaagtcacggtgtgaagcattcaaaagcctctacacaaacacatgcactattcgggcttagctataaaaataacacacttgttatcactcttgtaaaaaatctacatttggtatagacattttatcattttttatataaaaaggaaaacgagtaattctgagaaatataactatacatgggaaagatttaaagttagatgatcgcaataaaagagggatatcgcttttgtaatcttgactatcccgcataagatctaattgcgaatacttatatcttctcgttgtcacatccaaaaacattctcactacatactattgtttgaacacacccatatgtncattctataagtcatagtaatgttggattccaacaaactt

SEQ ID NO: 103308 - DNA, 390 bp, Glycine max
ttcttgagttaactctcatctcacaaaagtctataacatttaatttacaccttgcttcaaactgtgtgttaagagcgaacaacctccactcgatctcaaagaatatgacccacctcaacactccaattttacccagaaaagaactctgctttcacatcttgccactcatattacctcatttgctatgccgaagtctttccaccagtcctaattgacatttaaactacgatcacctcactttagacttcaaattacactaaccccaaagttatctgctctaaccctcagaatctcacactcttctacctacaacattgccattctcacatttagccctgaattaactttcccatcatctttccaatttacataaacatcttaaccacaacg

SEQ ID NO: 103309 - DNA, 468 bp, Glycine max
  unsure (1)..(468): unsure at all n locations
acttgtagcttcaatgcaaggaaacatgcttatggctatttatccaaaaatntggtttttagaattaggaagatatgaaaattaggatctgcttgtgagagtttttgctcgaatttgggctgccccatgttagatactctacatagaaggtagcattggaatacacctcgctatagtggtttgcatacgtaaatataaggagcatgaaattcctagcaaagtatgaatacattgttctcttgaatgaatgtatgatagtgtggaatgcctttttgaatgcaagtgtgtgcataatgtaaatagctcgccaatatgaataaatgtgaaagaaacagtataataatattttgatatatatttcacacatatgtaggtagtttgtgatacaaatgttacgatataaatggggtaaagtggaccacactttagcataaagtgtgtttcttttaaatgttatcgctatggaat

SEQ ID NO: 103310 - DNA, 240 bp, Glycine max
gttcaatttcgagcgtctctatatgtgaggcgccttgatcagacatccgagtgtaagagtatgaccatttgaatttctggagagcttccgtccttcaattttgatcgtctcgctattttaaccgccgtaataagacctctgtgcgtatggatttgcccattgtattttctggagagctcccgcgttcatttcaagcggtccattttgatgctcctgatcaaccttgagctaaagtttgac

SEQ ID NO: 103311 - DNA, 478 bp, Glycine max
  unsure (1)..(478): unsure at all n locations
atctgcaaccttggctgtcaaattgtcattcaacaatatattagtctacttcacgtctctgaggattatgggagggttggcaagctcatgtaagtatgcaagtcctctggcggaaccaagagcaatgcggagtctcctcttccagtcaagatgaatctcagatctccctgcaactcacattgattgtttaaggggttttattaattcttttctcttgtagttgtacataaatgccaaaaattcagttttacagtctttcagaatgtgagtttggactaactcaaccccaaaaattctcaggggatgagaattgtccctcacttatatattctatctttggcttttctgtagccaatgtcagatttattttgtttccaatatacaaaaacatgtgtactcacttgtctgtgatatttctgctctatgcaagattntttaccaaacatgtcaatcagcacaacagaatggtaagcttgcc

SEQ ID NO: 103312 - DNA, 344 bp, Glycine max
  unsure (1)..(344): unsure at all n locations
actcagctnnctcggagccatnacctgcgagaacaaacatttataagttatctctacaagacaatgcttatcttaacgcaaaacatgtcatgcttatctctctgattctaaaacgaaatgaccccctaccccgatacaagctgaaccaacgatgtgtggaatntcctactatctatatcaacatagaggccatccaacacactttaattggtcatacatatatgcctctcaaaagaacatgcattctcacgcctaaagcaatgcgtcaaaactacttaattaaattctaaacatttgctattaccaactacctactatgtttgaatatatatcaacaaatttta

SEQ ID NO: 103313 - DNA, 499 bp, Glycine max
  unsure (1)..(499): unsure at all n locations
ttacggacctataaaactcagctttgaaagggaatttagcctggtcacaggtagttgtatttaattctagatngagaatgntnttcggtaagctgaaatctaagtgatctggaccattcatcatcaatgaagttatgccacatggagctatgatattggaggatctagccataaaaaagacaaggatngtgaatggctacagaatcaaacactacttgggtggtgatgttgagagtctcaccactgttatccaatagtaggagtttgagccataacaagggcgtctgacttaaaagacgttaaagaagcgctcctggaaggcaacccaatatttctaaactctggtttaaattgtgttacttgaattctatctcttatgttcttgaattataattttgaacttgacttctaagtttttattgaaaaattatgttttcgaatgtatatgtttcaacttcgtggttgagctatagtgtgaaattgtgcttacatattctag

SEQ ID NO: 103314 - DNA, 477 bp, Glycine max
  unsure (1)..(477): unsure at all n locations
aagctacacctgatgggcagacatggaaatctctttctgaacattgtttgtcttggatagtgctgattggtataactgtatattcattcaaagaagatttcagtatgacaaactgagataattatgcattaaataccaatgcagcagcataggtgcacattagaagatgaaaatattggtatgagatatttaaaaataattcccaggaatctaacgttcctaagaattgtaggggtgggtgggaatctaagattcttgaagaggggaaagtttttcattaactatgtctctcattaccaggaatatcttacacggcatatttacgacattcttaggaaacataattcctaggaaacatgactccatgggatgaaagaatattatgtataccagacgtntagagtatcnttcttttagccaccccacacctgacctggataaatatgcatagtntgacatatcaactcttaacttgag

SEQ ID NO: 103315 - DNA, 484 bp, Glycine max
  unsure (1)..(484): unsure at all n locations
ntagagcccacatgtnnttgggtnttccttgtgttgtggttgttgatgtcggaaagaaacctaatcctaggagtcaattaacttcatcattccctttttgtatattgaccatacagcattggtctcatcctattaattaacatactaacataaacttttcgtcctggccagtaacttaattatagctattcaatttcttcaacctctctggtaaatttctttcatgcatgtgcaaggaaaaatgtccattcggccgaaacaaaaaaacgaagcattgttcatagctccatattatttcaagtaatcactgtcactgaggtgcgctggtcaaaatgaggttctgtcattccaatatgttgttaattagtccaatccacgataattgggtgtaatctattcagatgccgatcgaatgcaatatagtcgatgcgtgaaagggaaactgcatacgtactatacggtgcacattctacgtacgtgatat

SEQ ID NO: 103316 - DNA, 419 bp, Glycine max
taatgaatcatacataagcagaaccctaatctataacaatttataatttaatgagaacagaaagacaccaatgaagacttggtgaacctgcgacgctaacaaaggaagaagaagagatgacaaaggatgatcggaagagatgaccaaggatgatagaaaaggatgacgaatcatatcggaagcaccaaagagaaaatcgcacagcatgccgtgaggaacaagacagagaaattttcacggcctagaaaatgaggaggacacgctcagacactctgaaataattgaggacatcactgtccacacaatatgtaaggaatagatccccgataaaaaatgtgagaagcagataatctgagcctcaaaacaagacctcccgagagcactcacctatcgaaaagctcaaaaaaacactaaaacca

SEQ ID NO: 103317 - DNA, 478 bp, Glycine max
  unsure (1)..(478): unsure at all n locations
tgttatgaccatnttgtnggagattataacacatataggatacatgttataaatntaatattggaaaaaatccttgaacaactcaacagtaaaatataatacaattgcttaggtgatttttattatatttttattatttaataattataaataaaaataaaattatttcttaaagaaacaaaactaataaatgagtgagttctctattagtctctcctactcagctccgctcacctttcctgttcgactcatctttgtttcctcttcctcttctctacttcctgcatctacttgttntttaattctcttcatttcctctttgcctcgnttcttgtttatgtgtgtgttagtggttgtaagcttgggttntatttaacttctatttcatgcttactctaacctagtggcaattaagtttggtcgtgataaagcgattgactacagtgggattatttcaccacaagcaaagcacattgac

SEQ ID NO: 103318 - DNA, 480 bp, Glycine max
  unsure (1)..(480): unsure at all n locations
ctcaacgctataagaacanaattgcctcaattattttcatatatgcattttattaggacggggaacaagaatcaagccaaggctattgtgctcgcaatcaatggggcaaaacacaccaaatgattatgacgatggatggctcatattctcacaaaggtaaaatcatcactttcaaattgagctttcaaaactatcatgacatgtatagaagaatcaaggatttcaagtcacaaaatgtcaagaacttttattttcaaaacaattacccatttcttgaacatatcctataattcatagaaaaacatgcatagtcgtacgtgcacacataattgacccataatattaaactaaacatccgacgaaactaatcacatttacatattaacacaactaacaacattacaaatcccacagaatctgctaaaccatagaacactctcgcctcccatacttaaacaacacattgtgctcatgtaccac

SEQ ID NO: 103319 - DNA, 308 bp, Glycine max
  unsure (1)..(308): unsure at all n locations
ctatgggctaagctangaactattctttttttttctccacttgtcatccacaaactgatgggcaaacagacgttatgaataggtctttatccacctcttcaaaggctcttctgaaaggcaaccattagtctcgggataagaatcttcctcatgtaaaattttcctacaacaggcgggtgtatggaaccaccaagcgacctccttttgaggttgtctataggtacaatcccctaacaccgttagacctcattcctcttccactggacactttctttatacataaagaaatggaatttacgtcagagttt

SEQ ID NO: 103320 - DNA, 435 bp, Glycine max
  unsure (1)..(435): unsure at all n locations
acattgnccttgaatatcatgaaacgttattgcttctcagcaacatccttatatacttttccatattttttcatccactgctcatgtctttcggacatggatgcctcatggaggctgcgggacattacttgggaagtgcagattgagagaaggagcacaagagctataatgtgctgctctttgccaatggaagccatgtcttttcttcacaatgtgttactctttagtaattctttgtatatcgagttctgcgtctggaatttatgtggtaatatgtatgctctgaatgcaatgtttcgaatggtatttataggagtgagcaactttttaaccagaatcataatgaagtcgtgttctaatgcatggccctagttaattacttgttatgttttcaatgctttgtaaaattagatctcttctctgctaaaaacaaat

SEQ ID NO: 103321 - DNA, 396 bp, Glycine max
actcagcgtgctttacactactataatgtgacacatgattttggatctttggcagtatatatattaactattaaatctaattttggctctcaaatgtgttttgcgtatcatacaagctaactcaacatatgtctattacactattcatccatctcgtgtagagttaatctgcttgtgcatgataggaataggactacagttagacctattaagataattaaacgtatagtaagctttatgatctggctaagagacatagataacatcttgctgatatgatgattaagatagtgactattactcactttactattcttttccttgtgtcaccgtaactactatttttgcatgtgacaatttatgttaaaagctttcggagagagctttgctctagct

SEQ ID NO: 103322 - DNA, 452 bp, Glycine max
  unsure (1)..(452): unsure at all n locations
actaagcttaataagtccttagtgatccatatcgagtatatgctctgtctnttgctctttcttagaaatgactagactaganagtttttttgcattgtaaacaactcgcaaatgttcttcgttggataaaacataataacaacctactttaattatgctatgagattgaagggttaaaatgagttgatcttaatatccaagtatcattatatcaacaaaaaaaatgaagcatattggcaaggtgtcctgttgataacgagacaccatcctattgagtttaaggtctagcctatactcctagataaatctgtttcaacatggcacttaacataagaaatcttggccattgacttaatcatgcaatacaacattggttataagttataatgacaatcgtatattaagactaacctacttgggatgagataccttatgaaactcaacacaagtgt

SEQ ID NO: 103323 - DNA, 483 bp, Glycine max
  unsure (1)..(483): unsure at all n locations
ctaagctatgaacaatcgcctacacttttctatctgatgttaacttgtnatttataataatagcctctttactgtcaatttttacccggctatatgattttacttgagaaaatttgaaaaatntaaataactgaatatgtggtttaccttagtgtcatgatgatggtgtgcttgttttggcttgctcttttttttttttggtgaaaacttaatcaacaatcatgaatatcttttgcatccaattatctattatcttcctcanagagatcctttcattgggaactaagcaggtttattttttaatcataaagcacagtgaaaacaaatgatatatcgatttaaataatccatttttaaagcaaaaccccttgttaatgcagagaaaaagttccttgaatgtttgcattntttaaagatcgccctattaatggaattacagtgtaaaattgagaaagttatatttcccctaattgagaaaaaaaa

SEQ ID NO: 103324 - DNA, 472 bp, Glycine max
  unsure (1)..(472): unsure at all n locations
nttacanagctcgagctcaaccatattatanaaganaataatgaacgagtcgacttgctgtcaaaattcatcagtaccaagaaaaaaaagagcaatacaggacaatcattcaagagataatcttagaaccgagtctaagcaaagtagtgtcaagcctaactccggttggtcgagaatggatgactgagttttgggacttcttagagaagagcttactcccaaatacttcaacaaaggacaaaaaaatcaaaagaaatgctagctattatgtgataaaaggaggaaacctttatagaaaaggcttcatagccccatgttaaagtgtttaagtcgaggtcaggccgaatgaacgagatgcatagaggaatatgtggaatgcactcaagagccaggtcattagtaactaaagtacttagaacagggtactattggccgactatgagaaaagatngcactgaatacgtgaagaaat

SEQ ID NO: 103325 - DNA, 448 bp, Glycine max
  unsure (1)..(448): unsure at all n locations
ctcgcgagacnatcggtgtggtattttcngcctcagcatagaacacaagaataatttcaaatagagaaaaaccctaattgcatcaagtatcttagtggaaggacccaacgcttttacttatntgttttcacactcaattgttgacatttactgtttctttgattacaatagaatatacctctgttttcaattcatgatacttaattatttttacaaacaattgtattttgaatgacgcttttccaagtaaaacaggttccttgagttcgatactcggatcattccgttttaattatttacttgacgatccggtgcacttgccggtggattttgcaccctcacaaacaaatagtattcctacgggtgaaaacatgcatacacactcgtggtcctatcttttgactacatgtttggttcactacatcgagcatgatcgcctcattgacat

SEQ ID NO: 103326 - DNA, 350 bp, Glycine max
  unsure (1)..(350): unsure at all n locations
ccangctcccaggagacattcagacattgacatcaaaaatctgattccgaaaatgctcaagcctattgtcttactacttccattgaaatgatatctatggacttcgttagagtgaattattagaagattggattctgatgaatactggattaataattaattacttagcatgcgtattatagaagatttatggacctctattatggtctcaaattgttcattcctgtgaacgcttcatgaatgatattatccatgactttctatctgtaggctcttgttgcggattgcagaaagntactatcttggtagatctttatgtgcaaagctagtctcaactaaaacttagctct

SEQ ID NO: 103327 - DNA, 355 bp, Glycine max
tgtggtgaatatcccaaccttccttttttgggtatgcgtggcggaattagctacaaccgactccttgctcgacaacaatttgggtacccaataaagacataaccgaacaaccttgccttgagttatgaattctatcttaaccatggtgatcactcgaacaaaagggagagattcgcacaagcttggagcgctatccgcatacttcagcagaagtcatttgtgaaagacatcatactatgtgcacgaatcttatacccaatgggttattgataggaccaatagcttgggctaccctaccgttacctaatacctatcgagcacatctcacatctccttgcctatcccttcacaccag

SEQ ID NO: 103328 - DNA, 346 bp, Glycine max
  unsure (1)..(346): unsure at all n locations
tatttgatactccttttgtgctctaaattgtgggagtgtgctcaaatatatggggcaattttgattggttttcttgcttgattagggtgaattaggggtttgtatgagatggccctangcctataatgcattttgaagtaatggggcatgccacattgtccccgttctcttgctattgacgcctaaacgcgcgcccaccaagtgttcggtgaaatgcctcaatggcattagcgcgtgatttttgtatggaaacaacccatggggcaatttggtttgcacatatttttgggacatgcattcattttcgaaagagctagagtaattaccccgcatatgttctatgcct

SEQ ID NO: 103329 - DNA, 348 bp, Glycine max
tgctcttgcttgatgcatgtatggcaaagtggctcacatggtattgttaattttagaagaattaagttcttatgtgtatgagtgtctgtttctttctttaaaatcattctgctactgtttcattctgcattctggagttgaaatggggtttggttacttttcagttttctgatccattatttcattatgcagattgcatataggtttctagtgctgaagcatcaaaatggggagatattcaataccctctatgggtgttctgctactgttctgtctggtttcatcttcagaggcagaatatttgacgataaagaccctcaggcgccactgaatgtcagaatcagtgac

SEQ ID NO: 103330 - DNA, 355 bp, Glycine max
  unsure (1)..(355): unsure at all n locations
gaggggcagggttgaattaaaatattacaaactttttctaattaaaaattctattttgattttaacccaaatcccaagattactttcaaaatgaacaaccaaataattatgcatattaaatttactgantagaagtaataagcatataacaatgaaagagtttaagggaagaaagatagaaaactctgatttttactggttcggcctcacccttgtgcctatgtctagtccccaagcaacctgctttagagttccactatcttgcacaagccctttacaagttctgaaccacacaaggacaacccttcctttgtgtcatatcgcttacaacaagagaccctctatctttaatcct

SEQ ID NO: 103331 - DNA, 443 bp, Glycine max
ctttcgctgttttatatatattgtttcaacaatcacaagcatgtgcgggtttcattctgaaatcccaacaaaaagccaaagtgtgtatcaagtataagacaataatatactattaatcattcacaagacatacattgaagaatataaaccaatcgtggagcaagaaacatgaatatatcaaatatataaaaaccacatagtcatataacataattcataattgttcaatcaaaccatgcaaataaagaaataataaatcatccagatgtcattacatggccaaatacacagctagaaaacaaagtacttgtaatattaaaagtaatagaaaactaagatgatggtggctgcggtggtggtagatcaaagcttgaacgaatataagaaacatcttctttgaccttggtgattcttgactccatctcattgaagcgcatgttcac

SEQ ID NO: 103332 - DNA, 382 bp, Glycine max
tatgtagagcaggtactcctagtctatacctgtcttttcttttttcttattgcacacttttttgtttttatatatatatatatttatatatatatatgaatgcatgtatgtatgtatatacatacatacaatctgtggctgagtgaactcaactcactcacttcatctatctaatgtgaatatcacccttcacaatgtggcttaagctttacaaaacattttctttactctattgctttaaaaaatacatctagtacctcttaacttcacctttactcctaatgttcatttcacgacaacatgtgtatcttctggcttacataaaaaaggatttgatttatcctctaagatttttgtatattgatcctatagaagatttttg

SEQ ID NO: 103333 - DNA, 416 bp, Glycine max
  unsure (1)..(416): unsure at all n locations
agtgtgaattgagtttctgcactattgaactatttgaacaanaacaaaatattcatagctataaaatgtgacaactatcaagttaaaagtgtaggggagttcctactgaaatatctcttgctgaataaaagggtgttctctatttaacgctatcctagtgttcttacattgagaaaatactcagaccatgattcttcacatgaatgaacctaactctcttaactntcgttcttgattcctcaacaaactcgctctaacagagttgcactaagcacacagtgtaaaataaactatatcactacactccattcctagacatacagatttctaacttgctctatcaagttctagggttgtaaagcattttccaatacttaaaaacctaactacacatacaaatgggtgatcaagccaca

SEQ ID NO: 103334 - DNA, 445 bp, Glycine max
  unsure (1)..(445): unsure at all n locations
gtctcacgattgtcacgtgctcatgcaactattgttagccgtggctatacgaaacatcttgcctaacaaagtcaggttcacgataactcgcttgtgctttctcttccatgctatatgtagcanaatgattgatccaataatgttcgatgagttggaatatgatgccacaattatactgtgccacttggagatgtatttttcccctgctttctttgacatcatgattcacttgattgtgcatctggtcagagaaatcaaatgctgtggtcctgtttatctacggtggatgtacccggttgagcgatacatgaagatcttacaagggtatacatagggtatacatgaagatcttcagaaacaataagatagctagcagatgggcctaaaagaaatggtataacctggctaggatacgacatacacaggtattcatattacacaaatg

SEQ ID NO: 103335 - DNA, 462 bp, Glycine max
  unsure (1)..(462): unsure at all n locations
agctaacctgaaactgaactnttgcttttctcgatctttctttcactgaaaacatgaagtatcactcactcgtttaaagttatatataatgccgactaaaaacaaaaccatgttgcaagttaaaagaattaattaactggtactccgcagtctgccaatacatgaatgatcagattaataattatctccactcttgattgaaagagaaaggaatgtttggcatcttatatcatctgtgagaacatgctattctagctaaaaaaagacaaagggaatctccggaatatgtccgggaataagagtgttgcgtgttgaccatgactcgtntgagtaaatcataaccactcatcccaggcatgcaatagtctggcatgatcaaatacactttgattcctgccggatttcaaagatggaccaaaagacatgtactggctgctatcaataggcatactaccccacata

SEQ ID NO: 103336 - DNA, 465 bp, Glycine max
  unsure (1)..(465): unsure at all n locations
cgagattataaatatgtgaccatggtatgagtttttatcatcaatcatattngaataatctatctttcaatcttttttcaacatcatctctcaaacatctatcaatcaatctttcaatatctttctacaggattttcttattcatttctcttcatctttctaaaattttttgatcaacactttcttttccaagaaaagttctttgttcaaaaacttgtgctattcatctttttcattcttttctccctttgccaaaagaacgaaggactaactgcctgaattcttttgtgtctctcttctcccttacaaaagattcaaaggactaaccgcctgagaattcttttgattcttcccttccccttaagcaaaagatttcaaaggactaaccgcctgagatatcttttgttcccccntacaaagattcanaggactaactgtctgagaattctttgtcgccacacattg

SEQ ID NO: 103337 - DNA, 453 bp, Glycine max
actaaccataaagacttaccttgacttaacttctctgatatctcttatgagcctcgcgacgcttcccttgatttcgagctcactacaagcctgaagtgaaaaaccatgatatcaccatatccttcaggaattctggagctatggaatctgtctgtgaataaacgtgggggtttctggtccattgtataacatgtattgttggccatgctatatgatatcatttgagccatacttgatgtacataccatattggataaaatggtgacatgctaaatatgacgttgtatctcaaaggctacaaacacaaataaaaactattattataaaaatatcgaaataaaatagatcatgcagtcagctgactgaataagatcttaaatgacacaataatgataatactcttcggtctactctctatgatagatctaatctttacttattgtatctcctatg

SEQ ID NO: 103338 - DNA, 427 bp, Glycine max
  unsure (1)..(427): unsure at all n locations
cctgacaattactggtctccgagcgacacaaataccacaatattggtatatgaaatatacacaaaacacaagagngggtagaatcatcaagcacatacatgaccgcaatgaattgtgagtatgcataccaagagaaatacatttgccagaatggacacagggagtgatcaaaatcatgggagacaagctttgagattgagacgaatataacttatggctgagaatgcattattttggatagcctctcacaagtcaagtgttttactcaacgtataatataccaagatgatcatcttcactcattcacacattgaaattgcccaacgcaacttggtgttcatcctatttgttatatgaaagaatagtcacatatgagcatgaatcatctttactcatcagaaccacgaatcactactctgacaagtca

SEQ ID NO: 103339 - DNA, 480 bp, Glycine max
  unsure (1)..(480): unsure at all n locations
aacttgacaagctagagcttagctacacacacccatctaatatctaagctcacctccttgagaagctttcttgagaagctagagcttagctacacacccctataatagctaagctcacccccatgacaaaaaaacatgaaaatacaaaaaaaatcctactacaaagactactcaaaatgccctgaaatacaaggctaaaaccctatacaactagaatggccaaaatacaaggcccaaaataagaaaacaacctattctactatttacaaagaagagtggacccaaccttggcccatgggctcaaaaatctaccctaaggttcatgagaaccctaaggccttctttatcaactctagcccaatcctcttggagcctcttgctcatggctctggtaactgggcctttcctagggaggagtgcatcatccnctcccccttgaagaggatgtgacctcaaatctggtgggtcctcctcctctat

SEQ ID NO: 103340 - DNA, 463 bp, Glycine max
  unsure (1)..(463): unsure at all n locations
ntcacaatatccaaacaattcaatctcatttgtcatgaaactaccttaaacaaagaaaaacagagtggaggcagatatctctgcacaagattcattcaaattccacagagtttntcctacccacatacctcagtaacatcctcttcgttctgattcgttaaccattggatcgccttgaaaatttaactgagagttcctaatacagaaatctaagtctttaccgttgggatctactagagaatgtctagaacacgagatatactgtctttcccgtgacagcagaaactagcactgcacaaccattttttctgcataattggcagttntgctgcacaatttgacnagctttctctgcataactttgaagatttcgaaatccagcttacgtgcatcanatttcactcanattggatcctacaagtcctataccatgtataaatcgtgttcaagccanaaacaaact

SEQ ID NO: 103341 - DNA, 190 bp, Glycine max
tctatatagctgacaccatttatctataaacacaagttgatttttattcagaaaattagagtttatctcttttatcttagtgagagtggttctcctaaattcttgagtgattcaagaacaccctggctgtatcaaaggactttcacaacctttgtgtgttgccctcgctggaaagagtgattctgatgag

SEQ ID NO: 103342 - DNA, 390 bp, Glycine max
  unsure (1)..(390): unsure at all n locations
tactcagcttgacgctattcacgctctccctctctttnctgctattttctgtcttaaaagggctctctgatgacgcgctgagagtgtgcctgcgtgaaatattcccttccagattcctcctacccgctaagcacgttgatgcctcgctcagtagatgacacctcactagagcattgagcttgcttagtgagatcataactttatcacttcttgataatactcctttttgcctgagattgaagagagattgacattaattccatacacatggcttctactacgctcagatataaactacgcaaaatttattttcgatcctatcaaaataaccatacattggggaacatgtctacatttttgaaaagtcttctatactaaagtttgtcgtat

SEQ ID NO: 103343 - DNA, 164 bp, Glycine max
tgcagcggcacatttacacaactaactcgtgaacacacacatcaacatcttgcaggagcaagctctctatcacgaactatagaaaagagacacctcaccaagcctgggcacaacaaagataaaaaagtgtcctggcacgggtcagtacgtgcaaaactgtaaag

SEQ ID NO: 103344 - DNA, 456 bp, Glycine max
  unsure (1)..(456): unsure at all n locations
gcacttcaaactcagccttgaaatgtngttntcaccttctcgctaagccaatctgtcttggtgtttgcggnccaccgtctaaggaaatacatgctgagccatactacctggttggtgtccaagatggatccggttaagtatatcttcgagaagctttccctcacgggacggatcgctcgatgccaagtgttgttatccgaatttcactaatgtgcgctaagcagttcataagtgcgctaagtgcacgagcacgaacaaggccacctatttaagcctgaaatcagattttagagagggagcttggactggaattcagagctttgcatgtctagagtttctatggagagaaaggtccaagttccagagagctttgagagattctgctgtgtgaagatctgcagagaccagagcttgaagcagacgccggnttgagagcttgagattagtttatgagtg

SEQ ID NO: 103345 - DNA, 347 bp, Glycine max
acactataaatactcaacttattgcaactcgtctacggaatcgaatttctgtctgttaatccaccctacgatctctcggaaactaattgccttaaagcaataaccattctaccagcgagaatcgttgaggccttatctctttcttgaacttgtttgcttgaccttgaattattcttgacacaatgcttaacctttgaactaatcttgacgcaatgcttaacctctgaatgcttggctgaagaaccttcgaaagtaacttgtttgattctactttggcatcatcaaaaccccgtattcatacattcacaacatatagagggagacaaaccaaaaaaagagaggacatc

SEQ ID NO: 103346 - DNA, 472 bp, Glycine max
  unsure (1)..(472): unsure at all n locations
ggaccttagatactcagcctgaaaagtttgtctttacatgcgcaactctttgagtgatatttgtattgattgtagcattttagtgtctatattttcatatgtgcatcattcatcatcatgtagaagtaagaagtttgtttctaaatatgggaagaatctaatcgattacatttgtagaagcaagcttaatgatgatgaatcaagtatgaatcangtagttttgatgatgacaaaaagcccaaaagaatgatttcaagattgagtcaacaagtttaagatcaagattaatttcaagattcaagagaagaaatcaagaagccataagtcaagacttcacaagggaagtattgaaaaggatntttcaaaaaccacacatagcacagttttgtttacaaaagagtttctcaaactttctaagtactacagaattactctctggaatcgattacctgttcctgtaatcgattactag

SEQ ID NO: 103347 - DNA, 419 bp, Glycine max
  unsure (1)..(419): unsure at all n locations
ntgagggtgcgcagcccaccatcttttatattatagtacctataatgtgtctaccatcacgattatcgtctccctttttgcacatgttctgtagntgcatcctatccggaaccatatcagaatagtactgatactgcctaacgaaggcaaccattaggtccttccaagtatggactcgggaaggttccaagttagtgtaccaggtaacagctaccccagtaagactttcttggaagaaatgtattagcagttcctcatctttgcgtatgcccttatcttccgacaatacatctttggatggttcttgtggcaagtagtccccttgtacttgtcaaagtccagcaccttgaacttgggaggggtgatgatattgggtactaggaacaactcttctaggttagcaaagacataatcttcac

SEQ ID NO: 103348 - DNA, 299 bp, Glycine max
  unsure (1)..(299): unsure at all n locations
tctactattnntatgctctagatgctctgtacattataccacattttttgcattaccagagtcgacactggattacttggtcaccaacactcaaatagccctgaaatgtctaacgacatacgagatgatgacggtcacaattgaatagatggaaacaaaaatacgacaaccgatatggcgcgaatgattcaaacatataaatttcaccctcaggtcaattatagggtcattggcagaagatcggttatgtcatttctacgcgaaaaattaaatcagatgctgtaggattacaatacata

SEQ ID NO: 103349 - DNA, 438 bp, Glycine max
  unsure (1)..(438): unsure at all n locations
aaaaccatcgaaggtgcgtcttccattggaggaaaatgcgtggagtcgccaccaatgtttatttgaggaaaacatctganaaaccaaaatgggaaaaaggtcagcggtctacatattttgaaaatgagggttcgggaatcatttacgcgcggcgaaggtattagctccccacatgcccgttacaagggacgacaacctctaatcgagtgtgcaaatcatgacttcagtattatttatcttccctttttatgttttattatctttttccctttttatgttttttactttnttggggtcgacaagggtgtttccctcactcctaggtatcctcaattgcgatgaggaaatcagacctacatangttcttaagtctgaaatttagttggttagatcttttntatctttttngaaagattgatttaaccggacaaagtcgtt

SEQ ID NO: 103350 - DNA, 393 bp, Glycine max
  unsure (1)..(393): unsure at all n locations
cttgagccanaatcctgactcaccatanaccttgacccagggtgagaatgccaatccttaccctcggaagcanataanaaaaggagaagagaaggaatatttcctatcaaagaggaagcataaaaaggagagaaggaaatattccaatctaagagaaagaaaagaagaggaaagaaaactcccaatcaaagaatgggagaagaaaaaaaaaaaaaaaaagaagttaaaaagaagaaagctcctgttcaaagaaactagaagaaatgtgcagaaaggtctttngaccggacgatatctgaacaatacagaattgtcaccaaatgaacaaaaaaagaaggaaaggaaatcacgacctanaatggtcttctccctttaattaccaaccaaaatccc

SEQ ID NO: 103351 - DNA, 422 bp, Glycine max
  unsure (1)..(422): unsure at all n locations
ctcagcttatgatgatgaatcaagtttattcaagtagtnttgataatgacaaagatgatgacaaaaatcctcaaagaatgatttcaagattgagtcaacaagttcaagatcaagtttaatttcaagtttcaagagaagaaatcaagaagattcatgaatcaagagaagtttgatttcaagattcaagagaagatgaattcaagtttcaagagaagaaatcaagaagacttcacaagggaagtattgaaaagatttttttcanaaaacaaacatagcacaatnttgtttttcaaaagagtttttctcacaattttctaagttaccaaagttttactctctggtaatcgattaccagtttcctggtattgattaccagtggcaaagtttgatttcaaaagctttcaactaaatttgcaacgttc

SEQ ID NO: 103352 - DNA, 401 bp, Glycine max
  unsure (1)..(401): unsure at all n locations
atgctcgttgcgtaaatgccagggcgttcctccactcaccaatttcccagctagaaatcaggagggcatggtcgtaccaaatccaatgtactcggaacatcatcttcgtatatcgcgaccacttgacctttcgtctccagacccgcgcttataaagcttctacttatgtggcagggcgggcttccttcacttccttgtctcaaacgcgagctttgaccaccgctcttccttcccgcgatgcttctctttatatctgcctgagtgggcttatagcctanagcatacgtcccacgatttcctttggcatttatcaggctagttatgccgccgntgtctttgcctaaacccattccaagttcgtaactgttcccaacataactcgggccatcattactgctgca

SEQ ID NO: 103353 - DNA, 462 bp, Glycine max
  unsure (1)..(462): unsure at all n locations
ttcaaactcagcttacanaagtttatatggcttgaaacaagcaccgaggcagtggtacatgatttttaatgagtttatgagcaactcaggattcaacagatgttacatggaccattgctgctatgttaagaaatatactaatagttatgttatccttgttgtgtatgttgatgacatgttgattgcaggatctagtatggtagaaattaacaagttgaagcagcagttggtagaaaactttgaaatgaaggatcttggtccagctaaacaaatccttggtatgagaattcttagaaacagaccataagggaatttgaagctgtctcgggagaaatatatacacaagttgcttgacaggttgtaccttanagattctaagaccaggaatatctcattgggatctcattngaagttttcatagaagcaaatcttgcagacagatgaagaacaatgtacatgtca

SEQ ID NO: 103354 - DNA, 479 bp, Glycine max
aagatggcctcagcaaactccttatttccagtatggaattttatcaatagacctgcaatctttaatggagagggttaccattactggaaaacccgaatgcaaatttttattgaggcaatagatctaaatatttgggaagccatataaataaggccttatatacccaccacagtggaaagagtttcaatagatggtagttcatcaagtgaaagcataactatagaaaaacctagagatagatggtctgaagaggatatataacgagtacaatacaacttaaaagccaaaaatataataacatctaccctgcgaatggatgaatatctcagggtttcaaattgtaagagtgctaatgaaatgtgggacactccttcgataacacatgaaggaactacagatgttataagatctaggataaatgcactaactcatgagtatgaattatttaaaatgaatgcgaatgataatattcaaagcat

SEQ ID NO: 103355 - DNA, 451 bp, Glycine max
acatcattatcgtggagaataatgtatccattttaaaaataaaacctaatgtggagttcacaattgtctgactgcttgtttctcccaagaatgctcatactttttgtaagagttgggttactactgaaacttgtggtgttttatagtcttaggcagtgtcatatataaatatatatatatatatatatatatatatatatatatatgagttctaatatcagtgttgcatcttttaaagattaaaaatgcgcatgcacatgctttctgtatgtgttgtcaactacaccaatgacgtgatacgctttatcttgcatcagatctgcctgtgtagtcttgctatgcacggacatgtcacgcactttctgttaatgcatacaacaatatatcatacacgtttcttacagtgtattgtcaactcacacaactatatatcatacatgtttctttagaa

SEQ ID NO: 103356 - DNA, 469 bp, Glycine max
  unsure (1)..(469): unsure at all n locations
ctttctaatatgaataacctaggattcacttagtgaaaaagtggagagaatatgtgtgagagatctctctanaactttatgaaacaaatatttgtaataaacaaaatagtattttccaagaccaagtcatagataagataaaacctagtctaacatactaaatcaacaagaccaagttaaacaaattatttttttttataaacaataaattaattttaaaaaaacattntctatatttaattaaatagacatggtattgaaatatcaagaacatatagaacacaaaaaacacaagatgtttaactattattattattattattattattattattattttaataaacacatatacattaattatttatactaatttataattctttatatcttaaatttataattctatattactttatcaggtaanatattatatgatatctataaatatatatttaattgctaccac

SEQ ID NO: 103357 - DNA, 422 bp, Glycine max
  unsure (1)..(422): unsure at all n locations
ccttccccaattagggtggaaagcaacggggctaataaatctccttgtctcaagcctcttgatgggctatattccttacatgggctaccactattcaaaccgactttttgctgattgaggcaagctgatatcctttttccattttgtgagaccccaccctaaacagcatattattcaagaacgaccatgatacataatcataggctctttcgaaatccaccttgagaatcattactggctgtttgcttcttattgcttcctccaccacctcattatgaatcaacatgccaagaagaatgagtcttccttcgatgaaagctgactgtctttcatcaatgagatcatccatatcagaccctaatctgttagacacagcttggctatgactntatacatgcaccctatcaagataacgcctatat

SEQ ID NO: 103358 - DNA, 61 bp, Glycine max
gttcaggctcccgcgattatacttttcttacgatcttataaaatgaaaatgtcaactaggg

SEQ ID NO: 103359 - DNA, 435 bp, Glycine max
  unsure (1)..(435): unsure at all n locations
gtgaatgtgaatgtgtngagggttttatggttctctggtatttgnaggagtggagcatagctacgggtccttgtttgtaggtggtgttataccctttggagataatttccggcttatagataatagccaggagcttatagataatgttagagataaactatagcttatagataaaagctagaagataattgtaccttgtagataattttgtggctttgtagataattaactacctgccaatagataaagatattaaaatatcaataggttagagataacttgttatttggggagcccgactgctaatggctgagtgttcgcgcttctattgcagggctgacatggagggttgacatgtgtcttaaagtgccatgtgtaccagagattgtccagttgtcaaggagagtatctgatgcaagggtagtagtgtcgaca

SEQ ID NO: 103360 - DNA, 462 bp, Glycine max
  unsure (1)..(462): unsure at all n locations
actaacctggttgaggtacttacccgttgaagactgatgaacgaatgttgaacgtcgaagaacggtcgaaaaccttcgcgaaatcactcatggaaacgttacagaaacgttacggaagcgccttggcttggattttcttcacggaaacaattttcctaagcaaattcgaaagagagagaagtgcctaaggggctgaacccttttttgcttcacttctcccnctatttatagaaaattgggggagaagcttgccacccagctcgcccagacgagcaaggttgcttctggaggaatcttctggagggcccaagtgggcctggttgctatttgcacccctaattttactaaatacacccccttgccctttgntggtgattcttctttcgtcaagttacggaaacttacggatttcgcaacgatacttgtattctttcctaacgtcacagaaccttgcggattgct

SEQ ID NO: 103361 - DNA, 456 bp, Glycine max
  unsure (1)..(456): unsure at all n locations
taaccttatganaatttgtgtcaaccatggttcaaatgtctagtgattaagcttctaggcaagtgttggatcaagtggtctcaaaataattaaaaaggagggttgaattaattattcctaaacctttactaattaaaaatttactcttctaaggcttttactatgttgttaactaaatgaagaacataaaagaaacttaaccaaaagtaaaagcgggaattaaagtgcacaacggaaattaaaagagtatggaagaaggagacaaacatacaagagttttatactggttcagcaacaactcgtgcctacatccagtccccaagcgacctgcggtccttgagatatcttttcaaccttgtaaaaatccttntacaagcaaagatccacaagggatgtaccctcccttgttctcttgaacaagctagtggatgtacccttcactacaactgatccaca

SEQ ID NO: 103362 - DNA, 383 bp, Glycine max
  unsure (1)..(383): unsure at all n locations
aacgcttttagtctttttaaccgttggatcttcggcgagattggtttacagcttcacaagacacttgtccatgatctgaccgttgggatcttcaagaagatgtctggagtgtgggctaagcttccgttcctggagcatttcttatataagcatttcggccattgctttcgtgtatcttaggaaanacgacatttcttctcccttctgtcttccaaagacatttctaacatcccaatcactttctccatctcccacagtcaccattagccaccacaaaccatcgttgttctccattgaaaccccacaccgagaggaacccttcaaccgaagcggaatctttcaacttggcttgcggattctgtagagatgaaaccctaatctga

SEQ ID NO: 103363 - DNA, 395 bp, Glycine max
  unsure (1)..(395): unsure at all n locations
ctgttcttacagaaaacgtcagatcttcttctttctttcttccaaagccatttctaaaggtccaagctctttctccatcacccacagncaccattagcaaccacaaaccatcattgttctccattgaaaacccacaccgagaggaacccttcaaccgaagcggaatcttccaacttggcttgcggcttcggtagagaacgaacaccctaatctgacctttcaaggtaaccatggttctatgcttatttcttggtagattcataatgactttgcatcttttctgcctttggaacccgcattgcatgtcttatgcttccttngaaaaaccttatagaaatagactttgccaacgatatgctttcatgaaatgcatcgtattttcgtaacctacactg

SEQ ID NO: 103364 - DNA, 307 bp, Glycine max
  unsure (1)..(307): unsure at all n locations
tatttaaatgtttatgatcatgtgcaactattgtgtgcctactatgactngagaaacagaaggtgatcacaatacaagcacaaatttaaaaggtactaggttgcctcttaatatcacttatttaacgtcttgagctggactcgtgatgacttgttggtcacacacctacaactnttgcttaactttggctttggacttggtcagctgctgggtgaccacgggtcgtaagcaacgcttctacttttgtagatgatatgaagggctttggatgtggcggtggtggatttgttgctcgctgtcggccatg

SEQ ID NO: 103365 - DNA, 431 bp, Glycine max
  unsure (1)..(431): unsure at all n locations
actcaaggagggtaggatattagcagctattgaacaactttcttaactatntgtcctgtagatatactgtttctttttgctaatatgaaaatataaatagtataaggctatggcttatggacatggtcttttctacccatattcaatcacattatttaacaaaatacttgcaaaatagctttgcaacacgagttgtgggatatttcaaatgcttatgaatccttgttgaagcaatcagcaaaaactgcttccaaagctttctggtggggaagaataaagtgcctgctaacattctccaatatacagacgatactattttttttttggagaagcttctatggaaaatgttaaatctgtgaaggcaatgcttatatgtttgagatgatgtttggctacgaatcaacttgctaaaggcaatgttatatgtttga

SEQ ID NO: 103366 - DNA, 414 bp, Glycine max
  unsure (1)..(414): unsure at all n locations
catgcatacttgcagattgtttgttgctcggcaaagaaaggccaacaaatcataggcacacctgcagatatactttcaagtgtagaatctcaaccacaatgggttataaaggccccaactgatggatgagaaagcactttctcttgaacacaccaaacttgttatatatcccctgtccttgatcgcatcaaagaactcttgtggcaaagatatagattcacccattactacatctggccttattatccataagaaatgttgctcgctatttgctagtccncaagcaaattctttcaagagatgctctgtcatcaccgttatacttccataattaacatatatgactgagttagggtcccatttgtctagctcatgctaagcatttgaatcatttttccataaactngatccact

SEQ ID NO: 103367 - DNA, 279 bp, Glycine max
agggaattttttttttgttacccaaaggggggtaagtgatgggggtacgaactctgggacgtaatgtgggtgctattgcccaaaactaagtttgaccaattcctgacccaaccctggcatagtcggacagtgagaacctgtgatgtacctaaacgtgcgatctcctggcagtaaaagataaaaggaaatcatcaccacttatgcaggtagctctgggtggctggccagatgtgaatattgtgtaatattgtggatggtggccctatggtaatcgattac

SEQ ID NO: 103368 - DNA, 394 bp, Glycine max
  unsure (1)..(394): unsure at all n locations
atgcattttaaattatgggattaggaagcctgatcatgtctctgatcattggtgaggacccctatgttcattgtatacctcgctgctgtttggcacgactgaatcatgacacttctttatcccacattaaaatattttactgcgttgaattaaatcttatttatttgattgtaattgatcaattgggtttctctaagattttttcttcacgtttatcctcgacaatttgggaaaatattttgtgaagacgttgttctaaagaactcaatttagaccccttctctttttagttttactatcgacttggataacaagagattctccagctcatatattctcagaatctacatcacctccgcaggaataccacgttgttatgctntctatatagtta

SEQ ID NO: 103369 - DNA, 415 bp, Glycine max
aatgccactctactcctatttctttattgatatgttaacaaggaaacattagcgtatttattatgaaaacatcttactggaaggaaattgttatgatgtgattcaaaatatccttccacctccacataaagaccctggaggtgttactattgccttgttaattggagaagtcaccgtgggaaaggctctttattacttaggagccaaaattaatttattgcccctcttcatgtgcacaaaagttggttgagttgtacataatgccctctaagatgactttacaacttgctagaccctccattaccagaccatatggagtaattgaagatgtgttggtcacagtgatacattttatcttgctggcagactttgtggtgatggatatctatgaagatactgacattcttggtatatt

SEQ ID NO: 103370 - DNA, 391 bp, Glycine max
  unsure (1)..(391): unsure at all n locations
agaaataatcacaaaatgttgctttgttttaatggttttctatattaatctttcaaacacgtttacaggtagcatttntgtaattatttatgaaaagttaaaaatagaacacgttttctcctaccaaataatcccttaggaccttttcaattaatgggtttagaaacatttattttaaacatatattttagaaacaagtttttcgtgtattttaaagggtggagttgtgctagtggccaaaagatgtttcacatggtagagggggaagaacaagtctgactntntagcttttttatttntctgtgcgctagctttcatggtttgatgttggcaatggagaaagatggtatatgttgttaagtggtttacatcaaagcagatatttaaacat

SEQ ID NO: 103371 - DNA, 447 bp, Glycine max
  unsure (1)..(447): unsure at all n locations
agcttaatgaaacaaacacaagcataaccttactccataacatattataatttaatgagaagaaaaagaatttattgaagaattggttaacctgcgatgctcacaaaggaagaagaagagaggatgaatgatgatcggaagatgaccaacaataatcggaaagaatgaccaatatcggaagcacgggagatgaatgcatggccagagacgaaggaacaacacgttgaggaagaagagagagaaattttgagggtttagaaaatgaggagggcatgctttgttattttgaaatttnttgaggacataatgtccaagcattatttagggaacatattcccaataaggaaatttcaaaagctgaaacattgaacttcaggaanaaaatttgctcacagctttcacttttcccaaagcctaaataaattaattacccaacactcttaaaaa

SEQ ID NO: 103372 - DNA, 449 bp, Glycine max
  unsure (1)..(449): unsure at all n locations
atcgaggttagtaatttaagctatagcatagaacacaacagcacaattgattagagaaacatctttatatacatcagctggtctgttagaaagacccaacatctttacctattgttgtcaattttacttacttgcatttttactgttgttagcctagacttagtttaattctattctaaatcatcaactatcaatgtttctttcaacaatgccttatttctgaatttaaccctatctaagactagttccctgagttcgatactcggattcatccgttttaattgtaaatacttgacgatccggtgcactttccagcaaattggatttcccttcaacatatttgtataaagaaaaagtggaccanaaagtaactgcaggggaaatccaacacctgctcgccaaacgacaacttttaccaagtaaaacaagttccttgagatcgatgctcg

SEQ ID NO: 103373 - DNA, 422 bp, Glycine max
agcttattctagttattaaagaataaattcaattatatcaaagtgtggtaaaaattccattgtattagttatttattaattaatggcattaatattatcagaaaattgatcaacaaaacatcaatattaattgtattaataatatgatttttagtaagatgtatttttacaaaatgtatgtgtctgagatttggatcctttgccctttaaaataattggagagtctccaatttgagaacgatacattgttggatcaaataggcggttgagatttgttcaattaaattcactgttcactaaagcctctccaccgtgactacttcccatgtattcaacggtgggaaaggatttttagaccattgcatttttatatttttagatagatgatgaaaatttcttatggtctaaccattatcatattt

SEQ ID NO: 103374 - DNA, 469 bp, Glycine max
  unsure (1)..(469): unsure at all n locations
tactaagcttttcttgttcttgaatagcctntcttgattcttgaatcttgagtcttgaaccttgatctcttgaatcttgattcttgaattcaactttcctcttgaatcttgaagtgttcttgattctatcttgaacatcttgaactcattctttgattgacctcttgagtttttgtcatcacctttgtcatcatcttttgttatcatcaaaacatctttgaatcactcttgattcatcatgaagctttgcttctacactttttatttttgctttacttttggctaagttattatttctgttctttactttctcataacttagtagtaaagcctaattgaatctagtaacattaagaaggataaacttttaattagtcaagacacgttcataattaattcaacccccccttcttaattattcagaggccacttgatccaacataacctttgtaaatcctttacaagcaaa

SEQ ID NO: 103375 - DNA, 408 bp, Glycine max
  unsure (1)..(408): unsure at all n locations
agctngtgcaaatcaagtcactcccacattttatctctatcatgcattggatganggnctcggcctttgtcacgggaagccaaaaggtccatatcaccttcttaattgtacacatggggcactgcgcccccaaatgcgcaagtaagaagagataattntccgggctctcgtgtccgtaaaatgcattcatatcatgcatcgcataagcatctcttcataacatcataatggacatatcctgcatttgtccgttatcatatttcggcctcacattntgcatgagtcatggcatcatcatgcatatgcgttcaacaaactctttgatctgcaaaaatgcataccatttgttttcatgtttgctcatccttgccgtttcctctaccaaacaaaaacaaaaaaaggggaagc

SEQ ID NO: 103376 - DNA, 455 bp, Glycine max
  unsure (1)..(455): unsure at all n locations
acacacctatctaaaaactaagctcacctccttgttatatcttccttgagaagctagagcttagctacacacacccatctaaaaactaagctcacctccttgacaaaatacatgaaaatacaaaaaanaagtccctactacaaagactactcaaaatgccctgaaatacaaggctaaaaccctatactactagaatggtcaaaatacaaggcccaaaagaaggaaaaacctattctaatatttacaaagaagagtggatccaaccttgatccatgggctcaaaaatttgccctaaggttcatgagaaccctagggccttctttagtagctctagcccaagcctcttggagtcttctatccaatccccatggggggtaggattgcattaattggagacgccacttcaaggaaaagatgagtcaagaagaagctcaccaccatatgaagccatggat

SEQ ID NO: 103377 - DNA, 348 bp, Glycine max
caaagcaagtgtacttacatttgacaacaacaagtcacatctttattaacagtaaagatacctatatttgtgactccctcactcccacatgcatattaatggaacaaacactattatcatggaagttaattaaatcaatttattcaataaaatttgtagtaaactcacatggggtaaaggtccacatttgtttcactgttattaaactaaaacttctcagaaacattctccggctcaaaacaaaaccgttcaagtttacaaacagaattcatgttaagtagcagaatataataaactaaaatgacatgtttggaacatcatgcacatcaaagagaaactcatgtccca

SEQ ID NO: 103378 - DNA, 351 bp, Glycine max
  unsure (1)..(351): unsure at all n locations
gcttgtagcatactcgaacggcaataacatttctctgtgtagaccgacggagcaccgnaggatatctgttcatctaaaatttacaatcgagcgtcgcagcaagttctaacgacaataacctttcactcagaactccgattgagtcccgtaatatatctagacgctcgaaatttaaaaccgaacctcgcatgatatgcttacgacaatagcatttcactcggaagatcgatcgtgtcccgtaatatatcgagagcgctagaatataaaaccaaagctcgtagcaaactctaacgacaataacatttcttttggaagagcccatgagtcccgccatatattgagacgctcgaa

SEQ ID NO: 103379 - DNA, 449 bp, Glycine max
ctctgatgtcgcgagtagttatacatgatgacgcattggaatccaatacaggatgggtgatcgatacatcccaatagccctctggatcaatacggatgtgtatcgatacaagctgccttgtcatgtgtaaacgattacacttggatggtaatcgattaccaaagcctatcctaggctagggtctatgagaatatctatatttatgctcaaatacatactatatgactaattatcactactaatacactaaattcaatcattcagttactatgtacacatgaaagtatagattctatcatataaacatgagttcagacgagatctaacaaaacaatctacaatcaaaagataaaaagtgaatcaaccaatcaatcaaccaatcaatcaaccaatcaattactatatttctaaatctcttacatctaagagacctgattctcttctaatag

SEQ ID NO: 103380 - DNA, 430 bp, Glycine max
  unsure (1)..(430): unsure at all n locations
agcttntccaaagggcatggttattttctgtttcctgagaatatccaaaaatctctgcggaggatggttcttcactatcttgcgaagtaccacaagatatgggacttccttaccttcatttatagctttatcactctctactgctttctctttattaatcatatctttctcacaaaatcgtatgtctcttttatacttttctacttccttttctttttcttgggcattaaattcttttttcttgaccaacatgcggttctctttttcttgattgctttcacctctcacatcctttttcttgtcctcagtacctttcttttcaacagctttcttcttatgcacaacaatatccttattcttagtctccataaacactttactacttgtctcccacctttgcattcctcctcgggattcttatctgtatttg

SEQ ID NO: 103381 - DNA, 388 bp, Glycine max
tgcatcatactgagcatgattgtttggcacgatggactgatgatgattgttgttgggtatgtgttggactagtaaatgtttgtgtgcacttatgatattcgttaatgttttctatttataatgaactcacccttgcattttgtaccgtgtggttgatacttgtgatgatcatgaatccttattcgtgggagcagaatgacaccggcttaggacgatgagtgagattcttttgtggagccaccgagccgatgtgatgacattgggattattctgggagagagttgtgttttgtaatcaacatctccatacctcggtctgtattcttcttgtgatatgacgatgtaatcataaatttatctatttgtacacaccacattacctttaattt

SEQ ID NO: 103382 - DNA, 362 bp, Glycine max
  unsure (1)..(362): unsure at all n locations
cgcggcgtgcaagcttcatgatgatgaatcaagattgattcttgttgttntgatgatgaaaacaaagatgatgactaaaagcccacgagaatgagttcacgattgagtcaagaacacttctagaatcaagagaaatttgatttctagtttgaagaatcaagaatcaagaataatcaagttgaagattcaagaatcaagaaaagactccattaagataactactaaaaagtttttcaaaacattgagtagcacatgattttttcacaaaatcttttaccaaagactctttactctctggtaatcgattaccagntgattgtcagcgattccagccgcacagattgtgtcaaaaaggtttttct

SEQ ID NO: 103383 - DNA, 482 bp, Glycine max
  unsure (1)..(482): unsure at all n locations
actcagctgtataggtgaaatcaggtgcagccatttcccttagagtcctctcacgaggtggaggttgtgccatgttctcagaatgtgcaaaattagaatgctaagaatcagaatgctcaaaattataatgctcaagatcaggatgttcaaaatcaccaataacagaatgcacagattcaccggttatggaatgctcagaatgatcaaaaggtataaaatgatgcctaactaatctatgaaatgtcctatctatcttangatcaaaggtttgtaagtcagacggattgcctctagtcatacactacattcagcatgcacacaactagttgccttgtcatgtaaataaaggtgtaggtttaaactacagctaccctcaaatgatatccaaatgacttgaaattntgtgagcaaccttataaaatgatgagaagatagcacanaaaatttcagaacaanattcanagtctaactatgaaagctaa

SEQ ID NO: 103384 - DNA, 418 bp, Glycine max
  unsure (1)..(418): unsure at all n locations
ttgatgatatgggcttcgtcggattatatatctaagngggnctgaaaagagcaaatctgatcatcttgctttgataaatgcacaacaaaaagctggggcaaataaagaaggtgaggatgaaggagaagcccgtgctgtgactgccattcctatacagccaagtttcccaccaacccaacaatgtcattactcagccaataaccaaccttcttcttacccaccgcctagttatccacaaaggccatccctaatatcaaccacaaagcctacctaccgtgctctcaatgacaaacaccacctttagcacaaaccagaaacatcaaccaagaaatgaattttgcagcgagaaagcctgtagaattcacctcaattccgggatcctatgctgacttgtctccatatctactcgataatgcaa

SEQ ID NO: 103385 - DNA, 433 bp, Glycine max
tgtagaggtatgtctcctatcggattaatcgattactaccttctcgtaatcgattacacagttgtttctaagacaatgactgatttattcaggagtctctactttaattggttaccatgtgatataatcgattatttctccttctttgagtagttcagaagtgaaaagaacactctaattgattactttgagtatctaatcgattacattgttcttgagttgctttcatgtgtttggaataacactttttcaattaaaaagatagtctaattgattacttcattgaattaatcgattacctcgtagatttaatcgattacaggcagctgtaactatcttctctataaataactaactggtgttctcttcaaaacaatctcaaaaataacacaataagcctctaaatgagctaagatcaagtattgttattagt

SEQ ID NO: 103386 - DNA, 394 bp, Glycine max
  unsure (1)..(394): unsure at all n locations
agcttatgttgtatgcgctttatatttgttctctcaatnctctttttaaggttaccacatgcttaataaataatgaacacttaatcgttgaaattcagacaaaacaattaatcttacatctaagaaatgcaaagatagtatataaaaaaatcccacacactttacttttcaagaataaatatagtaaaaaaaaattgaagtgacacttgatacaatattntaataaaataatggattatatttattcttaaataaataattattaaaaagttatttgaagtttgtcttcttgttctgaatgttgagttctataaaagcattccagaaatacgataataatttcaaagcttagtttataatttagaagacataaaaggagaaagattataacaag

SEQ ID NO: 103387 - DNA, 453 bp, Glycine max
  unsure (1)..(453): unsure at all n locations
tgtaaagaatgaagtcttatcaagatcaacctcaagatgatttantacttaatgaggagattgatactttaagtcttaatgtcaatttcggtccattatattttgtagttgtttcgctttggaacatttaagttttaaaagtttcattatggttctttacgtttttgcaatgtatcattttggtcctttnttataattttctgttagaaacattaatgttctgttagttcttaaattttaaaatgagttaatgtcacttttggtccatcatgttttaaaagtttcattcatcctttgtgttcttgaattgtatcgttttagtcattctttcaattntttgttagaaacattagtgttttaaattttaaaatagttaagttaacataatgacagctaaaaaccactactatctttttcatattcaaaaaattaaaactcattatgtaaatgtcg

SEQ ID NO: 103388 - DNA, 384 bp, Glycine max
ttttataaccgacttatattctatgatgttgaatcacactgtttgtagtagtgtgataaattaccatggcaaaattttccctctcataccttttgttgcctttcacttggctgcctatgataagtgttacaacaaatatttgacatatatttctcttatctaatttccatgtagcctcaatattgaatccttttgcaaaatgcacattgttcaagaatctgcctaagaatgctggggcattgttgacgttatcatatttcttgtccttgacaaaaaaccagacttctctatcagatgttgctatcattgttgaggtgtgtgcttccatgcctattcattctttatagtattcattctaccgactactgtttgaacatatttttt

SEQ ID NO: 103389 - DNA, 311 bp, Glycine max
  unsure (1)..(311): unsure at all n locations
ttcaattggaattcccttattgtataaaattatgagagatataatagttttaatgttatgttaagagactccacttttactgagtatcgantaagtgagagttgattccatttgagtatgaattccttgtattttaattgatattattgaaatattattattggactaagacttaagaaaatggttcacatttatatgatgaaattgaaaaggattggtgtgactaaggattatgaaatccttganggggaaaaacaaatggactcaatgcatgagtgcatttgtagaaactagaattncaccctaatatg

SEQ ID NO: 103390 - DNA, 398 bp, Glycine max
  unsure (1)..(398): unsure at all n locations
caagcttttgtcgtgattcctttgattatcttttcattttattcttgcgaatatgacattagtgtatgttgatctattcatatttctattcccaacggatggttcgtgaacattcaagtagaagaatcttattatggttcgttgacttcacaaacaaatggatgagcatgatttggaattttgggaagaggataagtatcacaaggtatcctaatgatgaacttggttttgtacaacccaagaaggttggggtgggtttatgtataacttataaatgaatcctcgttatcagtatttttaacatattggctaagaaattaaaataaaaatctttattataataattataggagccataanaaactataaataatacaatcttgcctaaggacattgat

SEQ ID NO: 103391 - DNA, 184 bp, Glycine max
cattactccgtatgcgagtaggcgagataaatagattgagatttgtacttattacaaactctgaattaatatgctgagggggtatggtgacgtgcgtaagctgctacacatgattactatgcggtaatctaatggaattgttatgagagcggacgcgagattagaacatgcgtattgcttgtag

SEQ ID NO: 103392 - DNA, 422 bp, Glycine max
  unsure (1)..(422): unsure at all n locations
agcttggccagagtggctgaggcatggtatactcttctggaagcttcccagatccgatcatggaaagacttggcgactgccttcattangcagtaccaatacaatacagatatggctctcgatcggaaccagcttcagagtatgaccaagcgagaacatgagtccattaaggagtatgcccaaagatggaattgatctcgcaacccaagtcgtgccgcccatgatagagagggagatgatcacaattatggtagatacgttacccacgttctactatgaaaagttgataggctacatgccagctaactttgcggatctcgtcttcgccggagaaaggattgaatccggactacgaaaagggaagtttgaatatgctgacaatatggccccccacaacaacaaaagaagcccagtagtgggcg

SEQ ID NO: 103393 - DNA, 411 bp, Glycine max
  unsure (1)..(411): unsure at all n locations
atttaagagagcacaaatcatagacttaatccaatgatcttgtatcatacaagtagctttctcactatcttttcctcttaagttgctcttgaccttattgtaacaacacaatttattctttttttttaacatacaacttatttgttgtgtgtgctgatgcttaacctttttcttttcattctaattgacttccctcccccaaatttagagtaactttgccttgaaccatatgctctcctaaaatctaaacaaggtattaggagataattatttaagtttagggttcaattcatgacaaaatcatttagcttatacagggagcanaggatggaattatcattcaaggtaagctctttggtcaaaaggcttgtgtatgtacaatcatggccttcatcatgtgctcatttatac

SEQ ID NO: 103394 - DNA, 406 bp, Glycine max
  unsure (1)..(406): unsure at all n locations
agcttatataaaatgataaacttcaactttctttctgctgaaaatccaaacaacaaaatgttggtntaccataagatatagaacataagcgagactcccactaaactaagatactatcaggaattacacccatatgaacagtgtgctcatgaaaaatctttaagtgtcaaacatttagtaagtggataagctagtatggaatgagtccctatatgttttatatagatctgtattttctgaattctttatttaacaataaaatactttatgtcaaaaaacttttacttggttgaatcctcaataagaccgctaagatattgtcccaataaacatatgatgactacttaatgttggcaacaacaggcaagccagttacaataatttaggaggcataaattctagtatg

SEQ ID NO: 103395 - DNA, 411 bp, Glycine max
  unsure (1)..(411): unsure at all n locations
tcgatacccaaaacattgtatcgaatataacttttttgaaaatcaatgggaccattgtaaatcatttgaaaaacttttcaaatcccatttgctactggtnatcgattacaacaatctggtaatcaattaccagagagtaaaaactctttggtaaacatgttttgagaaaaatccatgtgctactcagtttttgaaaaaaccttntcatacttatcttgattaagacttctcttgattcttgaatcttgagtcttgaatcttgttcttgattattcttgattcttgattcttgaaaacttgaaacttgaaacttctcttgaatctttctcttgattcttgaattctttggcatcatcaaaataacctttgaaggcattgcttccacatatatttcttaacaacatagtaaaa

SEQ ID NO: 103396 - DNA, 356 bp, Glycine max
gcaagcttggtagagaatatatgtgcttgatcctcttatctatgcttccaccttggggcaactaaatatttgtagagtagttattatctaataaaggcttgggttatctcttgaaatgctgttgagagcgttgtagatgtgattgtattagatgtaatggatggttatgagatttatggtaatacagttacattttgggaggttgcaagtgcagatatgcctaaatttaagaaaaactgcaagtttggtatcataaccagtcccaagcctatgtaaaggagggttatgttaagtcttcggaagtcaacataaaacttggcatatacctaacatgagtcactcaacggattttgcta

SEQ ID NO: 103397 - DNA, 487 bp, Glycine max
  unsure (1)..(487): unsure at all n locations
actaagctntaaaacaatgacatggaaggcatcttttcaattgctgaaatgtttcatgcacctagtaatcgattgcctaaggtggtaattgaatacaggttcagacagagagtaggactttntgtcttcactaaaataatcgatttcccaagttggtaatcgattacaagtttacccagagaactttgatatttgcctcagctcaaaataattgactacatgatacaataatcatatgatgtgtaatattcaagaatacaaatcacatgtaccaacaaccaatcaaacaaatgtaaatgcatatgtacatgaatatactccctaattggcttaagtaagattaaactcacttagaatgccaagttcattgcgaaggtggaagaacctatcccttgctaaaggtttagtgaagatatcagccagttataagtctgtatcaacaaactatatcacaatcacncttgtgaatatgaaccctactgaaatg

SEQ ID NO: 103398 - DNA, 439 bp, Glycine max
agcttgcccagagaaggagtccacggatgaattgtttaccacctctaaagactggaaagcggtttctaatgactcctctgcggcctccacataatgcatagaggatgggcagctcaccaagatgtcttcttcgcctgatacgatgaccagatgcccttccactacgaatttcaacttttggtggagtgttgagggaacaactcctactgagtggatccacgggcgccccaacagacagctgtagggggggggggttaatatccattatttggaaggtgacttgacaggtgtgagggcctatttgtactgggagatcgatctctcccctaacctctcggcgggtgccgtcgaaggcaccaaccaccattgaactctgcttttagtgggaagcattgaatggtaatttctccaaagtgctcttaggcatcacgtttaaact

SEQ ID NO: 103399 - DNA, 489 bp, Glycine max
ctataaaactcagctgactgatcatctttaaacttgagcttgaagctcttattcataagactgtgctcaccaatctggatggtgaaaaaatatgatggaactcaataaaccaagaaggggtgaattggatttctaaacaaaatgcacttttttaataaacacagttacaaaaaaacttttgtatggatcgtatcacacaacaaatatgaattgaacgtaattaatacttaatcaatccttccttaaacatgatccttcattaacatcctatctttcatagtcataaaacttgaatctttaaaatcttgattaatactcaaatgacttttcttaaaacttgaatgagttgattaaaccttgaatcagagaaaaagattagaataagagaaaaaagacacactcttttatattgcttcactctctatttctaaagaagctaatctagttatctaatccacaacttgaattaaatatgcactatgcattaag

SEQ ID NO: 103400 - DNA, 430 bp, Glycine max
  unsure (1)..(430): unsure at all n locations
agcttgttggaccatatatatcaaacatcatttctggttataaacagcagattcaggtatagntacttgttcatcagtcccttccccttttgcataattgcatgcacagattatcagatgcaagcctggactttcgagtctatagattattacattttaatgatggaaaaatgaattcaaaagccaaacttaatcagatttttccaaaggagaagatagaagaaaaataatcatgatagtaatcaagctgaggtggaatgtggatttcagaatatggattttattactgtatcgttatgaatcattgaactagtaaggaccaaaagtggaattgttggttggttaaaagtctttattggcattactatgttaacactcgacattattggagaatagagacaatattcttgaaccattagtattagagaca

SEQ ID NO: 103401 - DNA, 412 bp, Glycine max
  unsure (1)..(412): unsure at all n locations
tgattgggactttgttgattcaatttgggcaaaattggatgagggaaagaagtggtttcgaaatctgcactttatgcagaatttttgctgtgaaatgtgcagcagaaatttgtattagtgcagaanaatgcttgtgtatggctggttgtgaaaagggaagtaaatatggggttctggccatttgctagcagatcccaacggtcaaaatgtagacttgtgtactagagacttccagtaaaattttcgattcaatccaacggttaacgaattggaatgaaggaaatgttactggggtatttgtatgtgaaaagctgtgattttgagttgtggtttgggcagagtttctgcctttgccctgttttgcttggttttgttagtccatgatgtttggaagaggaattacctgggatgt

SEQ ID NO: 103402 - DNA, 432 bp, Glycine max
  unsure (1)..(432): unsure at all n locations
atccttaagtcacctgcggcatgcaagcttgtctaatncatggcattgctctctatttgaataagagaattntgtccttgccttttccaactaacaaaagaacctatgtgatcatatactgatcagnaattatgattaatatgattctaagctactattataaaaataataaaattattcaatataattatttgtgatcagataattataaaaaatgaatttatcatgtcaatatatggcctaatttttcaataatatataattagttgaaaataaaagacaatctagttaaaaagtgaaattatcgaggagtttcaatgttgccttatgggctggttcgctaaagtactaccggaaattatactgaaaagcccaagcaattttcttggccttccatttactccctgatcaattatcatcaaaaaatgtcaa

SEQ ID NO: 103403 - DNA, 461 bp, Glycine max
atcacatctacaggatcaaggtccttcatattataatttctagacaagaaagatttcacatcatttatgaattgcatattactaccaaatatcaatatgtcatccatatacaaatataaaatgacacatccattatcatcaaattgtttcacatacacatatttatcactatcattaatttgaaaatcatacaaaataatgacttaatcaaacttttgtgtcaatgctttggagcttgtttcaaatcatacaaagatttaacaatttatttttcaagaaaaaatattttcaaagaaagtcacatctctagactccataatagtaccattagaaattttagatacttctgaattaataaccaagaatctataagtagtattatgtaaaaaatatccaacacaatataattaataatttcttaatattttttcaatcttctctgtcttattaatagggatatt

SEQ ID NO: 103404 - DNA, 418 bp, Glycine max
  unsure (1)..(418): unsure at all n locations
agctngcacattgctacttgatagaagataacctagatggtcaaccttggttcttcgatatcaaatggtacatcatagacaaggaatccccaccggaggccgtttacaacgacaagagaatgttgcgaaggttggcagccacctttttcctaagtaggaatatcctgtacaaaaggaaccatgatatggttttgcttcgatgtgtggatgccagaaaggcggagcaaatgctagtataagtgcatgagggatcctttggaacacatgccaacaacatgccatgaccctgaagattctgagagcagggtattacttgctcactatggaaaacgattggtgcatccatgtgaggaagtgccacaagcgccaagcctctgccgattatgacaatgctctacacatacctttgaacgttttg

SEQ ID NO: 103405 - DNA, 449 bp, Glycine max
  unsure (1)..(449): unsure at all n locations
cttgctccaccactactccctgatccttgcaggagaaattcagttggtttgtctgaacctccttgccaggtgagtgttgcagcatggttcccaggagccggctcacttgatctttgagttggcaatgtatttctcaaagtaagcttggggtatgaagcaaattccatcagaaagccatcgtctcgaccattgttatctgttaaacataagggaaacagttgaatgttttatatgcaatagcaaaaactgaaattattgatgcttcctagggatacataaagcagagagagtggtttggaattgatgttttactgantaattctaaccaaaaataggcacagagagtctgccatagcgagaggttaatatggagcttggtgggggctttcgtcggcgctcattatggccagcaagtcgcttgcggcagctacgtttttcttgatcaaatt

SEQ ID NO: 103406 - DNA, 358 bp, Glycine max
  unsure (1)..(358): unsure at all n locations
agcttgcagataaaacccgttgagtttatgattttaatgagtcgactaanaaatttggtgtaattatacgaattttaaaaaaaatcattatttgctagatccataggtttaagcagtccacatatctaactccgtatatccactccaaccagtacttctctatattcatccaactgagagagaggtcagataatctccgttacatctcgctaacccacacaaaatcccaagtacaatttttaaaccaattnttttttttttttacatatctaatcaaatacattgtcaaaatatttatagaagcttaaggtagagaatatctagaaaanaaaaggtggtaaagtatcctaaaatttag

SEQ ID NO: 103407 - DNA, 469 bp, Glycine max
  unsure (1)..(469): unsure at all n locations
ggcttctacacctttctctctctagagatctctaaacatgctaaagcttcaagaatttcccaaactccacttccatttctgatttcaggcttaaataggtggccttgttggtgcttgtgcgcttagcgcaactctagatctcttagcgagcataagcgaattttggcttagcgctcgtcttctcgcttagcagatgcatgcaagcgatgcacttagcgggatgagccctcgcttagcgcatgtgtccaactcatccttcttccatattcttcctcacacttagccacaagagtggtttgctcagcggatagctcgctaagccagtagattggcttagcgagcagatcaaaatcaacactttacaaacttgtctaattaacctgaaattgaaaggaaatgattattaaatacacaaaatgggagtattaagtacttattacctatctttaacaaanagtaattacaacac

SEQ ID NO: 103408 - DNA, 367 bp, Glycine max
  unsure (1)..(367): unsure at all n locations
agctttgtcctcagatccctcttgttgtgtcttgtccaattgagacagcccgtttaggtttagactaacttaaactgagtntcgcccgcagatccctcttgtaagactagactcagctcacgcagcttacgaaagtttagcctaatttatcctaagctttgtccgcagatccctcttgtaagactaagtttcgatcctgcttcaatcaagttctaaggcaatagtacattttccaatgctaaagtcacctaactatgcacacaaatggatgatcagaccaaaagcatacatacattaagcattgaaggaagcggtgcacataggaaacataatcaattagatattacgtatttacatcagttgttca

SEQ ID NO: 103409 - DNA, 444 bp, Glycine max
  unsure (1)..(444): unsure at all n locations
tgtngcgtggtantgtaaggaagagagaagggggacttatattcaatcggttntcgatgcaatgcatcctctgctccactacttgtatgattgtgggctcttgtaggaatgttcttcctttctatctataagagcacacaaacttgaaatccaaatattagtgaagttgaaatcaatcaccggatgaaaattcaaatgataagagtttctagaacatgaatcatcctcacaatgcttccatgtgtattgtgaaatcatatggacattaactaacttagtataaagcatttatgtgagttagttatgtcattctggacacataaagcttctcagactttggtacttgtcacaatgtatttggacgtttggttctacacgacatattggacgatgtatgttaacatcgataaaacacgttgcatttgtggacactctgagaatgta

SEQ ID NO: 103410 - DNA, 260 bp, Glycine max
cctgccgctcctgcggctaatatatatggatagattggtcacctgcttcctctgcccatttggtaaccgatgccgaaaatgaagatgagacagagttacttacccttaactttaacattgaatcatgaacttccatggcatgcccccacataactggtattggtgcactaataaagactatccatcctacttgtaacccgccaacaaataattctgcccttgtactacaggtaaatatccactaatcattgatatcttct

SEQ ID NO: 103411 - DNA, 398 bp, Glycine max
tcttaccacaattatcttttatatattattgttcaaaccaaatataattgttgtgtttattcattcaacgagtgatttcgatcatacaatctaaacttaaattttgtttaagaatattaaattcgagttaagtattgttcaaatcaataacctattaatgtttcttattataatagaattattattttttaaaatagagttgtagttccaaaaaaagttaaattatataaaaaaaattcatattaaattttagtgtgcttttaattctaagtacaaattatgattttatttatgagttcgattttgatatacattattaatcaaatggaaatcattcttaagtaatcattatttaatttttaaagaaaattatatgtattgatctatcaatgaataat

SEQ ID NO: 103412 - DNA, 440 bp, Glycine max
  unsure (1)..(440): unsure at all n locations
agcttcatcctcaattactgatgagaatatgatctcttcttcgtaagacaaatttgactaagatttgtgtgagaaaggaatggtaaagatatttgtgtaatctaaactttcttttctatttgtagagcatctttctttagggaggtatttgaatatttttgcaaccaaaatttaagattcgatcacattataccttatcctataaaattataacactgtatcatatacaaaaggcaaacttgaagatttttttgtcgtagcattgttagagagtttatcctattactaatgcgtggacctcacctcactttaaactctgactttagttttgtatgaacttcatattctagtttagttttaataactgangtatagtatcgtggtcatgaacttagttacaacattaatatatacctttaataagaattaaatattttttt

SEQ ID NO: 103413 - DNA, 324 bp, Glycine max
aaacattcacaaatgccaaatgcatttaaagcgcacatgaaaatgtatatgccaaaggcagttatgccttattttttggtggtttgaatgcctcgcttagcgcatcaactcgctaagcgagcatacatgatgtttaagtttccaaacacacatgcttagcgggaaaactcgcttagcccaatgcgaaaaaatcaaattttctagagaagattttgggcttagtgcgaagagttgcgcttagcaagttctgtagctctgattggcctgcaactctcacttaacgggcagtggctgcacttagcgaataaacatgctccttatatg

SEQ ID NO: 103414 - DNA, 360 bp, Glycine max
gcttctagtctcaatattgaacgtctcgatatattttccgattcaatcggacatccaagtaaaaagttattgtcgtttgaatatactatgagctccgattctcaatatggagcgtctcgatatattacaggactcaaccggacatccgtgtataaagatattgtcaattcaattttctcagagctccggatctaaattttgagcgtttcgatatgttacgggactcaaccggacatccgagtataaagttattgatcatttaatttgctcagagcttctagtctcaattttgagcgtctcgatatattacccgactctattcgaaatccgagttaaaacgaattgtcgcttgaaattcct

SEQ ID NO: 103415 - DNA, 439 bp, Glycine max
  unsure (1)..(439): unsure at all n locations
ttggagcgtctcgatgtattacaggactctatcttacatnctttgatnatgttattggtcgttgaatttgctacgaacttccgttttcaatttggagcatctagatatatttcgggacacaaccagacatcctggtataaagacattgtcgtttcaatctgctcagagctttcattctaaatttgagcgtctcgatatattacgggactctatcggacatccgagtaaaaagttattgtcgtttgaattttctgcgagcttccgttttcaatttggagcgtctcgatatattacaggactcaaccggacattcgtgtataaagtaattgtcatttcaatttgctcagagcttctagtctcaattatgggcgtctcgatatattaccagattcaatcagacatctgagtaaatagttattgttgtttgaattttctacga

SEQ ID NO: 103416 - DNA, 239 bp, Glycine max
gtctctatcattccagcctgatggatgacaaggagaacagcattcggggtgtatgtcgatgcataggtaccgatcaaactcaagggaaagatatatcggattgcggtaaacccgcgattttgtactgaacagaatgttgggcgggctaaagccaacatgaaaataaagtaggtgctgcggacacgaggattgtgccgcggatgtgtggcaagactctacaggatataattacaaactaa

SEQ ID NO: 103417 - DNA, 434 bp, Glycine max
  unsure (1)..(434): unsure at all n locations
agctntaattggcacggacggaaatatattggtttataatatgggatgcaaataaccaatcatatacttgcttggtagttggtacagcttaatatatatatatatatatatattccatgagatgcaattttttcccgccaccctcttggctctacaaaatctaccagttaactgggagtgcagatgcaatatttcctttgttaaccttctttacattctaccttctcttccaagaatgccctagagaggggaattatattaatgtagctcatcttcttcataacaaataggcataaagatgaaggaattaagtcatgtttgttgcatgccggtgtctattttttttctacaccaccatcaacacacattgttgtatgcaacacattgtttgaaatcaatgacatctttccggccaatccttttgattttgttat

SEQ ID NO: 103418 - DNA, 178 bp, Glycine max
tattccaaagaatatacaatacagatgatttcctattctataattattaaattaaaataataacaatcacacacattgaagtttctattcctcattaaaaatatatatgaagcgcatggaatacttacttaccactagataatttaaatgaactatggtagtcccatcctactactgg

SEQ ID NO: 103419 - DNA, 419 bp, Glycine max
  unsure (1)..(419): unsure at all n locations
agctntatagtgcgggtctgggagacgaatgtcatgtgtttgcgatatgtgaagatgatgttccaagtacttcggatttggtccgaccatgccctcctgatttccagctgggaaattggcgagtggaggaacgccccggcatttacgcaacaagcataatgtaaacctttacggttttaaaagctctatagttgggcctaggctttagagttttcattttgttaaggctttgtgacttttgtttttgaatatataatacaaagatctttcttcatctgttcctggtctctacccattctcattcatttgcatgtttacttctttttctgaaacggcagattcgatgacgagtcccccgaaggtactaatacctgggacccgtctataacttcgagccagaaatgaaccctactgaagat

SEQ ID NO: 103420 - DNA, 213 bp, Glycine max
tttgggacttagaattgacctcataaggagacctttaactattacttaatgttgtttgctcaggaataggttgttaaaaggcttaactagactaacttgacaccctagtttttttttgtacgcaatcatctaatcatgaatcgggaccctacattataacggcacttctggagaactacaaaaccccttaccttaaaaaaaaaaatctttaaa

SEQ ID NO: 103421 - DNA, 467 bp, Glycine max
  unsure (1)..(467): unsure at all n locations
atatgctatcgattctttttggcgatggactgtttgttcttangagaacncatggcattcacgaaagttttgtcatgncgtttgttgcatgggacaaacatactactttcaatgtggaccgttggggacctttacatagacaaacacaccaaagggcagccacagtcaccaagcgccattgttttaccattgatgtctttgaagatatgatacaacacaattatcaattggtaggtctttgttaatataatcataatcccttatattatttattgttgacgtcttatctntaattactgtgttccttctaacctaggttctgccaccagaggcttcaatttatttaactgcatcaaaaaatatatgattgtagatcgtggtcgcggtagacatcacgaatggatgatcaccatgaataatggnctatcatgtgtttctgagtcctgaatacattatttagctgactg

SEQ ID NO: 103422 - DNA, 430 bp, Glycine max
gcaagcttatccaaagaaatatcactcgtgtttatacataatataaattcttgcttatttctaagatatttattcaagtgttttaaaaggtaacgaatctaaatcacgtcacgagactttattattgtgttaactttaagaaaaattgcatagctacaatagtttaaaactttcatcatgatttagaggatattaagatatcgataatgacaattggcgagcatgtatttgttaccaaaaagtaaacttgtttagcatttgtcttgtctaaattgctaagagcaccctatctataacttaaaaaataaaattgacatatataggaaattttttctcatgagacatatatataaagttacaccccgattatattttttaaaaaaataatggtttaacttattaaaatatttttaaagaaaaataagttgat

SEQ ID NO: 103423 - DNA, 415 bp, Glycine max
tttagtcagctgagtatcactattcaacccttttcttctgaccaattgatccacatcacattagggctgttaaagattaacttacaaatattaatttcagaaccaaatttgtgcatttaaaaatatagggttcacaaccaactactttataatttgaaacttttgaaaattagcaagcagtgaaaataaaactaaaactaatggaaaatacataataattattattattattaaattaagattattcaatctatattatgtcataataaggttaattaacacagtaagggttaattaattcaaacttcacaactttataaatattatacaagactaatatattcacaatatataacaatatagttcttatcaataattaatgaccatatttacttaatagaattcatactatttc

SEQ ID NO: 103424 - DNA, 372 bp, Glycine max
agcttgatgagtactgagagcctcgattcacttttgtgacaacaacatgaatacgagacattggagtgttgacctgcccaaaaccacagacggtggagctgcttctggctttccccctgacccacaataagccgctgacctaggcctagctagcggaaaaaataaccccattgaaagaaacatcgcagatgcttatttaaagcccagtctgcgagcccacactctatccacttgaaaaccagaattgcctagggagctcatatggttggacacacccgataacgtggccgaggatataggagctaggcaacctataccaaaggagctgcatttaaaattgttacccaaactgaaaccgggagacgtttcaga

SEQ ID NO: 103425 - DNA, 426 bp, Glycine max
agcttcaggttgctcaattgctccaggttgcttcactgaagggcaaaggtctgtatggtggtcagcataggagcacaaaccacaaaccctcgcgacaggtacagatttctgattcaaggccagctgggttaccaagttgaccaacgcatccagtttgccttcaagcttcttattttcaaatgatgcacatgggtttgtagctacctcatgcactcctctaatgactatggcatcatttctggcgctaaactgctgggagatggaggccatcttctcaattaaatttctggcttcagcaagggtcatgtctccaagggctcaaccactggcagcatctatcatacttctctccatattactgagtccttcatataaatattggagaagaagctgttctgaaatctgatggtgggggcaactggcaca

SEQ ID NO: 103426 - DNA, 173 bp, Glycine max
gcctataaaatccgctgctttacactccctcttgagagacaacctgttttataacaataccatctcttctatcgatcactcattaatttccatatttccccttttttgagttaagctcacttgagacacggtattagttatatgagccctgactaaccctactcttctcccat

SEQ ID NO: 103427 - DNA, 407 bp, Glycine max
  unsure (1)..(407): unsure at all n locations
agctntaattcgttctcacataggagaataggcttattctaaagaaagaaaatatttgtatatagactacgtttacattagttggacaaactgaatcaatcagtatcacataatgttaacaataaaaaaaaaagtgacgcattatcagataatacaaagatatatgagattatttagtataaagtgatgaaatactgaattgttcattggtttaatctagcaaactcgtatgaagagagtcttctatttctcgttctaaaagaattttcctcagaatttataacgcaaccttggatgggacaaaaaaaatatcttcggaaaaaaaattgtacatttaatagttgtctttctaacattcaaactaaatttattaaaataaatggggatgatatggtacaaactatatt

SEQ ID NO: 103428 - DNA, 468 bp, Glycine max
  unsure (1)..(468): unsure at all n locations
agagagaagtgagttatcaagaataggatgttgtgacttatggcctcagttaccttaagaaaaagggggttgaattaagatacaaagactattccccaattaaactntcactctctcttttcggattaacaatgcacccttaacatgaattactcaaaagacaattcagaataaacttctttaaagcgaaagataaaaataaataaaagaagtttaagagaagagaggaatgcaaacttgatttatactggttcggccacttcccgtgcctacatccagtcctcaagcaacccacttgagattttccattgtaaaactctntttacaaagtctgaatcacacagggacaacccttcccttgtgttcaggaatcctctacaacaagagacccacagtctcttaatcccttntcagaaataagaagaagagaagaagaaatctctctacaaagagatagatggtataatg

SEQ ID NO: 103429 - DNA, 434 bp, Glycine max
  unsure (1)..(434): unsure at all n locations
agcttgtgtttcacaaaaagagattgttattatgctgctcacagtctaacatacatgactttcacctctcttgatttttggctggattgaggaggttccaatgcaattgaaccaaatcattctagaagatgtatattttgtttcttctaaataaaatccagcaaagttaaatgtaaagggaaaaaaatttcaggggcgcgtttcgaggaatgcatggtttaagtagaaataactctaagtaatttttgcattggataaaaaaaatattttatcaagttttactactaacttatttttataataaaaatattcaaatataaattgtttcactttaaactcaattttaacctaaactcaatttacaaacactcatttnttattagctatgttgtttctattatagatataaactacaggttttgattattcttttt

SEQ ID NO: 103430 - DNA, 466 bp, Glycine max
  unsure (1)..(466): unsure at all n locations
ngtggcagataatgctagggtggattcccggcatgttatatggttgtcaagcaaataggtctgtgttcctatgtaagacatcaactatgcgtctgtgctcatggctggtgaggtccctgttgagctacatgcactacccgagtttgggtccgagttgtagcttgacgagttcttcagtaggctttgggcctctatcagaagtgtcgttgcacgaatctacattgaatatgttgtctaggctttcttggtagactgtcagggctcagactggagacccttcgtccacactcatgatttgagtggtaccatctgctgtggggtaaagcttggcaggctccctggtgggaggatagagtgccactttcaagctttccgcgtagcactgttgtgcgtgcttttgatctgccttgacagtcatgatctctcccatcaaggtggagaacttcatctttagatgttctatgga

SEQ ID NO: 103431 - DNA, 434 bp, Glycine max
agcttattggattatggggcactcgttatatgtggttctaagagacggtcgggcgatggcacaatataactattccatttccacaagccagacataagcacaccatccccaattgcccaccttttaatttagctcacgtgcatgtacgtagccttcttctcgttcctctcagcccgggtccccatcaaccccgccaaactatcacagcatccaaacaattcaattccatttgtcatgaaactgccttaaacaaagaaaaacagagtggaggcagatatctttgcacaagattcattcaaattccacagagttttttctaccctcatacctcagcaaaatcctcttcgtttcgattcgctaaccattggatcgccttgaaaataactgggggtttccaatacataaatctaaattttgaccgtgggatctgctat

SEQ ID NO: 103432 - DNA, 463 bp, Glycine max
  unsure (1)..(463): unsure at all n locations
nggaggcagaaggagatgaatgaagggagagggagagaagatcacgaaattttgtgctctaaatgagctctgaaatctgaaatttaatattcaaatgatcaaagttttaaaaaatgcacacacatgacctctatttatagcctaagtgtcacacaaaattggattgaaatttgaatttcaattcaaatttcacttgaatttgaaattgaatttgtggagccaaactttggagccaaaatttcactaattatgaatagtgcattttagttatggttcaacgcactaatccaagatcaattcctagattctcccctaagtgtgcttaggtgtcatgagacatgtaaagcatgatggacatgcacaaagtgtgactatatgatgtggcaatggggtgtggtaagcaaatgctcacctccccctctaaaaattaattggattgggcttctaccaattcaattaaatt

SEQ ID NO: 103433 - DNA, 444 bp, Glycine max
  unsure (1)..(444): unsure at all n locations
agcttttctttgagcacaacaaaggcttgcttttgttttcaccccaggtaaatgtcacattctttntcaccagcttattgagaggtgatgcaattgtagataaattaggaatgaaccttctataaaagcttgctaacccatggaagctcctaatatctcccacactntttggggttggccattcttggacggccttgattttctcagggtccacatggacctcatttctaccaactacaaacactaagaaaactatattatctacacaaaaagtacacttctctatattttcatagagggtgtttttcctaagaactganaaacttgcctgagatgtcataagtgatcatctaggctcctactgtacagtaaaatatcatcaaaataaacaactacaaatatacctctgaaatcccttaagacatgatgaataagcctcataaa

SEQ ID NO: 103434 - DNA, 423 bp, Glycine max
caactaacactaatatatagagtgactacttcaaaggaatggatgggcctttgataggctcatctaatctatctaattaaactaattacacaacacaaagcctaaactcaacccaattattcaagtgaagaggttctaacttttaaactcaatttgaccctcgaaatggtagaattggccaaagcttatttctggcaagattgaagaactttttcttatgtttccaaataataattacatcactactacaaaaagcggattcaacatcggtgtgttaacatcagttattaaaaaaaccaatgctaacatatgcgcggtggcataattgtaaataccgtgtatacgttaacatcggttttgtgaaaaaccgatgttaacgaagttcattaacatcggttatcggagaactgatgttaacattta

SEQ ID NO: 103435 - DNA, 250 bp, Glycine max
cctgagccaaaaatgtggcgagcgaatatcttaagctactcaaaaagcccactctctcggcgatatagtcagatgcacattggctcacattctgtgtggatgaaccctgagcagtgagtccacgcaccaatctaactgtttcatctataaaagcgcttggacccgtctcaaatatcatgaaacgtgccttctcggaatcttgacctctgaatgatcaacgaataagcagtataactatttgcctaacaga

SEQ ID NO: 103436 - DNA, 440 bp, Glycine max
agcttgagatgaggaagtgttgaagggtagaacttcctgcttttattgttgaccacagagtggtacctggagatatgtcgcgggggtcaggagaccttggggacgtcaggtggggtgctattgcccaaaaccaagcttgaccaatcccgacccaacccgggcatagtcggtcagtgagaacctgtgatgtacctaagcaggcgagctcctggcagtcaacagataaaaggaacaaagaccacaaagcaaggaggcttgtggtggctggccagctgtgaactttgattgatatgtgggttatggcctctagtaatcaattaccaagggtgggtaatcgattacaaggcttaaaaatgaagacaggaggcttagatggtctctggtaatcgattaccaggggatgtaatcgattaccacgcttgaaaatgaggtcaggaagc

SEQ ID NO: 103437 - DNA, 420 bp, Glycine max
  unsure (1)..(420): unsure at all n locations
gaagtactaagtatttattacctatactcaacagaanatacttataacactacaaaataaccataaattggaagagtttgatacaatttacacaagttttatacacaaaagttagtcgtattcaccgactaacaggtaccctatgctgacttgctcccatatctactcgataattcaatggttgccataaccccagccaaggttcctcaacctccatttttccaaggatacgactcanatgcaacgtgtgcttatcatggaggagccccggngtacccattgagcattgtagggccctgaagcataaggtgtaaggtctaattgatgcgggctggctgaaatttgaggagaatcgcgttgaagtcctgacattgacaagagatgccacacatagggcaatttgaaggttgtggttatatg

SEQ ID NO: 103438 - DNA, 433 bp, Glycine max
  unsure (1)..(433): unsure at all n locations
cttgtgtttnttcatcgcaatctccattttttatgttttttgtgattctgaattttttgtatctggcctttattgtgtcccgaatatcgaatttcctggctattgtggagtttttgcaatggtggtatcaacattggcatcagtttttgactttgtcagtttggtcgtgttcttctggtgttgcttcccacctatgtgtttattatacatgtccttgctattacattcacaaattacagttttatcataccttgcttttctttgcaggattactcgaatgaccagccccattattggatatccttaaagaacaatggtcaactttcctaccttaactcttttcttgcataacatgaggtgaaacaaaactcaacaggtgcaacttagccaaaagaaattattgaatatacaacaacttgagtggtctatctgt

SEQ ID NO: 103439 - DNA, 374 bp, Glycine max
  unsure (1)..(374): unsure at all n locations
atcttcttcctcggccaaccccgcaccaaacacaaaccataacccaccaaaaatgaaactcaatgttccaaaatttaatggcaccgacccctctgggtgggtgttcaaaaccacccaattntttgcctatcactctacgctgaaaccaaagcgccttaccatcgcctccttcgctatggaaggccccgctcttacgtggttctagtggatgacccgcaaccaccagctcccgacgtgggtggcgtttttgcaggccattgagacgcgcttcgcccactccccatacgaggacccaacaggaatcctcttcaaactcacacaacggagctcggttagcgattacctgcatcagtttgaagctctagcaaacagaa

SEQ ID NO: 103440 - DNA, 356 bp, Glycine max
  unsure (1)..(356): unsure at all n locations
agctttgtcagtttatgcacaaccctcttgaaagtcattgtatagccacaaatcgtgtactcagatatctcaatggcacaattgatcatggcttagctttttatccttcccagcatctcttcatcactggctatagtgattcacacagggctgactcatttgacatgcggtttacctcaggcttctgtgtttatttaggaaacaatcttgtgtcatggcttgcaaagaagcaacaatcagtctctatgtctagcactgaggtagaattcagaagtttagcagctctagttgctgaaattaaatggcttcagtctctccttacaaaatngcataatgttcaaacaaagcctcctttg

SEQ ID NO: 103441 - DNA, 436 bp, Glycine max
  unsure (1)..(436): unsure at all n locations
ttatgtaagaaataaatccaagctttatgagtgtaatcatcatataaaacttaggatgtaccttttgttgttgtttgattatggtttaataggcctgcatatgtctgcatgcacaagttgtagcttatttgatgctctccataaactcttctttggcatagagtctctgtgttgcttgccaattaatcattctatgcatatcttcttcggaatcttgaccaaaggcagcccatttaccatcttcttatcaaaaagtgtcctcaatccattgtagcctaagtgaccaaaccgacaatgccaaagatgagattcattttctgatacaatctggaaacatgaaaaagattttggtatcatggtagccaacanagaaaacattctatttccactcatatatgtctgcataattaatcctttctcacggtgatatacccta

SEQ ID NO: 103442 - DNA, 442 bp, Glycine max
agcttcttcatctggttcattgctctttaccttttcatcctaattaaaacagcactgtctggaagcttgtctgatgcttcaccaccttccttcaaccaagggtgttctggttcaaacgaaaaatgaggaacggggtgatgacagacagcatcaatcactggttaaactatcaaaatgcaaatgggtgaaaatgcgacaacaatacaacatatttaccgagggcatcagcagctgtaatgcgttccttatggtcgcaagtcagcatttttctaaccaaatcttttgcagcttctgaaatagaaggccatggctcgctatccatatctaactttcctcccaaaatagcatcaaatatgcctttctcagtcttgaattgatcgatacataattaatcaatataaatagatatgtctatcacgagctgaaaaatagagtaacatgt

SEQ ID NO: 103443 - DNA, 448 bp, Glycine max
  unsure (1)..(448): unsure at all n locations
actcagctttaccgaccaattatccctagactgcggactgtttataattcatagagtaatacaccctacaagcaagcgctacaaaatttcaacttactcaaacgttatccaaaacaggaaaaaacctcacgacacgcatagtcaaccaaactcccctttatcaagtaaagaccaaataaaaaatttaaataataataataacaataactaatattaatatcaattaataaataaatacattaataaataaaagaaagaaagaaatcaagcagcaatagcgtgatgtgctacttaacacgttccgaactaaagcaggaaatgaaaattattattatacgaagaataacctcaacaaaaggaaaatntgagaaattgcaaaaaccaaggacgttgatgttacgataatgcgatacctgcatgagaagggtgggaggagtcgatgatcgat

SEQ ID NO: 103444 - DNA, 360 bp, Glycine max
  unsure (1)..(360): unsure at all n locations
agcttgtcggccgcgattgacgaagggttcttatnacgacgttagtctctgcgtgctatcaggcttttcgtcttacagatagcaaaaaaagaatgtttatatggataaccactcgggtatttccgcccgtcagcgtgactcataagtcagtatgacagatcttgtgagggcgcacaagacgacgttagtctctgcgtgctatcaagcttttcgtcttacagatagcaaaaaaagaatgtttatatggataaccactcaggtatttccgcccgtcagtgtgactcanatgtcagtatgacagatcttgtgagcgcggaagatgacataaatctccgcgtgtcaacgggcttgtcggccgcg

SEQ ID NO: 103445 - DNA, 445 bp, Glycine max
  unsure (1)..(445): unsure at all n locations
tgtcacgaagttgctgcatttctccctataagaatgcaatttaataataagcggaaagcgaagccaaatgtgggaaattaatataaaagaagaaatataagcaaaaagagtcatggaagtcaagaactcaaccactaaattcagatgaattggcagagtaaagcaaaaaaatattacctgcaagaatcgacgttcttcaagccactgtttgacaggcatcactttatcattagcatctttccattcatttgcaaccacaacagctactctgtttgctgttaccttggcacgagccaactccctgtctagagtctttctttcctcctaaagaatgtcaaataaaccgtgcaaaaataaatatgatcttaactagaggcagtacaatcaagaataaagcaaatgtgagttngaacatgctgaagactnttcacacattacattcatt

SEQ ID NO: 103446 - DNA, 407 bp, Glycine max
  unsure (1)..(407): unsure at all n locations
agcttgaagatgatgctntaatggatgattaatttagagaaggtgatgtaagctccattggagcctgtatgcctangatcttcttcatcaatggattcctttgcttcttggaagatgaatggcaaccgaatggagaaaggaagagagagaggagacgccacttcaaggagaagatgagtctataagaagctcaccaccatatgaggccacagataatagcttggaggaagaaggagatgaatgaagtgagagggagagaagaccacgaaattttgtgctccaaatgagctttgaaatctgaagtttaatattcaaattatcaaagttgaaaaaatgcactcacatgacctctatttatagcctaagtgtcacacaaatattgagggaaattcacatttcacttgaat

SEQ ID NO: 103447 - DNA, 411 bp, Glycine max
  unsure (1)..(411): unsure at all n locations
ttcagaatacacaggcagttntaaagacatatatttanatgggattgagttttgaaatgcttgaatgcattcaaaactctcatcagaaaagaaatccatatctatgaacttagggtcaatgatagaacaagaggagaagaggtttttgtaccgtatacattgttcttccgatgagaacaatgaggaggaggaaattgaggaaggaattggaatatccttagcctcggagtgtcgttggcttctacttgaagaacccttgcgcttctttgatggttctgccatttgagagacttattcaaaatttcaattggttgaaatgaaagaggatgaaaaaagatgaattttgggctttgtgggatgtgatttggataagaaatgagtaagttgtggcagaaatatgaattgggaatg

SEQ ID NO: 103448 - DNA, 393 bp, Glycine max
  unsure (1)..(393): unsure at all n locations
agttgattntagttttaatttttctttagttattagncaattcaattaagaatgagaaatcccaaagagaaaacgcccgattgattttcgctttattttactaaaagggcattttttgattattatattattattttaccccttttttgatttccaatgtggttacggcacgaccgaacgggcggaattcattttaaccgaaattaacggatgatacaattcaaacgatcggtggcaatttattttattttttagattaagcgagaaatgacttaaataaatagcttaagcacgtgaaaagggggtataaaaagttaatgaaaacgagaataaaaatacatgaaacaaaatgtggaccaccacgggtacatagaatgaattgtaaagctcggt

SEQ ID NO: 103449 - DNA, 476 bp, Glycine max
  unsure (1)..(476): unsure at all n locations
ntcatcatgtagtacaagtacaacatcgacttgactctctttagtattgagttgcagagcatgtcaaagaaggaatatgaaacatttacggagtatgcccaaagatggatagcagtggcagcttaactggaaccccctttatcggagaaagaaaccatgacgttgtttatcaataccttgcgtgagccattttatgataagatgattgggtgtacctcatcaaaattttttgatatagtcgtcataggggagagagtggagaacgacatgtggaaagggaggattgattaccctagatcagccaattcaaaaactcttctaagtgggtcggggaaaacaagaagggaacaccaatgcagtgatgtttcattctcctggggcacctgtcagaccctaatttcgttgggggaatatcattggatatgaatatttgattcttactagtcgaattatgatatttggcgtcagttacagtg

SEQ ID NO: 103450 - DNA, 370 bp, Glycine max
gagcttatggcgactaaatgaagcatgatgacatcattattggaagccgcatgatatgactatatggcagtaacagcatctcagcatttcctaacactgtcagtggctcccgagtatttcattgaatgtttggtttactttccgtaccaaagctcccctggtctccaatgaatcatgtttaatgacaacttcttttgatggggaaacctatagttgaaaatcattaatcatcatgttaacgattcattgggccaaataatatgaaactattgaagaataattgcgctcacctgtcaggtatgaaaactctgttcttgatacaaaccactgcaaagaaacaagttgaatatgaatgatgcgttttcatgta

SEQ ID NO: 103451 - DNA, 405 bp, Glycine max
agatgattaagtataacccaatatgaaggttcgttatgattttaaatgtggaacacaaaatagataagaagataaactaacttgttggaaggtattgatgtttctattaaatcaaacaaaaataaagtgcagagataggttccccgcatgtagcccgtgtatataaccagaaaatagaaggttcatgtgctcttcaaataatgttattgttaatttcctgagccttcaaacattactcccacacacctcctacaagagacaaacaaggatggtgtttgaaaatattgcaagatagaaataacgagagagggagagagagaacattccctcatgaaactaggggttgaataatagacaagcacattaattaagaatgtgaacattagatgaaatataaaaatgatc

SEQ ID NO: 103452 - DNA, 362 bp, Glycine max
agcttagcggaccaaatcagcttgagatgcattggttgagcgctaagcgctaaaggctctttgcttatcgcatgacaaaaaatgcgcttagcgcgaggcttgcgcttagcaaagggactgattttcaggaaaaaaaaaatctaagttctatttcagtccttttctcaagaatttgaaactcttatatctatcattcaaaaagaagctgatataccccaatgtaatgattatgaagcaagttccaaattatacaatgcataaaaagaacagaataccaaaaattaaaactgggttgcctcccaggaagcgcttctttaacgtcattagcttgacgtttttacctcaatggatgatcaaatgta

SEQ ID NO: 103453 - DNA, 439 bp, Glycine max
  unsure (1)..(439): unsure at all n locations
nnttttgactcctgattctntgaaacttgtttaacttttgatcctttagcatcatcaaaataatcttggaagtcattgcttccacaaaattttaattagtcaagacacatttttgtcctcttatttttgtaattttgtgattttagatcttttgtttttaattgagatattttgtcctcacttttaaaaatatatgattntattttttaattgaaacattttgtcttacacttttaaaagattcatgattttattcctcctatcaatttcaaatgtttactatttactttttttattattttttatataaattaagtctactaacaattaagtaatttaaacaacattcactacatgggtaatcaagtgataagtgttggtcaaccatatagtatacacaatcaatattttgaattgatcataatgactaaaattatga

SEQ ID NO: 103454 - DNA, 457 bp, Glycine max
  unsure (1)..(457): unsure at all n locations
tctgtattnnttttagcttatatgagaagggatcttttattcttttttatttatataaaatttaggaattgaattacaccatacgacagttcgcaagctgcaaataaaatttaatgaaaattaatataaagattaaaaacatattttaccaacctcgattattagttattctataactttgctgtatgaatataatattgatgaaaaacgttaaatactacattgttttgatgcacgttgctatacttctatgtatgagatgtttttaaatatgaaacgaaccaatctaatcttactttatgattagttcatatcacattcttttaatcactttttaacacacaatatgccaatagagtgatgattatctgtgatgatcagggttaattattaattaccctgacgtatatatcaatgcatatgtctaggcaatcattggcagcaagtgtggttgaaa

SEQ ID NO: 103455 - DNA, 407 bp, Glycine max
agctattacaagcccgtgagacaacctcaattattattgaatcctataatgaaagaagaagtaagaaaagaagtgctcaagttgctagaaacagggctcatctatccaatttcggatagttcatgggttagtcctgttcaagtcgtttccaaaaagggaggtatgtgtattgattatttgatggagagtgtgtattgattataggaagctcaatgaagccacaaggaaagatcattacccgcttcccttcatggatcaaatcttgagagacttgcagggaaatatttctactggttcttggatggatactcgggctacaatcaaattgcagtagatcctcaggaccaagaaaagataactttcacataccccttcggtgtatttgcttatcgccgcatgtcggtcgg

SEQ ID NO: 103456 - DNA, 427 bp, Glycine max
tcaatagacctccaatctttaatggagaggggtaccattactggaaaacccgaatgcacaattttattgaggcaatagacctaaatatttgggaagctataaaaatagggccttatatacccaccacagtagaaagaattacaatagatggcagttcatcaagtgaaagtataacaatagaaaaacctatagatagatggtctgaagaggatagacaacgagtacaatacaatttataagccaaaaacataataacatctgccttgggaatagatgaatatttcagggtttcaaattgtaagagtgctaaggaaatgtgggacactcttcgattaacacatgaaggaactacagatgttaaaagatctaggataaatgcactaactcatgaatatgaactatttagaatgaatgcagatgaaaatat

SEQ ID NO: 103457 - DNA, 435 bp, Glycine max
  unsure (1)..(435): unsure at all n locations
ctcgccgctttcttctataagtgttgcagcaagaccatatgttgaattattttgagattgaatagacgttntcattaagctacaaattacctaatgctattgctattatgcaatatcccttatatttcactcttatggaataaacttcaaaagttgcttaactaacttgattatttcagcttaactagaggctttaaatttgagtcgtggatataatactacgttaaatacttgaaggaagaactttgcctcccatagaggtgctacccagctcgaacaaaattgcctccagtgaaaatacttatgattcagaccaaaaaagaaaaaacttcaccaatggcttcagaccaacctttttggcaccaagcttcagaggattacatctagagctgccattttagccctatgccctatccaatatctatatacacacat

SEQ ID NO: 103458 - DNA, 474 bp, Glycine max
  unsure (1)..(474): unsure at all n locations
tactaagctggaagttgacaacttgtgaacttggatccttacatgaatgttattgtggctganacagcgaatctatagntgtagacagaattttgaaacgtngatctgttgacttttttcattttaatttaattcattntactaagcctggtattattaaaatttaaaactaaaactcttacaagctaatcataaactntctctagtttactttgaaatggtaatgctctatcatacaacccctttactttcatttntgtccttttgtgtcatcattttgcttagcgaaattcttgcttagttgatattagtcactggattaagattgcatgccttcaaagatcatatttattactcccgtggctagaagaagcaaatttgtgtgacatggaatgtttgggctatgatttgatttaccttttattatgagccttggtctactataaatggcttctctggtctttggttctttta

SEQ ID NO: 103459 - DNA, 433 bp, Glycine max
  unsure (1)..(433): unsure at all n locations
agctngatccttgaatcttgattcttgaattctttcttcttcttgaatcttgaagggttcttcaacttttcctcttgagtcttgaatttgttcttgatttcttcttgaacatcttgaactcatcctttgattgacctttgagcttattgtcatcaccttttgttatcatcttttgttatcatcaaaacatctttgaatcacttttgattcaccatgaagctgtgcttctatacaataggtgctaatactaattgatgggggtagcacccacaattttattcaatagtgcctagttttggctttgggcttcaccacccagtccacaattcctttgtgggtcatggtcgacaatgtgaatgaaatattgtgctgatagctctataacggncatccctatcatgttcaagcccaaactttcatagaagacttttat

SEQ ID NO: 103460 - DNA, 413 bp, Glycine max
  unsure (1)..(413): unsure at all n locations
caccctcattaagagctagctcttttcttcctctattgcctttagttgaatacacctttgtttggttctctatttggntcttaaccctctcatgcaacttctttacaaactctgaccttgattccccttctttatgtataaaagaagtgtccagtgggaggggaatgaggtctaatggtgttaggggattaaacccatagacaacctcaaaaggggactgcttggtggttctatgaacccccctgttgtaggcaaattctacatgaggaacatactcatcccaagacttatggttgcctttcaaaatagcccttanaagggtggataaatacctattcactacctctgtttgctcatcagtttatggatgacaagtggtagagaaaagaagtttagttcctagcttagcccat

SEQ ID NO: 103461 - DNA, 445 bp, Glycine max
agcttaacttaacataattcacatcattttaccaatctttgtgtaacatcacttgtcctaaggatgtaatcacaaaatcatattctataccttcacattaatcacatgttcataacaaaacatctcaagtacaacacaacatctctcacacacaattcattacccaccatcacgtagcaagtcacaatgatcattacacagatgttatgaaacatatatactaaaactcaatcctatattgaatgtggtatcttgtcagtgaaaaataacactagggcacctaggagtacataatataatacaccacacaatgggtaagcacgtcactcttattaatagaaatcataacgtgatcaattaaggttattctgtttagcgtgaattctctaaccatatgagatgaacagagatttaaaggagcactctaaccgagtgtattaccctc

SEQ ID NO: 103462 - DNA, 436 bp, Glycine max
  unsure (1)..(436): unsure at all n locations
tactaagctccatataagctgaaccattttatcaataaacacaagttgagttttattcagaaaattagagtttatctctnttatcttagtgagagtgattctcctaaattcttgagtgattcaagaacaccttggctgtatcaaaggactttcacaacctttgtgtgttgccctcgctggaaagagtgattctttccttcctttcatcatcacccttgttctttcaaaccacaattccagaaaatccacctctgcccagaattatctcgtggccataacttccattttacgcactcaaattaagtgattcttgagcctaaattgaatttcaaaacgagacctttcacctcgttttggaatcacctcanttggagccctgtagcttcagttattgccatttctatatttctgtccagccaccacttaacctacgttt

SEQ ID NO: 103463 - DNA, 434 bp, Glycine max
ctgcaagcttctaatccaatctatgtgctttgtttattctcgtctccctcttgccacaaagacaagtactgaatcttgtatagcgttccattcctgtgaagaaatggggtctcagattctgaaaactggctcatccttccaccatatgggttccaaatcatcaaggggctgtcttcaaccagcaacctttgccacaacccctcgagcccggtttccggtatcgggtccctcacaaaatctgattctgccttgaagaagttcttgaatgttgactttcctttgagcagaacttctgggggggtgtcacttggaaagcctgcaatatagagcacagatttgatccaactagtttccaagcaatcctttattgtcaaccccaattcaagaatacttggcttcatgactcggaggagtgttctggccccaccaaggaa

SEQ ID NO: 103464 - DNA, 465 bp, Glycine max
  unsure (1)..(465): unsure at all n locations
acctgccttgggaacatcgatgctcatcactcatctgttatattacgcaccccatttttaacttggtgtatctcattntttgtattacagatttgtaagtcaaaaataggatgccttaaagaattacccactcatcagcctaccacaggcccttgagcaagcatgaactgaactaattaatttatttactaaaatcttaattatgtttttaatccttttataatgttcagtgtataattttaagctctaattgttttttttttcaaatttagttattaaatattttgtatgtcctgtcaaattttatttatccaaagttctcaaatttttattacttattcaaaatctttatgaagcgaatcgctgaaactattggccacgtaaattatatatattatcaattgtaatctatttttttagtcatgactaacataatacacagtgaatgagtagaataaaataact

SEQ ID NO: 103465 - DNA, 288 bp, Glycine max
gcacttaacttgatgggcttattgtcatgcgaaggattttgcgccttactatccatgttcacacattattgcaagctatggttacatgagcatgaactactaccaatatatagaatgtgtttacacaaatgagtacatcttataagcatacttcgcagtggtggcctcttgggaatgaagcggaaattcctccttctgatgatgcatggacacttatccctgatccaactacaattcgtgcgaaaagtccgcccaaataaacaatgatacggaatgagatggattggc

SEQ ID NO: 103466 - DNA, 372 bp, Glycine max
  unsure (1)..(372): unsure at all n locations
tgcangcttntgtaagaatgatggaggatatgtttttatattatcacaagttcttgcccaatgaacttctcttgacaaagcaagtattgaacataaacttctataaagatgtagagaatgattgagtgatcagaatcttatgaaatacgtgccatggtcacatattcatagccatttgatggttcttgaaaaaatcatgtcaaatgttgtgacttttggcaatatcttgcaaactagtcacttttaaaagttgtgactctcttgagaactaatcacttaaaagttgtgactctctctcaaaactagtcacttaaaagatgtgactttctcgaagactattcactttgaaattcgcggctctgtgcaattcat

SEQ ID NO: 103467 - DNA, 461 bp, Glycine max
  unsure (1)..(461): unsure at all n locations
tgctntataccatataggcgttttctcaacctacacattttgtattctttcccttcaacatgaaaaccatcaggttgcttcatgtagatctcttcctccaaatcaccatgaaagaaagcagtttttacatccatttgctctacctccaaatcaagagtcgaagtcaaactcaacatggttctaatggatgacattttcaccataggagagaagatctcattaaaatcaacacctttcctttgactatagcccttcaccactaatctagctttgtacctcggagatgtagagttactctcatgcttcaccctatagatccacgtgttatccaaggcccccttacccttaggtaacttcactaaatcaaaagtgtgattatcatgtaaggatntcatctcatccttcattgcatccaaccactttctcttttcttcactttccatgacctctctaaagcactc

SEQ ID NO: 103468 - DNA, 350 bp, Glycine max
agctatgaaggatttgtcctgaaatgtttttttattatatatcaaggatcctaactatatcttttctcccatgtcatgaggtatccctccaaacagatgatttctagactagctcaaaaccgctatgcacatagcttggaaatttcacatggatttgctccagacagcttattacttgtaagatcaatcatgctcaccaatatcagactgtctctgaacgattactcatctcctttgggaactaagacaaaagtttccgtgttgcggttataactgaagtcagagccatatgaattacttgagggctgggaagaagtcatttcactcagccattggcttcatgtttccaa

SEQ ID NO: 103469 - DNA, 456 bp, Glycine max
taagctgcaaggtggggcgactcaaaataaggaatgttttttttttgtctatacctccattacacttatttgtacctgagcttcttccctatttcattaattttgttcatgtttatgtgtgagttgaatcttcaccgcgaggaccaaaagataaaaaaaattgtaaatataagaatcaaaatgaatgtcttaaactatagagactaaaaaaaattatcacaattataaggactaaaagggtaattaaatcataataaaataaactagagcaaaataatggtggtgtggtgatagggatagtaatactggactgcagggagtaaaggggttgcatgaagaaaaagcatgagacccatgcagctggtataatcgtgaaggaagatatcatcgtgctctctagaagatatgtatgtagtggaataatggaatattgttgttacgatattccattttatc

SEQ ID NO: 103470 - DNA, 399 bp, Glycine max
  unsure (1)..(399): unsure at all n locations
agcttgngctattccaagatcattaaccatacttttgagctagatttcttccttcactccttcagctagggccatgtattctgcttcagttgttgaaagagcaacaactgattgttgtaccaaacaaagtaaacacatatcctgttaaggatttccttgtgtctacatttcctgcaaaatctgcatctacatagcttgtgattgttgcctcttgtgctgtcttcttgtaccttaatccaacttgcaaagatccatttagataccttagtgtccacttcatagcttcccagtgtgcactgccaggatctcccatgaatctgcttattatgcttacagcatgagccaagtcaggtctgctgcaaaccattccatacattatgcttccaacaccactggcat

SEQ ID NO: 103471 - DNA, 464 bp, Glycine max
  unsure (1)..(464): unsure at all n locations
acctatgaaactccgcttacgtgggttctaggtttactaagtttacaggatatttgtcaagaattatgtngntattgcttctcccttgacaaccttacttaagagagaaagtggtcaccggaggcacattcagcctttgacgctttgaagatggtgatgatgacgactcttattttgaccttgccagacttcactcaaccatttatagtgtagactaacacatttggctttgctataggtacaattctacttcaatctggccatcccatagcttattttagtaagttattttgtcccagaatgtctcaatcctccatttacctccaagaattacacaccatcactagtgtagtaaaaagatggcgacaatattgattaggtaactactttataagccaaactgatcactacaagttaaaggaactgttaatttatgccattcagatgctggagcaacaacatta

SEQ ID NO: 103472 - DNA, 371 bp, Glycine max
agcttgcttctacatgacgtgtgcgctgaattttgtcagagcgccactgactacatggactgcgttttcgatcttgcttctttcatgacaccaggtcgtgcaacagatcctctgcctcatggtcacgccccgctaccgcgaattgtccctcacgccccgcagacagatatacctaaggtgccgaagcctggagcataccaccacctctgcggaggagcctacacatgcggtggtaagtcatactaatacattacgtcatttacctcaatatttgcactaataatggtgttatacgttccgctacgagtgtgcagacagtctatgacgacatagacgagatctttcattagttacgtcactatatttatctg

SEQ ID NO: 103473 - DNA, 379 bp, Glycine max
gtccatatggacatacgactgttaatctctatgttgtacctctccaaacaaacagacctgttgatattaagggagctagcatctttattcagagatccagctgatggcaagctcatcatgggaagtagctcataattcttaaagtacatgttgaggaacgatgcctatagaccctgtttcagttctatgacccgctctaccattgctacacatttcccgagtaccagctcgaccccacacttgaagagtactcctacctagtatgtttacctgtgccagacaagacacctttccatggttttgagcctaccactaaacccttctacatcgcagccgacctccatcttataagcttcatatccaagcaaaccttacctct

SEQ ID NO: 103474 - DNA, 444 bp, Glycine max
  unsure (1)..(444): unsure at all n locations
agcttgtganaatgaaaccacgatttattaaatttatattgatattcaagaagttggtgaaaattaagaaaaacagagcctctctcatgcactngaatttgtcttcatgccttcctaagttagtacaggtcaaccaatatgcttctatgtttgtctaactttacctatttaaacatatgaacaaatctgtgctgatgtatatgtgcctgtgattctctaatatacacttactcttttcaaaaaaataaaaaactatattaacaagttatattttgacttttcagtatatttaaatacaatcaaatgttggtacaatattatagataaaaaaaatagttatagtattataagtatcttatatgttattctaatttaaaattaaattttcattctaataaattttaatgatatgtgacaaacaattaatacacattatcataatga

SEQ ID NO: 103475 - DNA, 464 bp, Glycine max
ctcagcttctgatgcatctactaccctacagagcttaatatttgctgattgtatctatgccttctaacgccttgatcgtgctcgcgattccttcgagaagcttcacacgttcctccattctgcatggcttctatcgtacccttctagatatgctggggtgagtcattcccttcgtggcctctcattccttgcttcctacacctcccttgctagtgacaccccttcccttacttctcccataacactcccctgcccatctagcagcaccttgtcctcaaggtggtgagtgcgcttcaagctcgcccagtcttcccatgaagtctcttcgggtggtaacccttgccactgaacgaggaccatatgcatgggtcctgtctccgacggaatgactttagaagctacaatggctaagggtgtgataattgggtgattatcacatgctaaagggggaaagtccatgactg

SEQ ID NO: 103476 - DNA, 445 bp, Glycine max
ttaagtcaccgcagctgcagctgcctaagagaccggaaggaaatttgtttttgaactagttccgctcctgagtatgacagtcaccgttttaggagcgcggtacaccagcagcgcttctaggccattaagggatggtcgtttctccgggagcgacgcgtacaactcatggacgaccagtttactgatttccaagaggaaatatggcgtcggcggaggacattactggttactcccatggccaagttctatccaaaaatagtccttgagttttatgccaatgcttggccaacatagggcgtgcgtgacatgatgtcatgggtaaggggtcagtggaccccgttcgatgcatatgctatctgtcagctcttgcgatatcacctaatgctggaagagggccaggagtgcgattatggtcagaggacgaaccggtctgatggattcaatg

SEQ ID NO: 103477 - DNA, 418 bp, Glycine max
  unsure (1)..(418): unsure at all n locations
ttattttctgagaaataatcatatatgttcttagtgtgaataatcctcttccttgtgtccctgaaaaaggttggagattttanggacacaacgaataatgatcatacatgtccaacctccttgtgtaatctttctatgttacttcaagtcgttgcgccaatattcatatgcttcttggaaatattatattactctaaggaggttggagatttcatgtgttgtgtgtaatgacatgggtggacatacttggcttgatgatgcccacacaattattgattcttttccttcttttggaattcggttatgtaaaatatgatagatattctctatgagcctaatcctgatcatttgtgtaaagacagtagggtcaaaagaatgtgtcatataatgcggttctagcattaataactctctctct

SEQ ID NO: 103478 - DNA, 439 bp, Glycine max
  unsure (1)..(439): unsure at all n locations
agcctagagttntcttgtagagaaacaacatattacttgagttctatgggctaagccacaacccaatattaacctttacgatgcaccaaattcgtcataaaacatacgattagtggtgaatccaggacattattctattgaagacaaataaataattgataatattttcataaaaaaagcgttaaatgttttttcaaatatgagaaaaaaatacttagagctgtagaaattacaataattctctatatatttcaaatttttaaaaaaaattatgattttttattgtcaacattataaagataatagaatagtcaaatgataaaattattatgaattgattctctcctttatctttataacttttatgctaattcattctaaaattcgtcttatgggttacaaccaatttttaattgcgcaaaaataaaaatattgaata

SEQ ID NO: 103479 - DNA, 430 bp, Glycine max
  unsure (1)..(430): unsure at all n locations
gcttctcttcctactcctattctcttagcaacttagtaaatgccttgatgtatgtatttttaattagtaaaggtttaggaataattaattcaaccccccttcttaattattctgagaccactcgatccaacaataagttgagggtgattcactacaaggaatagaatttttttataagaaccttaggtttcacacaagaaccaagagagacactctcttaactgtgcctaatatgaaatatcatagaaactggcaaacaagtattttaaggagtctatntataagttatgctaatgatcctaaattaggaccaaagcccaataactaatctaataattaaaatacttaaaaataacaatagaaaaggtagcagcccattgcacgtccaaaaatataattataaatgaaaataaatcttattctaaaaggt

SEQ ID NO: 103480 - DNA, 432 bp, Glycine max
  unsure (1)..(432): unsure at all n locations
agctntcataagtgaaatcaggtgcagccatcttcctttagtcctctcacgaggtggaggttgagccatgttctcagtataaaattagtagtggaatgctcaaaatcagaatattcagaatcactagcaatagaatactcagaatgctcaaaatgtacagaatgatcaggatgcacactatgcctaactaatctatgaaaggttctatctatttcaggatcaaagggttgtaaattgcctggattgcccctagtcatgcactatatgcagcaaataatgtgtttttcaacaagcacctaacaagggggtaaaactacaactatactcaaatgatatcaaaatgagctgagaatttgtgaggaacaccctaaaatcatgaaaatatatcaccaaaattttcagacaaaaattcaaagtctaactatgaaaact

SEQ ID NO: 103481 - DNA, 375 bp, Glycine max
  unsure (1)..(375): unsure at all n locations
tcctctttcagntctcttcttcctttttcttgcttaattttgtggcttttccatcggtgatgatcatggaaggctaaatactcaatcaatccaatgaatttgagttcaggtttagtatttctattttgtatgattgttcattttttctcctatctaattttcgattttcatgattataaatatgcttaggattgaaaatggattangttatggattcatttcctaattgcgaaatttaatcatagattgtttggatgatattctaacctaatttgcggtttcaatgaatttagggattaattcgattgaactaactctaatgacattgatcgaactttcccaacatgatcatccactatagaactatgataattc

SEQ ID NO: 103482 - DNA, 405 bp, Glycine max
agcgttgtatggtttaaagcaagctcttcgttcttgttatgaaaagttaagttcttttttaactgaaaatggttttataagaggaaaagtatatactacttgtttcgcaaagattatggaaatcaattcctattcatccaaatatatgtggatgatatcatattcggtgctactaatgactcttcgtgtgaggacttttcgaagcttatgcaggcaaagttcaaaataagtatgatgggagaactgaagttttttcttggacttcaaatcaagcaagtagatgaaggaatatgcatacatcaaaccaagtacgtaaagtaattactaaaaaatttgaagatggatgatgcataatatatgaaaactctcgtgcattcaccactgtacttggactggacgatgaat

SEQ ID NO: 103483 - DNA, 465 bp, Glycine max
  unsure (1)..(465): unsure at all n locations
cagaaccttattgggatgatgaactcgtctctatattgctcctatatattacatctctcctttcatcagaatgtgtttctgctagatttctccatattgaggatgttaagttacttatatttttattactgcataataattcttacttttccctccctctcttcagaaactagaatgggaatctttgtctattgatcttttgcctcatcctgacatgttcacggatgctactttatgccgctctcaagagggagcaaacctgagagacgaggatggtgcaaagcgggtattgtttggaggtgagcgttctatagaaggaatatcatgagaagcatatgtaaggaatatagttcctccaatcaagtntaatgaatactctgttttcttctagaattntatgtgtcatgactcatgaaatacggcctgaactntatatttactagataacgatacagagaactgaat

SEQ ID NO: 103484 - DNA, 389 bp, Glycine max
  unsure (1)..(389): unsure at all n locations
agcttcccagttatggtaagactaattctctgttgtatcttcctntgangnactagaggaaaatatcgttctatctatctaatgaccgcctgtgtgctctctgtgctatcaatattccattctagtatgctactacccttgaccacgaagatgcatgctttgctagggtctttcaacagcggaaattgggttgatccttacaacttgattggacatggctagtctgtcatactatcacgagggatccgggtacaataacctatttgttgttctgtttgtcttaatgcgggcctacttgagtgtattccaacaaacggaatctgcggatgatgcttgatcatgatcaggctcaactatcatgacgaaccggggaaaccactctcatgaga

SEQ ID NO: 103485 - DNA, 397 bp, Glycine max
atgtgcgacagcatgcattcggaatgattattataccacgaaatgctactcttgatcacaattggtgtactacctggctccactaaacacaatcatctatgtataatgagagcaaactcgtgcacatacttccttatgaacatacactcgcgcacgataatcttctacctaaaaaaaatgcgcccatgcgcaatgaaggcaccgatgctacctatatgtatctatgagtgcttccgaggtgtatttgctacctacatcacatgcaaatgcttggctaaatttacatacgtgtatgctcaaaacagctgggctgccagaaattgcacatgtgcacattctggcatctctaatacctatgcgagtacagaccttgtgatgaatcttggctgtctacaca

SEQ ID NO: 103486 - DNA, 441 bp, Glycine max
  unsure (1)..(441): unsure at all n locations
agctntatacaagggagcaaaagatacttgtatcattcaaggtaagctatttatttggtcaaaagagcttgtgtttatgcaattcatggccttcatcatgttttgagttatacaaatcattctagaattcagagattcatgcaaagatcattactcacaattagtcgttcactcacattttaaggtcacactctcaccggtttttggttcatgcttttctttcacaatcaatctgtctactgactaacaattctaaatgcaagttcacattcttgttttttctttgttcgacatgcacatttgctcaacttcatgaaatgaaacacaaattccatcaaaatcatgcattcaatataaaacaaagtcatacacccatttttcacaaaaagatanaagtgtntcattgacatgtcatctaaaataaagtaaattgttcaaaat

SEQ ID NO: 103487 - DNA, 434 bp, Glycine max
  unsure (1)..(434): unsure at all n locations
cttccttgagaagatagaacttagctaactcacccctctaataactaagcttaccttcttgagaatgcttcttgagaagattcctaaagaggctacaacttagctacacacaccccctataatagccaagctcacccccatgccaaaatacatgaaaatataaaaaaagtccctactacaaagactactcaaaatgccctgaagtacaaggctaaaaccctatactactataatggccaaaatacaaggcccaaaagaaggaaaaacctattctaatatttacaaagaagaaagcacccaaccttggtccatgggctcataaatctatcctggggttcatgagaaccccatgaccttctttagcagctctagcccaatcctttnggagtcttctatccaatacccttggggggtaggattgcagcacccacgct

SEQ ID NO: 103488 - DNA, 379 bp, Glycine max
  unsure (1)..(379): unsure at all n locations
agctttttgatgcaacagactaagaattttttttattagttatggnggaataaggtggagtcatttgttcacaatcttatactcaaatttattatcgttacataacaaaaaagaaaagaaatagaacatgcaatcatacttcattggaggggaaaaagaagaaaacaaaactcatcttgcatgttatcaagtctaaatagataacttaaaaaggacggatggtaaaataataaaataaaaaattaaaattttaaatgaatataaagaaccataagtataattatacattcaaagatgtcgttgagatcttatttcagattgtcggacagccgcaacttcctttgacataatttgaagtgcaaatgaactacaccttatt

SEQ ID NO: 103489 - DNA, 450 bp, Glycine max
agtgacgttaccaccggacacggcgtggccatcttaattttgacaaggaattcattgacggaaagaaaaaatctgtcaagaaacgaatgaaaatcgcggtcacttcacaattctctcttctctcatttcatttttatacatacaaaactttcatcttcatttttaatatattatttcgtacatacctctcgatcttgcgggatgtattcatgcttcaagctagtaacgtaaggttaattaatgtatacgtgagtgggaaaagaaagtgatatatatgtattaatattcataccttggcagagaagaatgatcaaaagaaaaagaaattgcgtagaaaatataattaacgagtggaagatatatatgataaattaagattagttttctcttcctttacaaactacaattgtaagctgtgtatgatctctatagatattagtctctatatta

SEQ ID NO: 103490 - DNA, 404 bp, Glycine max
agcttgtaggccaagttcctttagctcttgtatactctaccaagcttaaatggcttgatttggagttgaatatgttgagtggagagcttccttttaagattgtaagtaattggccacaactacagttcctctacttgtcatacaacaattttaccagccatgatggtaataccaaccttgaacctttctttgcctccttggtgaatttatcacactttcaagaactcgaattggcaggaaacaatcttggtgggaagctgcctcataacattggtgatcttcccaccagcctgcaacaacttcacctagaaaaaaatctaatatatggctctatacctccacaaattggcaaccttgtcaacctgactttcttgaagttgccaagaacctattaatggatctat

SEQ ID NO: 103491 - DNA, 456 bp, Glycine max
  unsure (1)..(456): unsure at all n locations
tctgcattcgtaattcccaaagaattctcttgttgggaaattctattttaataaacaacctaagagcttgaactagagtctagaatgcttttgtgcgtttatcaaatatgaatattgaagtttaatcacatcctgtgttatataatgtgtttggatggagcaatttaaaagaagaattcatttttttaaggaatttaaaatgattcgtgataaaataacttaattcacgtttttgtttgcgactctttcttgttcaacactcacaactacgggtgtccaaatttttacggttgatatcgacataagttgtttttcactgatgttgaccgaggtttttttggtcaaaatttttttgtatgatgtcaaccaaagctattttttgtcgatatcgactacnaaattttttagatgatgtcggttagggttattttctcactgacatcagtcatgagaaat

SEQ ID NO: 103492 - DNA, 395 bp, Glycine max
  unsure (1)..(395): unsure at all n locations
agcttgcttctacaatctccccctttttgatgatgactaacctgaaatcaagaaacacatacacattctttttcctagtcgatcactcacttaattctccatattctccccctttatttttgagtttaagcttcacttgaaattaaattacttaattatatgagttcttgatttaatccctatattgtctccccctttggcatcaacaaaaaagccaaagtgcataagacataaatgattttaaaaaaaaaaatcatccacatagcatctattggtaatcaatcataaaagattctaaactaatcatgaagcangacatgaataaaccaaatttaaaatataaaccacataggcataattcataaatggttagtcatactaagcaaatatttaaa

SEQ ID NO: 103493 - DNA, 454 bp, Glycine max
  unsure (1)..(454): unsure at all n locations
tgaagacaagactattcgaggtatcttccttgggtatagctatatctctaagggctaccgtgtctacaacttgcaaactaagaaactcgtcatcagtcgagatgttgaagttgatgaatatgcttcttggaattgggatgaagaaaaagtggagaagaacgttcttatacccgctcaactacctcaagaagaagctgaggaagaagaccgaggtgaaccaccttcacctccaccacagcaacgagatcaagaactatcatcaccagagtctactccaagacgagtaagatctttggtggacatatatgaaacctgtaacttggtcatacttaaacctggaagctntgaagaagcgttaaagcaagaagtatgggtcaaggcaatggaagaagagatacagatgatcgagaaaaacaacacatgggagttagtaaatcgtccccatggaaatata

SEQ ID NO: 103494 - DNA, 409 bp, Glycine max
tcaagcttctccccaattatctataaatatggggttaagtgacgtggaaaagggttcagccccttaggcacttctctctctttcgaatttgcttaaaaaaattgtttccgtgaagaagatccaagccgaggcgctttcgtaacgtttccgtaacgtttccgtgagtgatttcgcgaaggttgtcgaccgttcttcggtgttcttcattcgttctacatcgttcttcagtcctcaacgggtaagtacctcacaccaagcttttcaattcattctaagtacccgtaggggtccacacttgctttcatgtatttttattcttcgtttcatttactctttatacccccttttgacgtgcttaagccacgttatctaagtcatttctcgcttaaccctagaaataaataaattt

SEQ ID NO: 103495 - DNA, 473 bp, Glycine max
acctataaaactcaagcctctgtgaaacttcatgtgctactcaatgttgtgaataacttttttgtacttatcttgattgagccttttcttgattcttaaatcttgagtcttgaatattgatcttgattcttcttgattcttgattcttgaaaacttgaaacttgaaacttctcttgaatctttctcttgattcttgaatttcttcttgactaaatcttgaaatcattctcatgggctttttgtcatcatctttgttatcatctaaacaccttgaatcaatcttgattcatcatcatgaagcaatgaagcttgcttctacacgtatcacaaacttttgttaaaaccaatatttaatcaatcacccttacacaaaaaccttctgttaaagttctttctcaaatgatattttctttatacttagcaaatcgaacaagaatattaatagaaagaaagattagatcaagagaagatgt

SEQ ID NO: 103496 - DNA, 295 bp, Glycine max
  unsure (1)..(295): unsure at all n locations
agcttcttaatgaggtactttatttgtgtttaacttccactcacatggcgtgatctctattggatgtgagctactcccacctcttctctattatcttccggtgctactccatggctgaaactcattattgaagggcctcattgatgctgaaagatacattttccatagaatcttctctagcaatgctttataaaaataacacatatatcttgttgctatgtntggatctatggattactttagttagatacttccatgcagaatcaaaacttttttgtcattccaacactaaatc

SEQ ID NO: 103497 - DNA, 424 bp, Glycine max
  unsure (1)..(424): unsure at all n locations
tcttatccaaggctcatcttggtggtgaagctccttcttctatggcttattccctagtagatggcgcctcctctcacctcttctcctttgtcttccgctgcatctccatggtggaaaatcaccattaaaggacctcattgaagctcaaagatccagcctccatagaagccccacaagcaagcttccatcaagtggtaatcagagcacaagagcttcaagtaggtgctccttaaacctccattgactttttgctgtaccttctcttccattgttgtttcttcatttttctccatgtatctcctcacatgtcttgtgataaatgttgttaacatgattctttagagtttccactgattaaacttgctatagaagctagatttgattttctatggntctaaattcttgttcttggtcttgaaccatg

SEQ ID NO: 103498 - DNA, 442 bp, Glycine max
gctgtccacaaaaatatgtttttgaaagtttatcatttcattttcttactaagtgaaatggatcgattttaaggtccaacgccttaaaatgatcgcccttcaagtaaaagaatcacttgattcacgcataagaaagaactacgtaggtctgatttcctcttcgggggagggtacgtaggagcaaaagccccgcttttgtcgacctcaaaaaataaaaagaaataaaagttaaggtaacacaatttccacaattctaaaaaataggctgttgtcctttgagacaaacgtgagaggtgctaataccttcctcgagcgtaaatacaactcccgaacttagaatattcattttgaccggtttccttcagtttttccgacgttttccacaaataaacgttggtggcgactccgcgcatctttcctcctttggaaagcgcacccgtga

SEQ ID NO: 103499 - DNA, 394 bp, Glycine max
gtgctcgcgactggtctctttcttcccttcgcaacttgagttcactattgctaccccatagagctccgcgaaatttgttccggccatactcttccttgcgagccctcttggtctcttgttcaagggctcttgcagtaattgcattctcttcccgtaacccggcacactccttccgaacgtgtgtagcggccaacttgaacttctccttggcaagttttgcttttcctaactcgcttttgagagtttggacttcttcgtcctcttccggtgcttcaaaactctctttgctgacgacttttaacttggcgagccaatctaaacctcgtatatgaactttcagccattcgtggtacccaccaatgatgccattacgaatgcctttaagctcttgatc

SEQ ID NO: 103500 - DNA, 448 bp, Glycine max
  unsure (1)..(448): unsure at all n locations
gcaagctntaagaataatggcctcagcaaaacttttatttttagaatgaaattcaatcaatagacctccaatctttaatggagagggttaccactactggaaaagccgaatgcaaatttttattgaggcaatagacttaaacatttgggaagccatagaaatagggccttatatacccaccacagtagaaagaaccacaatagatggaagcacaacaagtggaagcacaacaatagaaaaacctagagatagatggtctgaagaggatagaagacgagtacaatataatntaaaagccaaaaacatataattacatctgccctgcgaatggatgaaatattcagggtttcaaattgtaagagtgctaacgaaatgtgggacactctacaataacacatgaaggcacaacaaatgttaaaagatctangataaacacattaactcatga

SEQ ID NO: 103501 - DNA, 427 bp, Glycine max
  unsure (1)..(427): unsure at all n locations
tactaagcttcttcacccatggtactctaggagctctagaaagacaaattcttgatacttcaaccattgcagactcaagaacttantgttgaatcaactcattttggcatagttgaacttgtagggtgccttataatgtttctctgaaaaccatggagttgcctttggagagggtggtggtgatggagactttgttgtcctcttgcccttcctggaagatcgaccatttgntgtttccttctccttcttcgagcttggtttaagggctgtgggtctgtgtccaatgctcttcatccttttgcctttggtttcagtcattgatggaggttgaagataagaaaagaaagagagatggagaggtttggagaagatgaaaggatgtgttgtatacacttatgttttgagaaagggttgagagataaaggat

SEQ ID NO: 103502 - DNA, 434 bp, Glycine max
  unsure (1)..(434): unsure at all n locations
agcttgatggtaaatnttagattccaccttattagatattgttgtgatatattcaatatgaaaaatcattatttggaaagacccaaaccattcgggagttatgtcatcataatcgctattgacataggcaagacccaagaaggtgcccttgatggcaaagtaagctnttctctaaaattgaagggtgtccatttttcatctctaagatttctctctctaatgtatggtgggtgttgatcaagagagaaaaagtgaggaactttgattgaagaaattggtaagacttgacgcaagggaagatcaatcaattgctcccggcattgcaaaatctgcgaaagaaagtntcacgagcgaggcatagttgcaaatgacagaagatacttatatcactacaggctaaatcatcgttttaatgggacaacaatggtgaatga

SEQ ID NO: 103503 - DNA, 349 bp, Glycine max
acataaacactggctggctgcagaaaagcaaaaatagtttataaaaatgtgagttagtagtatacccactgaaattaaaaaaaaaaaagtaaaaaaatgccagcacaatatttcacctcaacagtgctcttagttgagtcatctgactccataagagtagtaataggaacactccagagtctgatactgagcacaaattccaggttacaacagaaaaattagctattgaagactaaatatgggagctagatataaaaagggggaaattgaaaaggttgattcttacgtgcaatcagttccacatgacacaagaatgcgtccatctgtagatgctgtcaagcctcgtaca

SEQ ID NO: 103504 - DNA, 295 bp, Glycine max
  unsure (1)..(295): unsure at all n locations
ttaactgcacgcgtgcgagcttagatcaggcatccgagtcaaacgttatgtctgttctaatatgcataagcattccattgtaacttttcatcgccttgatatattgcggagcctgaatcagacatgcgacacctaatctttatccatgaaaaaaaacaccccggcttttcatgttatatcttgagcgttgcgataagttacttgcgatatatgaagatccggaggaaaagttatggtcgtttgtatctgcgaagggctacattttnttactaagagcatctcgatatattatgag

SEQ ID NO: 103505 - DNA, 438 bp, Glycine max
aaatgaagcccatcgtttatacaaacgaccatatctgttccaacggatatcctaataaggcaagtaacctatcgcgacgctcaaaatttaacatggaaaactcgggtaaattccgacgagctaaagttttgactcgcatgtttgattgaggaccataatatatcatggcgatcaaaagatgaaatggaatgcccatgcatattcggacggccataacgtttgactcggattcccgattgaagctcataatatatcgagatgctcttaggataaaaatgaagcctatcgcaaacacaaacggccataacatttcctccggatcttcgaattacgaaagtaacctatcgcgacgctcaaatattaacatggaaaacccgggtgaattccgacgggctaaagttttgactcgcatgtccgattgaggcccataatatatca

SEQ ID NO: 103506 - DNA, 160 bp, Glycine max
  unsure (1)..(160): unsure at all n locations
gctatatggaaattntaagttccaacacacccaactctagttgatagttattggaaggtggaagaattgagtattggagaattgagttgccaccatacattgttcctgatgagcttgtggcagaaccaagttgatgaatctcacgaanatttgtgttgac

SEQ ID NO: 103507 - DNA, 459 bp, Glycine max
  unsure (1)..(459): unsure at all n locations
atcaagggtaattttgtatgttgtaactttacttntgaatatcgcatctagaatggatgacacttttattttgctnttcacctagcaggaagataattntgtaattcattgtttttataaaataatcttattggttttgatcttgtatctatattctaaaaaacgtagtaattttcataatattaaaccaattaaactccattcttgatgcatgtagtcaagtcacattgttttcaaaatacaaagtttattacgaatgttaatttgaacttctattcagtctattggccataatggacatctaattgctattacatgatgttttctggcatggccttaacttctactatgtaaaataatggtagattactctggatttatgactagaaatactcanagatttgggatggtagattctatccatccttcttcctgaattagtttgttgatgctgatttt

SEQ ID NO: 103508 - DNA, 423 bp, Glycine max
  unsure (1)..(423): unsure at all n locations
gcttgagttnnttttttttaaagattcattgtcctcctactcctgggctatttgggtaaagctatctcttgggtgacttcttttccctagcatatcataaactaatagttttgcgagtttaaagagagagaaagctactgttgtggaaacccttaccatgttaaaagggtcagccttactttgtctatggtaagtttgctcctctgtagtgtgaactatttcaattcaaattccagtattaattgagtaagagagcatgaaatacttggaatcttaggtgatacctgtcagaccttaatttcatccgggtataatactcttatcatccacatatgatgtcttgatcattgctaatcaaatttcggtgtttgacaccagttgcaatgccaagccanggcgcgcttatggtttgatggttgatta

SEQ ID NO: 103509 - DNA, 454 bp, Glycine max
  unsure (1)..(454): unsure at all n locations
tattaggacacttagatactaagctgaccatccgacccaacccggcatagtcggtcagtgagaacctgtgatgtacctaagcaggcgagctcctggcagtcaacagataanaggaaaacaagaccacaaagcaaggaggcttgtggtggctggccaactgtgaattttgtgtaatatgtggattgtggcctctggtaatcgattaccaaaggtgagtaatcgattacaaggcttaaaaattgacgacaggaggctaagatggtctctggtaatcgattaccaaggggtgtaatcgattaccaggcttgaaaacgaagtcaggaaacttacggagcctctggtaatcgattaccagccggtgtaatcgattacacagaggaatgggtcactggtaatcgattaccaggcatgtgtaatcgatttcacagtgtattattgcatatttcatgttctg

SEQ ID NO: 103510 - DNA, 395 bp, Glycine max
  unsure (1)..(395): unsure at all n locations
agctntatcgttgacgcctgaggtatgttctgtttttaccaagagccattnggaacttgcttactattttattttaagctgcacacgctaaggaattactatcattattttctaatctcattgtattagctcatgtgatgaggtcatcatttattcacttagttttgttgatcatttattcaatatcttccctgttaaaatttgcatagccatatgaagagttatgctagttgagtggtttaatggtgtattacatattgatgtttgggttgttgcacatgaactgcactattcattgttgttcctaaagtcacagatcacgaaccctcattgaactccattgcatgaaatctttaaaaaaaattctttggaattaatatttaaattccacaatc

SEQ ID NO: 103511 - DNA, 274 bp, Glycine max
  unsure (1)..(274): unsure at all n locations
cttgatagttgtcacgataagtgaagtggattacctctatgttctcgtatcagataacacattattctgtggaaagtattacctactgctcagttntttagcttttatttatttatgattagggctaggctttatctctctctctctctctctctctccctcctacctacctatctctccccccgttgcctgtaggccctactggactttggtgatagtgcgtcgttctctgccacatgctctcattgaaacggccgatgtgcaccaggcacac

SEQ ID NO: 103512 - DNA, 398 bp, Glycine max
agcttctatttatcatgcatgttaaaagatattttattggaaggacaagatgttgaggagccatttaatcatgtcacacaacgaggaggaaaaacatggtatgttatattgaacgaatgttactataagtggtgagcttttcaagcctacagatatccttgttactacatcattgcaatgtgtgcccatgttcatattatcccgtatgtagacaacatgtacaaaatcgaaaacatcattgaagccaatttgggcaactggaatcctcttggctatgagaaaaccattcttgaaaagaatggacctattattgttccggaggaatccataatacgtgataagggttgaccaaagtcttcgcgcataaaaatgaaagggattggataaatcttaacata

SEQ ID NO: 103513 - DNA, 465 bp, Glycine max
  unsure (1)..(465): unsure at all n locations
tgttgaaatcaacgcacgaggggaaatcggngattaccttgtgctccattgttgaagattcagaagcgaaagagtgaaagaagtttgttctgtaaccgagtgcttaattctcttaaacgaaaccaataatctggtgcagcgcaacacagagggggacggaatttattgggcctaccaagcgggcctgttctgaatttattaagctggattttcttcctgcacctttcacattttttctacacccaacatatttttgaaaattccaaccttacccctttttacttcttcttctttccttccttctttgttttcttcttacaccactcagtttgttttttttgtaggatgagctcctccttccgtgttgtggttggtttcgtcaaggtgcattatcgaggtggttcattcgcagttcgcaataagtttgtggttgttgtcgtgatgggtgttgtggtgcaatggccg

SEQ ID NO: 103514 - DNA, 387 bp, Glycine max
agcttcttagtctcggctaatgaagatgaattcatggctactttatgcactcctctaatgacaatagcatcacttctgacactaaattgttgggagttggaagccatcttctcaattaaatttctggcttcatcaggggtcatgtctccaagggctccaccactggtagcatctatcatacttctttccatgttactgagtccttcataaaaatattggagaagaagctgctcagaaatctagtggtgaggacaactggcacatagtttcttaaatctctcccagtattcatataagctctctccattgagttgcataattcctgaaatatcttttctgatggttgtggtctttaaagcacggaaatgtttttctagaatactctct

SEQ ID NO: 103515 - DNA, 466 bp, Glycine max
  unsure (1)..(466): unsure at all n locations
cgtagaatggctagacatgatacatgtcagggcttggtttgtttcaangataaaagggatgccccacattatttccatgacacaaatgcaaaaatgatgatttggaaacttcatgcaaaacttgtcatgcatgcatctatgcggacactcaaatgtcaaatttttatggtcatgtgatgctagggctcaggattcatttcctctatttttaatcaacccaatgtttccaaaatatgttcttttatcaatttgtgcattcatccgagtccatttcgggcgtccgggaaatttcacagcattcacccttcaggcgtagacacatttcccanaaattggttatggtcgaatgaatttttcaaagaaaagttggaaatcgtctcttttcaaaagcatgtcatttttagctagacaacttattttcttttttctcctcttctttcttttttatcattatcacttggttatt

SEQ ID NO: 103516 - DNA, 403 bp, Glycine max
  unsure (1)..(403): unsure at all n locations
tgaggcatgcaagctttactattaactggatgttcatgtattctatcatacgctgtacttagtatatgtgttcatttaggatctggaatcccaatacaagccaaattaactcgagtttgaagatagaataaatttggtttcttgttttttaacaaatcataaagagaaattttactattttatttaggcactctatcgatcatgttacatacatttagcaaaatttcactccacaaaaatgatatagcaccaccatgaagaaaagaaacgacagatttaacaaanggattggtttttcttcaaccttaccattcatttcaggagaatgtgagtgaatttcacatgagttgttacttgataattgtaaaactcatttaaaaatcaaatcctattttttcctcta

SEQ ID NO: 103517 - DNA, 450 bp, Glycine max
  unsure (1)..(450): unsure at all n locations
accttatagagagctgttcaggagatttttgtacgtacaaaatacattatagggtattggaaatccgcactagaagactcgtggtgtctctttttactttaccacatgaatggtattgaattgtgttgtgtggctatgttgttctcagacatttaattccttgtccttgtgtattcataggaaacagtttattcaaaattaaactagctcaagcatatatatgntttgcatactttgaagttttaactgttttttttaaatgcaaacaaaagtgaacaattaaagttagtaaaagagatcctgattatgcaaaggggaaaaaaaaaatatggacctcttattcctctcgttcccttcaaacggacaggcatgttggtatgcatacgtgtttctccgaactgagtggactctacagtattttatacaacttctttatataatgtaaagggt

SEQ ID NO: 103518 - DNA, 272 bp, Glycine max
atcaacaggttgagctttaaactatctcatatcccagtcaaattttgtatgccattagtattctgcctcactctcgtgatgaatgaatgccttactataaaggtcatattaatacgaaagaaataaattacgtgacatttaatacgaaagagataaaccacgtgaaaaaaggagcaatatctgtagttcttgctacttgtaactggtaatcctagcccattattaatactactcacgattaatttattatgacgattgttaattctgactga

SEQ ID NO: 103519 - DNA, 445 bp, Glycine max
  unsure (1)..(445): unsure at all n locations
ngagtagcctgattgttcaaaaatgctgcntttggcataggacaccatattccaataccaagaagaaaaaaaacttactgacacatgatatatcatcaattcaatgcgtattcatacaattcctaccagaggatttacctgtataatgtttcaaaaactaaaggaacagaaatcaagtattgtggttgataacgttgcaaatcatcctagaaaataagaaaggagaacatgttaatacatgtgcgtataagtaatcaatttagcgtagtagtatatgtagcaatgcgttgcctattatcatcacatactaacaataatagtaataatcgttgaactgaagcaggcttccctgattntggtgtcacattataaatgtgtaagaggccacattntcacaatgtttatggatcaaagtaataataggaataataccttgagattctca

SEQ ID NO: 103520 - DNA, 444 bp, Glycine max
agcttctaaggaagttttctcaagaaagcttctcaatgaagctacctagtctataaatagaagcatgtgtaacacttgttgtaactttgatgaatgagagtcttgtgagacacaactcaaagttcaacttctctccctttttcttccttcaatttcgtgcttccccctctctctttctctccctctttcttttcctccattgaagcatcctctccaagcttcttatccaaggctcatcttggtggtgaagctccttcttccatggcttattccttagtggatgacgtctcctctcacctcttctgctttgtcttccactgcatctccatggtggaaaatcaccattaaaggacctcattgaagctcaaagatcctgcctccatagaagccccacaagcaagcttccatcagaatgtcccctatgtaggtctacttgggcattgg

SEQ ID NO: 103521 - DNA, 173 bp, Glycine max
tcgcacaaagatcaataatttttaaagcaatttttttatcctgcttggtaatacgaagcgtggtgcacatggaaagaataagaagagggaggaacccatgttgtgactgctattttacatgggcaaatattccaccatctctacaacatcaatacttagccaatattaaccct

SEQ ID NO: 103522 - DNA, 414 bp, Glycine max
agcttcatgatgatgaaccaagcaattttgatgatgctctaagccccagtgattgattcaagacttcaagatcaagcatcaagaatccaatccaagattcaagattcaagtgaagacatcaagaagcaacaagtcaagacttcatataggataagtattaaaagatgttatcaaaaaccaaatagcacagttttggtttacatctgaattttctcaaattttctaagttactagagtgattactctctggtaattgattaccagtgactagtttggttttcaaaatgttttcaaatgatttgtaatgttccaaaatgttcttcaaatagtgtaatcgattacactatattagtaatcgattacaagtgaatctaaacgttggaattcaaatccaattgtgaagagtcacaactt

SEQ ID NO: 103523 - DNA, 327 bp, Glycine max
  unsure (1)..(327): unsure at all n locations
taaaatagaatggattaaaaaaaactagaggtgatctgagctgaacccannnnaaaacgggagaaaaaaggagaatgtttttttataaaaaggaaaaggggataaaaaaaaaaaagaaaagaaagaaggagtgaagaataagataggggaaaaaagggagaaaaaaagaaaggtagaggtaaaaagagagacaggaaaaagaaagaaggaagaaaaagagaaaaagattaacgaaatagaaaaataagagttggaaggataaggaggaatggagaaaaaaaaaaaagaggaaggggataaaaataagtctaggggaaaatagaaaaa

SEQ ID NO: 103524 - DNA, 336 bp, Glycine max
agcttgtgagacaaaaggacctatgatcatcttaatctttacactatcagcttagatacaaatccatattaggtcccaccacccaaaagtgccatagacatgaaagcatttcaaagggacaatgacaaagaataacacagtaaaatcaaattatttgtaacataaacctgggggagaattggtttcacaaatctttcccagtttttatgtttatcaagtacacatattgataggctcatgaaggccatgacagaaaaataaaggaaaataagccaaagtagttagagtagatatagaagtacgtaggtttggtttaatattagttagttactgaat

SEQ ID NO: 103525 - DNA, 445 bp, Glycine max
  unsure (1)..(445): unsure at all n locations
tttggagtaganacatgggaccaactcattntatttcatataggaagtcatatctagtcaaggtctgagagaccatacaagtttcctaacgatttctaattatgtgggccattaagtctatcatatgctgacaatagccgagaagcccatgaatctcttcgggggcggagtaggtgtctaccatcgccttggccttggctaataatcggggaagttcttgactcccgttcaaggtaagggcaaaccgatccatccacatggttgcctcttggtgtaaagagtcgatcacccttcctctagcctctttttccgcgtatacttgggcatactcatccgcgattctatgctcgtgggccgtggctagacctaactcttcttggtacttggcgatgatagctagcatgttggtctccgtctcgcataaacgctgagacaagcttctttt

SEQ ID NO: 103526 - DNA, 468 bp, Glycine max
  unsure (1)..(468): unsure at all n locations
cgccgacgaaaggatcaaagttaatttgatatgaggcaatnttttttatcctgctttggtaaataggaagcgtggggcaaatggaaagaataagaaggagggaggaacccatgttgtgactgtcatttctacatggccaaatttcccaccatctcaacaacatcaatactcagccaatatcaacccttctcattacccaccaccctatcagcctagaacacccaatcatccacaaaggccacccttaaatcaaccacaaaacccgcttgctgtatatccgatacctaacaccacctttaacacgaaccaaaacaccaaccagggaaggaatttttcagaaaagaagcctctagaattcacccaaattctgctcaataatgcaatggtagctattagtcgtcttatacgactaacttttgtatagaaaacattntccaaaacttgtatagtttccccaatttatagtta

SEQ ID NO: 103527 - DNA, 431 bp, Glycine max
  unsure (1)..(431): unsure at all n locations
agcttgtatacatgctgaggtttctccttatcttcataacaaggtggtttcttcacacatacttcttcattaatgaatccattcaaaaaagcactcttgacatccatctggtatatcttgatatctttgtgtgtagcataagccaaaagtattctaatggcctttattcttgctactgatgcaaaggtttttcattgtcgatcccttcatgttgattatatccttgagccactagtctttccttggttctaactactttatcttcattgagatttctcttaaagacccatttggttctgccataccctaattttgttcggggaccattgtttgatggcatgcaacctttgcttgaccgcttcgaggtatntggcacccattgctgcacaatacataaagttccataacgtgccaaaagtcaaaagagagca

SEQ ID NO: 103528 - DNA, 451 bp, Glycine max
  unsure (1)..(451): unsure at all n locations
tgtagaatggctagacatgatacatgtcagggtttgtgttggttctatgataaaaagggatgccccacattattttcatgacacaaatgcaaaacaatgatgatttggaaactttatgcaaaactggtcatgcatgcacctatgcggacactcaagtgtcaaatttttatggtcatgtgatgctagggctcangattcatttcctctattttaatcaacccaatgtttccaaaatatgttcttttatcaatttgtgcattcatccgagtccatttcgggcgtccggggaaatttcacagcattcacccttcaggtgtagacacattttccaaaaattggttatgatcaatgaactttntttttttgggaaatcgtctcttttcaaaagcatgttcgtttttagctagacaacttatnttttctttttntaccttctcttttttttttttta

SEQ ID NO: 103529 - DNA, 298 bp, Glycine max
actcaacagaactcgtatatattctcggtggaacccttctactaatcaaggaagaaacctcgcgagccaactaaagaatctgcctctccgaagaagcaaggatttaaaaagagcaaacgacttctcgcgcaaatcgaaagattctattattgcaagccattctaaaatcacagcaggaattaaactgaaccacaagcattaatacaccatacattttgttaaacaaaataaaatgctgaataatgacaaacctcgactcaacctggcaaaatctatgctaaagttaggagccagtgat

SEQ ID NO: 103530 - DNA, 434 bp, Glycine max
  unsure (1)..(434): unsure at all n locations
ntgaacaaaactgagttgctaagcaaagtgagtatatcgttacattttctgattgttttatatttttttactcattggttatctgtcaaatttttgtagtcacgcttgagcagattttttttttgttccctcccttgacaagaaactaagaaaataatttacaatgaatatgaaactgtgttttctatttgactttgttaaactggatgaaacaaaatcagtagtgtgaaccacttgcaatctctgcactcatttttgcatcataaggtgatgtaaaggttggcggttaacccaaaaggtagtctctcagtgtaaaacaacaggtttctttaggtctttggttactgataatatgtcagcatggtttagtcatttatcttttggtggtttggtgcgaagaactaaaaccacatatacttttcattgagccatat

SEQ ID NO: 103531 - DNA, 427 bp, Glycine max
  unsure (1)..(427): unsure at all n locations
agcttgtaggattatggggtacccatcacatgtggtactaggtggcggncgggcgatggtgcacaacaagttttccacattcacaaagcacacataaacccaccatcccctgttgtgcacctccaactgagctcacgtactcccacgtagcccctatcctcgtttctctcaacactgggtccccatcaatcctcccaagcttccccaacatcaaagtaatacaacattcaaacagcacaagctatcacagccaagcaaaacagggcaaaggcagaaaactctgcccaaaacaccaaccanatcacagcttttctcacttaaagaccccagtaacaattccttcgttccggttcattaaccgttggatcgactcaaaattttactggaagtctctgtacataaacctgcgtnttgaccgttgggatct

SEQ ID NO: 103532 - DNA, 465 bp, Glycine max
  unsure (1)..(465): unsure at all n locations
tctcannagaagttctcaaggaagtntatcaaggaagcttctcttgaagtttctcaaggaagctacctaggctataaatagaagtatgtgtaacacttgtggtaactntgatgaatgagagtcttgtgagacacaactcanagttcaacttctctccctctttttcttccttcaattttgtgctcccccctctctctttctctctctctttcttttcctccattgaagcatcctctccaagcttcttatccaaggcacattcttggtggcgaaactccttcttccatggcttattccctagtggatggcacctcctctcaccacttctcgtttatcttccgctgcatctccatgggggaaaatcacaattcaaggaactcattgaagctcanagatccagcctccattgaagcttcacaagcaagcttccatcaagggaataaacttcaatggtcagacttcttt

SEQ ID NO: 103533 - DNA, 400 bp, Glycine max
agcttgacgcacagagagaaggatacttattctgtcttcatatcagtctggcctcgatcttatcttagtttgtactgacaaaacgctatcttgttcttcctccttctcttttgctttacaccaaccgcaacttccttgcacttcatgagcatggacaatttcactgcttcaaaatcatcaaaacactttatattttcaaaagaagccttagaaggatgccaagtattggtgatttctagaaccttaccaccacttcctacactctcactatacacatgagagacctccttttattcaagatccccttctcaatgaaaaccctctcatcacacactttttctctttggtttcactcaactttgctctctcttatctactttatgctttaatctcccacctc

SEQ ID NO: 103534 - DNA, 461 bp, Glycine max
  unsure (1)..(461): unsure at all n locations
cgtagtcattagaagagaataagcatgtgattagaagtatgtctgataatgttagtcagtttgtcagattgattgtgaaggaatgcattgaccgtatcctggtgagagtgtgatccttaaattttgagagaaacgactatcatttagtactgatttttgcatgaatctctgaagtatggactgaatgcatgaaattgaggatgatgaaggccatgtgttgagtgtgatagccacttagccaaaaagctgaccctgtgcttgaatgatatcccttgcacccagtttgagctgaatgaattattgattgattgaaccctgagcctatgcaatgttatttcctgctaccttgtcttaagttgtaggagagcatcatccacaaaagcttggttcanacctaatttgtcccanatttgggggagtaactgtcaaggaaaaattgttccaaattttggggaaatact

SEQ ID NO: 103535 - DNA, 349 bp, Glycine max
  unsure (1)..(349): unsure at all n locations
agcttnttggagaagaaacatgttacctttcttttttgtttncaaacagaagcgctatatagttatagtttgatagaccatacaagtttcctaacgatttataattaagtgggccattaagtctatcatatgctgacaatagccgataagcccatgactctattcggcggctgtaaacatgtctgacatctccttggccttggataacaaacggagaagttctcgactcccgatcattgtgaaggcaaaccgatccatccacatggttgcctgttggagaaagagacgatcactctctctccaacctttttttcacgggatacttgtgcatacacatccccgattcttt

SEQ ID NO: 103536 - DNA, 458 bp, Glycine max
ctccactccaaaatctgatttcaggcttaaataggtggctttggtcgtgcttgcgaacttagtgcaactctgaaccgcttagcgcgcgttagtgaattttggcttagcgcatgcttttctcactcagcggatggactgaagcggtgcgcttagccagatgaaccttcgctcagcgcaaatgcacaactcatccttcttccagactcttcctcgcgcttagccaagcaatggtgcgcttagcggatggctcgctaagccaacagattggcttagcgagagggtgaaaattaatacttcacaaacttgcctaattgacctgaaattgagagaaaatgattattaaacacacaaaatggaagtactaagtatttattacctatctttaacaaaaagtaattacaaccctacaaaataaccataaattggaggagtttgatacaatttgcacaagttttata

SEQ ID NO: 103537 - DNA, 436 bp, Glycine max
  unsure (1)..(436): unsure at all n locations
ggccgataagtgctaactcagccacaccagacactcatttttttacgacttagctacagacataaagagaaatcatgcccgtccaaatgtcgtcgcatccttatacagattatgaattaatccaaccaacatattacgaaatagcgaattattcgcgactaaagacaagaacatgaatacttcaatataactttcaggattcccgaaattctgccgcatcaagccaatattgtgcagtgtaacacacgccatcactttgaagagtacaagagcgacgaagcgtgtgtgttcgcgatcattactgatgtagcaaaacacgcaagaaacacagaaactaggtttttgctttacgaatagagagaaacacgtncatcggtctgaagaattaaacacgctcgatatagcaaacacagtgcacgactagttttaacataga

SEQ ID NO: 103538 - DNA, 319 bp, Glycine max
  unsure (1)..(319): unsure at all n locations
gaatatctttatactgatcaacacatgcacagngggcaaggatgcctgggagatcctgtaaaccactcatgaatgaaccttccaagtgaagatgtccagattgcaactattggcccccaaattcgaaaatcttgagatggaggggggagagtgttttctgactttcacatgaacattcttgaaattgccaatgcttgcactgccttgggagaaagaatgacacatgaaaagctggtgagaaagatcctcagatccttgtctaagagatttgacatgaaagtcactgcaatagaggaggcccaagacatttgcaacatga

SEQ ID NO: 103539 - DNA, 414 bp, Glycine max
catgccagcctgtatgagagaggtagggcaactgtgtggaagcctgaccctatttctttctctgtgttggggaagatgtttggggaggctggggactatgatggcattaagtacgtgtttcaagagatggagtctgttggggtgcagcctaatttggttgtgtacaataccttgttggaggcaatgggaaaggctgggaagccggggtttgcgaggggcctgtttgaggaaatgatcgagtcagggattgtgccgaatgagaagactctgactgcggttattaagatatacggcaaggccaggtggtcgcgagatgcgttggagctgtggcagcggatgaaggaaaatggctggcctatgcgatttatcttgtataatactttgttgaatatgtgtgcggatgttggactggtg

SEQ ID NO: 103540 - DNA, 319 bp, Glycine max
  unsure (1)..(319): unsure at all n locations
acctttccataataacgtgcaagggggctgaaaagggggttcctcatagagtagtgaaggaaattgagaaaattccgagagaagaagaagaaagaagaaggaacgaagctgaggcgctggcgaatcacgattgtgatcaatctttacgttgntccttgttcagtgttcttcatgcgaacgtcagttagatttgtttttaagattcaaatgtgatctatgcatccttaggggttccccttgttgtttatgcatattcatttcctttatctatcatcggtgatctcgttttctttgtaaagttcaatcttaaccgatcact

SEQ ID NO: 103541 - DNA, 347 bp, Glycine max
  unsure (1)..(347): unsure at all n locations
gattgcaaggtagcaacggacacttttaacgactatgctaaaggaatttcagatttttatgtcattttaaataaatctagagtactaatttattctatcccatgcagaatgagttttgttaagaggcaagcaaatgatgtagatcatagcttaacaaaggcttcacgattttatgttagctatcatgatttttatcatataccatcttgtattgttactccacttatgaatgaaatgtagtaaacttgtttctcctatataaaaaaaagagtatggtgcgtaaaaaaacatgagtatgaggttttctctaaaacaaatgagtatggattcgnttgaaataatttatt

SEQ ID NO: 103542 - DNA, 417 bp, Glycine max
gatgcaacattgcgagaggtttttttaacaacgagatgatgcgctccatgataggttggatcaaatggagaatagagatcataatgaagaagaaaggaggagaagagggaatgatggtgttcctaaacaaaaccgaattaatggtattaaactcaacattcctccatttaaaggaaagaatgatccggaggcctacttggagtcggagatgaaaatagagcatgttttctcatgcaacaactatgaggaggaccagaaggtgaagcttgctgccacggagttttccgactatgctcttgtgtggtggaacaagctacaaaaggagagagcaagaaatgaagagccaatggttgatacatggacagagatgaaaaagatcatgaggaagcggtatgtgccggctagttactcaaggga

SEQ ID NO: 103543 - DNA, 428 bp, Glycine max
tatgaacactagcataaaatattaacaagattcaaaacatgcaaatcaatatttttttttatcataaggctttatatattctctttggttttctcctctttttcattgatttgagaaatgctaacgagctttttaatttgagtgcacatatctaaacaaacttatgtgtaaactttgaaaaaaaaaatataatttatgtagaataaaaacatttattaactaaaatcaaatttcatactcaatccctgctcgtcaccctattttgttttgctcctttcttaatcttgtccccaagcctccataataatcctagagccgccacgccacaccccattcacccttttgttcgtgttgcacatcgcaacccagagccattggagtgtcacctacgttgatagtagagatccatcgtaatgttgagaaacaat

SEQ ID NO: 103544 - DNA, 355 bp, Glycine max
ccactcaaatcatacaattgcttattcaaatcatactcaaacactcatttcatgcaaaataatccactgcatatcattttcaatcaattcactgttcaaacacacttttggtacaagaaaacaactcaaagtgctaaaatttaaataactgaaatataaagcaaactaaaaagcaactaaatcctgataaactaaaatgttcatgcttttcagaaattaaactaaacacaatttaaacatcctgctcatcctatggctgatgttcattaagatccaatgctggagctgctgatgaatcctggataggctgctttggctccgtgactggtgcaaatggctgggtctcctcacggat

SEQ ID NO: 103545 - DNA, 372 bp, Glycine max
  unsure (1)..(372): unsure at all n locations
ccttctttcacacggaacgcgacaaaccctttctttctccaaccctttaaatggcgcctctcgttacttaaaccattcaaatgagtccaacccggttcaacttcaacccgaatcaaaccgaaccctgctatctcctgctccatgctcactacctcggagctagtcgntccctcgaagctggagtacctggcggaggagtttggctccttgtaggagccagtggagcagctgaagcgcacgagtctatgggatttcaaattaaagtacgcgtggaaattacgtgattagggaaaaaaacaacaacgtttctatatagaaacctgttgtcatttaagttgtccctagtacattctaaagcggttcggtagatga

SEQ ID NO: 103546 - DNA, 330 bp, Glycine max
gctatgatttcatctgcccataaaaaaatttggaaaatattgtattcattgtgattgcctaaactttttcttttgaaattgtttggtaattagttgttgccatggctaagttggagttcatgatcctgatttttccttttgttcagtgcctatatgaagctggaaagtatagtagagtgcgactattggatttgttttgtcaagctctcagtcaacatttatacctttcaagggtttctgattgtgatgtgggggatgaaaaagatcgtgatttgtcctcaacaaatgatcccagacaacaatattccatcatgaaaagcggtggtatta

SEQ ID NO: 103547 - DNA, 417 bp, Glycine max
  unsure (1)..(417): unsure at all n locations
tttcagctttgaatgctctattcaatggagttgacaagaatatctttagactgatcaacacatgcacagtggccaaggatgcatgggagatcctgaaaaccactcatgaaggaacctccaaagtgaagatgtccagattgcaactattggccacaaaattcgaaaatctgaagatggaggaggaagagtgtattcatgacttccacatgaacattcttgaaattgccaatgcttgcactgccttgggagaaagaatgacagatgaaaagctggtgagaaagatcctcagatccttgcctaagagatttgacatgaaagtcactgcaatagaggaggcccaagacatttgcaacatgagagtagatgaactcattggttcccttcaaacctttgagctangactctcggataggactg

SEQ ID NO: 103548 - DNA, 332 bp, Glycine max
  unsure (1)..(332): unsure at all n locations
tctacttcaaccgatatgcccttatgcacggcaatacataacatacaaatcacactcggaaagggtggacaattaactaaagcagcangtgctggagcgaaacttatttgcaaagaagggaaatcggccacattaacattaccttctggggaggtccgtctgatatccaaaaactgctcggcaacagtcggacaagtgggaaattgtggagtaaaccaaaaaaatttaggtagagccggatctaaatgttggctaggtaagcgtcctgtagtaagaggagtaattatgaaccctgtagaccatccgcatgggggtggtgaatggacggcccc

SEQ ID NO: 103549 - DNA, 410 bp, Glycine max
  unsure (1)..(410): unsure at all n locations
tgtaggattatggggtacccatcacatgtggtactatgtggcggtcgggcgatggtgcacaacaagttttccacatccacaaattgcgcataaacccaccatcccctgttgcccaccttcaactgagctcacgtactcccacgtagcccatatcttcgtttctctcaacaccgggtccccatcaatccttccaagctttccccaacatccaggtaattcaacatccaaatcatcacaaactaacaaaccaagcaaaacagggcaaaggcagaaaactctgcccaaaacacaactcaaaatcacagcttttcacatacaaataccccagtaacatttccttcgttccaattcgttaaccggtggatcgactctaaaattntactggaagtctctagtacataagtctacat

SEQ ID NO: 103550 - DNA, 337 bp, Glycine max
atgcatgtttttttttctattaacagaaaaaatatttataatccatcaaatattcaggttcgatttaatgttttgcgagagcctctcccgtaaccgacaacaatcactgtagcaatccttgttaagaaggaaatttgatgttatgttttgaacggattaatttctctaaaataatgattaaagataaagcaactaatattaattattgataaaaaaattaatggctcatattctatatatttataatataatttgctatgcaaaagtttcagtggcgattttttttttcaaattacatataaatcgttttgttaataacgttgtatttttagtaatg

SEQ ID NO: 103551 - DNA, 421 bp, Glycine max
  unsure (1)..(421): unsure at all n locations
gacattaaatactcagcttccaccaatggattgagtttatgatccattgtttcatttaagaaaaactattgattgatgttatatttgaagctagtggaagtaaggctattcttctaattctgtatgttgatgatatatttcttgcaactaatgatcttggtcttcttcatgagactaagaagtttctctctagcaactttaaaatggaagatatgggcgaggcaagctatgtgatggggatagaaatattccaaaatagatcacaaggattgttaggcttgtctcaaaaagcatatatcaataaagtactagagagattcangatggaaaagtgctcatcatcacctattcgaattcaaaaatgagacaaatttagtcttgcaccatgtcctagaaatgaacgggaatgaaaacacatgga

SEQ ID NO: 103552 - DNA, 407 bp, Glycine max
  unsure (1)..(407): unsure at all n locations
nntgcggattggtctttgccagtgaaaggatcaacgtgggtgatgatgaagtanaagcccatgctgtgactggggcaaatgagaaaactggggcaaatgaagagggtgaggatgaagtataagcccatgctgtgactgccattccaatacagccaagtttcccaccaacccaacaatgtcactactcaaccaataacaaaccttctccttacccgccgcccagttatccacaaaggccatccctaaaaccaaccacaaagcctacctaccgcacttccaatgacaaacaccacatttagcatataccaaaacaccaaccaagagatgaattttgcagcgagaaagccttagaattcaccccaattccagtgtcctatgctgacttgctcccatatctacttgataat

SEQ ID NO: 103553 - DNA, 419 bp, Glycine max
  unsure (1)..(419): unsure at all n locations
gcttcatgatgaatcaagaatgattcttagaagtgttgatgatttctaaggtgatttctattagctcaaaagtcaagaacacttcatgataacaaagatgatgatctcaaagaatcaaagaatgagttcaagatgttcaagattgaatcaagaacatttcaaggttcaagaggatatttgatttcaagaatcaagaatcaagattcaaggttcaaggttcaagcttccaagaatcaagatcaagattcaagactcaagattcaagaatcaagagaataattaatcaagataagtatgaaaacgtttttttcaaaaactgagtagcacatggatttttctcaaaacctgtttaccaaagagnttttactctctggtaatcgattaccagattattgtaatcgattaccaatagcaaaatg

SEQ ID NO: 103554 - DNA, 288 bp, Glycine max
taaatgtaatggtatatgataacaatgccttcgaaaccctccactgagatatcatgtgctacatgggcatcgttaaggacctttatcaacagcgcacgatgaggctcggagtttatgagtagttcaagcaaagagatccttgctgcaattttattcagttgttcgactaccttaaactcgctttgttggatgaggcggaggaactcatgggcctcttccaaagtcactggttttccttgaagaccttctttcttttagcccctcttaccactggaggatctacttctt

SEQ ID NO: 103555 - DNA, 366 bp, Glycine max
ggggagaatgggaatggatgtatacctgattttgatgatgtccaaaaagaatttaaccaggctgcttcaaatgaatagcctttgcttcaagaataattcaagattgcttcaacaaacaaagccttgtttcagattcactaaagaccaagccttgccttaaaacaaagtgctttcaagacatgcaaggctctggtaatcgattaccaggaagtgtaatcgattaccagaagacagggttgagaaatagcagttgaaaaaggttttgaatttgaatttttaacatgtaatcgattaccatatgtctgtaatcgatcactagcaacggaactttggaaattcaaattcaaaagtcataacccttcaaat

SEQ ID NO: 103556 - DNA, 235 bp, Glycine max
ttggagctttggaaatgttttgggaaataatgtggcggggtttttgtttcatttggacaacttgatttgttggctatgcttcatgatgtattctgggccatacttgatgtacattgtatattggttaaatgttggacatgctgaatgaaatgttgtttctcaaaggctaaaaaaaaaaaaaaaaaaaaaaaaaattcgaaaaaaaaattcgaagaagaaaaaaaaaaaagaaaag

SEQ ID NO: 103557 - DNA, 415 bp, Glycine max
  unsure (1)..(415): unsure at all n locations
cttaaaacccatgtgaaagagtcaaaacctttttgaagagntacatctttagatttttcagaaacaaacactggtaatcgattaccaaatatgtgttatcgattacacaaagcttttgaatgaaacaatgtgactcttcacatttaaatttgaatttcaacgttcaagggcactggtaatcgattacagccttttgaaaatatttggaatgttgtaaattcagtttgaaaacattttcaaactcattttactactggtaatcgattacaacaatatggtaatcgattaccagagagtaaaaactctttggtaaaggttttgtcaaaaactcatgtgctanttcaaagtttgaaaaactttttaatacttatcttgattgagtcttttcttcattcttgaatcttgagtcttgaat

SEQ ID NO: 103558 - DNA, 154 bp, Glycine max
  unsure (1)..(154): unsure at all n locations
actgaattctgcacatctgaaggcatcactcatgagttctctgcagcccatacaccannanaaaatggcatagttgagaggaaaaacacgactttgcaagaagctgctatggtcatgcttcatgccaaagaacttccctataatctctgggctg

SEQ ID NO: 103559 - DNA, 386 bp, Glycine max
  unsure (1)..(386): unsure at all n locations
agctngccttgccccttgctatatttgtgggactcatggncactatgaatgacacattccttgagaggagggaagtgttgccatgttttcaaagcccgtactaaggcatacaaataacttatcataagttgaatagtttaggatatgaccactaaacttttcactaacataagcttttttatggacttcttacaacaacacagtccctatcccaacattggaagcatcacactcaagttcaaaggattcttgaaacgatgcgcgtgcatgattggcggcgctcattaactcttacacaaaagcattgaaagcgtgttattgattccctacccattggaaaccaacaccatacacgatcactcgattgagagatgctgccaatatgc

SEQ ID NO: 103560 - DNA, 325 bp, Glycine max
  unsure (1)..(325): unsure at all n locations
tggccttaattgaatacaaccttggttggttctctatttggctcttaacccttttatgccatttctttacaaactctgacctaaaatccccttttttatgtataaaagaaatgtccantgggaagggaatgaggtctaacggtgttaagggattaaacccctacaacctcatatggggactgcttggtggttctatgaacccccctgttgtaggcaaattctacataaggaagatactcatcccaagacttatggttgcctttcagaagagcccttaaaagggtggataaagacctatntactacctctgtttgcccatcagttt

SEQ ID NO: 103561 - DNA, 317 bp, Glycine max
aaaaagaggctggcacctgagaaccataatccgctgcagcatgggtcttgccacaatccaatacacgggccaccatatacgaggaagacccctgtgcctgataacaattatctactagaccgtaataatcggacgcctgaccatgaaaagatggggctagacaacataaaactggcagaaacaaaaactcttgtatgaacaacaggatggatacaaataccaaagccctcgtttaacaaaagactatatttcaaagctcgtgcggaataataaaaagaactctctttctatggacaaactctccttactcaggagcc

SEQ ID NO: 103562 - DNA, 373 bp, Glycine max
aagaatacatagttattgggaacgatcaaaaaataattttgtgaatcggacgcaccattattattaaagagtttggcatggaatgaatttgttgcacccattaggcccttacaattacaataggagaaaatcatttaaaaaatattaaaaatgcgaagtgaatcattacaattcatcttaactcaggactaaccggtgattcacttttctccctccctcagtccaaacttctttgactcctaagagtatttttagaaatctattgtaaaactacatttgaagtaaaagtgatcttgtcaatcgattaagatcctttcttttatgattatgtccgtcttattcgttagacttatatgaaaattcatgtcacatg

SEQ ID NO: 103563 - DNA, 417 bp, Glycine max
  unsure (1)..(417): unsure at all n locations
gatcttaagcacctgggctgcagcttaactcatgggctatacaatttttgatgaatgttgcaaaatatattaataatatttattcataattncgcaatatttattttaatgctgttaaaagtttttaataacacttaataatttttattaagtgttagattaaaaaacattactaaagatcacatgtataataatgaccccactagcaaacgtggaaactaccgtaaacaaagaaaatggtgcaatcttgatgcctttgtttttcagtacttgtcttgcactcggtaccaaagtcatatacaaagacaccaaactaaagccaacaaattgaaccatcacaaggtaacctaaaactacatatgtcaaataactaagacagttatacttgaatctatcgcatgatgcaacgttaaaatt

SEQ ID NO: 103564 - DNA, 281 bp, Glycine max
  unsure (1)..(281): unsure at all n locations
cacacagacatttggaaaacttcaagagctaatgaatgttcaaaagtttntaatattctttaaatctagagaacttcaagaggacaagattgaatagtaccaccgtcatacatatgtaattcaaaaagatcaaaaccagctcgaatcataagactacgacaggacaagatatttttcaacccaaatctcaaattgaagtagcattttggttataaacttctcttaacanataatgagccaatctcacagaaacatgtgagattgatatgggaccacaactc

SEQ ID NO: 103565 - DNA, 378 bp, Glycine max
gtatgcccgagtcttcattctatgagatgtttgtgaagtattggcgatcaaaattgccattccttggattataaggttgaaccaagctcatgcttttacaaaaaggttcatcaagtcaagttgaaatatggaagtaaccgtcttgaaaattggggcaaaagatgaatcgagtcacatcactgcttcgtctactgccaaacatatttaagattattgatgtccttgttacttccagtttcaccttgacaaagatgtcatggaccatgttgaaaatctaaattgattcaaccccatatcctgcgtaaaaattcgcaatacttcgactgtacatcattcgcatgcatccatgcttttcattggttgcattgctcattgcat

SEQ ID NO: 103566 - DNA, 404 bp, Glycine max
gcttgaacgcaaactggatgcgttggtcaacttggtaacccatctggccttgaatcaaaaatctgtacctgtcgcaagggtttgtggtttgtgctcctctgctgaccaccatacagacctttgcccttccatgcagcaacctggagcaattgagcaacctaaagcttatgctgcaaatatttacaatagacctcctcaacctcagcagcaaaatcaaccacagcagagcaattatgacctttccagcaacagatacaaccctggatggaggaatcaccctaacctcagatggtccagccctcagcagcaacaacagcagcctgctccttccttccaaaatgctgctggcccaagaagaccatacattcctccaccaatccaacaacagcaacaaccccagaaac

SEQ ID NO: 103567 - DNA, 187 bp, Glycine max
ctttttttaaaaagcgattataagttaaactcagttctacattattggggcttatttattgcgaatccgaaccctgttttgggggggagtttgctccctggctggtaacagcggaagttgatcctcagaaacaacggctcactgtgcttgggaaagcacacttcttccttttttggatctgactctc

SEQ ID NO: 103568 - DNA, 427 bp, Glycine max
  unsure (1)..(427): unsure at all n locations
cctatgaaactccgcttcaaattatgggctcatcaaactacttgtnttcctaggaaattctataaatagacctcccatctttaatggagtgggttacaactactggaaaacccgcatgcaaatctttatagaggcaatagatttaaatatttgggaagccataaaacaaagaccttatgttccctctataatggccggaagtgcaacaatagaaaaacctagagcagattggactgaggaagaaagaagattagtacaatataatttaaaggccaaaaatattattatatctgccttaggaatagatgaatactctagggtttcaaattgtaaaagtgctaaggatatgtgggatacactacaagtaacacatgaaggcataacagatgttagaagatctaggataaacactttaactcgtgaatat

SEQ ID NO: 103569 - DNA, 414 bp, Glycine max
  unsure (1)..(414): unsure at all n locations
tccttgagaagcttncttgagaaacttccttgagaatctttcttgagaagattcctagagaagctagagcttagctacacacactcctctaatagctaagctcacctccttgagatgagaagctaaaacttagctacacacacccctctagtaactctaacccaatcttattggagttttctacccaatacccttggagagtaagattgcatcatcccctctccattggaaaggatttgacctcaaatctcgaggttcttgatactccgggctccttccctcgacacctggtaaaagaataaaaacatatatattagtggtgttgggtatgttagagtagggtaaggtctgaaaatccctttcctaggcatcttctcataagggaccatggttcctcaccaactcaatgagtgg

SEQ ID NO: 103570 - DNA, 403 bp, Glycine max
agcttagcgcgtgtttctgttggatctttggcttaacgcacgtgttgcaggcttagcgcgtgcttctgttggatcgcgggcttatcgcctgtgctttctggcccgcttagcgcgtattggactgggcctgcttcaaattttctttttttcttcaatttttctggcctttttgcttgttacacctccagtttttatatctgcagccaaaattcaacaaaacatcaattctttaatatttaagcacaaataactgctaaataattatttttaaagacaattttgccttattttctattatcaaaatacaattatttaacagttatcaaaatcccccaaattaaaactttgtttgtccccaagcaaatcaaattaaaaagcaggctccaaatgcttcaacactttc

SEQ ID NO: 103571 - DNA, 446 bp, Glycine max
  unsure (1)..(446): unsure at all n locations
gacacaccaaactaagcttgggatcattataggggtaatagcttggacattcaacagctcctccttctgtgtctttttaatttccatttgacattacaacaaaatgtacttggctttgaaacttagctagccatcgtgattttccaataaattttctcctgcattttactaagcttatccgagagtatttgaaaatcttcttgaacactcttacccaattgccagaaaaattacataaatagaagaaataaaaaaggcttaattttcttaaaattttgctccaaaattcccttccactgtacccgaatgctaatctgaacctgtagggtgccaagttggaaactttttccctgaaaaatgatggggttatcagaattagaggagctactgcttcttcagtggcacccagaatctgaanaacagcaacatgttctgtatcgaaagat

SEQ ID NO: 103572 - DNA, 379 bp, Glycine max
  unsure (1)..(379): unsure at all n locations
agctacaatcattggtataaattttctcgtnctgtgcctctacacaagggtgtctgcatccttctaaaagaatatctccttcgtcctattaaagtcaaaatgacaatgttcaatgctattccgaaaaatatctctccaaccaaaacaggggataaacagagaagggaggcaaatgcgagaagaatgcagtaattgtgaaaatagcaaattaagtaccgatgaagtgatgtcaggccttgtgtagggagtaggacaactagaagccaaatcagcaaagctcagtaatacatccaattcagaaattatttcagctaaagattcaaacacctgcagagcaaaaaatattcaatttagcttattttgtatttgatacagctta

SEQ ID NO: 103573 - DNA, 376 bp, Glycine max
ttggccctagtaattggtcttccttgcacatccattcactaaagttcctttgttcatgaaggcaatttgggaaggcatcttgctaatcgtcatccaggttatgacaagtcaggggaagctgtcagcaatgcagcagcacgacctgtcactgtggttaagaagtcccagcctcatggaaaagcaaaccacgtggattatgatcatctaaattggttgctcattaggtggcttgttttagcttctctccctccttcaactctggaggagaagtggctcgtgaattcctacaagtttctaaatccatcaatacaactgtggcccagtgacacgtatagaactgtacttgatgaagttttcagaagcatgagggaagatg

SEQ ID NO: 103574 - DNA, 324 bp, Glycine max
tataaacattttccgttcaagggtcattattggactgtgccaactttttaaactacactatcaccttctatttatattattcggcatctatggcaacctaccataataatcactaccagtggagatcaacacaaatggtttcaattttgaattttatataaaaaataaataaacaaaagggtctactacccttgttagcaaaggccacaagttttcattattattattggaccaacccagcatttagtgttagatagcctttacctaaagcctttggtgttcttaccccaaaaagacaaacaaatatagtgaaacggaatggac

SEQ ID NO: 103575 - DNA, 404 bp, Glycine max
  unsure (1)..(404): unsure at all n locations
ngcagagtcattggaacaagaatgtgtagatatcatttctactgagggaggaaaatgttctaatcccacacaatctggtgttatgggtttgattgagaagggaaccaaaaaaatatgtttgattcacttatgaatgtctttttcctattacctacataatatgattgagtgcctcaatgacattacacaacataaatcaacatattagagtcttaaaaattatttaatgttctgcattcgctcttgtatgtgtcagaactccaaaacttgataagctattggccctttctctttcccccacaaacttcatactgaagctacattttcagcccttaaagcaattaanaattaatgtttctttacattcataccgattgttgcattggtaaatgatagttgattat

SEQ ID NO: 103576 - DNA, 353 bp, Glycine max
  unsure (1)..(353): unsure at all n locations
acatttatttaaattaaattntaaattaaaaaaaccaaacattaaattaccatacccatgggataaatccatcaacaaatagggacctctttaatttcttaaatctgtctatgccaccaaggaggttgatatactcatcatactatntggcaaattctttaaacaatggctgtgcaccaatgaccatgaatctttacctatacctgaaattctgataccaggggacagatgtcgtacaggatgtcacgacatcacgcttcagaacatgcagtttatgtgtgtccgtatgaacagattanacaagtnaataacacaagagaattgttacccagttcggtgcaacctcacctaca

SEQ ID NO: 103577 - DNA, 415 bp, Glycine max
agactgccggtggaatatcctggtttgttaagcttcatctccttatatgttccaaacatgtcgcagctgctcttccaacatcactcttcaagtgtagctggcgctgatgccttctgagatggaccttctggactcccctgtgttgagtcccatgacgaatcaaaaggcgtgaaggttttgaacgtcactgacaactatctcaaatttacacccaacaaccttatttattccccccccccccttttttgaggggaaacataaacatggccctccgcaggttggcgctcgcttattcaaacccactcaaggtagattaggcgtccatttttaatttaaaaaaacaacagaaataactaccgtgaaaaaggatactaggctgccttgcagcagagttttccgcttgcacagagctggg

SEQ ID NO: 103578 - DNA, 437 bp, Glycine max
actagcttgagcgaggcctctctcaattttgagggttgtttacttggaaccatagtatattcaccaggaaaacatcataatggaaggaaattgcagtgcaatgattcaaaagatactttcaccccagcataaagatcctgggagtggaactattccttgttcaattggagaagtcactatgggaaaagcaattattgacctgggagccaacattaatctaatgtcactctccatgtgcagaagattgggagagttggaaataatgcccactagaatgactttacaactagctgaccgctccattaccaggccatatggagtaattgaagatgtgttggtaagagtgaaacattttatcttcccggcagattttgtggtaatggatatctgcgaagatactaacattcctgtaatattgagaaagccattcatgttga

SEQ ID NO: 103579 - DNA, 418 bp, Glycine max
agcttcaagaaaaggccaaactctcctcataaatctgatttcagacttaaataggtggctttgttcgtgctcgtgcgcttagcgcaattttgaaccgcttagcgcgcattaatgaattacggcttagcgtggcttttcttgttcagcgaatggaccgaagcagtgcgcttaatggtatggcccttcgctcagcgaacaagcacagctcatccttcttccagattcttcctcgcacttagccaaggaatgttgcgctcaatggatagctcgctaagccagtagattggcttagcgagagggtgaaaatcagcacttaaaaacttgcctaattatcctgaaattgagagaaaatgattattaaatacacaaaatgggagtactacatatttattacctatctttaacaaacagtaattat

SEQ ID NO: 103580 - DNA, 370 bp, Glycine max
  unsure (1)..(370): unsure at all n locations
taattggggaggggcccaatatatggggcattttgaattggtttcttgcctgaataggttgaattanggggttgtatgaaaatgccctcaggctattatgcattttgaagtaatggggcatgccacatttgtcccgctctcttgctattgatgcctaaacgcctgccccccaagtgttcggtgaaatgcctcaatggcattagcgcgtgattttttgtagggaaacaagccatggggcagtttggtttgcacatatttttgggacatgcattcattttgaaagagctagagtatattgccccacatatatcctagtcctagaaactgaaattttatgcaaaaagagcacaaagggaggtgcatgttgggt

SEQ ID NO: 103581 - DNA, 415 bp, Glycine max
agcttggctctcttattatcactgatatttttcttaacacttggctgtacccacccatctatatttgaaactcagaatggttagcacctttactatcaataattttgtaatatactatcatattgaataattaaattggttcttccagtgtatacttgtcattggaatgtggtattgatagttcagattctaactcatggtctgcctttggcacgtctatattttttgccagtgtgaagcagttggcagagttgcaaatatcattcagattccagcattcttgtgtcgccaagtaaatatctattgcattcaatttcaatatccattataattttctgggtaaaattttaatagatgtgccaacttcaattatttcattcattttatttctaatgacagacagatcttctaattg

SEQ ID NO: 103582 - DNA, 286 bp, Glycine max
ttcctttcatcaacagcttcaaaatatccaaatggtgctcttggaatgcgccagcttatattccatggcagcattcacaaggggggagcaaatgatgatcttgtatatagcatgtacaagccagcctatatgataatggttggtttgaaggaagatgagtatccgattgaagaacgaaagtggcttgccatgactgcatggaaccgagcagcagtgccagtcaggttgggtcagattgaagtggggaagaaatggatgactgtgggcttagacattgcaaagcatg

SEQ ID NO: 103583 - DNA, 408 bp, Glycine max
catgaagcttgaggatatggggacccattttatgtggactagtggcgttgggcgatgggcaagtcaactctcccatccacagatcacacataaacccaccatccccagttgcccaccttcactgagctcacgtactcccacgtagcccttatcctcgttcctctcaacaccgggtccccataaatctctccaagcttccacaacatccaagcaattcaacatcccaaccatcatgaactatcaaaaccaaggaaaacagggcggaggcagaaaactctgcccaacacaaaccaatatcacagcttttctcacttaaaaaccccagtaacattctcctcgttccaattcgttaaccgttggatcgactcgaaaattctactggaagtctctaacacataagtctacact

SEQ ID NO: 103584 - DNA, 390 bp, Glycine max
  unsure (1)..(390): unsure at all n locations
agtatatcgacatgcctgaaattaaaagcagacgctatgagcaaaatcaaacgacaataatttntaattcggatgtncgattgagtcctgtaatatatcgagacgctcgaaactgaaaacagaagctctcagcaaattcaaacaacaataaccttttactcggatgtccgattgtgtcccgtaatatatcgagtcgctcgaaattcagaatagaagctctgagaaaaatcaaacgacaataactctttattcaaatgtctgaatgaatcccgtcatatatcgagatcctcgtaattgataacggaagctcgtagcanattcaaacgacaataactnttaactcgagtgttggattgagtcctgtaatatatcaggacgctcgaaattgaa

SEQ ID NO: 103585 - DNA, 390 bp, Glycine max
cacattcttttcaaattttaatattaaacataagtacattcatcatctaaagctgtccaaaatatgggaggtttgcaaaatacatagtgacatccagagcaaaggtatccactgtggtggctttaaccacatgtatacaatcatcaaattcctataaaataggtctacccatacaaaaacaaaaagagtaaacctaacagtctgtactagatacacccacccccaaaaattatataaacctagtctaaggagtcgtctgctatgatgaagaacctccactagtcgctatggagtaggtgtaggtaatatccactccacagtgcactgaagcgtgcgtgctggtttctctggatgtaccaatgaagtagccgtgaatcgaatcgtgccccg

SEQ ID NO: 103586 - DNA, 416 bp, Glycine max
  unsure (1)..(416): unsure at all n locations
gatgcacattggagaggtaatgattttctattttatgcgctccatgagagggtggatcaaatggagaatagagatcataatgaagaagaaaggaggagaagagggaatgatggtgttcctaaacaaaaccgaattgatggtattaaactcaacattcctccatttaaaggaaagaatgatccggaggcctacgtggagtgggagatgaaaatagagcatgttttctatgcaacaactatgaggaggactataatgtgaagcttgccgccacagagttttccaactatgctcttgtgtggtggaacaagctacnaaaggagagagcaagaaatgaagagccaatggttgatacatggaccgagatgaaaaagatcatgatgaagcggtatgtgcccgctagttactcaagggacttg

SEQ ID NO: 103587 - DNA, 386 bp, Glycine max
cccatggaagctcctattatcttccacactttttggggtgggccattcttggatggccttgattttctcagggtccacttggaccccatttctaccaactacaaaacctaagaaaactatattatctacacaaaaggtacacttctctatatttgcatagagggtgtttttcctaaggactgaaagaacttgtctgagatgtcctaagtgatcatctaggctcctactatacactaaaatatcatcaaaataaacaactacaaatctacctatgaaatcccttaagacatgatgcataagcctcataaaggtgcttggtgcattagtgagcccaaaaggcatcactagccattcatacaaaccaaacttggtcttgaaagcagttt

SEQ ID NO: 103588 - DNA, 432 bp, Glycine max
  unsure (1)..(432): unsure at all n locations
ntaatgtcncccttctctttacaccattgttttatagacaatctcaggttcctcagcttgtttttaagggcaacttccccccaaccaccctgcagatctgtactccatgcctctttaatcataaaatgataccctttatggttaagccaccagtccaccacccgaaaaggcttatggccccagtccaccatctttgttttcaaaatgattggacaatgatccgaataatctctttgaaggacatgttgggaggtgtcaagccacaaggatacccactgatcaaacaccaagaatctgtctagcctactcttggcactgccattgggcctaaaccaagtgaaattgctaccaaagcatctaatatccttgagctccatctcagatatccagtcattgaaatctgaggtatctgaggtaacatcagacctctga

SEQ ID NO: 103589 - DNA, 396 bp, Glycine max
  unsure (1)..(396): unsure at all n locations
aatcattccaatctattcttatcatacaattgctcattcaaatcattgtcaaacactcatttcatacaaaaaaatccactgcatatcattttcaatcagttcactgttcaaacacactttntgtacaagcaaacaactcatagtactgaaatttaaataactgaaacgtaaaaactaaaattaaaatgactgaacataaatcataaaataactaaaaataactaaaatgttcaaaatgcacaaatttaaatgtcctactcctatgcatgctcattaaggtacaacacctaagcagctagtgaatcttgagagataggttgctctaactcacatgctggtgcaaatggtatggcatcatcaggtatgcgtgctgaggatggctctagaatctggtct

SEQ ID NO: 103590 - DNA, 401 bp, Glycine max
  unsure (1)..(401): unsure at all n locations
catgccagcttgagatgaggaagtgtagaagggtgaacttcctgcttttattcgntgaccacagagtggtacctggagatatgtcgcgggggtcaagagaccttggggacgtcaggtggggtgccattgcccaaaaccaagcttgaccaattccaacccaactcgggcatattcggtcagtgagaacctgtgatgtacctaaacaagcgagctcctggcagtcaacagataaaaggaacaaagaccacaaagcaaggaggcttgtggtggctggccagctattaacttgattgatatgtgggatatggcctctggtaatcgattaccaagggttggtaatcgattacaaggcttaaaaatgaagacatgaggctaagatggtctctggtaatcgattacca

SEQ ID NO: 103591 - DNA, 415 bp, Glycine max
  unsure (1)..(415): unsure at all n locations
ttagtcaaacagaataatccanaaatgtctaagaattgtgtgttgaaaaagcataacaagactttctgtgattggtttaaagatacagtctttgcagatgaaaatgcttcagaaacattaagaaatctagcatatgggcctaaaagaaatgttataactcggcaaggatacgacataaacaagtattcattntacacaaaagtacaatgcagaacagcggggtcacactaagggatgaatctcaacacttcgcaagtgtgtatgacaccaatccctgtgtagcttccatcccttactttgggttcattgatgaaatttgggagcttaactatatgaaatttattgtttgtgttttcaaatgtaaatgggttgacagcaacaccagtgtgcgcaccgatgatataggatttacgtt

SEQ ID NO: 103592 - DNA, 405 bp, Glycine max
agcttggctagagacaaacgtctcgcttagtgagctgatttcacgcttagcacgcggccttgatccttgtgctcttccagattcccttgtcacgctaagcgcgctaaagctgcgcttagcggtggatgcgcactgagcccatagggtacgtttagcgtgactactccttttagcacttcaagattttagcctcttttgacctgaaattgaacatatttcatcattaaatcaaatggaaaatattctagagacagttataacaataaaacaagatttatttacaaatccctacaaaataactataaattggggaaactatattgttggatcgagtggcctcagaataattaagaagggggggttgaattaattattcctaaacctttactaattaaaaaagtactc

SEQ ID NO: 103593 - DNA, 389 bp, Glycine max
tacatggagctacatcacaacctccgtttaaacaagtaatttagcttgcccaacaaatcaaaggtgtaaccaacaccattgctagcagattttcctataaagggaagtccaatcagtcccgtaagcatcacctccataccatttgggacattgacatcaattgtgttgatgcaccatcaccacgaagtctccttcccatcatatttacaaaaagagacttcaagggcatcaaccctatcaaccaggacaaccctatggttatcgccatcataattgccaacttcatagtgtccaaggtcctcattgaccaaggtagctccatggacatactatactagaagacattctagaggctcgaagtctcatttgatatagtccagccacactct

SEQ ID NO: 103594 - DNA, 283 bp, Glycine max
  unsure (1)..(283): unsure at all n locations
atgaaaatggcggtctncttcccagattgaacgtgaaggaatgcattaaccgttacccggtgtgagtgtgatccctattttgagagaaaacgactatcatctagtactcgattttgcatgaatctctgaaggatggaatgaacgcatgaaattgacgatgatgaacgccatgtctgattgtgatagccacttatccaaaaagctgaacttgtgcatgaatgacttatcccttgctcccaactttgagctgaatgaatgtttgagggattgaaccctgagccta

SEQ ID NO: 103595 - DNA, 384 bp, Glycine max
  unsure (1)..(384): unsure at all n locations
tcaaccaggggagatggaccatttcaagtgctagatataatcaatgaccatgcttacaaagttgagctgcccggtgagtataatgttagttccaccttcaatgtctctgaattatctctttttgatgcagatggagaatccgatttgaggacaaatccttctcaagaaggagagaatgatgaggacatgaccaagagcaagggcaaggatccacttgaaggacttggaggacctatgacaagggctagagcaaggaaagccaaggaagctcttcaacaagtgttgtccatactatttgaatacaagcccaagttttcaaggagaaaagtccaaggttgtgagttgtatcatggcccanatggaggaggactaaatgacaccact

SEQ ID NO: 103596 - DNA, 385 bp, Glycine max
cgctgcagctatgctactgtttcaatttttgaatgctacagctaactgcttttttactttgggaacatattactaccttaatgacactcaaagaattatatgcactgattgaattgaatgccatattggctttgctacattttatgattggtttcagtcatgattcttattcctaagttttgtatgtggaaattaaaaaccttaacaaaaaagttgtggaagctattgccttttctgcagtggaatcttctaatcatggagtaacaaaagaattttttgaatctactgtttatcaggtaactacattctatattttaggtcatagatcaacttattaatatatgcatataaaattagtgctacatcgtataaaaaatcatgggag

SEQ ID NO: 103597 - DNA, 404 bp, Glycine max
  unsure (1)..(404): unsure at all n locations
cagcttacatgtagctacatcaaggtctctaattctaatgtttatggcaacgcacatcttcataaaagaccacaatgactcgtcattaccctcgtaaaggttgaccagagtgatggatgtggtatggtaaaggaggctagttgcatattacgctttgaagcattaattgggataatgtgaagaaagagtcaatggatcatgggggaaggcgtntgtaccacgtcagtgccaaccctttgagggaggtgggaaagaccttgcacattaccgngtcattattaaagtactaattgacttgcatggtgaatatgtctaaatgctcattcagatctaaggcatcatcatatcatttgatgattagagggttccaagtggtgggttaggtattcatgatgccatccatg

SEQ ID NO: 103598 - DNA, 332 bp, Glycine max
  unsure (1)..(332): unsure at all n locations
aaacttacaaaattaaactcacatgccattgaaacatttcaaccgacatttggtgggtgcattgttaagcatgaatattaanggaaagggggcaatgtggcacgcccaatcatttcaaaacatgacccangcctaaggccattgcccataactctctaacttaacaaaaacaggcacaaattcaaagaaaaatgcctcacggatttgagcatgagcaaaaaaaggtatcaaaacgcaacaatggtgagccaaggagcaaaggcatggtacacttactagtatggagtgaacaccaacaccaaatggaaccaaaaacacaaaaaatggtgatc

SEQ ID NO: 103599 - DNA, 399 bp, Glycine max
  unsure (1)..(399): unsure at all n locations
gcaaaacaatctttggtttaaagcttagcacaacggttttataaaaaccatcgntgagtttacaacaataccaataagaggaaacatcatatatgtggagtattaaggtttaatctaaaaaattcacatgatttattaaaaaaataacatgaatttttaagtggttaattggtcacatgacattaaatcttgatcattcatgtttgattagacagtccaaatttaatcttctaaccctcatataagatacattcctcatatatctatctatatatggggaatgttaacatagacccacttaaaaattagaaggtctatattagcatctagtatcctttcatttgaacaaaaaaatcactcttaatttagattaacataaactaaaggacaattatatat

SEQ ID NO: 103600 - DNA, 242 bp, Glycine max
  unsure (1)..(242): unsure at all n locations
agtcattgtttgagtcctagattttgagggagagagaaaagagggaaggcgaaccacttgtcatcgaggttgtcatggaggtgagaggagggggcaagggcaanaaaggttcggagtanaaatagagactgctgaaggtagagaaagagaaggaagagaggctatgatcgttggatttgagagagagagagagagaaagggaaagaaaaagtacgatagtgtctggtttttagtggacacac

SEQ ID NO: 103601 - DNA, 417 bp, Glycine max
  unsure (1)..(417): unsure at all n locations
ctgcagctctaagtgggcacaacaaatatttactaaaaaacattttatacataagttcgagacattcaagattaaggtcatttctaacaatacaaaatctatatcaatataagtaattaattgcaagttcgaggatggaaatgtgtcactttaaaaagtgagcatgcacaataagtggaatcaaaggataaaatacgcctaaataacatcatcaattaaaaaattccataaaaaacatcacgataaaaatactaaaagataaaaatttaatattgtttgacaaacttttgcttacatctattacaacatctcaacaaatatttattcatcatcctaaataaaattacaacttttttcagaaaatngagaaaatccttgccattacaagttttctaaaaattttcgaaaatccttcat

SEQ ID NO: 103602 - DNA, 367 bp, Glycine max
  unsure (1)..(367): unsure at all n locations
tctcaaatgggaactcaaaaatctgggatttactgatagcctcttcaagtcctggttttacccccccttttttattgaggctggggaatacccttaatgatacagaccccagaanaaaaagtaatgcttaccatcaatcaaattcacaggttcatccttcaaaatcagaagagtgacagaggaaaaagcagaacaatcggacctaacctacacatgctntatattaaagtaaacaacttagtagcaaaccacaaaataggaaattgggcagagagactaacatagtgcaaacaaacaagtacaagtttaaaataaaaaatgaaaattatataaccttgaccataaaagaagcaagcaagttcccata

SEQ ID NO: 103603 - DNA, 352 bp, Glycine max
  unsure (1)..(352): unsure at all n locations
tactttaaatatccaaagagacacattagggtaccaagattacatctcatcatttggagaaattaatctatcattgggttgagcaccagatccattaagaaatgatgaaagaggcgatccacagtctcaaatctaaagctcaatgccatatttctctcaacttttcatgtggttcctctaggttttttgcactccacaccttgcttccttgttgtgcatggctttttatacaaaatgagccaagagataccataccaactcgcccagggagttggtgcttaaagctgaaacattactcgcccaaggagtntttgcttatgttgaagaactccatagttaggcaagtggtgct

SEQ ID NO: 103604 - DNA, 249 bp, Glycine max
  unsure (1)..(249): unsure at all n locations
ttcgtggctacttcatgcactcctctaatgacaataacatcacttctgggactaaattgatgggagtttgaaaccatcttctcaattaaatttctggctttagcaggggtcatgtctncaagggcttcaccactggcagcatatatcatacttctctccatgttactgagtccttcataaaaatattggaggagaagctgctcacaanactggtggtgagggcaactagcacatagtttcttaaatctc

SEQ ID NO: 103605 - DNA, 389 bp, Glycine max
  unsure (1)..(389): unsure at all n locations
acttcccttatttttggaatttcatttgtctcatgtcttttcaatctcccatgacattattgcactgatggggtcatcactactttccctcattttctttcttggttttatataactattgcaattttcttagaaaatttaattcattatcttttgaacgtntcatttcttcagttataaatggtgtccaatttaattttcttcattcattcttctccttctccaaaaccagttcttctctttttcccatttgggtttcctttgatgcaatttcatcttcttagttctttctcttcgtgagccattctagctacttcaataacctttctgataaagcggatatcacactagaaggggatgatgggttgaataatgtgttagataaaaaa

SEQ ID NO: 103606 - DNA, 208 bp, Glycine max
  unsure (1)..(208): unsure at all n locations
ccgctttaaaaattatatatacatanattgttgagtccaataattaaactcaataattttatcactgatcgaggtcgtacccgaatcaaataaatattaaaaatgccgtatctaggaagtgatcataggtcgtctcccaacgagcaatggtcaaccaaatgttcataacagatagtaataaaacagtaacgaattctggggggggggg

SEQ ID NO: 103607 - DNA, 399 bp, Glycine max
  unsure (1)..(399): unsure at all n locations
gcttgatgattatggngtacccattatatgtggtactatgtggcggtcgggcgatggtgcacaacaagtttttcacatacacaaagcgcgcataaacccaccatcccctattgcccacctccatctgagctcacgtactcccacgtagcccatatcctcgtttctctcaacaccgggtccccatcaatcctcccaagcttccacaacatccaagtaatacaacattcaaacagcacaagctatcacagccaagcaaaacagagcataggcagaaaactctgccaaaacaccaaccaaatcacagcttttctcacttaaagaccccagtaccaattccttcgatccaattcgttaaccgttggatcgactccaaaaatttactggaagtctatagtacat

SEQ ID NO: 103608 - DNA, 422 bp, Glycine max
aagctttaatgatatggtcttcaccaaagaaaggatcaaaatgtggtcttttagaagcaaaactgatcatcatgctttgataaatgcaaaaaaaaaaaactagggccaatgaagagggtgagaatgaaggagaggaccatgctgtgactgccattcctatacagccaagtttcccaccaacccaacaatgtcattactcagccaataaacaaaccttctccttacccaccgcccagttatccacaaaggccatccctaaaatcaaccacaaagcctacctaccgcactttcaatgacaaacaccacctttagcgtaaaccaaaacaccaaccaagaaatgaattttgcagcgagaaagccctagaattcactccaattccagtgtcctatgctgacttgctcccatatctacttgataatca

SEQ ID NO: 103609 - DNA, 404 bp, Glycine max
agctttgattgtgtctagaagaaatcttatgtttgtcatcaaccaaaagggggagaatgtgaatgtatgtatacatgattttgatgatgtcaaaaaaagaatcaaataaggctcattttgcttcaagattaatacaagattgtttcaacaaacaaagccttgattcaagatttcttcaagatcaagccttgcctcaaaatgtagagatttcaagtcatccaaggcacatgtaatcgattaccaatacatgcaatcgattaccaaggcacatgaaagtgtgtaatcgattacacatcatatgtaatcgattaccagagactctgaatgttgggaattcaaattttaaatgaagagtcacaactgttcaagaaaaacaactgtgtaatcgattacactaattttgt

SEQ ID NO: 103610 - DNA, 413 bp, Glycine max
  unsure (1)..(413): unsure at all n locations
tttgtgaagttgtggacagaaaaataacttgaaaaaattaanattgtccactcacaaagcgcactcctcacgctaagtgccatcttcttcacgcgctaagcgaattgctgttcatgctaagcacattcacccctgatcattagttgtatggtctcgctaagcgtgtgacctgtgtgctaagctcacaaaactccctgtccatttaatttttggaattgggctaagcgagttatctcgctaagcacacaagtttggtcttgctaagcgcgcttacgcgctaggtgctattcttctctgtctgattaatttcgagaattgggctaagcgagtgctctcgctaagcccaattccttctctgtttggaatagcgctaagtgagatggacacgctaagcatgagccactactgcattc

SEQ ID NO: 103611 - DNA, 363 bp, Glycine max
gtcatgatagacttataattacaaaaaggaatgaaaatatgtgaaaaaagtggagaaaaatggagaggaagtggaagtggaagctcctaatggttgattaatttctcttccaaaggaatgtgccctattttttctttgtgtggggaagaagaatgaatgcctcattccctcctttttcctcacttaaaacgcaactgaattttgttttttttttttcatgacctcgcactaactgtgaatgcacgttaagcgaggaataagtgactatgcgttaagtatacaacacgcgctaaacacatcttcacatgacatccggctttccctggtggcttttttgtgctaagcgagaggctatccgtgagt

SEQ ID NO: 103612 - DNA, 404 bp, Glycine max
  unsure (1)..(404): unsure at all n locations
ggggctacagccagagaaccattgacaagaacccttttttatgatgctngcatacatngaaaacgagctacctattgttgaatagttaaatttttgtctgttaatgagagttgtttcatcccctaatttgtgagttattgtaatgagcaccatatcatttttctgggaattgtgttccccctgcatctagctgttatttgtcaaattcagggaagaagttattaatcgaaatattgtgatattcaatgtacgggtgagatttggttccatagaatttgctgttcaagtatgtaacaatccaatatcgagatattctttcgtcaataagtatctgacttgacatatacacatctgtacgagattcatcgtaggttatacataatatttcttccaggttctattta

SEQ ID NO: 103613 - DNA, 278 bp, Glycine max
tccccgtcttacagcactgtgatgcacttcgctcaggaataagttttttttggtctccccctcaaaagggtcgagttttcttaacctagagtttactgctctgaggacctttttgaagaaacccttttttatcttctgcagacttcaaagattacctatccatcttcgccaataggctctcctatgaaactccacccaaagaataaaaccttctcactgaagtgacacacacacacacgctttcccttgggggcgtactgacactcgctatgttttaa

SEQ ID NO: 103614 - DNA, 375 bp, Glycine max
  unsure (1)..(375): unsure at all n locations
ggtctcaatactattcacacaaactctctctgtctagtgatatctatccatggaggccaagaacttgtggcgcttcctggttctttcaatcggtgtggtactagttttacttgtcacttggctgcccaacaaggaggctctaaactgcaacctttactctggatggtgcacctcaaagaaccggttctactcttcagcacatcctaataatccgattaagaaaccatcatttttcacatatcatcatcacaagaaccaacaccatgaatccgagattcctcaacaccctcttgaccctctaaccatccaagagttcaacaaggtccgcaccatccttttgaactaccctctcttaaagncttatccagctacact

SEQ ID NO: 103615 - DNA, 383 bp, Glycine max
gcttactaccattcccttcatccaaatagctttctttattgccttagttagagcaatgaattcggttttagttgtggacaaaaagaccacatgctgaagattgcatttctagctaacagtgttaccacaaaacttaaacacataacttgtcaaagaccttcaagtatctagacatccaaaataatctgaatcaacaaacccaataacatcagtggtacttttcaaatatttgaaaatccatttcaaagcctcccaatgcagttttcctggtttccccgtatatctattaaccaaactaataatatatgctaagtctggcctactgcagatcattacatacatgagattgcctataacatttgcatatggtacctttttcttat

SEQ ID NO: 103616 - DNA, 410 bp, Glycine max
  unsure (1)..(410): unsure at all n locations
ggatcttaagcaccgcngctgcagctttcctctttgataatacccctcagccaaataaaatccatcttgggcctttttcccacaactctcgtaaatgggagagaaatggtcatctaaagcatacaagtccctaatattatcaaatactaaaatttgagctcctagggagcaaaacaatgtgtgtctcctagagagggcatcaactaccacatttgttttcccctttttgtatttgataacatatggaaattgctctaggtactctacccattttgcatgcctcttgtttaacttgctttgccttctaatgtacttaagtgattgatgatcactatgaatgacaaattccttggaaacaaggtaatgttcccaagtttggagggcttctattaaggcataaagctctttat

SEQ ID NO: 103617 - DNA, 393 bp, Glycine max
  unsure (1)..(393): unsure at all n locations
tgctctaaatntacattgatgtttgtatttatgggaggaggttatatgccattcttgctttaagagtagtgtcccactggtaaaattaactctccaaatgtttgccttcgcaagaatggccccgaggaagcttgcctcaaagaggtccangaaggacaaggcggccgaaggaactagttccgctccggagtacgacagtcaccgctttatgagcgctgtacaccagcagcgcttcgaagccatcaagggatggtcgtttctccgggagcgacgcgtccagctcagggacgacgagtatactgattttcangaggaaatanggcgccggcggtgggcaccactggttactcctatggccaagtttgatccagaaatagtccttgagttttatgc

SEQ ID NO: 103618 - DNA, 390 bp, Glycine max
aaggagccagaagtgacagtgatttatacttgtaatttgttgaagttagtgaaacttggtgatttatcgataactagacgtagcctcggtggttgagataaactagtataaatttcttgtgtcttattttctcttctattatttgaactggcctagggtttgaatgtgatcttcgcttttgaaaaactctatttgttttacaaagatatgaaactattgtctgatctgtcttgcaaaaatttgatatctattttcttaagttttacttcatcaaacactatctttgatgtattcaaaaaaggttttgagtttagtaaaatttgtaaatgtatacatacatgactttgatgatgtcaaagaagaatcaaacaaggccgcttcaaaaggata

SEQ ID NO: 103619 - DNA, 233 bp, Glycine max
  unsure (1)..(233): unsure at all n locations
tcgatgatgttgaactggatttcatcaacttcatcaaaggttgaattgctgctgaggcatgaagagggaggaacaacaaattcatggcctgaaggagggaagtggcagtttggaaagttgcttatgagggtgttaagatggagattanggatgtcactttgcagaaggctaaagtttggtggaactaggaatggattttcaggtgctagatagtggactcctctgatctcact

SEQ ID NO: 103620 - DNA, 422 bp, Glycine max
  unsure (1)..(422): unsure at all n locations
ccgagctgcaagctttatttattgtgtaaanatacttatttattttggtctttaagaaaataatgtagttttagtctcttattatagatttaaaattttgggtaatgagagactaaaatcatattattctaggctaatatatttgacagtccttttaaatatgatgaattttaatgtcataatagacaataaaatacttaaaaatgaaatgcatttagagatataattgataaaatgtttaattttaaattttaaaaatactatttgttgattaaaaaacaaaaggtagaaaaaattattgtgaaattcatatgagagcgtaaaaaatatcatgaaacacacaattttataaattctattattatctttaatttcttaactaatactcaaagatacttattagtatgtatctgtattaaaat

SEQ ID NO: 103621 - DNA, 278 bp, Glycine max
  unsure (1)..(278): unsure at all n locations
tttaaaatttaacatggcctgctatcgagccacaatatgcggccctaattatcatgtgtatctaatagggtatctatcatacttataagtgaggcactgattggttcaaagattgctctatttaagatgaggttgatctgttatatcgaattttcttgggacaaaattgcatctcttccgattttaattaaataacctggataaaatatcaattgaggttntaatgctaatgacttttttattttaattctgatattaagctataacaaatgatatgt

SEQ ID NO: 103622 - DNA, 348 bp, Glycine max
ctaaactttatacaacaatgaatctctgataccacttgttagacaagtggccttatatatcttaagaagggggggggggggttgaaacaacaaatcataatctttttctaataaaaaatactattttgattttaacccatatcccaaaaatcctattaaaatgaactcctaaataattatgccaataaatcttactgaatacaatcaataatctactaacaataaatcagttctaatggaacaaagattgcaaagtcatatttatactggttcggccacaccctgttgcctatgcccagtccccaccaacccgcttgagaagttcactatcctgcaaaaagcgcttta

SEQ ID NO: 103623 - DNA, 227 bp, Glycine max
  unsure (1)..(227): unsure at all n locations
agcgagaaaagtgcactaagcccaaaatcactaacgtgcgctaagcagtccatatgtccgctaagcgcacgagcacgaacaaggccatctattgaagcctaaaatcagattttgtgaagggaagttggactgggattcagaggtttgcatgtctanggtttctagagagagaaaggtccaagttccagagagttttgagagagtttgctgtgtgaagatctgcggag

SEQ ID NO: 103624 - DNA, 414 bp, Glycine max
agctcttcagattgttggggtaagcgtgagtgtaactactgttgctcttcacttaaccattttcgagtaactcgcttagcgagataatccgctaagcgagagaggcgcttggctatccgcctcctctcttggcgggccgacatgggcccatttaaaattcaatttttttttaactgcgcttagcacaaagaagcgcgctaagcaaatttgtgcagataagaaaacctacaactctcgctaagccgcactcaaggtcggcttagtgaatatactgcattctgcatacaggggggcatgcgcttatcgagcggttgctagcttagcgccatccaggccgcaaggaatttcacttagcgcaactgggttgcgcttagctcaattaaaccagtaatttgaccgcatggaatatggctt

SEQ ID NO: 103625 - DNA, 318 bp, Glycine max
  unsure (1)..(318): unsure at all n locations
atcaataatctgagacgcagtgatagctaaacatctaaaaattaataacgaaaaaatgaagaaaaaggggaaaaaaggacttacgaaatggagggtcgattgggaactgaggatctaatgaagaataaggagaaagtgaaggtaagagagagaagctgcagaaacaagccgaagatttgggagacaaacgcttctaattgttgcagccacgagaattgctctgggctcttgggccttactgatgggccttcttacgttnttatttgacaatttttttggaacatgctattacacagcctctccaatctctttgacaat

SEQ ID NO: 103626 - DNA, 398 bp, Glycine max
agcttgccactcaactcgcccaggcgatcagggttgcttcctccagaagcaacagccttctggaggaatcttctggagggcccaagtgggcctggttgctatttgcacccccatttttactaagtacaccccctgcctttttttggtaattcttttttcgtaaagttacggaaacttacgaatttcgtaacgatacttgttttctttccgtaatgttacagaaccttgtggattacataatcatcccctttttgacttacggaatgttacggaacctcactaatcgtgcaacgatgcttccatttgattttcggtgtgtcacggaaccttacggattgcgcatcaatttttcttttctttttcggcatgtcccggaatttcacaaattgcctaatgat

SEQ ID NO: 103627 - DNA, 437 bp, Glycine max
  unsure (1)..(437): unsure at all n locations
gacctataaaactaagcttagccttaggtgtccatgtgctgctcccttattttaacagaacaagcacatttccattcacaggtttagcgacatcaacatcatcacttgagccctcactttcaatgtttccattatccagtaatatcatgcctcttttatttggacattgagaagcaatatgaccaactccttgatacctgaaacatttgatatcatgggatctagaagatgaattaatttccattttacctttaggtgcagcaaatgaatttttggacttagcttcatcttttgactntgtcatagattttttgttttgccaatttgacttccatgaataagtggaatcaaatttggaagtactcttagctttcaatggcctctccacttgaatagaattatgcagcaagtcctctatctncacataatgatgcaat

SEQ ID NO: 103628 - DNA, 249 bp, Glycine max
taacaacatcgactcagcggagtacctactgaggcacctgctccaggtgccgaacaggtggtaccaggggaagtcgcaccagtacctgataataagactgactcgtcaacccctgaccctgaaaaggctgccaaagaccgtgctcaacccaagagtctatcaataaatatcttattatatcaccatcgaacgaatgacagcagattccggatgaatgttggtacccacgccgaaagccctaaatgggag

SEQ ID NO: 103629 - DNA, 394 bp, Glycine max
  unsure (1)..(394): unsure at all n locations
gctggngctcacgtaaattatggagggtttattngtttttntcagttataacacgccccagccatttagatttgttggttgttaagtagattagcaatcttacatccacagattatagcacgaagtgtatgtccccgatgaattacatatgatgaactccgtagattttttgttcactttttcattttacaataagacttccatctgagattttaataataattggctggtagctgcggcgttcatggttcgatgctgtatgctgctttaatgctctgttataaacagcaaatttggatttgtaactatatgtctggctaattacttctaaattggaaataagtttgctataaattgggatgactgctgctgatcttgcatgttatggtatttc

SEQ ID NO: 103630 - DNA, 256 bp, Glycine max
cctcctcattatggcgtggcacgacacgtgtctcatattataattcacttctttttctcctgggcccatcacaaagaagcacgcttagcaagtgtgcataggagataacctgcaactctcgctaagccgcactcaaaggtcgggttaagtgaatatactgcattctgcatacaggggggcatgcgcttagcgagcggttgctagctaagccccatccatgccgaaaggaattccacttagcgcaactgggttgcac

SEQ ID NO: 103631 - DNA, 414 bp, Glycine max
  unsure (1)..(414): unsure at all n locations
tgtttantttcctccattttttgacatcgttaaggtattaataaggtatagctagaaccaatataccatctagaagcatccattgttaaatggtacattgcagaagaagctatagagttttgttcaaagtacatggaaaaggaaaaatctattgggtttcctaagtctcgtcataacaaaaaatggggaggtaaagattcatggggttttgaggttgtaaccatgggtcataaggaactgaatcaagcacatttgtatatattgaataacactaaagtggttgtcctgtacataattgctcacaaaatttttgaaggttagtcaacaaaaaatgaccaaaaaataggttttgcaaaagcaaaataagactttaataaactggtttacaaataaaatctttggtgatgacaatta

SEQ ID NO: 103632 - DNA, 373 bp, Glycine max
agcttgtgttgtcaatgacgtgcgaatgtatatatgacggcaactaaacgcgcatctcgggaagcagttaccggcgtacgaatttggatagagcatctgctatctattacgagcgttttgatattttagagcaatccaccggacatccgagcagaaactgtttgggtggtgacttaggctagagctttttatattatcacctagcgtgctgggcttattcatgaccatatctgacacccgagtgaaatagttttgccctctgaatttgcacaacattctagtcttaatcactaattgtaagactgttgcgggactgattgaacatactcacctaaaggcttggcctagagcccgtttccgctcggaaacctgt

SEQ ID NO: 103633 - DNA, 158 bp, Glycine max
acgacataacgtgtgactcagatgtcctattgcgtcctggaacaaatggagacgcgtgggagtggaaacagaatcttttgaggaatacaaacgaccataacttttgactcggatgttcgagtgggtcccgtaatatatctagacgctagccattgaaa

SEQ ID NO: 103634 - DNA, 401 bp, Glycine max
agcttttgtatgtatgccactcgtcgtgggtggtatacattggaggtttagcaggatgctcatgtgcacataccatggatagcacatactggaggcttgatagtatactcttgaatatatgtcacttgccatgggtgacatatactggaggcatagcaatatgcttatgcgatcatgacgtggatggcacatactagaggcttaatagtatgctcttgaatacatgtcactcatcgtgggtgacatatgctagagacataattttgtgctcttgcatatgtgtcactagctgtggatggcacacactggaggtttagtggggtgttcgtgcacacatgtcactgcagtgggtgacatgtactggagtcacagtgatgatacgttcttgaatgtgtgtcact

SEQ ID NO: 103635 - DNA, 421 bp, Glycine max
  unsure (1)..(421): unsure at all n locations
ttggaagtggtaagcaacgcttatgtcgagtttccctctatgcaactacgctcattcgacgtcgctttaatggtggcccgtgtgatgttagggcatggatacgagcccgaaaggggtttgggtcggaatagcgacggtgtggcgagcttggtggagttcaaggagaaccgtanagggttcgggctaggatataagcctacacgcgccgacgtgaggagaagtaccctatgaaagaggggtagaagcatgggccagccgcaaggaccgcaagtgaaagggattcccttatgtcacatcaatgtaagcttcatcagcgtgggctagatgtatgaaggttgggttgccatgattaatgatgaagtccctcaagagcaatcaaactgggtgggccattgcctttcaaagtcgagttgggaaactg

SEQ ID NO: 103636 - DNA, 286 bp, Glycine max
cccggacccaagtgtcgagcttcagtgaagaacacctgcgttgtaacaaggaccaattggaaataaaaacctatagtagagcccacaattgtctgactggttgtctctcccaagaatgccatagattttattggaagagtcgggttatgactgacactttgtggatttttacagacctaggcgacgtcatatatttatatatagatgagtcttaatatcagtggtgcattgtttaaagattataaatacacactcacatgctttcttatgtgttgttaactacacc

SEQ ID NO: 103637 - DNA, 410 bp, Glycine max
  unsure (1)..(410): unsure at all n locations
ngagatgagggaagtgtgaatggtgaaacttcctgcttttattgttgaccacagagtggtacctggagatatgtcgcgggggtcacgagaccttggggacgtcaggtggggtgccattgcccaaaaccaagcttgaccaatcccgacccaacctgggcatagtcggtcagtgagaacctgtgatgtacctaagcaagcgagctcctggcagtcaacagataaaaggaaaacaagaccacaaagcaaggaggcttgtggtggctggccagctgtgaattttgtgtaatatgtggattgtggcctctggtaatcgattaccaaaggtgagtaatcgattacaaggcttaaaattgaggacaggaggctaagatggtctctggtaatcgattaccaaggggtgtaatcgatta

SEQ ID NO: 103638 - DNA, 416 bp, Glycine max
  unsure (1)..(416): unsure at all n locations
gacacaagaaactaagctttaacatattgcttgacagcactcatgctggcattatgtattcagcctcacatgacgataaggccaccacggattgcttctttgaacaccaactaataactgcattttctaactgaaacaaatacccttggggactctntctatcagttttatccccacaccaatcagcatctgaaaagccaatcatctcacaggaattgctactcaagtttgtaggaaatagcaaaccaaaaccaatagtccctttcaagtacctcagtagccttttcactgcattcaaatggccttgctgtggtgctttcaaaaatctactcaccaaaccaactccatatgctacatctggtctggtattgcatatatacctcaaggagccaaccatttgtctgaacacagtctta

SEQ ID NO: 103639 - DNA, 349 bp, Glycine max
  unsure (1)..(349): unsure at all n locations
tttggatcaaaccgccaaagtcacctatttatttaaaagatggtggctgatcaccaaatataaagctgacctactcacaaatcaagaattgaattgaaagcctttataatatgtctaatgatgctagcaatttttcctttgatatacattattatttactctntgtaaaaaatgataggcatgcatgatgagatgctgccctgttaaatttgtcaaatttaattcatgtcctatatatatgtattttatttaagcaaagttgtgtcttggaagcagaanaaaggaaaaggaaaaggaacctgaaagaactggaagaacaagtcattgaanagagagacaggaacatgga

SEQ ID NO: 103640 - DNA, 413 bp, Glycine max
agcttcaattacctatcaaactcaaggaacttgtcttgagatgaataaaaggaaaaaatgagaaaacgttgggtccaaaatgcaagttttccctcactcctactacaattttactttatccacaccacccaaatcccaaaaaccaacataaaacacatcaaaaccttgaaagagaacacatatatgaaacttctaaaagtgtccatggagaaaaacgaaaatggaggatgagagggaaaaaatgaaggtcttttacctttgaaatcaatccaaattcaaacaaagaagctcaacaacaatgtcctttatgctaaaatttcaaggtctcacactctctaatggctctctaatggtgggtgattgtcttggagaggaaaaagagagtgaaatgaaagggtttgtgttgtggttca

SEQ ID NO: 103641 - DNA, 174 bp, Glycine max
  unsure (1)..(174): unsure at all n locations
atgggctttggaacgatttcgaggcctatttttaagacacgatcgcctccctcttgttattgtcactgacagagacctancactgatgaatgcagtgaaagctgtgtttcccgagtctactaatttgttgtgcaggtttcatatcgataagaatgtgaaggcgaaatgcaaatc

SEQ ID NO: 103642 - DNA, 405 bp, Glycine max
agcttgttgtcgatgcggtaaaaagacatttacatagtgccttggagcctcaagaatagttggaaaaactatatgacacttactaactctatggatttttttattgaccatatttttcgtgagggaaacaactctgcagattccttaaactctcgtgcttcttacacaattttttttttggaatagttgtcttgttttaatttagagcttttttgtaaatgataggtttagataaagcttctattgcttgttcccaggatttggtttggcccccaatgtgttttgttctctgatctttttcattaatatatttcttggcctattggtttagctagatggggcaaatttcccaaaagggagcacttttgcaaacttattcccagaatagggcccttttaaaactaa

SEQ ID NO: 103643 - DNA, 251 bp, Glycine max
  unsure (1)..(251): unsure at all n locations
aactatggcaaaccattaaagattgaaggtcaatggtttgtcaatagacatgatccactatagattatagaaaattatggagtcattttgtcaatgtagcaaacccacctagtagcaagaaaaaggcttgttgtattttggcacagttaaaaagctccggaatttttttagcaaaatatactctgttttaagagtaaatganttttaacagtttacagtaatagatgtgccacattctgaacattgatgat

SEQ ID NO: 103644 - DNA, 420 bp, Glycine max
  unsure (1)..(420): unsure at all n locations
agcttttaataacaggtacacaatgttcttgctatttanaaaatttatatgtgaatattagtattttaccataggtattttatggtttgtgattgtgtgaatattattttagaataggacggcaattaaaagatattgttagtctaaggggataatagaactgaaaagtttagctgttttcgtcatcaactctttcttcatgtagtttgttcaatattttagttgatatcctacatttactgatattctttgtttcattattagatccatgaggctgataaacaaatcgataagctttccgtgctacttcaaaagctaaaggtatccattatcttcatcatttgntactttttagcagcaaggtctagtctataaactaagtgtactttttgcaggaagctaatgaggaatccaaagctg

SEQ ID NO: 103645 - DNA, 324 bp, Glycine max
tgcttgaccgttcacttggtgcgtgccttggccaatggaaccatgtccaaaaccaccaagaagtactttggtgtgtaacacctcaaacaactggtttaagttggcaccataagggctgggatcagaaacgaaataagggactaatacaattgcctccttggagaccaagaaatctagaaagatggagagcattttggattgagggattaattgataagttggttcaaattaacttctaaggccatgcgtgtgtctactcgtaatcatctgtacgttttcaattaatagagggttattgctttgtgatactcttgcctacaatgg

SEQ ID NO: 103646 - DNA, 392 bp, Glycine max
agcttccacatcatgcaagcaaaacaacattcaaacagcacaagctatcacagccaagcaaaagcagagcaaaggcagaaaactctgctcaaacaccaaccaaaatcacaacttttctcacttaaagaccacagtaacaattccttcgatccaattcgttaaccgttggatcgactccaaaattttactggaagtcaatagtgcataagcctacattgtgaccgttgggatctactagcaaacatcaagaactcattctgtactactctttccacagccaaccacacacaagcattttctgcaccaagctaaaatcctgctgcacctattttgacagcaaaattctgcataagtgcagatttcgaaaatcacacttcccctcatccaatctt

SEQ ID NO: 103647 - DNA, 402 bp, Glycine max
  unsure (1)..(402): unsure at all n locations
aaactccgctgtcgaacctacccttcgcgggaggcacgcgatactccgggatgcgtgtccacgaaagaatacacccgagtcccccaacgttatttgagaaaacgttaaaaaaaccaaaaagacgccatctacaacttttagtgaaaggttcgggagttgtatttacgcacggggaaggtattagcaccccacacgtccgtcacaagggacggcaacctttaatcgaatgtgcaaacatgactnttgattttacgttcccttttatgtccttataacttttataccctttttatatttttctctttttggggtcgacaagggtgtttccctttgctcctacgtattcctcaattgcgatgaggaaatcagacctacgtagttctttcttatcaagtgagtctc

SEQ ID NO: 103648 - DNA, 402 bp, Glycine max
  unsure (1)..(402): unsure at all n locations
gagcttttatatgttcccacatgaacggtattcnngcagatgaatcacactttaccaacttctccctcttcctcgtgtatttgctagttcagaccatgcgaaccttaaatacacccttaaaagtcttaagtctatcttccttgtgataatttgaaatgacatactttaaaaatctaaatatgggtcaatccaaagcagaaaatccttcataacatgaatgcagcacaaacaagtattgataagggtaatgaatcaatcgaattgattaaatatctaaaaccacaatgaatagaaattgagaagggaaataggctatactgatttttgtgtcacccaccacattgtgaagataatgtgtctctaaaattgacactgggagtgacttcttgcagaaaaatcata

SEQ ID NO: 103649 - DNA, 413 bp, Glycine max
  unsure (1)..(413): unsure at all n locations
ngactntgtgagttgattttagcctgagtttcactttatttattagtcaattcgattaaagaagagaaatcccaaagagaaacgtccgattgattttttgctttattttagtaaaagatattttttgattattatattattattttacctctttttggtttccaacgtggttatggcatgaccaaacggtcggatttcattttaaaagaaattaacggatattacaattcaaatgatcggtggaaatttattttattttttgattaggcgagaaaatgaattaagtaaatgactaaagcacgtcaaaaggggatacagaaggtaaatgaaaatggaaataaaagtacgcgaaacaaatggggaccaccaatggtacatagaatgaattgaaaagttcggtttcaggaacttac

SEQ ID NO: 103650 - DNA, 399 bp, Glycine max
agcttttataatgggtaaaaggctcacattcactttcttttacatcatattcaaacttgtccaaataaataataaaggcatctcgactcaaagaaagtcatataagtctcatacaattaatatagaacctatatcctaatgtcacatcctatcagagcggggggttcccgtgtcctctagcatgaggttcttcatagtcatccacctattcatctgctcccccgaacacaaggtcaagatcatcacaggatccaaacacaacaacacacagggagtgagttatcacattcctagcttatagagaaacaagacaattaaatatacatattatataaatgagataccacttgcttaaacatagctcacgtaacttcaccacttcgtcattcaaaattcact

SEQ ID NO: 103651 - DNA, 411 bp, Glycine max
  unsure (1)..(411): unsure at all n locations
actggtctccttagtggtgtttaactggtcatacttatttgtactgngngngngntttcttccttagttgggataacagtgagaatctgctaactctcactgattttgtcgnttttattacatgttgcttttatatgtggataaggtcacttttcccccaatgttttcactcttaataacaaaaatttaaagcaatactttgaaggacctttggtttggttcattcttttccctaaattttgtttgcatgttaaattaactctcgatggttcaatttcagggcatccatggatattgttctacaccgagcgcacattaaagatgttgccctttaaatcaaaattgaaagctccaaatgcagctgcttctgcacctgaatctgggttangaggaaacaagatagatgatgat

SEQ ID NO: 103652 - DNA, 344 bp, Glycine max
  unsure (1)..(344): unsure at all n locations
agctttntccggaaacattccggaagtttatttatccggaaacttttcggaagaagcttcttccggaagaagaattactgattccgaaagtactcagaaactatttccggaagaagtcatccggaatttttccggaagaagcttcttccggaagatatccttttactttcggaagaaaggtcttccggaagttagtttttttttaaaaaatgatttattttgtaataatttacttttaatgaataaactaaattataaaataattaatattattatacataaataattaaataattagtgaacgtaattatgactaatatttataatctgttttttacgcgcat

SEQ ID NO: 103653 - DNA, 445 bp, Glycine max
agaaactaagctgagaactctccttgggaatacatcttctctctttcattttctattccctttttccatcccttctctttcatcagattctaaaccccttttcaagtgtaaggccccttatagctatgagaggctaaacccttaattagggcctgataggcctaaaaagccaaaagatgtattgtatacttcatatctatcaatgcaaacatgcggtttctttcctattatcatttcttacttttaatttcatgtatcattcatcattgcatcatctttgggggttaggtgctcgacagagggtaatccttaataaaaatacaaggaaggttttacatacatcggttctaggaattagttgctcgacagagggtaatctctaataaaactaaaaggaaggggtatcttaataaaatcatcgctagacatagaatgattgcattat

SEQ ID NO: 103654 - DNA, 378 bp, Glycine max
ctgtataatatcgctcggatatagtttccatatactcggttatgcacacttggggctcaaataatccttggtttgaaaaacttaacctctgccaaaacatatggattgtttcaagtagtatgacacccagatcatatttagataacttacatgcacatggaagaccgtgactaggttttattatacatccacaaaaaaagagttcttgttaacataatgtacacactctgactcaacaacaatctgatttaaagcataccttgatatcatgccaagtaatctcttgtataagggaactttaaaaacatatgcaactacatgtgtacttgtctcaaaaaatatcttaatgtcacggtgttgcagtgtgatcatgttgtt

SEQ ID NO: 103655 - DNA, 367 bp, Glycine max
tcgactggatctgcgccgatatccgaagatcaatctgtttctctagccatgacgaagggaggatactacttattgaggtacaacgtgcttgcgtagaaccttacgtggaactgcagtgtgtgaaatcacgaatacacgccataaactggttctatgagatactgggcatatatatctgcccgttcttgattggactatcttcccctctgatatgcgtcatacataggggtctctgacacgtagtattattgattgttggcgattacaactgcctatgaggtagagtgagatgctaactagagggcgagcatcgtatgacactcaactgcatctaccggattatgggaactgaggatccttaagtgtg

SEQ ID NO: 103656 - DNA, 385 bp, Glycine max
  unsure (1)..(385): unsure at all n locations
gcttttcccctattttgctataaattggggaggagtgaanggaagaagggttcaaccttcttggcacttcttattctattgaaattgctgaggaaaattatttctgtgaagaaaattcaagccgaggcgcttcccgtacgtttccgtgagtaattacgcaaagattctcgaccgttcttcaacattcatcgttcgttcttcattttcttcagtcttcaacaggtaagtacctcaaaccgagcttttcaattcattctatgtacccgtggtggcccacatttcgtttcatgtatctctattctcattttcattcactttctatacccctttttgacgtgcttcaaacatttatattaagtatttctcgcccaaactaaaaataaaa

SEQ ID NO: 103657 - DNA, 426 bp, Glycine max
gacacttacaaactcagcttttagaaagacgagatttgtgcttgccagttctgttagaggcatttgaggagctgaggagaaggcttaccacctctcccatcatgcagccaccggattgggagcttccatttgagctcatgtgtgatattcattaaataaattcatatcgtatttgctttgctcccatattactatttttactgaccatgcaaccttggggtacatgttgaagaagcctaatgctaaactgagattcatcaggtggacgcttcttcttcaggagtattgatattgagatcagagataggagtggtgcagaaaatatggttgttgatcatttgtgtaggattaagggacatatcgattcccttcctataaggataacttccttgatgagcatttgatgcagttgcactcatcacatgt

SEQ ID NO: 103658 - DNA, 379 bp, Glycine max
acataaactctttaaatcgcttggatatagtttccatctcttcggttatgctcacttggggctcaaataatccttggtctaaaaaacttaacctctgccaaaacatatggattgtctcaagtagtatgacaccaagaacatatttagatagctcacatgcacatggaagaccgtgactaggtctcatcacacatccacaagagaagagtttttgtcaacataatgtacacactcaaactcagcaacaatctgatttaaagcataccttgatatcatgccaagtaatctcttgtataaggtaactttaaaaacatatgcaactacatgtgtacttgtctcaaaagatatcttaatttcagggtgttgcagtgtgatcatg

SEQ ID NO: 103659 - DNA, 309 bp, Glycine max
tattacacatacaaaacatgctgggctattcatgatcaccaaagagtgattgaagtatggaaaaacaaactctgagttcatgaagtggaatatgaagccaaacggatgtgacctatctgtcgtcaaccccttccaattcctatagattatgaagggaaaatccatggcatttggtggagactcacctggcatatatcacatgctgtccatgatttgccttttatcaatggaaagtctctcttctgcctaattacttagatgaaaatgagatgccttcatgggtataaagtctcgagtgaaattgttaac

SEQ ID NO: 103660 - DNA, 372 bp, Glycine max
tgttttattcagaaaattaaaggctatctcttttatcttagtgaaagtgattctcctaaattcttggatgaattaagaacaccctggctgtatcaaaggactttcacaacctttgtgtgttgccctcgctggaaagagagagactttccttcctttcatcttcacccttgctctttcaaaccacaattgcataaaatccacctctgcccaaaattatctcgtggccataactcccgttttacgcactcaaattaagtgattcttgagcctaaattgaatttcaaaacgagaaatttcacctcgttttggaatcacctcatttggagccctgtagcttcagatattgccatttctatatttctgtccagccac

SEQ ID NO: 103661 - DNA, 264 bp, Glycine max
cgatatttttcagccgacattgcacaattctttttagaaaagctcgctggtcgataaaggtctttttacggcagagtaagtttcttggtttggtgttgcatcaaaaagatacaatgtacttccgcttaggttttcgtgcgaattcaaacgacattttgtttccgccacgaaaacattatccctcctctgcgaaaaaaatatttgcttaacgggttcatgcatatttcattcaaccactgaatataatactccatagccgacaac

SEQ ID NO: 103662 - DNA, 394 bp, Glycine max
gaaattcgtattatataagaataaaacttctaataaatgaaaaatgatttttacatagtctagaaacctatatatggcttcctaaagatatttgcttcaaaaaggagcactacaattgtggttagaagtgacgctgaagccttgaaccattataaattgactatgagcctcttgatttaccatgatcgtggtaaatttaccatggctattgttggatcttgacgctgtttggaaagactcttatcactttattgtgatcatgctaattaccacgaccatgatcaatgtaccacgatagtaatcaagttatgtaaagttcttaaatcttcataaatttgtataatatcttactctttcactcaattgagcggttatactcttggaataaaaaact

SEQ ID NO: 103663 - DNA, 368 bp, Glycine max
  unsure (1)..(368): unsure at all n locations
ctttagcataanggctcaaccattttggtaccccaacttttatggtcaaggttgatcaaattatatatcacttatctggagttagaatattttttcatggcttaattttatttggagttagatcaaaaaaaaaataatggttgaatatatgttattaaaatcaatttatatatcacttatctggagttagataattttttcatggcttaattttatctttttgcgtcattcattatttattctatttaattttggcctcctaataaaaaaatctttaatttgatcgcttaaatccaaatcgattcagtttgatctttttggtccaaattcacctgacattgtctattaatagtgggatgagattgaat

SEQ ID NO: 103664 - DNA, 417 bp, Glycine max
  unsure (1)..(417): unsure at all n locations
agcctgcnagctngtctcagcgtttatgcgagacatagtccaacatgttagctattatcgccaagtacgaagaagaattaggtctagccacggcccacgagcatagaatcgcggatgagtatgctcaagtatatgaagaaaaaaacgctaaaagaagggtgatcgactctttacaccaaaaggcaaccatgtggatggatcggtttgctcttaccttgaacgggagtcaagaacttccccgattgttagccaaggccaaggcgatggcagacacctactccacccccgaagagattcatgggcttctcagctattgtcagcatatgatagacttaatggcccacataattagaaatcgttaggaaacttgtatggtctcttagaccttgactagatatgaactccttttaaaatgag

SEQ ID NO: 103665 - DNA, 442 bp, Glycine max
  unsure (1)..(442): unsure at all n locations
ctaagctntaagtctactactaatactggcattgccatgagagttacaattgtttattcatggntatggcattgaagaattggtcacttcaacactcaagctttgaagatactatattcgaagaatataatgaaaagtttggcatatttgaaataaaataatgaagcttgtgaaggatgtcttcttaagaagcaaaacatattaccgttttcaactgataaagcatggaaagctaagaactttgtggagttaatccacattgacattttgcaaccaataaggacatcgtcactcaacaacaataggtacttcatccttttcattgatgacttttctagaatgacatgggtttactttcttaaagaaaaatcacaagtctttagaatattcaagaagtttaaagcctttgtcgagaaacaaagtgggaagcatataaaagtgc

SEQ ID NO: 103666 - DNA, 349 bp, Glycine max
  unsure (1)..(349): unsure at all n locations
agcttactttgtaattngtgattcaatatgatgtatgctagtttatatatagagaagtagttatttatattaataatttatgtaaatagtattgtagagtgttatagtatgattccaaaaattattaagtgttggagtttgagaatattatggttaaatttgatgaacatgtgtatgttgtaccttacgaatatcattaggaatgttatgagatggttgatgtgatgttatgagatgttaaagtgtggacatgatatttgattgtgaataagtggatgtgtttaacacttgatgttacattaattatattttgagctatgaattatacaataacctcaccagtgtttat

SEQ ID NO: 103667 - DNA, 415 bp, Glycine max
  unsure (1)..(415): unsure at all n locations
ggaatagattaaatagaaagttanactcagaaatattttttaactttagaacttttcttcttacttttacataatgatgcttgatgcacatatgaaatgatagagactaagatgcaacacaaaatacaaaaatcaatacaaatgcaactcaagagaatttgacattgtaaagataaaactttttcaagctttaaggctaagtcttcatgttgctccccctatctctaacaaacctcacttagtaggataatattttgtcgtgattattgtatttaatcacaaatcaccatgtattataagtttgtttgatttttacaataactagtgttgtctatgactcanaatctattttttaatcttatgaatgtttggtctaatgaggatgtttgttgtgatcagacttangacaatctaa

SEQ ID NO: 103668 - DNA, 395 bp, Glycine max
  unsure (1)..(395): unsure at all n locations
gctgagtcgttttatggaggaacattggttcaagagatggttgaaggtttggtgagtgggtgacttcaactggtgcccatatggtttgttgatttgtgtttgtagagagccaacacataataggcgggaaccaacgctcgcaggttttagtttcaaagcggagaacatgaaatcaaaccagatattatgttcccaaggttcttgtgtttgtatcaatcctatctattcatttttctgctgttaattaaaaaattattacagtgtctgagattntctgttttatttttggttaaattattagtttggttatctgatttattatttagatttaatttcatcatttattttttctatacaatttgtcattatgtgattntcaattattacaaaatgta

SEQ ID NO: 103669 - DNA, 427 bp, Glycine max
  unsure (1)..(427): unsure at all n locations
aaactaagcttgtgtagccagggttttgtggacgatgttatatatatatatatatatanacananatatatatataaggggtggttacctaccaaaacttatttttaagaatatttttttctaacatttaataaaaatattactataatattttttaattacatttaaaaaaatattatccaattataaataaatattattcatatatttttatgatattttatcaaaaaatatatatagttcatgttgttaaaacttaaaataataataaaaaattaacatgaattatatataacatttaataaatgttacagaaaaaattaacaatatgtgttcataattttataatattttttttaaaagttattaaaaaaatttaataatatgtttaataagggttagataaaaaaaaaatatttttaaagat

SEQ ID NO: 103670 - DNA, 424 bp, Glycine max
  unsure (1)..(424): unsure at all n locations
tcactgaatggcttgtgttattaaagatgtttcctgatctaaacacattgctgaaaaatcactaccaggcgaagaatattttatgtcatgtgggaatggagtaccanaagatgcatgcatgccctaatgattgcatattgtacagaaatcagtttgcagaaatgcatcaatgccccatatgtggggtatcacgatacaaagtccaggataacgaattcggtgatgatgcaagcaaaaacaatagtcattcagcaaagttgtgctggtatcttccaataataccaaggtttaggtgattgtttgctaatggatatgatgcaaaaaaccttacatggcttgcagatggcagaaaaagtgatggattgctccgacagttcatggcttggtctttcttccgacagaatgaatccttttggtaacttaa

SEQ ID NO: 103671 - DNA, 385 bp, Glycine max
agcttcaatgcattttttttcttttgtgtttcaaataaccaaattcatatttttgagttgacatttatatattttaaaataaaaaatgactatatatcaagattaaagagagaggttagaacaaaaaatcctgattgaacaaaagtgaacaagtgtagatatattgtattagcagcgactattggtgaagacaactcgttgactccggtggcgattttctttgaaaatcttgttctactttttggaatgaatataaggggttgctatttgataaaaatttcaaaaatgcaaaaacaatttctaactcttagaatgagagagagagagagagagagtctgagagatgatgccactgttaggctaagagagggaaaaagtttttctt

SEQ ID NO: 103672 - DNA, 423 bp, Glycine max
  unsure (1)..(423): unsure at all n locations
nttcttcaccccagtgttctcgcccaagcaattctaatctccctcaagctacgggattcatgaaaaccagcagccctaggtccttatttgcgcctttttgcttctattttgttgcgttttggttcatccctacaagtaagtgccatttccctttgatcttgggcttgccattgctgtattttagtgccttggttgcctaattgttgcaaaattcgtgaggcaatatgtgcttggattcatacttgtttgtttgaattaagacgttgtangggatggccatatgcctattaagaatgaatggacatgtcacattgcccncattccttatttgttcatgtctaaacatgcgcccaccaagtgttcggtgaaatgcctcaatggcatttgcgcatgattntgtgaaattctgcttgtggaacgaat

SEQ ID NO: 103673 - DNA, 427 bp, Glycine max
  unsure (1)..(427): unsure at all n locations
ggccacccagctcgcccaggcgagcaaagttgctttctccanaagcaacagccttctggaggaatcttctgcagggcccaattgggcttggttgctatttgcacccccatttttactaaatacaccccctgcctttttttggtgattcttttttcgtaaagttacggaaacttacgaatttcgtaacgatacttgttttctttccgtaatgttacggtaccttgcggattacataatcatccctttttttgacttacggaatgttacggaacctcactatttgtgcaacgatgcttccttttgatttccggtgtgtcacggaaccttacggattgtgcatcaatattttcttttgatttccggcacgtcacggaatttcacaaatggcctaatgatgggtgccaagcacctcataatgaccaaacac

SEQ ID NO: 103674 - DNA, 295 bp, Glycine max
cacgtgggcctggttgctatttgcacccccatttttactaaatacaccccctgccttttttggtgattcttttttaagtaagttacggaaacttacgaatttcgtaacgatacttgttttctttccgtaatgttacggaaccttgtggattacataatcatccccttttttgacttacggaatgttacagaacctcactaattgtgcaacgatgcttccatttgatttccggtgtgacacggaaccttacggattgtgcatcaatattttcttttgttttccggcatgtcccgga

SEQ ID NO: 103675 - DNA, 411 bp, Glycine max
ggttgaaattgccatggttggatgagttagacatactctttctgtgtttagggttttgtgatgatgtttgtgatgtttatatgctgaaattacttatgggaaactgttagagatgaaaggtagagtttacctaaggttagaaagtgagaatgggatgttatgagtggaaaaagagtgaagctttgagaagtggaaggttaagtctgaattctgtggtaaatggaggttaaagtgagttaatcctagcttgaaatgtcatttaggacttatgagaaagcttggactgtgctagagagaaaaacaaatgaccaatgtgaacaaagagccatttctagggcaaatttgggtgttgaagagtcaaattttgattcggtgagattttaggtgtaaatccagtttgaacaagtctaa

SEQ ID NO: 103676 - DNA, 391 bp, Glycine max
  unsure (1)..(391): unsure at all n locations
agctttgcttntgtgtactctatgaatatgcgttcttgggggaaaattttcgagaggaaataagaaaacaatacctgcttaactgaaaacaaatacatgtatagaaggagaagacagaacactttatcctttaaataaaaacagacaattgatagagcctgcagaataactacccactaacaacatgtgcctaagaatcatccatgaacgcaaatagagataacaaagaacctcaaaccttctaactgacaccttatgactaggataacactaccaaataagaataacatattcggaatgtggacatgtttcaacccgtaagcatgttcttaacactcctccttgcaaactccaattttttcccttagaaactcagacctactgactggga

SEQ ID NO: 103677 - DNA, 379 bp, Glycine max
  unsure (1)..(379): unsure at all n locations
ntaagatagatagcgagagactatatatcatttgaattatttacaggggtagagacaatacatctatttcatttgaagcggaatcagtgagaaaaggcctccaaggcagaaccatattaccttgtctacctcttggttccataccatcagacatgtgttatagtccatcccacctcaatgattcgggtagccaacgagtgcttacaaattggtgcacttgccaatccatcaacacttncactccatgcttcatatggtgtcatattccgtaccacttgtgttgggcatctattcaatacgtacaaagctgtattaagagcctcggacaagaaatatattggtattcctttctcataaagcatggacctagacatctaca

SEQ ID NO: 103678 - DNA, 250 bp, Glycine max
attcatctcgagcgcattataactcgggactcaaccgaattaaactaaaagttattgttgtggaatggctcaacttggtattgaattaagcaatcatatatactggatcatcagactggagaaaactatggatttgaattgctaagcttggttccattcacctatcatgtttcgggcgaatccacattcagtttaagttccgcgttgaattgcgagagctcacatttatttgagttcgaatatacggact

SEQ ID NO: 103679 - DNA, 385 bp, Glycine max
ttggtttctgtaaacaaactatgttcaccttatgctttaagttgagctttcgaataacaacccacttcaccccctacccaagcctctgcaggtatatgaaagaattatcattaatacctttatcatctcccttctctgctgtcatgtctaccaaacatcccataagctgctgaaaatcccccccacaggtcaaccccatttgatttagaagctcacattgtctctcgataatttcttctttttctttcactgataaagcagaatttgtgtctgtcaataactcctgttgggcttttttctttttgcaccactttcatctggaatagacctgcagaccattggatatcaactggtgttgcgggtgggggctattgtgttcctttaa

SEQ ID NO: 103680 - DNA, 413 bp, Glycine max
  unsure (1)..(413): unsure at all n locations
gcttgatggtgtcgagaagaaatcatatgtttgtcatcaacaaaaagggggagaatgtgaatgtatgtatacatgattttgatgatgtccaaaaaagaatcaaataaggctcattttgcttcaagattaatacaagattgtttcaacaaacaaagccttgattcaagatttcttcaagatcaagccttgcctcaaaatgtagagatttcaagtcatccaaggcacatgtaatcgattaccaatacatgcaatcgattaccaaggcacatgaaagtgtgtaatcgattacacatcatatgtaatcgattaccagagactctgaatggtgggaattcanattttaaatgaagagtcacaactggtcaagaaaaacaactgtgtaatcgattacactaattntgtaatcgattact

SEQ ID NO: 103681 - DNA, 371 bp, Glycine max
tcactcattgctcaatccaactccttgcggcttggattttcaaccctgattactgccttgtgcaaggcccgaggagtcacctcaaattctcttaccttcgagtcactcagcctagccattaatttggcctatattaaaaaaaattgttggaacctggatgacccttttgtcacttttccaaggacccaaaaatccagggctagaaaatctgaggacccatctctctctgctccccctacttctgctcttccttcaccaccagcagctccaattctttcaggtccctccacttggagctcagagcctttcatgtttatgctacagagcctgcaccagggccagctcctgattatgcatagcttgcaagatgt

SEQ ID NO: 103682 - DNA, 417 bp, Glycine max
  unsure (1)..(417): unsure at all n locations
gcttgcttctacattctatttttgatgaatttatgaaacttcttcacaaagagtgagaagtcttcttcatcatcagattcttcttcttcttcttcttcttcttcttgcattgaggaggaggctttgagtgctatgcttcttttccttttgtcggnctcttcattttggttgagacgttgaagttccattttatgttcctgcagtttgccaaaaagagtggcaagagacatagaagaaagatctttactttcagaaatggcagttaccttgggctgccattccctacttaagcatctcaaaactttattaattaaatcttcattaggaaaggtttttcctaaggaggcaaggtgattgactatgtgtgtgaatcttttctgcatgctttggatgttctcattagntgtcatcctaaat

SEQ ID NO: 103683 - DNA, 442 bp, Glycine max
  unsure (1)..(442): unsure at all n locations
ctaagcttggtgccaaaccaccgaagttccgatattatagaaggtaccggttgtttatatctacttcatattccccctgccaagaattccaacttcttcgacaattttatttgaattccaaataattactggagactgggnggccatatatatatatatatatatatatatcaaaagacgttgggatatgccaatgagaaaatcagacaacaatttttgggagtgtgaaacatggctgttgtagtgcatggtggaagggaattaaggctgagtgtgattgacagacacaaataaagcgactcttcattttatgactttttccatgaaattaggtactattatgtccgactctctaaaattattagggctcctttaaaaaggtggcaagttttttttctttttntttcttttcaaatgctcgtataatatttaaaataaaatg

SEQ ID NO: 103684 - DNA, 196 bp, Glycine max
agctttaacaaccatatgatgaaacacattgctatcttgtactggtttggttgtgtttggcactccttaaattatgacaaacgatgtagttccatgtagagcttgtaggccttggaccttcttcattaatggagtccttttcttctaaaagatcaatggccgcggaatggagaatgaggaaaggtcattttatatg

SEQ ID NO: 103685 - DNA, 428 bp, Glycine max
  unsure (1)..(428): unsure at all n locations
ngcctgcattgagatgttagcaaggaccatcatccataacccaagagtaaagacaagaacaaccctcggtcatgttcctttaaacgctctacaactttagacatatgaatttcattaatgtatgactaaagtcatcatatctgtgaaatttataagtcatagaaataaaatgagtctgaagagaactataggatgagaacagaaacctgcaatgctcatgtgtatcacctaatacatatccagtgtctggagaacatccaattaatatcacctaaattataagacttgacatagcacatatgtgatgtatgataaaaaaacaaaatcaaagtaagcaattaatgtcacaaatgcttacagctagacatatcataagagatccgncataatgaacagngtcgtctgccacctagaagtacatatatcac

SEQ ID NO: 103686 - DNA, 400 bp, Glycine max
gcttataaaagtccttctgattcaatttatgcattcctaactgtatgccatgagatgaagtgcaaaggttggacctcatgttagttgttaattattgattagtttaaacacttgagcttgagtgaaacagtgactatgaggcactggttaggcatccttccatgaaatctgtctgctgattagtttcattcagttgtgttgcttaataaaaatgctcttatctctcaaaatctgcatgtcttgtgaaaaaccattgattgagtcattgtatagatttcttatcatatgattaatgttttggaagcaaacaccctttgtaaataatcactgcattatttttgcaattgaggacaagtgagttgttctttatttgcttgaggacaaggaaaattgtaaattt

SEQ ID NO: 103687 - DNA, 336 bp, Glycine max
  unsure (1)..(336): unsure at all n locations
taatctttggatgaatctctggattttaaaataaaatgtataaatgaggacatgatgaaggtcatgaatgtgcatataccagccttttgaccaaaaagcttaccttgaatgataattgtatcctttgcaccctttatgaactaaatgatattgttaaaaatttgaaccctaaacttaaataattatctccagataccttgtttagaatctaggaaagcatatggttcaaggaaaatttaccccaaatttgggggagtggaactaattggaatgcaaagaaagagataaagcatcaacacacacaacacgtaagttgtttgttaacaaaanaaagaa

SEQ ID NO: 103688 - DNA, 395 bp, Glycine max
  unsure (1)..(395): unsure at all n locations
agctngtagatcaaatgtccaatttcaatgataaaaaatccaatcctttgtccattgtaagattttgataaattcaaacctaaagtctaacccaatagataagtttaaggtttttttttttcaccataattttggtatgaaatatccatcaagatttattgataactaatttttattagaaaatctaactaattacctttaattggatctccttttttaacaatattttttccatctaaaaaaaattataatttgtgaccttatttagggaaactgattccagttatacttggacacgactagagctatagggttgacctaatagtcaaaagagaagagaaggaataagaagttatatagttgaattcttcctgctaataaaaactaacaaatga

SEQ ID NO: 103689 - DNA, 386 bp, Glycine max
  unsure (1)..(386): unsure at all n locations
gggcagtttcttgcacgccaagcagncccaccctgatgaatttcaatgcctcttcctctggaaaattcatattaagcatgggatccaccaattntaatagatcattaaattgatacgctgcccacgcctgaaattgaaaaatcatgttcatgctcaaacttctaacacacaaacacacgtttcttcaatttgaccaaatcacaacagacaaaaaagcaattntaattattccccgtttgggttaaaccctttatctcgttttctaattgattttaattgtatccccagcaagtgaggctgaatctactagctagatagctacattaattataatgttggacttcaatttcataccttctccactattgaaacgtcaatgtcttgat

SEQ ID NO: 103690 - DNA, 401 bp, Glycine max
agcttctacttatgtggcagggcaggtctttcttcactttcttgtctccaacgcgagctttgaccactgttcttccttcccacgatgcttcttttcatgtccgcctgagtgggcttatagcctaaaccatacttcccacgatttccttgggtatttatcaagctagttatgccgccgttgtctttgcctaaacccatcccgggttcataaccgttccccaacataactcgggccatcattaccgctgcatcggacagacaaggctgcccaaagagggagtccacggaggaaatgctgaccacctcaaaagactggaaagcagtttctaacgattcttctgcggcttccacataaggcatggaggatgggcagcttaccaagatgtctttctcgcctgacac

SEQ ID NO: 103691 - DNA, 429 bp, Glycine max
  unsure (1)..(429): unsure at all n locations
tgcttgtggagcttctatggaggctggatctttgagcttcaatganggcctttaatggggattttccaccatggagatgcagcggaagacagaggacaagaggtgagaggaggcgccctccactaaggaataagcccatggagaaggagcttcaccaccaagatgagccttggataagaagctnggagaggatgcttcaatggaggaaaagaaagagggagagaaagagagatgggggagcacgatattgaaggaagaaaaagggagagaagttgaactttgagttgtgtctcacaagactctcattcatcaaagttacaataagtgttatacatgcttctatttatagactaggtagcttccttaagaagctttcttgagaaaaattccttgagaagcttctttgagaaaacttcctttagaagatag

SEQ ID NO: 103692 - DNA, 403 bp, Glycine max
agcttttgttcttctggtaatcgattactgtctcgggttatcgattaccaaagaggaaacattaaaatcatttttttaaaagaaaagtaacttggccaaatctttgtgctttcaaatctaacttaagaatctatctagtcaatcttacttgaatatcttggattgcttgatgtttacttgaattatccatgaagatgaatctttcttgaaatctaaatctccttgagttggtcttggatatgcttgactattggcatcatcaaaaacttcttgaagccttgcttctacaatctccccctttttgatgatgacaaaacctggaatcaagaaagcatatacaatttctatcgttcgttcattcattccaagctccccgtttcttttggagattatgcctaatttt

SEQ ID NO: 103693 - DNA, 349 bp, Glycine max
  unsure (1)..(349): unsure at all n locations
tacttcgggcgtgtattatagagcaacaaggtagctggatggattgtttgccattgattgagtttacttacaacaatagttaccaagccagtattggtatggctccttttgaagctttatatggacgaaagtgcaaaactcctatttgttggtatgatgatggagaagcagtacttcttggacctgaaatgctacaacagattaatgaacaagtgaggttgattcgagagaagataaaagcatctcaggataggcagaagagctactatgatagaaggaggaagccactagattttcatgaaggagaacatgtgtttntgaaggtttctcccgtaaccggagtcgaaag

SEQ ID NO: 103694 - DNA, 370 bp, Glycine max
  unsure (1)..(370): unsure at all n locations
agctntgatgatatggtcttcaccgactaatggatcaaagtgggtctaaaaagagacaaatccgatcatcatgctttgataaatgccaaaaaaaactagggcaaatgaagagggtgagaatgaaggagaagcccatgttgtgactgccattcctatacagccaagtttcccaccaacccaacaatgtcattactcagccaataaccaaccttctccttacccactgcccagttatccacaaaggccatccctaaaacaaccacaaagtctgtttaccgcacttccaatgacgaacatcacctttagcacaatccaaaaacaccaaccaagaaatgaattttgcagcgagaaagcctgtagaattcacccc

SEQ ID NO: 103695 - DNA, 345 bp, Glycine max
ggagagacgctcgcaccatgcttcgaacttattggccaagtcggagtgtctctcggaaagggctgctatggcttcttcaaggcggtccgtggttgtgggccgaatgccgtgctccgccatagtaacaagtcggaccagtgttaggtacgggggaggggaagattcgtgagagagaagatgatgtttgccttgattcgaggtcaaggttcctcttgagggaactagcttttattgaaaggatatatctgccttcctcataccactttcaggcttttatacaagctacaatgactacgacgaacatctaacggccctaactaccaagatggagtagttacaactaac

SEQ ID NO: 103696 - DNA, 384 bp, Glycine max
  unsure (1)..(384): unsure at all n locations
atcaaccttgaaataatatgattcatctaagcctgatcttcctctctttcccttcaaaccacatcaatcttactattgatcttctggcaaacaaaacacaactntgtgaaatatatgattggtgtgatttctaaaaaaagtttaataaacatttaattacaattatattttactaattttataaaatatgtatatatatgtatatatatttaaaggatctactttccaaacacacatttacacattgttcaaatacttttttcaaaaagaaaactagcctttatatacaaatcccacctgaaaacccatttaatttgtgaatacaaacatttattaaatatccaccctagttaggtgattttttttaaactacaattcatttca

SEQ ID NO: 103697 - DNA, 395 bp, Glycine max
  unsure (1)..(395): unsure at all n locations
tcaataagagaaatcacatcaaattctagtgaattgtgtgctctttatttgaagactatattttctttttggaagcttggactaaaattagggttggtatatgaactcgaactcacggactagtccgtgatttgcgtgaatatgggttaaagagtataatttatctaatagtaaaatatttttggtttagtatgacaaatccacggactttgtagacttaatatgcgaaatccatggataacctgagtaaaaaaaatacttttaactttaatcactctacacttatatttgatgtgttagaattnttatattttataattacgtatatattagtcttgaaaatgtttgatgttttatctagagttaaatgtttaatatttacttaaattcttata

SEQ ID NO: 103698 - DNA, 416 bp, Glycine max
  unsure (1)..(416): unsure at all n locations
tgcataactaactaatcatcattatcatatgcgtggcatggaaatgatatggagcatncccttattcccgagccacttactaaacaaatatctcaacatacatcatgtcctgcttttgcgaagcgctttgagccaaacatcaactttttggccttaaccctgacccagaatggaaatttcaaccttaccctcggaagagagaatacaaggatcttccaaaagaagcttcttttaccttgggttataaatgtgcgtcttatgaaggataatgaaagaaaagaatattatcatccaatctgagattgaagaaaagcacgtgatactctaaataaagaaggaaagataaagagttctttgacctacaatgtctaacaatggcatattgcccaagcaaaaaaaagataagtacaatgact

SEQ ID NO: 103699 - DNA, 349 bp, Glycine max
  unsure (1)..(349): unsure at all n locations
gcagcttataagcgcggtctggggacgaaagttattggtctttatatactaagatgatgttccgagtacattggatttggtacgaccatgccctcctgattntcagctgggaaattggggagtggaggagaccccccgcctttatgcaacaaacctaaatgtaacctttacagtttaaaagccttatagttgggcctaggctttaaagattttcttttgtaaggcgtgtggctttgtttttaatttaaataaaaggaaattcttatttgtgctacagtctcccatttcaacatttcatggtactcttttttttgaaagggatccttgacagtccccaagggcttaaacc

SEQ ID NO: 103700 - DNA, 287 bp, Glycine max
gatcccagcaccgagctgcagctgttggatgattacctagttccttgttatagcaatcgataaaaaatccaggaaaaagccgatgattttttttatttaaagatattttttattattatattattattttgccctcttttggttttaaacgtggttacgacgtgaaagatcagtcggattttattctaaccgaaattaaaagatgtttccactccagatgatagtggaagattattttatcttttatttaggcaagaaaatgacttatgtgaatgacttaagcacgt

SEQ ID NO: 103701 - DNA, 275 bp, Glycine max
cttaatttctattgtacatcttttatgtggcattatgtaacaaaagatgcaaaaaaaagtttactaaacgcttatatcagagatgggcattgggttgttatatattgcttgtctggcacccccaaatcctttttgaatttctatgtccgcagatagaagtagtgtatataggtctaggttgttgtagtaaaatcaataatatacttggcgtagcctcaatgaactaaaaaatgacaattgaaatatagaaaacatgatcttaggcaaccagtgat

SEQ ID NO: 103702 - DNA, 388 bp, Glycine max
  unsure (1)..(388): unsure at all n locations
gcttattgagattataataatagaacaatgactttngaagaatcaattcatgcttcctttgatgagtctaatgctattcctccaagaaaggatattctaaataatattgtagaatctttagaacaaatgcacattcatggacaagattctaaaggaaaaggagaaggaagcaatgaagatcctccagtagaagtcaaagcaaataatgatcttcccaagaatgggaagcttcaagagatcatcccctcgacaacattattatggatatctcacaaggggtaacaactagacactctctcatagatttatgcaataacatggcttttgatctatgattgaacctaaaatttaaatgaagccataatagatgaaaattgataatactatg

SEQ ID NO: 103703 - DNA, 443 bp, Glycine max
  unsure (1)..(443): unsure at all n locations
agctnntttcttgantattcctttnatttattgtagatggacattctagtattttgccttgcaagtagctatgatttcatctgccaataaaaaaacttggaaaatattgtattcattgtgattgcctaaactttttcttttgaaattgtttggtaattagttgttgccatggctaagttggagttcatgatcctgatttttccttctgttcagtgctatatgaagctggaaagtatagtagagtgcgactattggatttgttttgtcaagctctcagtcaacatttatacctttcaagggtttctgattgtgatgtgggggatgaaaaagatcgtgatttgtcctcaacaaatgatcccagacaacaatattccatcatgaaaagcggtggtattattggcacaatagtatgcaaagtgaggtaactaggaatttgatgctta

SEQ ID NO: 103704 - DNA, 465 bp, Glycine max
agcttttatggatccaggtatatcttaatactctttgataatctgacttaatgtgatgtggtactcatttgatatattataagggttattgaaaaataaccaacaagtggtatcagagccaccattactgttagaatattgtgatctaaagctttgcttgatatgtattatatctggattcttttaggtatacaagcccttagtttattttggtgagaactatgttgatcaataaaaatgtaaaacccctatatctatgtgttatggccataaagtctttctcctctatagaattaataaaaggcctctgcatttgatttatggcgctcgacaatttttacgtgtgtcacattagctggcatattattctatacgggataaaagtctatgtatctggtgttggcatttagtattgcgacacaatgtcataaatatatgtatatatatatatatatctatatatct

SEQ ID NO: 103705 - DNA, 460 bp, Glycine max
  unsure (1)..(460): unsure at all n locations
agcttcacttgcttggggatgcaatacacttcttcttcatttgcatcagctatcatgaacgccgnaccttctgtaacctctgtgctagcagtaattctcaggtgacattcaattttctttttaaagcagaatatatgatactttaattactaactaaatcccaagagacaatagcaagtaatattcccaacatcacatgcatggcttttcattttgtaaaaggttgggggtaccttgtacccttctaaaatgatttcatattggcatgtatgcatgctttttcttttacgtctaaacatcacatcctttatctttcagctctatttttattaatttttaattatcttgacactttttctcaggcaagcgctacaaaaagaaactaaaattagtaaggaaataatttatatgtacattaaaaatcacaaaatctaatttntttgtgatcctgctactaatg

SEQ ID NO: 103706 - DNA, 416 bp, Glycine max
  unsure (1)..(416): unsure at all n locations
agcttttatacaggctcatatcgggggatgctccttctgcatggataatgcttagtggatggtgcctcctctcacatcttgtacattgtggtacgctgcatcgtcatggtggaagatcgccattataggaccttattgatactcacatagccaagcttcatactagccccacaaggaagcttccattagtggggcaggcactttacacctctcctgcttggtcgacacatntggacaagcctatatcacaacataaacttattggccgtaccatatgtgtcttgtttttaacataacacattaagtgagccgaaacttaagctatttaactttgttatatgaatacgaagctgtggttccgggaaaaccagctccgatatccgatccggatgtcgaggatccactttatctgatga

SEQ ID NO: 103707 - DNA, 393 bp, Glycine max
actcaatccggcgtccgagtcataacgttttgtcgtctgaatttgataggagcttctgttttcaatttcagcgtatcgatatattatgtgactcaatcggacatccgagtaaaaaggtattggcgttcgaatttgatattggattccgttttcaatttcgagcatgtcatatattacaagacataatcggagtaccgagtaattaagtatttgtgtttgcaataggtacgaactttcgctttcaatttgagtgtctcgatgtattacgggaatcaatcggacatccgagagagacattattgatgtgcgcatctagctcgagcttccgtttcaatctcgagcgtttgatattttcgggactcaattggcatccgaggaaatgttatgccgttg

SEQ ID NO: 103708 - DNA, 334 bp, Glycine max
  unsure (1)..(334): unsure at all n locations
caaactcaagaattgaaaaattggcagaatttgatctttattgcaacattcatgtgattttagaatgggtgcctaagtaactgataatttaccacaccttgaacgcaaaaaagccatcatgcggcaattatccataagtatataagtcttggttctgcactgggaagaacatatgttggtgaaataacataaacctaattccatcagaaacaggattagaaatatcttacgattccaagacctccccatccttattgatgatgcncctctgtccagagatctccaatgcatctacaattatttgtgcatcctttttggttcttgaccggcttta

SEQ ID NO: 103709 - DNA, 424 bp, Glycine max
  unsure (1)..(424): unsure at all n locations
tagctttgaccaccgctcttccttcccgcgatgcttctcttcatatccgcctgagtgggcttatagcctaaaccatacttcccacaatntgctttggcatttatcangctagttatgccgccgttgtctttgcctaaacccattccgggttcgtaactgttccccaacataactcggccatcattactgctgcatcggacaggcaagnttgcccagggaaggagtccacggaggaaatgcttaccacctcaaaagactggaaagcggtttctaatgactcctctgcgacctccacataaggcatagaggatgggcagctcaccaagatgtctttctcgcctgacacgatgaccaaatgccctctcactacgaatttcaacttttggtggagtgtagagggcacaactcccactgagtggataca

SEQ ID NO: 103710 - DNA, 278 bp, Glycine max
  unsure (1)..(278): unsure at all n locations
agttttcaaaaaatattctcaacagtcacatctttttatttgattcttaaatggccatcaaaggcttatatatatgtgacttgagaccacgaattgctaagagtntttcagaacaaaaaggtcttatcctcttaaaaagcaaaatacgtttatcctcttacaaattccttggccanaacactgtgattcaataaggaataatttgagtgctcaaattgttcaatctatctctttttagagagattccttcttctcttctcttttattctgaaaaggga

SEQ ID NO: 103711 - DNA, 477 bp, Glycine max
  unsure (1)..(477): unsure at all n locations
agctgtgcagatntggtcttcgccagngaaaggtataatgtgtttccgaanagaggcaaatttgatcatcctactaggacgagtgagacaactggggcaaataaagagggtgaggatgatggagaaacccatgctgtgactgccatttctgtacggccaaaatttccaccaacccaacaatatctttactcagccaataacanaccacctccttacccaccacccagttttcacaaaggccattcctaaatcaaccacaaagcctgtctaccgcacttccaatgacgaagaccacctttagcacaaaccaaaaaaaaacaccaaccaagaaatgatatttgcagcgaaaagcctgtaggattcaccccaaattccggtgtcatatgctaactngctcccatatctacttgataacgcaatggtagccataacccctgctaggttccctcacacccccatttttctgaggatatgact

SEQ ID NO: 103712 - DNA, 239 bp, Glycine max
  unsure (1)..(239): unsure at all n locations
acctcggatctatactgggatcagtcacacccctagtgcctacgtccagtccccaagcaacccgcttgagagttccactatcttgtaaaatcttntacaaagactaaacacacaaagacnatcgcgtcgtcgagtcataatgcttttacaacaagagacccccggtctcttaatcccttagagaattagaaagaagagaagaatgaatctctcttgacagagatagattttacaatctc

SEQ ID NO: 103713 - DNA, 275 bp, Glycine max
  unsure (1)..(275): unsure at all n locations
gttggaccagctcttctagggcccgcatgcggaaggcgtaacaccctgaacatttactatacctataaattgatcgtttaaattgctacttgattgccgttatattgacttatatgcttggacttaaatcgaatcgaggcatcatcttgaatgactcactgtgtgaatatacttgatgcggatgttgcattctgtgtggtctgttcaacaccgatgacagggnnngaattctatatttgccaatccctatctcagtacaatcgtgatcttgtatt

SEQ ID NO: 103714 - DNA, 448 bp, Glycine max
  unsure (1)..(448): unsure at all n locations
agctttgtgagagaacaaatatgtttatcatattgctccgatttctacaacggngacaatcatgaagtctataaagcaatgagcaagcacagcttcacataatgaaaaaactcttaagggcttcctagactatcaattatagaaaaccaacaggatcttgaaatttatgattctcacaaacaatcaataaagaataatagatgatgatgtgtacctttctcataggaacttctctctagtgcactttgaattccttgaaaatgagagaaataggatttcacttcctctggcctttcttttctgtctctctccgatcatgatggctatggcggagaaaagagcactttctggtcacgaaggggaccttatctcacgttaatgggtatatagcccctattataaccactactctcattaaagagcgagtaacctataaacttctcctatt

SEQ ID NO: 103715 - DNA, 455 bp, Glycine max
  unsure (1)..(455): unsure at all n locations
gggatctctaagtcacctgcggcatgcagcttgccttgattagacattattgatacatgatntaggactngtaggattcaatttgggccaaaatgggtgaggacaagtgtgatttcgaaaatctgcactttatgcagaattttgctgtcaaatatgtgcagcagaattttggctttgtgcagaaaatgttgtgtatttgctggttgtggaaagagtagtacagattgggttctggacgttntatagagatcccaacggtcacagtgtagacttatgtgttagagacttccagtagaaatttcgagtcgatccaacggttaacgaattggaacgaggagaatgttactggggttttaagtgagaaaagctgtgatattggtttgtgttgggcagaggtttctgccctccgcctcgtttccttggtttgatagttcatgatggttgggatgttgaat

SEQ ID NO: 103716 - DNA, 478 bp, Glycine max
  unsure (1)..(478): unsure at all n locations
cttagagnganctgcggcatgcaagcttcacgctgttcaattgcttctaatggcattatattatggccaagggctgcgcggngggtggcagaggagcataaaccacagagtctggcgacaggtgcacacttttgattcatggccagttgggttaccaggttaactaaggcatctagtttacctgtaagcttcttagtctcacctgatgaagatgaattcggggctacttcatgcactctctaatggcaatagcatcatttctgacactgaattgctgtgagttggaagccatcttctcaatgaaatttcttggcttcaacaggggtcatgtctccgagggctccaacattggcagcatctatcatacttctctccatattactgaggccttcttaaaaatactggagagaaagctgctctgagatctggtgggagggcaactggcacataatcttctaaatctctcccagattcatat

SEQ ID NO: 103717 - DNA, 309 bp, Glycine max
atgagtcggaccagggaagttgctctattaacctatcacatttttcttcctcttcatgtctgttaaaaagaacattattctcttaacgtaaggaatacgtatggacaactgataagatattcacacaaagtcgtctcttgcaagtacaattggagttaaatcttcctcggaatgataggagattatgaatgataataatcagacgtagcgcatctagacatatgctgcaaactttcaagtcctaaacttaagtatgtgtgaactttaactgccagacaaacacgattctgagtacgggcaagggatata

SEQ ID NO: 103718 - DNA, 413 bp, Glycine max
  unsure (1)..(413): unsure at all n locations
actagatgtcttggtaacttgtgaacccttctggccatgaatcaaanatctgcacctgtcaccagactctgtggtttatgctcctctgccgaccaccacacagacctttgcccttctgtgcaacaatctgaagcaattgaacaacctgaagcttatgttgcaaacatctacaatagacctcttcaacctcagcagcaaaatcaaccacaacagacaattatgacctctccagcaacaggtacaatcccgggtggaggaatcatcccaaccttagatggtcgaatccttcacaacagcagcaacaacaaaaacagccttattttcagaatgctgctggcccaagcaaaccatacgttcctccaccaatccagcagcaacaacaacaacaacaatagccccggaaacatcaaaca

SEQ ID NO: 103719 - DNA, 420 bp, Glycine max
  unsure (1)..(420): unsure at all n locations
catgcacagcttgttattcatttatccaaacaacttcacttatctcacatgctttcttatacaacctcttcaatcttccatgtgtaccttcaaccctttaaagcatgttaatgtaatgtcaacagaagattattcttattaaaaacaaaatgtgaaacaagtaggcaattacatgaatgtacctattagttgttgtgtttccaatatgcataacccaatcagtccatgcttctacaacttctccttatgaggcatcaacaatgttttgtaaacatactaaaaaaatactaaaaactatgaacatagtgtcataccctaatttcttacggagaccattattngttggcatgcggccttcatttgactacctcacaatgtttaacacccactcgtgaggaatccgtaaagtccgagatgttt

SEQ ID NO: 103720 - DNA, 493 bp, Glycine max
  unsure (1)..(493): unsure at all n locations
atactccgagtcacctgaggcatgcaagctnggttcccaacgctttgtttagactatctcaatatctaatggcanatccaggatctctatcagacactatgctagatggcacagactaaacttgagcacattgtggacacacattctatctnggtagcaccagggtggatgctcaggtttctcctattttcttcctctaagatcatcttcttaagctcgggcacattggggacacacattctatcttgaaatcgcagaatccattcgatcccacatngaaactactatctctccctgacattatggcttctaactgagttttcagaaaaggattagacttttggccctctctgatctctcctaacaactaactagtaatcttcaaagctcccagtctcacactgttaggggtaatctcacacgcaaggctaaggtctcaaaactgttctatgagatccagctctctaaccatcatggtagatatatgtaggga

SEQ ID NO: 103721 - DNA, 454 bp, Glycine max
  unsure (1)..(454): unsure at all n locations
agcttctcaaggaagttntcttaagaaagcttctcaggaagctacctagtctataaatagaagcatgtgtaacacttgntgtaactttgatgaatgagagtcttgtgagacacaactcanagttcaaattctctccctttttcttccttcaatttcgtgctccccccctctctctttctctccctctttctttttctccattgaagcatcctctccaagcttcttatctaggctcatcttggtggtgaagctccttcttccatggcttattccctagtggatggcgccacctcttacctcttctcctttgtcttccgctgcatctccatggtggaaaatcaccattaaaggacctcattgaagctcaaagatccagcctccatagaagctccacaagcaagctgtcatcagtcaatgccaagaatattcctttccctagtcacctcttcacttg

SEQ ID NO: 103722 - DNA, 150 bp, Glycine max
tatcacatgcgagtgaagaacgctgttgacaagaacgtactcacgcgccagttcatcgaatgggacttggtgttgaagaaagactcccaagctcctactgacaacaaaggtaaatgagccctgaacttccaatggccttttgttgtaaaa

SEQ ID NO: 103723 - DNA, 418 bp, Glycine max
  unsure (1)..(418): unsure at all n locations
agcttgctctanattacattgttgtntgtatttatgggaggaggttatatgnccattttgctttaagagtaatgtcccactggtaaaactaactttccaaatatttgccttcgaggaagcttgcctcaaagaggtccaggaaggacaaggcggccgaaggaactagttccgccccggagtacgacagtcaccgctttaggagcattgtgcaccagcacgcttcgaagccatcaagggatggtcgtttctccgggagcgacgcgtccagctcanggacgacgagtatactgatttccaggaggaaatatggcaccggcggtgggcaccactggttactcccatggccaagtttgatccagaaatagtccttgagttttatgccaatgcttggccaacagaggagggtgtgcgtgacatg

SEQ ID NO: 103724 - DNA, 474 bp, Glycine max
  unsure (1)..(474): unsure at all n locations
agctggctctaatatctagagggaacatcanatatggaagcagtagatgagtggctaaaggaacgggatcaaattcttactagcttagcaaggaaattgacgaaggcacaacgaatgaaagagtttgccgataaacaacgtcgtgatgtgaattttgaagtaagagactgggtgttagttaatttacgaccccaccagcagacaaccgccaccgaaagaaatactctaagctcgcaaaaatacgtacccttttgagttatccaacgaataggggcaatttcgtacaagctggaattgccgccaacttcaaagattcatcccgtgtttcattgctccttattaaaaccattccagtccaccatgataaacacttctctggaattacgagctntatccgaagacaaccaaccnctcattaagcctctcacaatcctcgacacaaaatgggaacagacaacttcgggaagacattta

SEQ ID NO: 103725 - DNA, 473 bp, Glycine max
  unsure (1)..(473): unsure at all n locations
agctnttcagctttccatagtatgttaccatgttcatctttgttttgtcgacactctgccagntctgcctttatcntgtgaatccttggtccattcactactaagaaccgctccttaatgtcttcccataggtcttttatgttctcttgatacgaaatggtagaacacaagcttggttctattgtgttcagtacccatgagaccagcatggattgcaccgtcaccaatcttcaaatcaagagaaccttcctttggctgcgggaattttccttccacgaacccccatttgcatcttgcacgaagagaagtacgcaaagctctagaacactcaccataattttcccctttcagctgaaccttagtaatcaggtttcctggattatcactagagttcagatcatatggtgaagggatctttntcaccannatcaatttcttctctgcttcagtcttttccgacatctcccgcatgg

SEQ ID NO: 103726 - DNA, 338 bp, Glycine max
  unsure (1)..(338): unsure at all n locations
attctctncatgacacacctctcttactgacaagctctacgcttgttatctttctactccatgatgatgtcaacacaatgaaaacccactctttaagtcctctttcgtataacgctggattagatctttcatccaattattaaattcctccatgtcatgccaacgattaatcggttcttctgaggatggaattaaaaacaataagccattgatgactactaaaccaaaatatcgacagccaggaaaggacagcagcccaagaaaacttttcagtctctgatatgcttaagttttgtctcaagtattcttttatagatgatcaccanacatgatttgta

SEQ ID NO: 103727 - DNA, 469 bp, Glycine max
  unsure (1)..(469): unsure at all n locations
agtcacctgcggcatgcaagcttcggattcaattcgagcgnctcgacattttacgggactctatcanacatccgagnaaaaagttattgtcgtttgaatatggtcagagtttcgataatcaatttcgagcgtctcgatatattacgggactcaatcagacatccgagtaaattgttattgtcgctggaatttgctcacagcttccgtcttcaattttgagcgtttagacatattttcgtactacacagacattcgagtaaaacgttatttgtcgttgaatctggtcagagctttcggattcaatttcgagcgtctcgatatattacgagactgaatcagacatccgagtaaaagttattgtcgtttaatttgcacagaacttcggtattcattttgagcacttcatatattacggactcaatcagcattcgagtaacaattattgtcgttgaatttgtcaaagcttcat

SEQ ID NO: 103728 - DNA, 439 bp, Glycine max
cagatgtacgattaagtcccgtaatataacgagacgcttgatattgaaaacaaaagctctgagcaaattctaacgacaaaaacgttttcctcggatgtctgattcagtcccgtaatatatcgagccgctcgtaattgaaaacgaaagctccgagaaaattaaaatgacaataactttttactcggatgtcgattgtgtcccgtagtatatcgtgaagctcgacatttgaaacagaagctctgagcaaattcaaacgacaataactttttactccgatgtccgactgtgtcccgtagtatatcgagactctcgtaattgaaaacagaagctcgtagcaaattcaaatgacaataactctttactcagatgtccgactatgtcccgtagtgtattcatacgctcgtaattgaaaacagaagctcgtagcacattcaaacga

SEQ ID NO: 103729 - DNA, 307 bp, Glycine max
ctgcacttaccttgggctattctgtcatatggaaagacacttttcggtcggaaggcgtgctacatggacttcaaattaggttgggggcttcttctctttaattcggggatggggttggggagatatgagggtatctgctaggtctactgggagatatttggaaactttgtgaagctgtgaatgcctttggagagtaacatacccatctgtttaggttttggagatgtggatgtattgcgattgtgatggaattgtaaacaaggaaactactaggtaaaggaatggagttatgaaaaatgaacttaat

SEQ ID NO: 103730 - DNA, 141 bp, Glycine max
  unsure (1)..(141): unsure at all n locations
ctatatcatacacattctccatgctgtgattgtttattanggaatagntcatttcgatcattgnttaccactgtcatcccttctttctttggaacgactngaataggactaacccatgagctgtctgaaattggatagatg

SEQ ID NO: 103731 - DNA, 475 bp, Glycine max
  unsure (1)..(475): unsure at all n locations
agctntatatagacttcagagctntaatccattgagagatcccaactaactggtgtccaatagttntgacacttgacacgaggcaattactgtgtagagtgaaaaagtgggaaccacanacattttctgcatcatatcttcaaagaagtacaatctaccaatgtgtctaatgcttagagctgactcttagcataagacaagacaaaaggaattatgaatgttaagacaaacaatttaaatctctcattttgtgtgatatggcacgagtttcttactaaacctatggatgttactttctgatgatggttttgagtactcgaggatcaagtgactgctctattgcttttgtactgtgagctaagtgctaagtcactcttcttctcagaactggacgctgatggagtatcgtccaatgactgatacattggctattgttcagagcctttatgttcatgcttttctgcatgtatctcat

SEQ ID NO: 103732 - DNA, 473 bp, Glycine max
  unsure (1)..(473): unsure at all n locations
agcttctatagaccgccactcatgacacatgttctcangcttccctcctttgtgagttattgttgcaatggcatgtcgacatggcatccctacatcaaagttgtaaaatcagcacacatgtaggttaggaatgaaaaaaaaaactacaaagaacacaacctgttagtttccatactccacaagtgcatgtccattcaacaaaattgacctcaaccttatcccccacatgtggacctcatatctcaggcccatgttatcaccacaccaaatgggagtccattgattagcaaaatgaatttcttctttctagtcttttatattggacataatggtccaggctttccagaaagtttaaccttgcgggcagccatggttctcatgatataacttctaanttcttcaagcattgtgataataggctcgcatctatactgcagaagaattctggaattgaatacctcacaagtgttgtt

SEQ ID NO: 103733 - DNA, 467 bp, Glycine max
  unsure (1)..(467): unsure at all n locations
gcaagctnggactgtgctagagagataaacaaatgatcaaagtgaataaagagccatttctagggcaaaatcgggtgttgaagagtcaaatattgattcggtggaatttcaggtgtaaattcagtttgagcaagtttagtttgaggttatggacttgtgagaggtgagagtttgcttcaagcttacctcattctcaatttcacttttcaaacctagacaaccattgaattgaggggtgttggacacctanattctgtgttgctgtgctgtaaagcttgattttgggttagacatgattgatacatgatttgcgacttgtaggaattgatttgggcaagattggatgagaggatgtgtgattntcgaaatctgcacttatgcagaattttgctgtcaaaataggtgcagcaggattttggctttgtgcagaanaatgcttgtgtgtggttggctgtggaaagtctagt

SEQ ID NO: 103734 - DNA, 475 bp, Glycine max
  unsure (1)..(475): unsure at all n locations
agctggatgtaacctttagaataagatatttgtttcaaatacttatgataagtcacgtgactgataacactacgaaggtaaacactataattagacattatgtaatcacaaaaaagagacacaacataactcaatactacgagacgtcaaagatctctttctctaaactctctctaacttctctctctggttctctccttttctctcaacctacttcacatgcacaagccaaatcacactctgtgccttacatcataacaatgacattgtttgtgcgaaacgttgattctctagtatgaaaggatcaatagtttgtggatctttgttatgatgagcatgggaaacaganaagctttagtagcagtaacacactcttcacctgtgacaaaaaccacgacctctccaaggatggaggagaacatagcgttcanaaaactggtcgcagatcaatgaacaaaaaaggatgttgaacaaa

SEQ ID NO: 103735 - DNA, 447 bp, Glycine max
  unsure (1)..(447): unsure at all n locations
agcttcctcggggccatatcctgcgaaggctatacattggaaagntagttttaccagtgggacactactcttaaaacaaaaatgacatacaacctcctcccataaatacaaacatcaatgtaaatttagagcaagcttatgcgcatatttccctacgaacgttcactngcacaagacatcctattaactaagaaaaatgcacccatatacaatcaagggagttcattacctagattatttacatgtactttcaaggtgtannttgtatttacatcacacacgcctccttggctgaaattacatacatgcatactcaaagctattcgtggtaccaaaaatgcacatgcgctcatcttgggatttctaatacctatacatatacaaacttcatgatgaatcttgactacctacgcaataaggtgctacatttcatgcttttttnttttt

SEQ ID NO: 103736 - DNA, 470 bp, Glycine max
  unsure (1)..(470): unsure at all n locations
agctntggaccttgctnttcaaggccaagcactgttcgatcgagtggcccggngactagaagatctttctcgggacaaccacgaccagttgattggcgatgagagatggcaagagttccacatatgtcattgggatcagggcgaagatctgtgcctaccttggcgaaaagttccttgtcgtgtttgcgccaaagtgagcgttgttggccaagtgaggctgatcggagctggagtccagagagctcctccctgtgggggtgtgggcgcccttggttgggtgagtgtcgtatcggaagagacctcggtgcgagacgaaaaactcgagtgatgttgcgcatattggtgagtaccgcggggggtttgcgaagaccaagtccgcgaagctggaaggcatgtagcccactaatttctcatagtaaaatacaggcgaggtatgcaccatcatagtaaccattttcctctcgaccatg

SEQ ID NO: 103737 - DNA, 459 bp, Glycine max
  unsure (1)..(459): unsure at all n locations
agcttaccctattctgtgaacacgaaaatcaatcacttttagagattattaaggctagaaaagtagaattatcatacactcacaagctcttgattgatgggatgatcatctgggtggaccccggtacaccttaggttcactgaagagaatgaaagaacaaaagggtaagtaaggcgaaactcaaactcaaaattaaaacagtgattacaaaacagatgcgtttttgagattacatgcaagaagggtagatgtgactttggcgaggatgaagagggaatgagcccgttgaagagggggcatttgggagagggtttgagggtcggagagagacaaaaactcgttaaagtgcgttcggagtntgtgaaggttggagagagtggtgttgactgaatccataaccggntcgggaactgcaccgctctcactttctttcaccagtttcaaattcagagggtggag

SEQ ID NO: 103738 - DNA, 458 bp, Glycine max
  unsure (1)..(458): unsure at all n locations
agctntccctctttgaataaatacccctcagctctaatagaatccatctgggcccttttcccacaactctcgtaaatgggagagaaatgttcatctaaagcatacaagtccctaatattatcaaatacctaaaattgagctcctagggagcaaaacaatgtgtgtctcctagagagggcatcaactaccacattngttttcccctttttgtatttataacatatggaaattgctctaggtactctacccactttgcatgcctcttgtttaacttgctttgccttctaatgtacttaagtgattgatgatcactatgaatgancaaatccttggaaacaaggtaatggttcccaagttggagggcttctattaaggcataaagctctttatcataggtggnggtagtgagggtggcactatngaagttttcactaaaataagcaatagggtgcccacct

SEQ ID NO: 103739 - DNA, 463 bp, Glycine max
ctaagctctattctaaatattatttctcagagtcaagatcttcatccttctgatgtagactctaatgcaacttcattctaatgttggatgctctcttggtatcccttgatatgtcttctattaaggcccttattgtcttgcacttttccaagttcaagtacttagaaggaagcactcttcattatgtagataggcttcaaaggatcgtctaaggttttactcttgacaatagttctgagacaacatttatgagtagtgttttgagcacctcaaagtgtacacacatatctgcttcttaagaatatttagcattgaaacactttagtatagtgttagtcatcacataatcccctcattcttacaagttgcattgctaatgatttgcataattaaaatcagggatgtggattcaacaaaaattactcttgtatgctcagaacttggccaagtccaaatgagccta

SEQ ID NO: 103740 - DNA, 475 bp, Glycine max
  unsure (1)..(475): unsure at all n locations
catgcaagcttgctcggggccattcctacaganggcaatatatttgtaatgttattttacaagaaatataaccatcattacgaacaagggccaaacaacacttctcatggcacgagtgtcaacatgcactctataaaaaaatcatattggggtcgtgctattttatgacacatacgtatntgcacacataaaaattttgtgtgagacattttacaacacctatccatgttcatgatttttgacaaacacttttcaatgctacatcctatatatatacacaacatttttggaaggcttcttttgttacctactcacaaatacacatattttgaaaaacacttttacgctacccatccaacactttgtaaggcacttcatgctatatatattcatattatgcaaggcattttattgaacattttgcaggcattccatgctattatatattacatataacatactgttgaaggatttt

SEQ ID NO: 103741 - DNA, 432 bp, Glycine max
  unsure (1)..(432): unsure at all n locations
agctntctaagctctaatcttgctatgaagatgtactcaaagaacagaacttgaaaatatatgggtgcaattaaccatgtagttggagagagaactcagcaaaatggtgaattaaaaacactgtatgggagacaatgatacactgccaaacaactattacatggcaggaattatgcacaaccagttaattagaaacagatatatatatatatatatataatccccacaggagagagagagagagagagtntaactctgtggatctgaaaatctaatttcattcccactgagattctattacaaatctaactttatactagattaagaaaacttgcagagcaaacttctaatagttagctgccagctgtcacttgacagctggattactaacttccacactctaaatcgagtacagcactcacatacagatga

SEQ ID NO: 103742 - DNA, 488 bp, Glycine max
  unsure (1)..(488): unsure at all n locations
agtcacctgaggcatgcaagcttctagccaaatggacttaccttgaattaattcctttgatagccctttngagccttgnttccctttccttggtttgaagctcactacaagccttaagtgaaaaaccatgatatcaccatatccttaaggaattttggagctttggaattgtttngggaataagtgtgggggggttttgtttcattggacaacattgttttgtggctatgcttcatgatgtaatttggccatacttgatgtacatttgatatttggtaaatgttggacatgctgaatgaaatgttgtttctcaaaggctatagaataaaaaaaaaatattcgaaaaaagaaaaagataagcaataaagttgagtgaataagatcttaaatggcacaagactgatgaaactcttggttctactcttcatgctaaattttatctctaaatcttattattttcttattntgttcttaatatgcacttattc

SEQ ID NO: 103743 - DNA, 499 bp, Glycine max
gaacctgagagcatgccagcttggagccaacattctgactcaccatattatttgaccctttgtgataatgccaatccttaccctcggaagcaaaataagaatagaggggaaactttctatcaaagaaaaagagaaggaaaaagtccaatgaaaggcaaaaagaaatgaatgataatttcccaatcaaagagtgggagaaagcaaaaaaggataagaaggaaaattccccattctcagagtgggagaaacgcaaagaaaaaaaaggaaaattcccattctaagaatgggagaaagtcaataaggaagaagaagaaggaaagaaagctcctgatcattgatcgaaagaaaccataagatatgtgcagagaggtctttggaccagacaatatctgaaccgtacagaattgtcaccaaatgaacgaaaaaagaatgatagggaaccacgacctcaaatagtcttctctctttgataccaaccaaaataccgtgcgctagcgac

SEQ ID NO: 103744 - DNA, 454 bp, Glycine max
  unsure (1)..(454): unsure at all n locations
agctttctttcttgatagctgtctttagtacttgaggatactcttaaggcaaattaggtgaagaagaaagaaagacgcgttacttgaagagaagaggttntttaagttacggttcttcgcctattttattagtgttatataagcaccacatcaataaaattgtttcttagtgttatataagcaccacatcaataacttcattcccatttaacttgatggaaacatttagaagtttcctccttgattctccctaggtttaactagtttctaacattgattctgacataaaaataacaagtagtgctttttactaaaataagacaacaaacaaaatataattggattaaacaggcaaaccatgaatcttcaactattaatttcaaattctgcagtatacatgaatcgaattagtacaaatacagtttcattttcctcattttgaatagatagcatg

SEQ ID NO: 103745 - DNA, 464 bp, Glycine max
  unsure (1)..(464): unsure at all n locations
agctntaattacgggtctctgtcagttctacttgttacctgtcacctncagcaagggcatcaagcccnctactaatcgagctttcatcaagaagtactgcgtctccaggcaagcgcagggcgaaacaccacagcagcctggggatggccggcaacgggcaatatacgcaccgccaccacctctagagttcacctctgctcatccacaaataggtttgagattgcctacaccacatggccgaccaataggcgaccaagtccaaagccaaaggtaagcaaagtactaggtccatgaccgacaagtcataaggcgttcagctcaagacgttaaagaagcgctactatgaggcaacctagtaacttttaaatttctgcttggctattgatcaccttttgtttctcaagtcatattgggacacacctagttgctcatgatcctaagaatttaaataaaacgagcacaag

SEQ ID NO: 103746 - DNA, 390 bp, Glycine max
gcgcgcactaatagtggtatttcattttttcaaataacgtgcataatatataaaacaaacactatacacaattgtcatatgtagtgattcttcagaactcatactaaggagtctatagtcatgttatatgatagctgaaatggttacatatttaaattatatatcaaatggtatgaattctttatattccttaacatgcttaaacagacttcaaaaacaagttgatacagatatactatattgaaaatagtaggcatgacaacattaattgcatgtgcatatgcacgcagtcactataaaataaaataaaagaatcattcttctaatgaatttggccaaactttcatatatgaatttagccctatagtctaacatatcataatgacaata

SEQ ID NO: 103747 - DNA, 474 bp, Glycine max
agcttgcttggctgatgtagccgagacaatcttggcaaagttttgaggatccacacactggtgaatgaggaagagggccttacaatccattttcttggattctccaaacattctttttttgagcttcccctgcatccttctctagttcctgaagtcctatcataacagtctcaaggacatcctgcatttcgaagatacctttcatttgaatgcaccatgcacgtagttcttcctatccaggattggtagatgcgctgagggctcgttcccattcatctctgcaacactaaagcttcgaggatccagcactgggaccaaacaagactctcccatgattgttgaaaccaaaagctcttgataccactgataggcccgatgcttacagcaccctcaagctagaaaccaaaactgagtcttgaatgatgaagacaaatgaggaagatagtgaacaaggaaactaaattatgtaaatga

SEQ ID NO: 103748 - DNA, 445 bp, Glycine max
  unsure (1)..(445): unsure at all n locations
agctggcttgaggggcttatatggaggctggttctttgatcttcaatgagggcctttaatggtgattctccaccatggagatgcagcggaagacaaatgagaagaggtgagaggaggcgccatccactatggaataagccatagaagaaggagcttcaccaccaagatgagccttggataagaagcttggagaggatgcttcaatggaggacaagaaagaggaggggggagcacgaaattgaatgaatataagagggagagaagtggaacttngaagagtgtctcataagactttcattcatcaaagatacaacaagtggtgcacatgcttctatatatagactaggtaacttccttgagaagcatcttgagatacttccttgagaagcttcttgaataaattcttgagaagtagagcttactaccacaccccttcatactagct

SEQ ID NO: 103749 - DNA, 414 bp, Glycine max
agctttgatgcatctattggagatgttaatgtatcaacgagatgatgcgctccatgagagggtggatcaaacggagaatatagatcacaatgaataatataggaggaaaagagggaatgatggtgttcctagacaaaaccgaattgatggtattaaactcaacattcctccatttaaaggaaagaatgatccggaggcctacttggagtggggatgaatatacagcatgttttctcatgcaacaactatgaggaggaccagaaggtgaagcttgccgccacggagtttttcgactatgctcttgtgtggcggaacaagctacaaaaggagagagcaagatatgaagagccaatggttgatacatggacggagattgaaaagatcatgaggaagcggtatgtgccggctagttac

SEQ ID NO: 103750 - DNA, 422 bp, Glycine max
  unsure (1)..(422): unsure at all n locations
gagcttgcagctattataagagaaagaacatgttattagaaatatgacagatnatgtttgttcgtgtgtcagattgattgcgaaggaatgcattaaccacatcccgatgagagtgtgatccttatattttgagagcaacaactattatttagtactgattttgcatgaatcttgaagttagactgaatgcatgaattgaggatgatgaacgcatgttttgatcgtgatagctacttagccaaaaagatgaccttgtgcttgaatgaattatcccttatttggagtgaatgaattattgattgggtgaaccttgagcctatacagtgttatctcctactaccttgtcttaggttggaggagagcatcatcaacaaaaagcttgtgtcaaagaaaatatgtcccacatttgtgggtaatactgg

SEQ ID NO: 103751 - DNA, 323 bp, Glycine max
gcttacatggagcaagcggggttagcaatccttgctacgacacaatatgctaccaccaacaatggattagtgaatatcatacccacgcaagacgcagaagatgttgtagagagacattgtagaataactacgtcgacgtgccagtgccatggtgatgagtgacgacaacagcagttgacaagccagagccacgaccataaccacattcatattccgtggccaattggctggaggatcatcggatcttcaatggatttggcctttatcaatcttataggaaccacttgtttgttcagatttggatttgccacgaacggcaaaag

SEQ ID NO: 103752 - DNA, 439 bp, Glycine max
agcttgccacctagctcgccttgtcgagctatgttgcttcctccagaaggcggtgtcttctggagaacttcctagaaggcccaagtgggcctggttgctatttgcaccccctgtttactaaatacaccccttgcctttttttggtgattctttttccgtaacattacgaaactttacgaatttcgtaacgatacttgttttcttttcgtaatgttacgaaccttacggattacgcaatcatcccttctttggcttccagaatgtcacagaactttacgaattgtgcatttacacttcctcttgacttccgacatgtcacgaaaattcacgggttgtgcaacaatgctttcttttgacttctggcatgccacgaaacttcacgaattgcctaacgatgggtgccaagtacctcaaagtgggcaaatgagggtcgcatccc

SEQ ID NO: 103753 - DNA, 455 bp, Glycine max
agcttatcatatgaagccaagtttagaggttatttctcgacaagaactaaccatgatttctcatgaggagagaacttaaaatagatttcatttctttggaagaaagaaagacctctgtaaaaccaaattatagatattgtgtatgcctaaaatgtaaaactgaaaattcaataaggaagaattatcaaatggctgctttaggtgactaatagggtgttaattgagaacttagtaattgaaaactaacacttttattccttggttgttgctaatctttattgtggattttactttttaattcattttaatttaagtgtatctagctatttctaattaccaaatttaatttgatttcatctccattcactattagaaaattcgttttttacattgattattaagggattttaaaattgattattgacaaatgttgaaactatcgacattaaaatatc

SEQ ID NO: 103754 - DNA, 364 bp, Glycine max
agcttcaccaccacatcttcgtcttttacccctctctgcatgctcccctaccgggggtgccctctctctgcccggaaatgcacgctggtcctaaatgcaagaagtgagttcatcgtcccgtttacctccacgtacacgtaccaccctttcctccgtcgaccccgatgccctcccatcggcacgtacttctcccgccggaacgctaccacgtcgttcccctttacctcaccttcacataaattttcgcccgatcaaaacaccacatcaccggtatcacacatggagtctcttcctcgccttcgttcacattattgtctcccaaaaactcgtacacactatcgctttcaggttcggaatgagaata

SEQ ID NO: 103755 - DNA, 452 bp, Glycine max
  unsure (1)..(452): unsure at all n locations
agctntatccaagtattctttctataaacctctttaggcttcaatccaagtagcagctactactatagagacttcatacaagagatggtattctctttctatctctagaagaaataaacatttgactattctccaaagttcttttctccatcctaaggggttggaaagactacacatttaaagactccttcctttgcgatgagtccttcacattgcttttttaagtaaaccttggagctaaccatttatgggtggtggagggataattcaaacattcaaacttgtatgagttctccaaaccacatagctgaatgttgttgtttacttctcctccaagcttctttagcaccacttngactgcaacttttctactctttctctactataggtacaagttaggttccatgtgacctggaattaatttccttctcaatctatatctctggggttaa

SEQ ID NO: 103756 - DNA, 389 bp, Glycine max
ctggcctacgaatcaaccttgctaaaagtcaattttggagctataaggaaatctgaggattggtgcatattctgtgctgccttcttaaattgtgttatgctcaactttcctttctgctatcctgggattcctattggagttaatccgagaaaattggtggggtggaactattatcagaaaatttgacgctagactcaataaatggaaatagagaagcatctctatggctggcagaattactctaattaaagctgtcctaacagctctgcctttgtttattttcctttttagggcccttcacagtgattaaaggctaactgcatcaaggaatttctctgggtggcgctgtaagggaaaaataccttgatagctggagcaagctgccctct

SEQ ID NO: 103757 - DNA, 450 bp, Glycine max
gctttagtagaataaccgaagtctctgacgattttatccatattctaaagaatcataaccatctccactttccaagacaaagctattcccaacaggttcgaacctatataggaaaggattgtcatatatgatagataatttactatataagatggtcattaccaatatatcttctatgttcactatataagaacttagtatctacacaacctttcagcattaatattcccagccgaagcttgaaatatatagaacataacacattttctaatagttaaaaatcataaaaatgtttattattattatatccaaccatgtagagaaaaatcgttctcgattctttcatttgagaatctagatatatcaaaatatcttcttactgaagataaagtagaaaatctgaattatcaatacagtaattaaatacatgtgcccaaaaatagtaatgga

SEQ ID NO: 103758 - DNA, 482 bp, Glycine max
  unsure (1)..(482): unsure at all n locations
gctttaagggtgtctgaattcgnaaaatatttaataaaactcacaataaatgagaaatgatttttacatagtctagaaacctatatatggcttcctaaagatatttgctcaaaaaggagcactacagttgtggttagaagtgacgctgaagccttgaaccattataaattgactatgagcctcttgatttaccatgatcgtggtaaatntaccatggctattgttgatcttgacgctgtttggaaggactcttatcactntattgggatcatgctaattaccacgaccatgatcaatgtaccacgatagtaatcaagttatgtaaagttcttaaatcttcataaatttggataatttcttactctctcactcaattgagtggttatacttctggaataaaaaactagtgtccaattgtaaattctatcaagaaaatgcatacaacataatacaaaaatttgtacaaaatatcactcacaaag

SEQ ID NO: 103759 - DNA, 496 bp, Glycine max
  unsure (1)..(496): unsure at all n locations
ctgaggcatgcaagctntgagnnncttcattatcctttgcagatgcctctntgctagcataataaatatatacaagtatgttcatccttttctcttagtagcttataatttatttggcataattttatcatctgctctaagtcattcttcacaattaaatagaagacctattgtgaattaattaagattcaggattttcttaattagttcagtatattaacacgaatgttagcatttagtaattttaggtttgggttcattcttaaatttatttattattctatcaactcttaaataaaggttctcacatcgacaaggagattcaaacacatgtccatgtgggatataagtccaattcttaccaaatggactaacagttgttggctcaactactactacctctatcaatgttattgtcaccaccacaatcacaattgtntaatagtcacaaccaccaatgtgatagaagcaaataccattatcgtcatcaccaccg

SEQ ID NO: 103760 - DNA, 460 bp, Glycine max
  unsure (1)..(460): unsure at all n locations
agcttgaacgaatgtaagatacttcttcttcaatccttgtggttcttgactccatttcattgaagcgcatatccacttgcaattccaaagtgtcaaacctctcaccaacaaaggtttgaagaccatcaaacctgtccataatcgtcgaaagaagagatgaatcctctccttcatgtccttcttcaccaacatttttagcaccctttttcacccaagagccatatgcttctttatataaccaaaggatgctatgactgaagcgcctataaggaatgatctcttgattggaacataaggttcataatcaaaagggatgttgaagtgttgaaggaaaagggtaacaagatgaggataaggcaatggggcattcaatcacaatgccttatgcatgcgatatctaacaaggtgtgcccaatcaatntgtaaacctttatgaaaggcccacatgacaatgagatct

SEQ ID NO: 103761 - DNA, 422 bp, Glycine max
  unsure (1)..(422): unsure at all n locations
agctgttaaagaatcttataaatatcaagatctttcttgttcgcacactcgtcgcgtgtatgacatccactccacaagggttgaagtagaggagaccttcaatcctattacgcaacgtggtggacaatagtgggcagttaacttgaacggtcattattgtcaatgcggaaggtattttgcgcttcactatccatgttcacatattatngctgctgtggttatgtgagcctgaactactaccaatatatagatgttggttatacaaatgagcacatcttanaagcttactccgcacaatggtggcctcttgggaatgaagcggctattcctccttctaatgatgcatggacacttatccctgacccaaccacaattcgtgcgaaaggtcggtcaaaatcaacaaagataaggagtgagatgga

SEQ ID NO: 103762 - DNA, 458 bp, Glycine max
  unsure (1)..(458): unsure at all n locations
agcttntatataatctgaaccattttatcaatatacacaagttgagttttattcagaaaatgagagtttatctcttttatcttagtgagagtgattctcctaagttcttgagtgattcaagaacaccctggctgtatcaaaggactntcacaacctttgtgtgatgccctcaccagaaagagggatttttttcttcctctcatcttcaaccttgtctttaaaccatatttaagaaaatccaattctgcccagaattatctcgtagccataactcccgttttatagactcaaattaagttattcttgagcctaaattgaatttcataacgagacctttcacctcgttttggaatcacctcatttggagccctatagcttgagttattgtcatttctatatttctgtccagccaccacttaacctacngttctgtcatctcattaattccatttatgcca

SEQ ID NO: 103763 - DNA, 456 bp, Glycine max
  unsure (1)..(456): unsure at all n locations
ctgcagcttatgataatgaatcaagtggattcaagtatgttttgatgatgacaaagatgatgacaaacagcccacagaatgatttcaagattgagtccacaagttcaaaatcaagattaatttcaggttcatgagaagattcacgatcaagagaagttatattccagattcaagggaagatgaattcctgattcaagagaagaaatcaagaagacttcacacgggaagtatgaaaagaattttcanaaaacaaacatagcacaattttggttttcaaaagagtttttctcannaatttctaagttaccagagtttttactctctggggtatcgataccagtttcctgtaatcgattaccagtgacttcaaaagcttttaactggatttgcaccgctccaattgtttttaaatgatgtaatcgattaccaatgtatctgaacgttgaaattcaaatt

SEQ ID NO: 103764 - DNA, 447 bp, Glycine max
  unsure (1)..(447): unsure at all n locations
agaaatcacatgtttgtcatcaacaaaagggggagaatgtgagtgtatgtatacatgattttgatgatgtcaaanaaagaatcaaataaggctcattttgcttcaagattaatacaagattgtttcaacaaacaaagccttgattcaagatttcttcaagatcaagccttgcctcataatgtagagatttcaagtcatccaaggcacatgtatctgataccaatacatgcaatcgnataccaaggcacatgaaagtgtgtaatcgattacacatcatatgtaatcgattaccacagactctgaatgttgggaattcaaattttaaatgaagagtcacaactgttcaagaaaaacaactgtgtaatcgattacactaattttgtaatcgattactagagaggattttcaaggaatatctgcaacagtcacatcttatcatttggattt

SEQ ID NO: 103765 - DNA, 486 bp, Glycine max
  unsure (1)..(486): unsure at all n locations
agctaacagggagtttgccttctntatctgcgacatatgaattacttataaacagngtccaacatttccaatgaaaacaagaattttcatgaattctttaaactaaacttagaagccgttactctataaaggaagcatttacataagaatataatcatcgtttcaagtcaacatttaaaaaaaacagcaaattgatattaagctgctaatttcagtatccaccagctaaagatagagaaattgggtcttcatttatattatngacagctgacaatgaagcaaagatctgctgaaataatagaataaaagccaaaaaaatgcatataaaatatgttgtgatagttcatcgtgttcaattccaattgaaatgtgctacaagtaagtaggtcggataaatccatgagcagagcaacaaacttatttatgtcaatgaaacataacaaattttttattcgataaatatcctctgtaaacaaataatactat

SEQ ID NO: 103766 - DNA, 455 bp, Glycine max
  unsure (1)..(455): unsure at all n locations
atcctctgagtcacctgcggcagcaagcttagctacttgaaccttggccngaatagaatcctcacccttccccgaagaagaggacagtagaatctcctaaagggagagcgaataacgaatgctaaaacccgaattcccaatcaaagatcggaagaaaaaaaaagggaaaagaaatgataagaaagaaaaggaagaaatgaaaagatagaatagaaaaggaaaagaaggattcccgatcaatatcataagacagtaaaaaggaaaagatcgaaggaaaatagaataattcccaatcaataaaggaaaccaagaaagagaacagaagatcttcggaccaaataaattttcggcaaggtaaatgaccgccggcaaagggaaaacccattttgaagtggttcttcctttgtgatttccattcaaggtcgctcccgactggcgatgtcccgccccacata

SEQ ID NO: 103767 - DNA, 464 bp, Glycine max
  unsure (1)..(464): unsure at all n locations
agcttctaaactttatacaagaatgatactctgtaccactngnagacaagggcctcagatatttaagaagggggggggttgaattaagatattccaaattacttccccaattaaaaatctatctcactttctattcaagttataaattcccttaacaatgaacttcttaaatattaattcaaataagaacaattagaatatgaatataaagcaatataaacaaacgagtttaagggaagacaaagtgcaaactcagaattatactggttcggccacacccttgtgcctacgtccagtccccaagcaactcgcttgagagttccactatcttgtaaattccttntacaagttctaaacacacaaggacaatccttcctttgtgtctagaatttctttacaacaagagaccctcggtctcctaattccttatagaaataataggagaagaagaatgaatctctcta

SEQ ID NO: 103768 - DNA, 265 bp, Glycine max
gtagcgaggcataagcgaggttatcttttgtgggacgcgctccgtgtgatcatcatggatctgtgtggtggcttcatatgtagctaatattggtatctcgtccagcttttaaattagaattatgagctctatatattggtattctcattgctcaaccaagaccattcagcagaccactatggagtccaattcttaatcttttatcaatcttctatagcataggggcattgattctcatccttgcgcagcctttgggtaatagtat

SEQ ID NO: 103769 - DNA, 434 bp, Glycine max
  unsure (1)..(434): unsure at all n locations
ngcttgtangccttggatcttcttcattaatggagtcctttgcttcttgaagttcaatggaagtagaatggagaacgaagaaagatgattggatacaccactctaaggagaagatgagtcaagaagaagctcaccaccatatgaagccatggataagagctcataggaaggagaagatgagtggatggagatggagagaacgagcacgacatttgtgcctcaaatgagggctgaactctgaaatgtaattctcaaatgatcaaagttgaaaaaaatgcacacacatgatctctatttatagcctaagtgtcacacaaaattggagagaaattagaatgtctattcaaatttcactagaatttgaaatcgaatttgtgaagccaatatttcactaatgcatgtgaaattacaagactaccccaaatacaataact

SEQ ID NO: 103770 - DNA, 455 bp, Glycine max
  unsure (1)..(455): unsure at all n locations
caagcttgcaatgtctgataagcacttganatgtacttctgaactccacagagcggccgcgagcgatggcaaaagattgtggaacagagctttcaactcttcagcagaagaagtgtcctgtttgatctcactcaaaggttcattccgtggcacataaacaggatgaggctcttcaatctactctcagacagtggatctaattggattgacattgacccaatacacactccattaaacatgctatntgctcattccaaaacccaacatcagagagtaactaacaagagagcaaacttattgtagtgtaccagagagagtgggaggtcttacagttctacaacgacgagggtaagggcattcgtgagccccaaggactggccttcaagttcctcatccttatcagggttggccaagtcattgtacgtagcattatcaaagattctatcatgttgctt

SEQ ID NO: 103771 - DNA, 149 bp, Glycine max
actcctggccctatgacagctcactccaactttttacacgtcctatctccgtccactcgtaaacttacagcacttacagcaaacagaaggaactgccacaccaaccgttttataaaccgacatctgtatctccggaataattatgagtt

SEQ ID NO: 103772 - DNA, 179 bp, Glycine max
caagtcattcaaggctcatgtaatcgattaccaatacatgtaatcgattaccaatggtttgaaagtggtaatcgatacacattgtcataccctaatttcgtccgggagttattatttgatgatatacaacctttcattgccgccttcgagatacttggaccctttggtgacaatatgtg

SEQ ID NO: 103773 - DNA, 457 bp, Glycine max
  unsure (1)..(457): unsure at all n locations
actcacggagaacaatggctaagctcagagatacggtgttgttgatgatgataggaataacaagtatctgaaagtaagaaagcttcgccggagataatggacacgaattataaggagaagggtttcagaagcaaggaaggaaaagggtttcataagcaaggaagaagaaaggttttggaagcaaagaagctgaaggggtttctctggggntttttggcgctatttatggagtttcatttttaaaaggggaaaaaacaatataataatcaagggtcagaaatcaatcacatcagatttcccttttaactccccagcgtgacacgtgtcccactctgcctataaaggtggaattaatgatgggtagtgggagatcgaggcgacggttaccattaaacgtgccatcgtgtcgccattccacggaaactgttataagaagagaaaaaatgtcaacttctca

SEQ ID NO: 103774 - DNA, 354 bp, Glycine max
  unsure (1)..(354): unsure at all n locations
agcttgaaataataatagagagggagcttttgtttttctcgaagctnnttcatgtntagagatttctagagagagaaaagtccaagttccaaagagttttgagagcttttgctgtccgaagactggtagagaactgagattgaagaggaagccatcctgagagcatgagatgagtctgtgagtgtttgtgaggttctagaggtggaggagacatccccactactagtatttcttcaatgcttacttttctcttctgtctgaggaatgtaagcttccagatacggagagtaaatccgttttggtcttcttttaggacttgaggaaatacctgttatatattcatgaggtttatgt

SEQ ID NO: 103775 - DNA, 424 bp, Glycine max
tttgatactacctttttacatttttactttatggcatgagatgaagtgcaaagattggacctcttgctagttgttactaatgaatagcttaaacccttgtgcttgagtgaaacagtagccgtgagactgtggtttaagctactttccttaatatttgtcctatgattaacttcatctaatgatacagcttacattttattcttctctttgaaagctgcatattttgtcaaagacaagtgatgagtacataatgcttcatttttttatcatgcaatcagtaatttgtgctgcatacacctttgttgatgatcactgcatgttattgtcacttgagggcaactaagttgttctctttttgcttgaggacaagcaaaattgtaaacgtgggggagttgttagtcgatgaatacgactaacttttatg

SEQ ID NO: 103776 - DNA, 301 bp, Glycine max
  unsure (1)..(301): unsure at all n locations
atgcttatcgctttgtggcccactatgcccaaactataaaactcaagttacagaattgatctggggcttatcgcacgatagcgcacttattgctgctaataataaaatttttcccgagatgaaatggcgcttattgcatcatccatgctaagcccactagttaaagttcaattattgcaacgatgtggggcttatcgcantgatgtgcgcttagctaatctattcaaccaaacaatcatgggtatatgcacttagcgcgagttagctctgcttatcgcgtgaagactgagcgcttaacgca

SEQ ID NO: 103777 - DNA, 414 bp, Glycine max
  unsure (1)..(414): unsure at all n locations
acaaaaactttcaaactcataaacccatcaccatcagaatccaactcctcaatcaacttttaggatttttggtcaacaactcaccaccaatcatgcctagccggttcctaagctcacatggagaaatcttaccatccccatcctcatcaaaatacttaagaacacgctcaaactctgtgttcaccctcctaactatagaaaatacacgcaaaaatattgatgaaaaaataacccttgtgaaatcggcttgcagtatgcacaagattaaatatgtacgtgcanggtcgtcggctaatctcgtgtaacatatggtgggagatatatggtggttntatatcttgtgtccggaagcgaaacggaggactattccattgcatatgaaatgggccggccccccccccccccccccccccc

SEQ ID NO: 103778 - DNA, 451 bp, Glycine max
  unsure (1)..(451): unsure at all n locations
ctaagctttttaatgagggtggtgtggaaattatgtacgagacctaatgatttctgtttatangttgtacgtgcaaagtataaatgtggtaataatgtactacatgttattgataaacattgacctaaagctaacctgtggagggtgattgtgaagtgttgggataaattattgccaaatatgacctataaagtgggcaatgatagaacaatgagattttggaaagataactggatcctatatcatggtaagctagattaatataagagtggacaaactagtcatatgagaacattccggtatgtttttatgtcaatgctaaaagagattgggatattgagtgaatcgttgtcgatttaccactgaatgttgttgaaagattaagatgttgatgccacctcgtgttgcttgtaaacatattatttaagtggaaaaacctgtgatggggctt

SEQ ID NO: 103779 - DNA, 168 bp, Glycine max
  unsure (1)..(168): unsure at all n locations
agcttgtatgagtactgagaaagaaanatatattgtgtgcaagctgtccacaccaccagatntctgagcaactccttcttcaatatttctatgagggacttatcaacatgaatatgaatatgattgatgctgccagtggtggagctcttggtgatataacccctgttg

SEQ ID NO: 103780 - DNA, 308 bp, Glycine max
aggagttgaattggagcacctcaaagatttgttggatagcttggttagagacataagcttgcttagaaaaatttcatctacagaggagaaattttgtttagtgtgaatgtatggtttagggggaaacttttgtgggaattttcaaaagcttttgtttacttggtgaaggggattttatgcatgttgtaagtaggcattaaagtgtgtgtttaagaggtgagtggggggttaattatattcatatgcgtaggtctataaatacttagaagttgttaatttgagaacaagtatgaatgaatatagttttg

SEQ ID NO: 103781 - DNA, 382 bp, Glycine max
actatgtgaatctatacaccaaactacgaagttgaaccaagatattgatgggttatgtattaatgtttaagaaaagtcttcacatctcacgtccggtataagtatgactcttgaaccaatcccatttttttttttgaaggaaaactgttcactatatcccttatcccaatgcgatcatttatttctcttttggggatgaaatagaaactatatatcgtaagatctaccactctagtgaattgccagttatgtgctccataatttgaatacataaatagcattctcgccaggaagtgccgcggctgaattcctgccgatatgtgtgtaccttaacttgctgcaagataatactgaacctcttgcctccatattgatctatgaa

SEQ ID NO: 103782 - DNA, 366 bp, Glycine max
  unsure (1)..(366): unsure at all n locations
agcttctacttatgtggaccggtgtgctncctttatctttctngnctccaacgcaagctttgaccactattcttccttcccgcgatgcttcttttcatgtccgcctgagtcggcttatagcctaaaccatacttcccacgatttccttgggtatttatcaagctagttactcccgcgttgtctttgcctaaacccatcccgggttcataaccgttccccaacataactcgggccatcattaccgctgcatcggacagacaaggctgcccaaagagggagtccatggaggaaatggtgaccacctcanaagactggaaagcagtttctaacgattcttctgcggctctcacataaggcatggaggat

SEQ ID NO: 103783 - DNA, 470 bp, Glycine max
  unsure (1)..(470): unsure at all n locations
tcaagcttatgatgaatnaagagatatncaaagtagttttgatgataacaaaggggttgacaaaaagcttaaagtgtaagaacccttcatgataacaaagatgatgatctctcgaatcaaagaatgagttcaagattgtaacgagaacacttcaaggttcaagatgaaatttgatttcaagaatcaagaatcaagtttaagattcaagttccaagaatcaagatcaagacttaagaactcagagaatacccaatcaagataagtattaaaaagtttttcaaaaactgagtagcacattaatttttctcaataaccttctaccaaagagtttntactctctggtaatccgctaccagattattgtaatcgtaccagtagcaaaatgtttttcataattttttcaactgaatttacaacgttccaatgatttcaaatgttgtagtcaccacccccccccccccccccccccc

SEQ ID NO: 103784 - DNA, 246 bp, Glycine max
agaaaggaaaagaaaaaaaaaaaaggtgacgaatgaacaaaaacaagcaaggaaaggaagaaaggaaggatgtaaaaagaggaaaagaggaaagaaaagaaaagaagaggagaagggaggaaagggaaaaggaaggagaaaaaaggaggaaggaaaagggggaaaagagagagagaaggaaggaaaaaaaaaagaagaaggaaggaggaaggaaaaaaaagagaagagaaaaaaagagaaaagagg

SEQ ID NO: 103785 - DNA, 443 bp, Glycine max
  unsure (1)..(443): unsure at all n locations
agcttctagcacaatggactttacctgaatttattcttttatagcctctttgaagcctgnntccctttccttgttttgaagctcactacaagccttaaatgaaaaaccatgatatcaccatatccttaaggaattttggagctttggaattgttttaggaataagtgtgggggggttttgtttcattggataacttgttttgttggctatgcttcatgatgtattttgggccatacttgatgtacattgtatattggttaaatgttggacatgctgaatgaaatgttgtttctcanaggctatagagtaaaaaaaaaatcgaaaaaaanaattcgaaaaaaaagaaaaaagaaagcaataaagttgagtgaataagatcttaaatggcacaagaatgaatagaactctcggtcctactcttttatgttaaatnttatctttac

SEQ ID NO: 103786 - DNA, 320 bp, Glycine max
  unsure (1)..(320): unsure at all n locations
agtgcttccctttgaagatctcaatcttaccatgttgtaaagacatcaagaaagccttactctaaagatttatcaaatgctacattgagtagacaacatcataatgaagttgtttcatagtcaacatcaaaatggtgtacttgagagacttgagaatgagaacattagaatgatactgttagtcgtcttatacgattaacttttgtatagaanactgtgaatgtatgtatacatgattttgatgatgtcaaaagaagaatcaaacaaagttgcttcataggataagcatggcttcaagattaatacaagaatgcttcaac

SEQ ID NO: 103787 - DNA, 272 bp, Glycine max
  unsure (1)..(272): unsure at all n locations
ccaccatggagaagcagcggaagacaaaggagaagaggagagaggangcgccttccactanggaataagccttggaagaaggagcttcaccaccaagatgagccttgtataataagcttggagaggatgcttcaatggaggaaaagaaagagggagagaaagagagagggggggccacgaaattgaatgaagaaaaagggagagaagttgaactttgtgttgtgtctcacaagaactctatttatcaaagttaccacaagtgttacacatgc

SEQ ID NO: 103788 - DNA, 335 bp, Glycine max
  unsure (1)..(335): unsure at all n locations
ctaagcttacgaagttttttttactngtcattaacaagatataangagttcctatattaccctagaanntttagcatggctatgatcaataaatgatttttgctttcactttggctgaggcaacttttctcactaaatgtgagttttcctttctttactttttattcaaaaacgacaaaaggcatgtttgggtattgggtaaacaatttaattaaactcttgttccctaagaacttgtcacatgaaaacttattcacaaacttaactgtgaagtttgtcattggccccttatcaattggacattataaatgctttccttcgtggggacctaactg

SEQ ID NO: 103789 - DNA, 459 bp, Glycine max
  unsure (1)..(459): unsure at all n locations
agcttgtaggattatggggtacccacnacatttggtttatgtggcggtcgggcgaaggggcacaacaagttttccacatccacaatgcgcgcataaacccaccatcccctgttggccacctccaactgagctcacgtactcccacgtagcccatatcctcgtttctctcaacacccggtccccatcaatcctctcaagcttccacaacatccaagcaaaacaacattcaaacagcacaagccttcacagccaagtaaaacagagcaaaggcagaaaactctgctcaacacatcaaccaaaatcacagcttttctcacttaaagaccacagtaacaattccttcgatccaattcgttaaccggtggatgcgactccaaaatttactggaagtctatagtgcgtaagcctacattgtgacgcgtgggatctactatcanacatccaaagcttatttacatt

SEQ ID NO: 103790 - DNA, 358 bp, Glycine max
  unsure (1)..(358): unsure at all n locations
actttaaactaagctggttgatgtctacccgtgaagactggagaacgatgaatatacgtctaaaactgtctaaaaccttcgcgatatcacttacggaaacgttacggaagcgcctcggctntgatattcttcacggaaacaattnttctaagcaaattcgaaagagagagaagtgcctaaggggctgaaccactttctacttcacttctcccactatttatataaaattgggggagaagcttgccacccatctcgcccatgcgagcatggttgcttcctccataagcaacagccttctggaggaatcttctggagggcccaagtatgccttggtgctatttgcaccccncattttact

SEQ ID NO: 103791 - DNA, 366 bp, Glycine max
  unsure (1)..(366): unsure at all n locations
atcttaagttanctgagggcatgcaagcttgcacgtgctacgcgagtggagcgttttaacnattatattattaacattattacgtagggacgaaaagcttcaaagggaaatagtgaagcaaacactttctattgaagtttagagttatatcatttcacgttattgattggtttacgagtttcgtttaatatttgttccttacagatcttaacactttaaagttcaatctccccattttgcatatcatacgctaacaaattaagaatgtataaaagaagatgaggtcttcaatcatatttctttgcattctggtgtatctgaacgtggtagctgcggaattgtcagcttacgacgttcttgagaaat

SEQ ID NO: 103792 - DNA, 364 bp, Glycine max
cagcaatagggacaattttcactcgactagctgaatttgcattaagagatattattatcaatattacttttcaacaatgaactgtttacaaacagtttgatttaaggcaaactttgattgcaatactgtttctcatactctggcactatcagttaagacagttacatactaatgagtgctaatgcatttacagggtatgcctgattggcagcatattgtgaatgagctaccaccaaaggaagcattttaagcaagatagaaagatgagaagtattgttgagaattcagacggctcaatatttatattattatttttttcctgtcccaagtgtctcctggtatctccgtcgttggtatgtcccac

SEQ ID NO: 103793 - DNA, 342 bp, Glycine max
  unsure (1)..(342): unsure at all n locations
caaatgaaaggagagaggcttgagtagtcactcaaaaccaaatgttgttgaaaatagaggaaggggtaagcaccgtggtaaagaaggccatgggaaatgacgaggaagatcctagtctcgctccaaaggcgtaagttgctactactgcagaaagtcaggccataagaagtttgagtgcagattcttgaagagagatcncaaggtcagaactgtccatgctaaccaaatttacccaaagaagaagaatgaaggtggaaccactactgctgtggcatcngacgatgattaatgttttcttatcngctatgaaaataattaaatattgatctgatgattgatatg

SEQ ID NO: 103794 - DNA, 360 bp, Glycine max
  unsure (1)..(360): unsure at all n locations
aattcctttcacagtatatttattgtttctactttcttaccncttaaaagtcttcacattgatttatttggtccctctagaactgagtatgggtggtaattactatggcttagttatagtaaatgattactcaaggttcacatggactttgtttttgaaaacacaaaaatgaagcctctntgatgcttttaacaaactttccaaggtgattctaaataaaaataaaaaggtctcaacattgtttcacttagaagtgatcatggagctgagtttcaaaatgagtcttttgaaaacttttgtgaagaaaatggacttcaccataatttgtctaccctattaacacctcaatattatggtgtt

SEQ ID NO: 103795 - DNA, 254 bp, Glycine max
  unsure (1)..(254): unsure at all n locations
gcaagaaagttatgcaatgcatggcatctggtgttttttatagacagtacctacaaaacaaacaggtacagactcccactactttactttgttggagtgacaccaacggcgatgacattctctgctgggtttgcatatctggaggctgagccggttaataatattggatgggcttgtggaacaatttgaggcctattttaagaaacgaccgcctncctattggtattgtcactgatagagacctagcactgatg

SEQ ID NO: 103796 - DNA, 190 bp, Glycine max
catacaatcattattctttacctactcctcacgcttgggtgttttttatgaaaaacaccataactatacgcgccacaatgcatgcctatcgcaccatatccaaatctataacgattggtgaccaagatgagacatatgaatatatgaaagccgacatgtcggctttgaaagaacaaatggcttctatgat

SEQ ID NO: 103797 - DNA, 432 bp, Glycine max
  unsure (1)..(432): unsure at all n locations
agcttctattgtagaaaggagtgttgtgttattctatngagnnnngnncgcagtacatggaaactagtgaagttgtgggggtaccgaaaagtcgtcatgaccggacaccaagaggtcaagggacacgaggctacaatgttgtaaccattgagtcgacaaagatgtgtcacaagcgcatttgtatatcttgaataacacacaagaggtcgttccatacatacaaactcacaaacaatgtctgacatctattaacccaaaattgaacatgatgaaattgatgcaagagcataataanactttcataaactggtttaaagaaacaatcatgagtgatgacaatgcttctaaaacattaagaatttgtggctattggtccgaatctaaatgtccccacttggaaggggtatgacataaacaattattcgtctatac

SEQ ID NO: 103798 - DNA, 398 bp, Glycine max
actttatacttcttctctgagcttttgaaagccacttgttttactttttataagctagaagtctaactatccacacccctcttatatataaactaacactcctgaaaattatacatggattaaacatctcatcatataaaatcaaacatcaattataattactaataatatttcaaggttgtacattggggggaaggggaagaattttattaataatcattaaataaattttaattattaatatttattatgaatatagtaatgaatattttaactagaacttcatcataatatcaatttcatctacactttttaaaatcataacatataaccattagtctttgataattatagtacttatctaaatttataatcatatatccttcttatttctacat

SEQ ID NO: 103799 - DNA, 314 bp, Glycine max
  unsure (1)..(314): unsure at all n locations
ctaagcttgctgattagtcttcgccggagaaaggagcgattcgggtcttataagatgcaaaaaagatcatcctgctctgatgaatgagaaaaccggggcaaatgaagaggatgataatgatgaacgaacacatgttgtggctggcattcctacatgggcaaacttcccaccaacccaacaatgtaatcgctcagccaatatcnggccttctcttacccatcacctaatcattcacataagccattcccatatcagtcacaatgcatgcctgctgaccacacgcccattgccccaacaccacctattgcgcaaac

SEQ ID NO: 103800 - DNA, 277 bp, Glycine max
gacatttgtgtcataccctaatattgtccggtgacctttgcttgatgacatgcaactcttgttcgtgtactgtgatgtgcttggcacccattcattatgcatttagtgaaattccggtgacatgagggataacaaaaaataatattgatgcacaatccgttatgtttcgtgacacaccggaaatcaaatggaagcatcggtctcaaattttgaggttgcgtaacattctgtaagtcacaaatagggatgatttatgtattcgcaaggtttcggtaca

SEQ ID NO: 103801 - DNA, 300 bp, Glycine max
ttatcaataaggtgttggcgcagatattttatagttaaaacagacattgtcaacacatttactctctcgtgatccatcaccgcaggatgtgatcgacttaccagggcctaaactgattgacaacaccctattacaattgaattcaaaattatgcactgtgtaatcgattacacatatatgtgtaatcgattaccatcagttctgaacgttttaattcatatgttaaagcttgttatcgatgacacacatattggaatcgattaccagaggagatattcagatatattctaacaatcacat

SEQ ID NO: 103802 - DNA, 427 bp, Glycine max
  unsure (1)..(427): unsure at all n locations
agcttagccctagaggggatggacccnctcttgttttgtatatgatcattaacaangcctataggttggacctcccagaagagtatggagtcagcaccacttttaacatttctgaactaactccttttgcaggtggagctgatattgaggaggaggaactaacagatttgaggtctaatcctcttcaaggggaaggggatgatgcaatcctccctaggaagggaccaatcactagaaccatgaccaagaggctccaagaagattgggctacagctgctgaagaaggccctagggttctcatcaaccttaaggtagatttctgagcccatgggccaaggttgggtccaattatccttgtacatattagactaggatgtcattatatttggtccttgtatatacngctccatattgtaggtagggtacc

SEQ ID NO: 103803 - DNA, 283 bp, Glycine max
attaatagctcctcatccttagagtgtgcgcccatcttgcgacagtacattttgagatggtttttgggacaagtcgtccctatatacttgtcgaagtccggcactttgaacttctgggggattacaacatcgggtactaagcaaagatccatcatgtcggcgaatggatagtccccaaatcctttcacggctctcaattcttcctcgaggagatcgagcttcctcctttcttctattgccgtgggcggtccttccgtggacaaaccattggttgtgtcatgat

SEQ ID NO: 103804 - DNA, 373 bp, Glycine max
  unsure (1)..(373): unsure at all n locations
ataagccctatatcaaagatatagaaaaaaagggaaggagagggtctgaaggaatagtaaaagggggaaacaagccaaagaaacaagagcttgtggttgttgaaaaaaagaaatgtgtaacagcaactgagagggaattagaaaagagagaagatgggcataacagaatggacatctggcanggggaggttggatgggaggatactggaatcaccaccaagaggagagaatggagtcattggagggagaggaattggtcgggacatcatcttttgagagtaatttgttgtcagctgagtaaaaaacggttttatcaagacagggggctctatgctatatttctatttcattgagccccctccccccccccccc

SEQ ID NO: 103805 - DNA, 302 bp, Glycine max
aacatttaatgcttttctatactaaaaggaatcagttcacatggtccatgtacattctcctacataatatggcctattcactgttatgctatagcattggttaataaaaatggagagatgatgatagataaagataagcgttataagatatctgccttgctactacaccatatgttgcaccaaaaattgtgagtgtacaataaggcaatatgttatttacttcacattatctctagaagctaagtgaccaattatttcatacagagtccatacaccacaaggggaatgttgtttcatactat

SEQ ID NO: 103806 - DNA, 307 bp, Glycine max
gctagttgacttacggtcttgaatgccagttacagtgcaaagcaaggaaccattcagtgtttcgatcaggaatgcgaaaaataccaaaaaagaggggcagaaagggtcttttattgagtttcctggaccctagctcgcccaggctagcctctggctcacctgggccctcaaattacttcagggttaaggaaccagctctcctgagcgagccagttactttcaggagtaagccgtcggctcgcctgggcaagctccagctcgcctgggcgagctgccattgcgccaagtgcccattttcctataaata

SEQ ID NO: 103807 - DNA, 470 bp, Glycine max
ctcatgatgatgaatcaagtggatcaagaagttttgtatttgtctgtagatggtgacaacaaacccaaagaatgatttcaagatttaatctagatcaaattcaagaatcaagagaagttcgatttcacgattcaagaacagatgaattctagttccaagagaagaaatcaagaagacttcacaatgggaagtattgaatagaatttctataaaacaaacatagcacaattttgttcttcaaaagagttttcacaaaattttctatgttaccagagttgttactctctagtaatcgattaccagtttcctgtgatcgattactagtggcaaagttcgatttcaaaagcttttaactgaatgtacaacgttccaattgtattcaaaatgggtaatcgatacaagatattggtatcaattacaatgcatctgaccgtggaattcatatcaattgtgagagtcaccatcttcat

SEQ ID NO: 103808 - DNA, 333 bp, Glycine max
  unsure (1)..(333): unsure at all n locations
agcttatactatatcgaganccttttaanttaactatcattactcncgagaaattcaaatgggcataactntttacacggatgtccgattcgggcgcataatatgtcgagaggctagaaattgaacaaccgaagctcttgagaaattcaaatggtcataacttttcaaacggatgtccgattcaagcttataatatatcaatacgctcgaaattaaacaacggaaactctcgcgaaagtcaaatagtcataactattcacacggatgtccggttcgggcgcttaatatgtcgagaggctcgaaattgaacaacggaagctcttgagaaattca

SEQ ID NO: 103809 - DNA, 271 bp, Glycine max
ctctatatgtgagtcgcccgaatcgacatcccagtaaaagtgatgtgcatttaaatatgtcaagagacttcgttgtgtcaattaccaagcatactcgatttgccaatgcgttctgaaattggagaattcgtgtagaaaagatattgaccaatttgatttctccagagctttcgttgttcaattcgagcgtgtcgacatattatgcgcccaaatcggacatccatgtgtagaagtgataccaattgtatttctcgagagcttccgattttaa

SEQ ID NO: 103810 - DNA, 317 bp, Glycine max
  unsure (1)..(317): unsure at all n locations
gaaaannngaatggaaatttttattgagggaatagaattaaanatttgagaagnnatagaagttggatnttattgtcacaacatggtggntggttatacaacaatagagaaacatatagaagagtggtttgaagaagaaacaagattaatacaatacaatttaaaggctaaaaacatcattacttctgccttaggaatngatgaatattttaaggtgtaaattgtaagaatgctaacgatatgtgggaccctcttcatttacacatgagggacaactgatgtcaaagatctacgataatactctaactatgagtatg

SEQ ID NO: 103811 - DNA, 392 bp, Glycine max
  unsure (1)..(392): unsure at all n locations
tgaagaatatcctgatagccataccccaacatggtactcttttcatttgaagtntaaaccgcaactaaaatcatgtaaaatgtggtatactattcttcctacctcgaccatttatccctataaaaatgtaaaaaggatttcgtcaagaacgtttttacgaggcacacctaaacttatactatcaatgaatacatattttcaacaattatacatgccaattattattatagtaccctctccaatacccttattggcagatgctgaactctacgataacaacatgtgtgccctctcgaataacttatttgatcgatgatgaacttatatcgttaaacaataattccactcttgaataatacctctggccgacgatgaaatatcacattatatcg

SEQ ID NO: 103812 - DNA, 362 bp, Glycine max
ttttataagcaaaatttgattattgaaaatacttaaattgtaccgcaagttgtgcccagtgcccaattaatttaagactttacattacatcaaattctcctatcgcaacaataagtagtcctaaagttgtgctctgtcttttccatcttttcaattttatttgcatgtgagtctaaattattttaaaataatattttcttttcaatttcatgagagtcttaaaaaaaaattttgaaaattattattttcagacatgtcatttaagactgttttctacaaaaggcgatagtatgtgatttcaaatcttagcttgatcatctttgtctgaatagtacgaaagtcccaatgacaaattgcattca

SEQ ID NO: 103813 - DNA, 393 bp, Glycine max
  unsure (1)..(393): unsure at all n locations
aagcttgtgttggaataatgtcatttctctcaatntaggattttaaattatnttgaagaangctaaagttgatgtctcgctaagcgagctcaatgcgcttatcgagtgtcatctgctaagcgaggcatctacgcacttatcggataggaggaatctgaaagggaatctatcacgcaggcacgcgctcaacgcgtcattagcttgctcaacgaatcgtttaccaccttccatgcttatcacgagtttggcgctgagcgaaacttcacttactcgcgctaatcgcgagaatggcactaattgcgacgtctatgtcaatgatcccttttaaagcctgtaatagtataggatgtacacacacaataatgaatagtcgttatagcttgaagagtgaaa

SEQ ID NO: 103814 - DNA, 487 bp, Glycine max
  unsure (1)..(487): unsure at all n locations
tcgaaaagaaatttgtccaacagttaagcgagtctgatcggaatatgtgggccatcatcgatgagtgcaaagaatagctaaatcttgcagcgactcacgagcaaaggctataggatgagtacgccaagatatcatcagacaaggaagcaagggatagggtaattgattcattgcaccaagaggcaacaatgtggatggaaccaattgctcttactttgaacaggagtcaagaacttccccgattgctatccaatgccaaagcattggcggacacctactctgtccccgaggagatccacggacttctcagctattgtcagcatatgatagacttaatggaccatatgattagaaaccgctaggaagtttgtattgtcgctcagatcttgactagttataaccctttgaataatatgaagttatcccacattcttactccaaatatcagtgtgaatcaagtcactcccgcattntatctctagcatgc

SEQ ID NO: 103815 - DNA, 80 bp, Glycine max
cttaaactagcttcttaagataaagagccttccttttttttctaacctaactgggataaaaactatgctacgtactatat

SEQ ID NO: 103816 - DNA, 383 bp, Glycine max
  unsure (1)..(383): unsure at all n locations
agctnggagcgctatccgcagacttanatttatgtatttgggaaagatttcagactatgggcatgaatcttacacgcagtgggttattgataggaccaacagctntggcctacccctccgcttacctagatacctatcgtccaccatgccaccatcatccttgcctatcccctttggtactaaggaagagtttcatgaacgattcaccaaactaaggcacgaaaacgaaacttggaagaggatntgcgacgagctcgagcaggagaatgagactcttaaggtgaagatagcccacacagcgctgagctgtggatccataaccagatgatgattgagaaggacgacttgctttgtccgaaagacgcttcgctccaccgatatgc

SEQ ID NO: 103817 - DNA, 357 bp, Glycine max
ctctacaatagcatcacctctgactgttctggtgaagaataatgtggcttctacctgtggtgaaaaacaagagcaagcctttgctttgctcaaagaatagcttactaatgcaactgttctaactcttcctgactatactataactttgaactacaatgtgatgcctctggagtgggagttgtaactgtattgttacaacgtgggcaccctattgcttgatttagtgaaacactatataggtgccccctcaactaccccacctatgatcaagagctttatgccctaataagagacctccaaacatgtgaacattaccttgcttctcaagaatttgtcattcatagggatcatcaatca

SEQ ID NO: 103818 - DNA, 250 bp, Glycine max
  unsure (1)..(250): unsure at all n locations
tgcactcgnctaaagaccatagcatcatttgtggcgctgaactgctgggagttagaagccatattctaatgtaaaattctggctttatcatgagtcatgtttacaaaggctccaccgctggcatcataaaggggataatctaatattactgagttcttgtaaaaaattggaaagaagctgttcgaagtctttgggagggggacagaacgatatttttaaatctcgcccagatcatacagccgcaccactg

SEQ ID NO: 103819 - DNA, 333 bp, Glycine max
tgagctaccacattcactcctttaatgactatggcatcaattctggcactcaactgctgggagtcggagaccatcttctcaaataaatttacggcctcagcatgagtcatgtcttcaatggctccaccactggcagcatctatcatacctctcttcatattaatgagtccctcattaaaatattggataagaagctgttctgaaatctgatggtgggggcaactagcacatagtttcttaaatctcttccagtactcatacagactctctccactgagttgtctaatacctgagatatccttcctgatggctgtggtcctggtatcaggaaaa

SEQ ID NO: 103820 - DNA, 321 bp, Glycine max
  unsure (1)..(321): unsure at all n locations
atcttaagtcacctgaggcatgcaagcttcttctaaactatgaaacaacactcatatttttgtaaagaacatgaaaacactactctttgaaagagtntatccttattatcctcgaataatgccaagttgcatttttcttctacttctcatggtttgtgattttcaaatgcaattagcttctatatgtgtgtgagcgcatgtgtgtgaatcagtgaatggcttcccaagcagcccgcatataatttggcaacaacttaaatatatggactatttctgagttttgcacatgaatagcgacttcaatcccaagtaattgacgca

SEQ ID NO: 103821 - DNA, 411 bp, Glycine max
tatcggggcacatagtgtataactggcgggttaaccatctaatatgatgcccgttatgtatattctaatccaaaacaataatgaatgatataggtatggttaaaatcaaaattacaatgtaaacccttattcctgttatttcagatattatataagatctaagatattgtaatagtatataatttatactctctaatttgtaatgtacataagatagtttgatagataaggtataagctattttattttatatttgagattaatcacataatattaagatatcataatatatatatatatataatatgacaatattacctgttattacacttatataataatattaaaaataggttaaaattatgtgaaactttaatgatatatccttaaaattacacattgttcattttt

SEQ ID NO: 103822 - DNA, 249 bp, Glycine max
  unsure (1)..(249): unsure at all n locations
acgagaaaccatcaaaactnaggtatttcctatacaaaaattatttgacgaagctncgccgagtgtccccattgaaaaacctttattcaaacctttcaaagttagtgataaggctaaacgaaaaattaaggaacttataaaaactaaatccttatttgagggcgtgggngacaatcatagcgaattactaaacaagattagtagtttgcttaaggtcattccagatactccccaancttcggaaaatac

SEQ ID NO: 103823 - DNA, 406 bp, Glycine max
  unsure (1)..(406): unsure at all n locations
ttctctaaaccctgcctaagatggttgttccataagtcgacttagaatctattgaatttaagatgatttttctaattacaatcttagaatgtaaaaaaaatttaaaaaacctacagtaatattgttttatcaaataaaaactcaccataattgactatggaatttacaaatcatatttgataaaaatcgtctctcttaccaacatgatgatattgtgttgctcaataaaaataatattaaattcatgattgatgtggtggaaaaaatcttaatacttattagatagtcacatggtccccctaatatgccatgcaataatattaaanaattcagatgaaattgtatagtacattatatatgaagattattgttattccgatgatacgcgtatcttaattattttact

SEQ ID NO: 103824 - DNA, 211 bp, Glycine max
gtgaatgtaaattatgcatgttttgatgatgttaaaaagaatttacttgacaatgagtgtgatcatcaaaaagggggagaatgtgaatcatgcaaattttgatgatgtcgaaaaataatatacttgataatgattgtcattataaaaaagggagaagatgtgaatgtatgaatacatgatgttgatgatgccaaaaaaagaatacacaaag

SEQ ID NO: 103825 - DNA, 429 bp, Glycine max
  unsure (1)..(429): unsure at all n locations
attaattaaattctaagtgttcaacgttttactctgaaatcgatacataccttgtgtgattgattacaggattttaaattcaaattaaaatatgcatattgtttcagaaatcaatttatcgactagtaatcgattacatcctctggtaatcgattaccagaaaggaaatatcatatttttgaaaagataattgttcttcaaaaacatttgtaaaatatttcctttagccaaacttgtgcaacatcaattaaggaattctttctaagatcctatctactaagtacatcattcttcttgcacttctgaattcttgacttgaaccgcactcattntttgcatcatcaaaacttcatatcatatatgcttctacanaggccctctatccctcttnttcttttggtnttctaagttttcttcctcatccccttt

SEQ ID NO: 103826 - DNA, 378 bp, Glycine max
  unsure (1)..(378): unsure at all n locations
aagtntgaaaagagtattatgaantaagggacgtnaatatggncancgntgaagccttggaacgagaaaccaagaagggctgaaaggaagaacatgaccaaagcaaagttttgaggggctttatagggcagcaatagtgagctcaccctccgaagaggtgaaaggaatcatcacgggtcaaaggcatgatcttgaaggacgagcctaaggcttgccttatgtcgaaaagaaatttgtcccaacagttaagcgagagtgaagggaatatgtgggccatcatcgatgagtgcaaagagatgctaaagttagcggcgactcacgagcaaaggctagaggatgagtctccaagagttcaccccccccccccccgcccccccc

SEQ ID NO: 103827 - DNA, 178 bp, Glycine max
tcattcctagttattccattcgtgctccactttctatcttatgccctctctaaatattcccctcttgcacttgtaatatctcctatgactatgagaagttaagtccgctttgtggataacatgacaaccaactattcattggtgtaggttctgttactaccaagttatgaatattaca

SEQ ID NO: 103828 - DNA, 359 bp, Glycine max
  unsure (1)..(359): unsure at all n locations
gagatgaagtttaataaagagagtaaagatgttagaaaaagaaaaaagnaaaaagaatttataaagaaatcacctttatataggaaaaaaaatttgattggtatatatacaaaaccatattgtgtatacgaaaataagtgaaagagaaaccatactatttgatataatggtctcatattttttaatgcaatactaaattaaaagaaaaattttttattatatataaaaaaatatttactttcagattaagaattatatgattttttgatgagataaaaaattaaggacagtgttatagaatattgaggaagatacttttattaactgaaattgtttttgtttttaaaaaaaacattttg

SEQ ID NO: 103829 - DNA, 217 bp, Glycine max
aaaatcttgatatcatgctggaaataatgttgattttacagtttcattcagtgaagtataattgtcttaaagttgtatcaaaataattaaatttctatttgttaaaactacccctatcattattaatacatttttctgtcttctaattatttgtcataacacattaattaacgataattgtatctaataataattaatgataaataatggtaaaata

SEQ ID NO: 103830 - DNA, 393 bp, Glycine max
taagctgaggcaactggtgcgtggtcaactggaacccagctttgcttttatcataaatctgtacctgtcgcaagggtttgtggtttgtgctcctctgctgaccaccatacagacctttgcccttccatgcagcaacctggagcaattgagcagactgaagcctatgctgcaaatatttacaatagacctgctcaacctcagcagcaaaatctaccacagctgagcaatgatgacctttccagcaacatgtacaaccctggatggaggaatcaccctaacctcatatggtccagccctcatcaacaacaacagcagcctgctcctactttcataatgctgctggcccaagcagaccatacattcctttcccaatccaacatcagcatcaacccc

SEQ ID NO: 103831 - DNA, 448 bp, Glycine max
  unsure (1)..(448): unsure at all n locations
ggacactttaatctaagcttacatctgccgcatgtatntgcgctaagctccttaaaggcttctcttatcgacaccaactcttgaaaaattctactaagtgttgggagcttagcgagagaagctcgcttatctcattggatgccgcaaccaatcacgcttggcccatgaaagctctgcttatcacgcgaccatcaacaaaaaaattgatttaagttacctgtgcttagcgattcatcctcgcttatccacaggtagttcatcaagaggatgagtgttcatcctcaaaagatgaactcgcttatcgcggtaagggcgtttatcgagttcttcatagaaacgcttacatacaatgagtattgatgaattcgcatagcatatcatgctcgcttagcgagttcatcgcgttttccatataacacagaatatgacttgcaactttcaagcctct

SEQ ID NO: 103832 - DNA, 417 bp, Glycine max
  unsure (1)..(417): unsure at all n locations
gacatcntgacttgctttccaatctgacattcattttatattctgccttcttctattttcagattggggatgcctttaacagcacctttgtcaatgattttcttcatgcctcttaagtgcagatgtccatattcttgatgccatattctgactacatcttctttggaggatatacatgtggaggagtagctggtttctttgggtgtccatatgtaacaattgttctctgatctgctgcccttcattagaacttcactcttctcatttgtcaccaagcattctgactntgtgaagtttacattgaacccttcatcacacaactgactgatgctgatcaagtttgattcagtcccttcaccagcaatactatgttcagactatgatagtcatcatgaactagctttccattccatgatc

SEQ ID NO: 103833 - DNA, 275 bp, Glycine max
  unsure (1)..(275): unsure at all n locations
acaaagtcaggttagcgataactaacttgtgctttttcttccatgctatatgtagcaaagttattgatcctgtcaagttngatgagttggaaaatgaggcctgaattatactgtgccagttggagatgtattttccccttgcttttcttgacatcatgaatcacatgattgtgcatttggtcagagaaatcaaatgttgtggtgctgtttatctacggtggatgtacccggttgagcgatacatgaagatatttaaagggtatacaaagaatcta

SEQ ID NO: 103834 - DNA, 376 bp, Glycine max
tcaattcaagagagcttaagactatattttattcataaatccatccacaaatcatcaccacaactcaatttcttcatatgcatcatacaacaaacttataaaacaaaacaaagtccaacaacaagactacgtctaggaattgatttataatatgttatgaactaaatagcatgcatgatatagattcaaaattcaatagatatgcttagaatgacaagaatacatgatcaaatgtatctagaattcaatcaacaaaatcaaaattcaacatatacctttaacataatgtgacaattattatgactaaacatgactctaagacaacatggaataattgattacacatagatttttgtgttttgtttttaatcaatat

SEQ ID NO: 103835 - DNA, 403 bp, Glycine max
  unsure (1)..(403): unsure at all n locations
gcttgatgcaacannnnggagaggcgaattatacaattattatgatgtctcttcatgagaggnnggatcaaatggagaatagagatcataatgaagaagaaagggaggagaagagggctatgatggtgttcctagacaaaacccaattgatggtattaaactcaacattcctccatctanaggaaagaatgatccggaggcctacttggagtgggagatgaaaatagagcatgttttctcatgcaccaactatgaggaggaccaaaaggtgaagcttgccgccacggagtttccgactatcctcttggtggtggaagtgatatgcaagtgaagggaccttccattgcagatacaatgataaagactttggatgttgtcctatgaggccaaccctacttttggg

SEQ ID NO: 103836 - DNA, 326 bp, Glycine max
atgggcatgacctttcacacgaatgttcaattctgggacataactcatgtagacgctccaaattgaacagcggaagcattcgagaaatttgaatggtcattaacttttcacacgaaagtccgtatgggggacattactcatgttgacgctcgaaattgataaacgtaagctctcgaacaattcgaatggtcataacttttcactcggatgttcgattcgtggacataactcatctagacgcttgaaattgaacaatagaagctctcgagataatcgaatgctcataaatttcactcggatgtccgatatcgggcattatatatcta

SEQ ID NO: 103837 - DNA, 223 bp, Glycine max
ctttataactttgcatgagagggtttctatgtgagacccacaccggtttgaaagatatctttgggatttcaatgcgatcagactatggaagttcaagaatacataagtacgcatgtgtgtctctttctcttgatttgaatgagattttgactgcaccgcatagatgctttgagcgttaaatatatgattgtgaatcatattagaacacgcctttgatatatca

SEQ ID NO: 103838 - DNA, 308 bp, Glycine max
  unsure (1)..(308): unsure at all n locations
tttatgaaaagagatgactgtaatagttattttcctgtggttgcttttatgataagaattcaatatacgtgtttgtttagtttcctttttaaattttttgatagaatataaactagttgtcaactgtcaagtccagacagttcctcaaatgttatgatagcagtggctgcggcaagatcaacactggcatgtttgactcctgtgcaagttttctaaatttttatacattcttataattnttatagttaattanaattatacaataaatataagtttttgcttattgaaaatgtgttgacttaatatgc

SEQ ID NO: 103839 - DNA, 406 bp, Glycine max
  unsure (1)..(406): unsure at all n locations
aacgaagagttatcgatttttacaatgtgtaaacacgatacaactaagaataacttgtgatattcaagcaaactaatgagtatgcacatgaatcaacaaactaatgcacaaactaacgcaaaacaaatgatatgagtagcaatatgagtcacacactattgcaacaaaaagtattttttgctatatgcatccaatatgcctagttcatttctaatgaaaaagaacctatctctagtaagcggtttagtgaaaatatctactagttgatgctcactatcaatgaactcaatgcagcagtcaccttntaacacatgatacttaagaaaatgatgtcttatttctgtgtgcttagtcctagaatgcatgacaagggtttttgtanggtgatagcacttgtgttgcacat

SEQ ID NO: 103840 - DNA, 189 bp, Glycine max
acctaagctatggggtcatgaacagacaaatcttcacgtcgctttggcgcctttgtcagctttgaaatcagttgtggagcttattgatcgatttgggcaaggcccgccgcattgcgctccagatttcgtttaatactaatttatttattgttaattttttaacgccgcggcagtattttattatgttta

SEQ ID NO: 103841 - DNA, 340 bp, Glycine max
gaacaaagaatatgcaaatagcaatggagataactaaagtgataaggatgaaagttgggatccttgaacgtagaatttgaggattcaccgttacgacatcgtctgtttgaattataactgcctcaagcaacaccactttaacacccttatctacctctactccaactctgtggtcgacccttctctcatacccgtagcccttctcatgttcgcccttggcatcctccccaacaaggccaccatcacgcacatcgttgcggtgaagggcatatgcaagtataacaacgcttcttcgatgctctgaacctacgaccactgcgtggtatgttactgtgaaatt

SEQ ID NO: 103842 - DNA, 322 bp, Glycine max
  unsure (1)..(322): unsure at all n locations
agcttntgaaaatatcctttagccaaatctgtgttttataattaaggaattctttctaagatcctaggaactaagtacatcgttcttcttgaatttttggattcttgacttgaantgcgctcatctttggcatcatcaaaacttcatatcatatatgcttctacagtggatgttgttgcaacctacccttcaacgggggcacaaaaaggccaaaacgtatgggcaaaaagcgtttgtttcaaggagaaaactagcagagtcgccaccaatgtttatttgatgaaaatgctagaaaanacaaaaaatacaatggtctacatat

SEQ ID NO: 103843 - DNA, 426 bp, Glycine max
aacaacgctctcttaacattggtttttatgcatatcaacggtacaaaatacgcagtggcatttttgtaaatacaatgtcattgttaacatcggttttagaaaaattgatgttaacagggcaatgttaacattggttatttaaaaatcgatgtggtccaagcactcacaacattggtttttaaaaaatcgatgtatacatgacgattttaagatcgattatttaaaaaccgatattgcctatgcactcgcaacatcattgtttttaaaaatcaatctttctttggttattcattgttcaccaaaatcaggttttaagaactggtgatgtttatttctatattaaaatcactatcaccctccctctctctccacttttctcctctattcttcttctcatcctcctgaaacacattccccttttctctt

SEQ ID NO: 103844 - DNA, 327 bp, Glycine max
acatcactacactatatgagatcaatcgacactcctgactcaaatcacttacacatatgactctctcactcacgcacacacacactcacacgttgagatactgtcgtactcgcaaacacactgggccacagacactcacgtagacccacactcataagacacacacactgtgtcatgaacacacacatacacaaacacactcacactcataatcagacacgcactcacacacactcagactatcacactcacactcatttagagacaaactataacgctcacttatttatagagacaaacatcaacacacacgctgaagtccacact

SEQ ID NO: 103845 - DNA, 390 bp, Glycine max
  unsure (1)..(390): unsure at all n locations
gcaaccctgactcgtcatgnggacccgcactaccacacaatttgtgtctccggtgtcgggatgaagagattgaaactccccattgcccgaatgagagagatcgccccccgctacatcatcacgaacgaagttttggcaatcctgaactctttcgctcaatagtcgtcaacccgccacatcaaatcctagccaccaccatcaaaagcctactatgaacgagggagactgcctccgctccatgaccaccatctacggagaacggtgtgaaccttgattattcctcaatcaaattaaaattattggcgtgtcaaaccatcagttgtgacgccagtaaagtgacacatgcccctcctaccgtacgtccccccccctcccccccccccccccccc

SEQ ID NO: 103846 - DNA, 377 bp, Glycine max
actaagctttgcagcggaatattatcctatcccgctgtcatgttgtgagtcccatccaggtagcccgaagaaactggcctaccgtgtcaaaaataaaatgaaaagctgatcttactcatgtacaaacagttggagagtctgcatcgactatatgaggctgaaccaggttaccaaaaaggaccatgtttccctgccattcattgaccagatgctagaacgcctggcatgtaaatctcactactgtatccttgatggttgttttggttatatgcaaatcactcttgctcctgaggattatgaaaagaccacattcacctgccccttcggcacttattcctatatgaggatgcctttcggcctgtgcaatgcccctggta

SEQ ID NO: 103847 - DNA, 337 bp, Glycine max
atgtttatccttaccctcggaagcgaaaagaatagattgaatgtttccaatcaaagagaatgcaaaatagaaaagaaggaaaattcccaatcaaagagtgggagaaagcaaaatgaatagaaagaatattcccattcaaagaatgggagaaagtataaaaggaagataaagaatgaatgaaagctcctgatcagggatcaaaagataacagaataaatgtgcagaaaggtctttggaccggacaatatctgaacaatacagaattgtcaccaattgaacaaatagaatgaatggaatccacgacctaaaatggtcttctccctgtgattaccaacca

SEQ ID NO: 103848 - DNA, 384 bp, Glycine max
  unsure (1)..(384): unsure at all n locations
ggagcacgaaanngaaggaanaaaagagggggagaaagaaaactttgaagtgtgtctcactagactttcattcatcaaagttacaacaaggggtacacatgcttttatttatagactaggtagcttccttgagaagctctcttgagaaaactttcttgagaagcttctttgagaagacttccttgatgaactagagcttagctacacacacccctctcataactaagctcacctccttgagaagccttcttaagaaaattcctaaagaagctagagcttagcaacacacacatctcgaatagctaagctcacctccttgagatgagaagctagagcttagctaccgaccccctataatagctaagctcacccccatgacaaaaa

SEQ ID NO: 103849 - DNA, 418 bp, Glycine max
  unsure (1)..(418): unsure at all n locations
ctaagcttctgacaagtctcatattctntttaggtaggtgttgattttgtgaattatcatatggaacagaagatgccaccataacaccatcaatttggttggccaattcatgtgaattgcttatgacactgtacttngtgtatatctgatacttaagttccagcatagttcatgtcttattttagacttaaatttaatggagagaatgtagttatacctacaacatattcaattgatgattgatttatctaatcatgcatatgctcttgttctattgtcatggtcaacaaaagagaaagagaaaatgttaggcatatattcttgtgactcaaatcccacttcctatttaattacatacatctcataatttatcacctgttaatataatattgtcaaaaaaaaatatgttggcaattac

SEQ ID NO: 103850 - DNA, 391 bp, Glycine max
  unsure (1)..(391): unsure at all n locations
gcttcctgagaagctgagcttagctcacacacccctctaatttctaagctcttccacatgccaaaatacatgaaaatgcttagctacatacatctttttaatagcttagctcacccccatgccaaaatacatgaaaattaaaaaagtccctactacaaatactactcataatgccctgaaattagaggctataaccctattctactataatggccaaaatcaatgcccaatagaatgataacctattctatatatttacaaagaagagtggacccaactgtcgtaccctaattntgtctggggactatcattcatggatacttttattctcgctagccgatttgagctgttcgacaccagttactgtgcanaatgatagatcattcgatgt

SEQ ID NO: 103851 - DNA, 332 bp, Glycine max
agaagagctctgattccatattaatatgaataagacaacatatagaggtgaagttgcaactatcggaaaaatgatcagctacagctcgcaacccttattcattaatggtgaagcttatatacatctgcaacgtgaattctattacaactgataagctaactaactaattcagccaactaactaactatttctgttaaagctgtttatactgctaagagatttgtcaagtgactgatttctataaatgtaatgacctcaatgtaacattcttttgagaaatgacctggttttagtagtcagttgtcctatcattgattacttatacagaaatt

SEQ ID NO: 103852 - DNA, 271 bp, Glycine max
  unsure (1)..(271): unsure at all n locations
attctccatggagagaaggcatctgcgattttcttcttgngagaaagaancgancctcgccgcgagcgcgcccganagtcaacccagnacccaacattcctatgccccgtaaaatagaaggagaaaaaaaggggacccacgaatcataaaacggtacttttatggataanaactcgggtgtgtgtgggcaacggtgtttcggattaaaagaaattgttgggaattggattgggaacnaagaggatctgtctgtggcgattctaaggtttgg

SEQ ID NO: 103853 - DNA, 414 bp, Glycine max
  unsure (1)..(414): unsure at all n locations
cactagtacattcctgcattatgtgacgcttgcccaagattttcctaccttattagtattatntctattagagagatatatattagtaacgacatgatttggatatgtgtgcatatagatgatgtaaaacaacttatacaccgtaaaatatgacttatagagaatatacctctctaatcaaatgatggggaatgggttattagtcaagcaattactttcctttcataagcttattttgagttcataaatatgtttaagtcagaagtttcctgaagtgccaaccttacacattacaatgcagatacacatcaatttatgatgtcaaactataagcaaaatatacttattttaaatgcaatatactgcaacctatactgcatactataattccttaagtacaatgactccatgaca

SEQ ID NO: 103854 - DNA, 260 bp, Glycine max
aagaaattcctaagaaacgtctatgatttcctttattactaaaagtattcttcgatattataatattatattaccatcattttgatttccaacgtggttactgcacaaccgagcggtcggtattcattttaacacaaatctatcggttgattccatttcataatgatccggtgtgaaatatacttttaattttattattatgcgagaaacgacttaaataaatgactgaagcatgtctaaagggggtatataaagcgaat

SEQ ID NO: 103855 - DNA, 202 bp, Glycine max
  unsure (1)..(202): unsure at all n locations
tctttcccttntatattggcattcttatctcttgcatgtagttaagacatcttgcttgtcattattgataatatcagcttgtttaataatgaacaaagggttttaagcttgtgtgaagagatagatagaaaaagactcagaattttttttgcaattgtctatctgctaagcgctcaatcttcacgcattgtggcgagcttgt

SEQ ID NO: 103856 - DNA, 314 bp, Glycine max
  unsure (1)..(314): unsure at all n locations
ctcattcactcctctaatgactatggcatcatatctggcgctaaactgctgggagttggaggccatcttctcaattaaaattctggcttcagcaggagtcatgtctccaatggctccaccactggcagcatctatcatacttctctccatattactgagtccttcataaaatattggagaagaagctcgtctgatatctgatggtgggggcaactggcacatattntcttaaatctctcccattactcatacaggctctctccactgagttgtcaaatacctgagatatacctcctgatggctgtggtcctgga

SEQ ID NO: 103857 - DNA, 288 bp, Glycine max
gcatatagagttacagacatcttggaattgatacatacagacatttgtgggccatttcctacaccttcatggaatggtcaacaatatcttatattattcatatacgattactctagatatgcatacttgtttcttatacatgataagtcacaatcattggatgtgttcaaacatttaaagttgaagttgaaaatcaactcaacaaaagaataaagtgtgtcagatctgaccgtggtggtgaatactatggcagatatgacagttcatgtgaacaacgtctatggcctt

SEQ ID NO: 103858 - DNA, 277 bp, Glycine max
tgtcaatccataccctcggtagcgataagaatagattgaagggttccaatccctgagaaagcctattagaaataaatgaatatgtccactcacagagtgggataatgcataatgaaaataaagaatattccccttcaaagaatgggagaatagttataaggaacatcatgaaggaaagatagctcctgttcacggatctatatataacataatatatgtgcataaaggtctttggaccggacaatatctgtacaatacataatcgttctcctttgat

SEQ ID NO: 103859 - DNA, 364 bp, Glycine max
  unsure (1)..(364): unsure at all n locations
caatgggtgcaaacacaccaaaagagtatgatgatggatggttcaaattctcacaaagggatactcatacacttcaaattgatccttcataactatcatgacatgctgagaaaaataaacgatttcaatgtccataatgtcaagaactgttatttcaaaacaactacccacttctngaacatatcctattattcatagaataacatgcatagtcgcacgtgcacacaaaattgaccgcaaatattaaactaaaaattcgacgaaactatcaacatcaacaattatcacaactaacaaatttactataccaacatacctacataaccaaataacactccccccatacttaaacacactttgtcct

SEQ ID NO: 103860 - DNA, 406 bp, Glycine max
  unsure (1)..(406): unsure at all n locations
taaatcactagagatcttcttgatgatgtatcttgtatttcttggatttttgtcttgaattatacttgagaagtgcatgaccacatggcatcatcaaaacatcaaagtcaaagtctttgcttctgtttctacaaatgcaaactcaattaataccagttcagccacttcccgtgcctacatccaatcctccagcaacccacttgagattttccactatctctgtaaatatttatagactttgaacacaccttgggatccttcacccttgtgttcaagattntccaagagacaaccagtcncttgattacaactgagtttctgagatgaacagaaagatttctcccctctagagtagatgatacaaatngaatatcctagaggaatttctctctttctgagatgataa

SEQ ID NO: 103861 - DNA, 266 bp, Glycine max
gcgcttagcgcctgattaataattcataaggcgtgctaagctcagcctgctgcactaaacgcacagtcaaaaatacaggtttattgtaaagtgtttgcgaaaataactagtgctaatctcatgtgtctgtcttatttttttgcagatgacatctaagaatatgaatgctccttctacaactacccatgccagatttgatagattcaggttcacatccctagaggcttgtgagagatatgctgacatttgtgtgcctcgaaagctac

SEQ ID NO: 103862 - DNA, 237 bp, Glycine max
cacaacaagatatccacatccacaatgcgcgcataaacccaccattccttggtggtgacctccaactgatctcacatactcccacgtagcccatatactcgtttctctcaacacccgggcctcatcaatactgccaagctgtcacaacatccaagcaaaacaacattcaaacagcacatgctattacagccaagcaaaacagagtaaaggcagaaaactatgccaaaacaccaacca

SEQ ID NO: 103863 - DNA, 250 bp, Glycine max
cgtgcctctctccctcctttctagggtgatcactctcatgtctgcgtgcatatgttcgtattccaacccatacctttcgcgattctgtgtgaactctactagaaatgctatgccatttccgttctggcccaaacaccattcatgcttatatgcgtgccccaacatcacccaatctaccattctctctgcaccatatgagtgcggttgactgggggagactcacctaacatttgtacaacttcaatgcctg

SEQ ID NO: 103864 - DNA, 185 bp, Glycine max
  unsure (1)..(185): unsure at all n locations
ctcttgagtatacaatgtntgtctatcaagatcacttggtacctttcttgtgtcaaactatgctgacgaagaggatgaactacaacgacaaagattgttgtccactcttacaagaataatgaaaatatatccagaagatagagagaatttgtttccacagcagtgtcgtccaatcattgactttt

SEQ ID NO: 103865 - DNA, 333 bp, Glycine max
ttcaaaaccccatgaactacttcacattgatttatataatccctctagaactatgagtttatgcgtagattactatggcttagcactagtggatgattactcaacgttcacatggactttgtttgaaaacaataaatgaagactttgaggctttacgcaaacttgccaagatgattctaaatgaataatgtcttaacattcgttcacttggaagtgatcatggaggtgaattacataatgagtccttctaaaacttttgtgaagaaaatggaatcaccacatattttctgtccataacacctcaacaaatggtgtctggagaggaaaatagat

SEQ ID NO: 103866 - DNA, 371 bp, Glycine max
ttgctggttcgaggtacttacccgttgaagatcgaaattgatgattaacgaatgaagaacgtcgaagaacggttgagacctttgcgagattcctcacggataacgttacggatacgtttcagatgcgcctcggcttagattttcttcacggatacaatttttccaagcaaattctaaagagagagaagtgccttatgtgctggacctttttcttcttgcattcctccactatttatatcaaaatatgggaggtggttgccgcccagctcgcccaggcgagctcagctcgcccaggcgagcatggttgcttcctccataatcaaccgccttctggatgaatcttctggagggcccaagtgggcctgggtgct

SEQ ID NO: 103867 - DNA, 454 bp, Glycine max
  unsure (1)..(454): unsure at all n locations
agcttccacgactctnaacaatctccccataattatatactnacanancnnnntatccttattattttttttattttttattcttataattttttttaattctgatanattatgtgctttgttttttgttcttattatgttttaaatgatatttttttttattatccnaagcatagtcaaaagtgttttaagaactaaaaaaaatacaaggacaaaaaacaaagaaatattaatttataaaaattaaaaatatatttaaacttaaaagataattctagtaaaaatgtcaaattgatgagatttttgcattcacactatatgatatattntaaaattttcaactnctaccccttaatagaacagtcttaagccttagttaaaaagagcacattgttgttgtgaaatccaaatttgacctcacatggtattgaagtgatttgaattttgaaatgat

SEQ ID NO: 103868 - DNA, 340 bp, Glycine max
  unsure (1)..(340): unsure at all n locations
acacttgacactaagcttgatggtcgtgagatctaactagtatactttttgattatcgagtttatcccaagtgtntactccaagagtcagtgcgaatcaaatcactcctgcatcttatctctaacatgcattcattattacttacctactcctcacgtttggttctttacgaaaaacaccataactaaacgcgcccaaggcatccctatcgcaccagatccaaatctagaacgatgggtgatcaatatgagacatatgaacagatgaaatccgacatgtcggctttgaaagaacaaatggcttccatgatggatgccatgttacgaatgatacaacttat

SEQ ID NO: 103869 - DNA, 373 bp, Glycine max
  unsure (1)..(373): unsure at all n locations
agcttcgcataataagaacttatcncttcttatgtcttgcaannnggcatctaaagtctgggagctttgggcagatgggtctgctaaagctggaagtggggctgaagtacaagatgcagggatgctagctattggtgcaaaggaagagggaacatcagctgctctgacgctggtcttccttgcctctggaaaattaactgtttggtcattcgcattccaacagttctttatgatatatgctaagtcaatgaccggtcttatgttctcgtaggagctaagagcatcagatcccacttccttcgatctacacaaagctgtgattaaagctgggaagcctaacccgcgaaaagtagactgcgccatcatggtcatt

SEQ ID NO: 103870 - DNA, 62 bp, Glycine max
actttatactaagctctaatgaagtttctaagaaagcttatcaagtgatgcttctctattct

SEQ ID NO: 103871 - DNA, 430 bp, Glycine max
  unsure (1)..(430): unsure at all n locations
acactattaatactaagcttttatccagggctatcttggtggtgaagctacttcttccattgcttattccctagtggatggcgcctcctctctcctcttctcctttgtcttccgctgcatctccatagtggaaaatcaccattaaaggacctcattgaagctcaaagatccagcctccatagaagctccacaagcaagcttccatcagacctttccctataatgtgtgctcgtgtcaaccccataatctgaggaaaagaaattnntgatggcaatactttatcagcctatcatagagatgaatgactcatgcatacttatgttgtgcatggcaaatgcaattatgggattgacatgagatgccttangaaccaccactttcctagttaaccacgttcacatgatgttcattctcttatctttctcctcct

SEQ ID NO: 103872 - DNA, 164 bp, Glycine max
gattttttgagccgctgtacgatatagtttgtattggacaaatgtggtggtgaatacattactgaccgatcttggtcccctgggcatccaattttgattggagcgttagtcttcatcgcccgcaataaaaggtttagtccccacaagtaaacgtcattgattta

SEQ ID NO: 103873 - DNA, 421 bp, Glycine max
  unsure (1)..(421): unsure at all n locations
gctgtctcagcatttatgcgagacgcattataacatgctagctattatcgccaagnaccaagaagagttaggtctagccatggcccacaagcatagaatcgcggatgagtatggtcaagtatatgcggaaaaagaggctagaggaagggtgatcgactctttacaccaagaggcnaccatgtggatggaccggtttgctcttactttgaacgggagtcaagaacttccccgcttgttagcccaggccaaggcaatggcagacacctactccacccccgaagagattcatgggcttctcgcgtattgtcagcatatgatagacttaatggcccacataattagaaatcgttcgaaacttgtatggctctaaaccttgactagaacgacttctttttttgaaaaaatgagtggccctgttcta

SEQ ID NO: 103874 - DNA, 226 bp, Glycine max
actaccaagccaaagggaaaaaccatgattgtaccatatccttaacgaattctggagctctggaattgttttgggaataagagtgggggcgttttggttcattggacaactcgttttgttggctatgcttcatgatgtattccgggccatactggagctacatctgatatcggttaaatgtaggacatgctgaatgaaatgttgtttctcatagcccaaagagtaa

SEQ ID NO: 103875 - DNA, 184 bp, Glycine max
  unsure (1)..(184): unsure at all n locations
ggctcatgggccactttgggatagacaagacccttgtcttactcaaagaaaagttctattggccccatatgaagaaagatgtccataagcattgcactaggtgtgtggcttgtttcnaagccaagtctaaggtgatgcctaatggtctatacacaccattacccatcccatctgcaccttgggg

SEQ ID NO: 103876 - DNA, 271 bp, Glycine max
  unsure (1)..(271): unsure at all n locations
taagctgacttgcaatgatttagcctagtttacatcagtattttcttttattnaagaaagagaaatccccataggaacgtcgattgatttttcactttactttacctaaaggtagtgtctattattatataatataatacctctttattcattacatcatggtattgtactacctaacagcagattttatttaatctaaattaatggttattacatatcaatagatcgatgggtattatttatatgtttctatgtggcnagaaatgactta

SEQ ID NO: 103877 - DNA, 217 bp, Glycine max
  unsure (1)..(217): unsure at all n locations
aaaaaatcttcagaaacaagtcacttgaagaattgtgattgtaggaaatgtatttttcngaaatagtcactggtaaataattaccattaaggtgtaatcgagtacacatcaacagatgtgactctttattttgaattntgaaaattaaaacagttagaagctctggtagttgattacaagtattgtgtaatcgattacacaagtttataatgatttg

SEQ ID NO: 103878 - DNA, 452 bp, Glycine max
  unsure (1)..(452): unsure at all n locations
ctcaaggcctgtgtaatggcacaagattaataactacaagactggctaagcatgtaattgcggctgaaatcatttctagcaaatattcatgacatatggtttacatcccaagaatgtccatgtgcccttcacaatcaccatggctttgtatacttttaaggagacaatttccaatcatgttgtcttacgcaatgacaattaacaaatctcatggacagccactgtccacagtctgactntatttgccaaaaccagtttttatccatggtcaattatatgttgcattatcaatggtcanaacaaagaaaggtttgaaatatttgatccatgataaagaccatataaatatgacttctaccaccaatgctagtttcaaagaagtcttcactaatctatgaanggtgaatatatttctcttctaacacaanntctangttttattcctaatacta

SEQ ID NO: 103879 - DNA, 417 bp, Glycine max
gatgatgctcttcaacaaccgaagacatggtagctttagataacattgtataggctttaggttcaatcaatcaatcaataatttattcagctcaaactgggtgcaagggatagaccattcaagcacatggtcaccttgttggcttagtggctttcacaatcaaacatggccttcatcatccctaatttcatgcattcagtccatacttcatagattcatgaaatattcattactaaatgatagtcgtttctctcaaactctaacgatgacactctcagcggaatacggtcaatgcattcctttccaatcaatctggacaactgactaacatttcagtcaaatctatcacatgttctttctctctatcggatgcagcttgatcaaaataagatattcattcactcctttaattcatac

SEQ ID NO: 103880 - DNA, 259 bp, Glycine max
atttgcctgggagaaaaacactgcaataacttggtgtgagtttttgctttttttatatgttatcatctaattattgtgaagtgatttgagtattttgtgagtaaaaatgattttttttttcttttaaaaaaatcacaaaaaaatgggcactaaatctaattgtttgtacactggacgggtgactttgatcaatgtgattggttaaatttttgtgtggaagtttttattctggttttatgatgttaaacaatgtttattg

SEQ ID NO: 103881 - DNA, 383 bp, Glycine max
  unsure (1)..(383): unsure at all n locations
tctcaatggatatgttgatagtcatatagtaataaagagatgttctggtatatactaactaaaatctacccctaattgaataaaaaatagtaattttatctacttaaacttgaaacaataacaattgagttcctaattaataacaaatcactaacataataactactaagtgatagaaaataaaacaactaatcctaaaaacttggtcaaataattaatataaaataacagactaacaggcaactactcatatacgctcaacacttcgtcttgtatcagtggttgataaatccaagtntctctctcagtagctcaagatttaatgtagttgtatccatgtctatctatatgctctctttttcaacacacattgactttgcttt

SEQ ID NO: 103882 - DNA, 231 bp, Glycine max
  unsure (1)..(231): unsure at all n locations
gaccggatcttaatgactgagatgcactngaaaaagaaaaaaggattattatataaaccngcggaaaggcatggaaaaatgttaaaaaaaaatctaaaaattgagatttgaagaaaaaaaggtgaaaggaagagctgaaacataaaagaaattgggatcaaaaaacatttaattatgtaagacaaggaatggagaaaaaaatgatgaaaagctgggaaaatgaaaaagagc

SEQ ID NO: 103883 - DNA, 306 bp, Glycine max
gtgtgttaatgcaccaagcctaattacatattttattgaagctagcacagtccataccaattttccgaaccaagtgtatgatttatataccaatttgctacagttatgtgcatcataatttgtatctcattaccttggttcattctttacttacattcagcagtctatctacccttttaatatacagaatggcaatgcatcatattatcagtaaatccaccctataatagcctttatcctaccatgaatgccctctcaattatcatcttctaattattgagtgcgcaattaaattactttggattc

SEQ ID NO: 103884 - DNA, 389 bp, Glycine max
  unsure (1)..(389): unsure at all n locations
ctttatctagctttccattagaatcacggcagtttaagacatatttgttgggatatgagtnttgaaattcttgaatgcattcgaaactctcatcagataagaaatctatatctatgaacttatggtcaatgatggaacgagaggagaagagtnttgtgtactatgtatgttgttcttcctatgagaacaatgaggatgacgaaatggaagaagggaattggagtatcctgagcctcatagtgccattggcttctactcatataacccttgcgcttctttgatgtgtccgccatctgagagacttattcagaatttcaattgattgaaatgaaagaggatgaaanaagaagaattttatggcttgtgggacgtgatttggataagaaatg

SEQ ID NO: 103885 - DNA, 206 bp, Glycine max
tgcacatgccacagttgagttgttaaaagattgtatgaccaagtgaaggtgcaaattgctaagaagaatgaaaactatgccaatcaagccaataagaaaatgaatgaagtggtacttgaaccccgtgatgatcctggacatttgaggacaaatgatttccaagaatgaaggaatgatgagaatcatgaaactggccaaatacatgc

SEQ ID NO: 103886 - DNA, 358 bp, Glycine max
  unsure (1)..(358): unsure at all n locations
agctntgaaggcctcaaagtggaatcaacattttttactttaaaagaactttttacttgtttacctttttggaaaacttcacaaagagaatcatcttgatatgacaggtttggaagtccacttatgaggctatacttttgaagctttgagattaacctcaatctagcatgaccaagtttcttatctcatacctagtgatgctctttagctgaaagtaagcatgacaccttttgagtggatacagaccttacctacaccagttatcagacctttctgattcccttcgaaagtgaccaccccaccagacataaggcttagggatcaaaacatagacttttttcctatcatgtgttgtgag

SEQ ID NO: 103887 - DNA, 436 bp, Glycine max
  unsure (1)..(436): unsure at all n locations
ctgagtggtctgtgaacaatttatcaactgtggaatcatctattttatatgggtccaatntacaccactcacactagatttattgcttccttcctagcaaccttctgataaccatttgctgttgtcgaagtcaatttctggcaacagaatttttttaaatcttttccttaccacctttgttcctttctctccccatcaatcccttgtcttcgactgcaactgtctttcacaaaatattggcacccctaaaatttgaaattaaggccattccaagattgaaaagtgaaacacgacataaacatcaaaagtgatgcgtatgaccgaaagtgcattcaacatactaatcttcaacacaaaaacaaaaaaatgaaaaagtaaaanaaaaaaaagaagcttcatttatacctactttccagagcctgctttacactttaat

SEQ ID NO: 103888 - DNA, 449 bp, Glycine max
  unsure (1)..(449): unsure at all n locations
cgcttggatatccttatgactgggaatctatccttcctagaatggagccaaaccaagtcaccctcattaagaactagctcttttcttcctctattgcctttagttgaatacacctttgtttggatctctatttggttcttaaccctctcatgcatcttctttacaaattctgacctagattccccttctttatgtataaaaaaagtgtccagtgggaggggaatgaggtctaacggtgttaggggattgaacccatagacaacctcaaaaggggactgcttggtggttctatgaacccccctgttgtaggcaaattctacatgagaaagatactcatcccaagacttatggttgcctttcagaagagcccttaaaagggtggataaagacctattcactacctctgttngcccatcagtttgtggatgaccagtggtagagaaaagaag

SEQ ID NO: 103889 - DNA, 421 bp, Glycine max
atcgatgtgggtccaaaagatgcaatctgatcatcctactaagacgactgagaaaactggggcaaatgaagagggtgagaaagagggagaaacccatgctgtgactgccattcctatacggccgagtttcccaccaacccaacaatgtcattactcagccaataacaaacctcctccttacccaccacccagttatccacaaaggccatcccgaaatcaaccacaaagcctatctaccacataaccaatgctaaacaccacctttggcaccaaccaaaacaccaaccaagaaatgaattttgcagcgaaaagcctgtatgattcaccccaaattccggcgtcatatgctaacttgctcccatatctacttgataatgcaatggtagccataacccctgctatgtccctcaaacccccattt

SEQ ID NO: 103890 - DNA, 439 bp, Glycine max
  unsure (1)..(439): unsure at all n locations
accttgagaacctccttntgatactatttctacatttttgactttatggcatgagatgaagtgcttagattggacctcttgctagttgttactaatgaatagcttaaacccttgtgcttgagtgaaacagtagccgtgagactgtggtttaagctactttccttaatatttgtcttatgattaacttcatctaatgatacagcttacattttattcttctctttgaaagctgcatattttgtgaaagacaagtgatgagtacataatgcttcatttttttatcatgcaatcagtaatttttgctgcatacacctttgttgatgatcactgcatgttattgtcacttgaggacaactaagttgttctctttttgcttgaggacaagcaaaattgtaaatttgggggagttgttagtcgatgaatacgactaacttttatg

SEQ ID NO: 103891 - DNA, 410 bp, Glycine max
gagagtagttcaagcttaacgcaatatgcgcgctaagcgcacttccaagaattcataaccctaagagattgatgcttagcgctttgtggcccactaagcccaacttaaaaactcaagttacagaattgatctggggcttagcgcaggatagcgcacttagtgctgctataataaaatttttcccgagatgaaatggcgcttagtgcatcatccatgctaagcccactagttaaagttcaattattgcaacgatgtggggcttagcgcagtgatgtgcgcttagctaatctattcaaccaaacaatcaggggtatatgcacttagcgcgagtaagctcggcttagcgcgtgaagactgagcgcttaacgcaaggtctgcgcttagcggatagagaattgcaaaaaaaaaaa

SEQ ID NO: 103892 - DNA, 437 bp, Glycine max
agcttattatgtgtgaatccaatttataaatagctttgcaattagttttcaataactctgacaaattctaccctttattttcctttaataaagatgattcggaatctactagctcttgattggaaggtatgcttgaagcatatttttcgtgaagttaactcttgtggagattgacttgtaaagaatgagctaatcatgaagatatgtttatgtctttgatgcattgtcctctcttcctttaacttcccttattttttctgatgtaatgggagatcgggagttatgcacgttaggtgttagtttcctatttttatttttctgatgtataaaaaaagtatttgattagcatttgccaaaatacaaacacactccacccccctaaaattctaattaacagtcagaaagagaaagcttatatcaaattccaaattgaagca

SEQ ID NO: 103893 - DNA, 421 bp, Glycine max
  unsure (1)..(421): unsure at all n locations
ttgttagtcaaacttcttatgctcttaatctctcctcgtctaaatcaactaactcatctgacatcattttccaataatggtcgattggaatgtccatttgtttttgtactctggctgattgcaaatgtatttcgaccggaagtacagcatcgtgcccataagtcagtcgaaatggggtagtattagttgattccttaggagaatttctacatgcccatagaacttgatctaacgttttattccaatttcttggcttttgggcaatgtgttttttaatcaagttaattacaatcttattggctgcttcgacctgaccatttgcttgcgcgtaatatggtgttgaggttaataatcgaaagccagttntttgggcaaattctttcattnttcgtccagtaaaaactgaaccttgatcagtggt

SEQ ID NO: 103894 - DNA, 443 bp, Glycine max
  unsure (1)..(443): unsure at all n locations
gctcgtcccgggatgattacatcgacctcacgcttgcacgcttatgccgcattatccacttacagctggaaattgttgtgctcaaagtctctggatgaaacatatacttgaagactttggagtaatccttgatcacattaccttaatgtgatagcacaagtgcgatcaatctaactaaaaatccaatcatgcattctagaaccaaacatatagagataaaacataattttcttagagatcatgtttcaaagggtgattgttgcattgagtttattgatagtgagcatcaactagcagacatcttcactaaaccacttgctagagataggttcttctttatgagaaatgaactangcatcttagatggatctaacattgaatgatgttgggtttagtgcatgtaacctattttatattgctctttatgtctcttgatttcacct

SEQ ID NO: 103895 - DNA, 286 bp, Glycine max
gcttcatgttgtgtttgatctgcttatgttctattgtactattatctctatgaataaaagtcattatatcatttagtactttgatgataagttgaaaagttttatatgaatgaaatgctatggctcttctcttcagtttttgtttgctttgaactatgaaaactataactttatgaccttgtaataccaaaagggagaagatgtattagcatagcataattcattgcattagcattgtttgtatattgcctagcattatgcaaagggagatatttgcttagcttgc

SEQ ID NO: 103896 - DNA, 369 bp, Glycine max
  unsure (1)..(369): unsure at all n locations
gaggacagctctgaatgtgaagactaatccactcgccaatcatggaggctcagtggttaatgcagtggaagagtgggagccagaggctgaagtagatgggagacgtgttaacctctagaaggttcattttggaagcactgtgcgaagctggtatgattcgccatgatggtgacaagggagattcctgtttaatgcatctggaggcatcacatgatgtggagacgtgctcaatggaggaatagttgctacaggggatgatggataagggccaaattgaagtctgcagtgcgaanaaagggagagggatatgtgtatgcagtcaaatgataaaaacccaagtaagcccaagtctcttgtgatccacttcac

SEQ ID NO: 103897 - DNA, 428 bp, Glycine max
tgtagcccaccattttttcatagaagaacactagtaatgtgtctactattattgagatcatctctttcttcgtcattcgaggtgccactagagctacaaagtctctccacctttgggcatattctttaaaagattcgtgtctctttttgcacatgttctgtagttgcatcctatccggagccatatcagaattatactaatactacctaacgaaggcaaccattatgtccttccaagaatggactcgggaaggttccaagttagtgtaccaggtaacagctaccccagtaagactttcttggaagaaatgtatcagcagttcctcatcttttgcgtatgctcccatcttccaacaatacatctttagatggttcttggggcaagtagtccccttgtacttgtcaaagtccgacaccttgaacttggga

SEQ ID NO: 103898 - DNA, 334 bp, Glycine max
agcttctaggttagtgtactagatgactgcttccccggccaaactatcttgaaagaaatgcatcaacaacttctcgtccctggaatatgcacccatctttcgacagtacatttttaggtgattcttagggcaagtcgtccctttgtacctatcaaagtcaggtaccttgaacttcggagggatgacgacgtccggcaccaagcaaaggtcggtcatgtccacgaacagataatcgccaaatccttcgacaaccctcaatctttcttcgatgagatcgagtttccccgttccttctgctgccaggggtggtcctcccacagacagaaatattggc

SEQ ID NO: 103899 - DNA, 430 bp, Glycine max
  unsure (1)..(430): unsure at all n locations
aagtgaganagtgtggaagagtcagtcttcctacttttattcgttgaccacagagtggtacctggagatatgtcgcgggggtcaggagaccttggggacgtcaggtggggtgttattgcccaaaaccaagcttgaccaatcccgacccaccccgggcatagtcagtcagtgagaacctgtgacatacctaaagaggcgagctcctggcagtcaaccgataaaagaacaaagaccacaaagcaaggaggcttgtgtggtggctggccagctatggatcttgagtgatatttgggatatggcctctggtaatcgattaccaagggtgtgtaatcgattataaggcttaaaaatgaagataggaagntaagatggtctctggtaatcgattaccaaggatgtgtaatcgattaccangcctaaaaatgggatc

SEQ ID NO: 103900 - DNA, 423 bp, Glycine max
  unsure (1)..(423): unsure at all n locations
agcnttgagccaaaatcctgactctccataaaccttgacccagggtgagaatgtcaatccttaccctcggaagcgaaaggaaagaaggaagatttccaatcaaagagaaagcaaaaaaaaaagaaagagcagaaggaaaattccccaatcaaagagtgggagaaagcaaaaagaaaagaaagaaaattcccaatcaaagaatgggagaaagtaaaaaaggaagaagaagaaggaaagaaagctcctgatcagggattgaaggaaaacagaagaaatgtgcagagaggtctttggaccggacaatatctgaacaatacagaattgtcaccaaatgaacaaaaaaagaaggaatggaaaccacgacctaaaatggtcttctccctttgattaccaaccaaaatcccgtgcgctaacgactttttt

SEQ ID NO: 103901 - DNA, 442 bp, Glycine max
ccagctggaaggatgcttcaatggtggaaaagaaagagggttatatagagagagggggggagcacgaaattgaaggaagaaaaagggagagaagttgaactttgagttgtgtctcacaagactctcattcatcaaagttacaacaagtgttacacatgcttctatttatagactaggtagcttccttgagaagctttcttgagaaaacttccttgagaagcttctttgagaaaacttccttgagaagctagagcttagctacacacacccctctcataactaagctcacctcattgagaagcttccttaagaagattcctaaagaagctagagcttagctacacatacctctctaatagctaagctcacctccttgagatgagaagctagaacttagctacacaccccctataatagctaagctcaccccaatgacaaaaaa

SEQ ID NO: 103902 - DNA, 421 bp, Glycine max
agcttgtatagttgcgtatgatattggttttgcgtctgtgataataaagtcaaacacatcaaccagaaagagaggaagaatcccttttgttttaattgattgtgagaggagtgaaaaatatatagtatacaagaaagatttagtatgaatggtgactagcactagataatgtgggtctccctttaagccacgagtgaaaccagtattgggaggtgaagggtggatgatcaacttgacatgtgggacttataatcatgcattgactaagtcattcactacacatccatatgttggtcgactaattgaggatgagaatattattattgatgatatgacaaagtcaatggtcaaattaaagaatattcttctcactttgaaggagcacaatgccaacaattgtacaacaatgaagcatgtctac

SEQ ID NO: 103903 - DNA, 400 bp, Glycine max
  unsure (1)..(400): unsure at all n locations
ttgtgatattgcagttcattaatgatacctttaagctatattgcttccttcacaccttcagctaaggccatgtattatgtttcagttgttgaaagagcaacaactgattggtgatttgctttacaactgattgatgtaccaaacaaagtaaacacatatcctgttaaggacttacttgtgtctacatttcttgcataatctgcatctgcatagcctgtgactactgcttcatgtgttgtcttcttgtactttaaaccagctttcaaagatccatttagataccttagtgtccacttcacagcttaccaatgtgcgctgtcaggatctnccatgaatttgcttataatacttataacatgagccatatcacgtctgctgcaaaccattccatacattatgc

SEQ ID NO: 103904 - DNA, 421 bp, Glycine max
  unsure (1)..(421): unsure at all n locations
ttcttgtcaatgaattcgtaattgctgccaaaaatgccatggaagcgggtatatatactatacacacacacacacacacatatatatatatatatatatatatatatataattngatcttaattaattattaccggtgggaagattaatgacataaaaataagaagtgtcatgatcatgtattcatgtggtacaggttttgatggaatagaactacatggagcaaatgggtacttgctggatcagttcctaaaggacaaagtgaacgacgaagatgatgagtacggaggtactatagaaaatcgttgccggttcccactgcaagtggtgaaggcagtagctgatgagatcggagctgacaaggttgggattaggctctccccttttgctgattgcgtaggagacgacaccaacaacgatga

SEQ ID NO: 103905 - DNA, 435 bp, Glycine max
  unsure (1)..(435): unsure at all n locations
tagtgcaaataagatctatgagtggaatatagatgcccaaacagagtacaatatcatgaatacactccaacatattaccatggtagccacgacctaccaaacatcccatgagtgctctgcggaaacaatcatcgatatccttgtggcaagattttttggccaattaaaaggatggtggaataattatctcactaatgatgaaaaatccaaaatttatggcgcaatcaaaacgaatctcaatggaaaagtcattatcaatgacgataataaggagattcctgacgctgttaatacacttatttttacaatagcccaacagtttattggcgacccatccctttggaaagataggtcagtagaattgttatcaaatcttaagtgtagaactttagcagaatttaggtggtatagagatnacctcttaactagagtcta

SEQ ID NO: 103906 - DNA, 412 bp, Glycine max
  unsure (1)..(412): unsure at all n locations
agcttatgcgcatatntccttacgatcgttcactngcacaagacatcctattaactaagaaaaacgcacccatatacaatcaaggcagcttccttacctagattatttacatgtacttccaaggtgtatttgttatttacatcacacacgtctccttggctaaatttacatacatgcatactcaaagcactttggggtaccaaaaattgcacatgtgcacatcttggtatttctaatacctatacatacacaaacttcatgatgaatcttgactatctacacaataaggcgctacgtttcatgctcttttcaagttttttgctacctaaagtcgtatgcaaattcaagtatattttcctttgctgactaaaattgtattaaaaggtatatattctttttggaatgtattttc

SEQ ID NO: 103907 - DNA, 410 bp, Glycine max
  unsure (1)..(410): unsure at all n locations
agctttaagagaaattcctttctttttcttatcattctcctcatgctgattgaatctcattaattccatntcatgttcttgtaacaatctaaacaaagtagcaagagacatattagaaagatcccttgattcagtaatggccattacctttggttgtcattccctgcttaaacatctcgaaactttattaataagatcttcatttagaaatatctttcctaatgatgcaagatgatttactatgtgtgtgaatctcatttgcatgtcctgtatagtttcattaggattcattctaaataattcatattcatgagttaaggtatttattctagaccttttcacatttgttgttccttcatgggttacttgtaaggtatcccacatatcttttgcacttttgcaatttgaca

SEQ ID NO: 103908 - DNA, 400 bp, Glycine max
atgtgaagtgggtggaattcctagttcaattcccttatgttatcaaacataggaagggaaaaggtaatattgtagccgatgctctttctcggcatcatgcattactttctatgcttgaaacaaaattgattggtcttgaatgtttgaaaagcatgtatgaaagtgatgaaacttttggtgaaatttttaaaaattgtgaaaaactttcaaaaaatggtttctttagacatggaggctttcttttcaaagaaaacaaattgtgtgtgcctaaatgttctacaaaaaacttgcttgtttgtgaagcacatgaaggaggtttaatggggcattttggggtccaaaagactctagaaacattacaagaacatttttattggcctcatatgaaaaaagatgtgca

SEQ ID NO: 103909 - DNA, 435 bp, Glycine max
  unsure (1)..(435): unsure at all n locations
ctctttttgaaatttgttggtgtcccaaaatctttttcttgatctgttntnntcttcnntttgtgagcctcatgtnnttgtggtnatcaagaattgatgaagaaaatgttcagaagggaagaatatattaantccaccgatctttaaaggcattcccaaattattaatcannggttcaaagagggtaagaaactttgtttttctttctcanaactgctccttacttagatttgaagaggaattgggcattttgagttaggcacatggttatttgctttatttttgtcatatagctcttatgttaaactctgcttcgaacttgtcttgtaaaaaaaattgatggtgtaatttgtaaatccgtttccaataagttgttattgttgacataatgtgcataaagttaagtggtgtgttgcattattacttaatgtaatg

SEQ ID NO: 103910 - DNA, 418 bp, Glycine max
  unsure (1)..(418): unsure at all n locations
aacgctttttatagaggaaaattactntntaagtgtttaaatgaaaggcaaaatggccctttcaataaattgctgggtgcacctagcatatcccttatgaaccttgtttttttttcaagtaaggtctgatggcccatcgattggcccaaaatctacccattttgttttgggacatgctaggtgcatccaacaatattgctggtgcacccaacaatttagtgaatgaaccatttttcccttaacatgaaaatttaaaaaatgcccagctccctccctcccccacctttttggcttctttcttttcttcttctgctcattcttcttctctgcgccttcctgctgccatntctgatcgcgctagtgcacgtgctgcatatttgccgccaggttagtctcccctaactccatcccctttaat

SEQ ID NO: 103911 - DNA, 236 bp, Glycine max
aaaaataaaaaatttgaactctttcaaataaaatatggacaaattttttttgactaatataataaaacgtctgtgagatatcttaccatttgatgaacataaataacatcaaaatataatttggaaacaaaaactttcaccaccaactccactttacttttcctaacaggggttaatttatatacaacctgtctaaatgcataatcaatcatccatatttcactacattcattaat

SEQ ID NO: 103912 - DNA, 203 bp, Glycine max
gagcttacgtactgccacgtagcccttattctagttcctctcaacgccgggtccccataaattctcctaaactgtcacaaaatacaggtaattacacatccaatcatgatggactaacaaaagcaagcaaaacagggcaaaggcagaaaactctacctaaacatatctaaaatcacaggttttgaatacaaataccacagaaa

SEQ ID NO: 103913 - DNA, 477 bp, Glycine max
gctcgtaccaggattgatacatcacctcccgcttgcacgctttagcgtgaaagcacatgaatggttttatatttaacaaaacttatgcaagagccattagggtttgaagtgcggtaataggccctatatcaagtatatagaagaaaagggaggagagggtctgaaggaatagtaaaagggggaaacaggccaaagaaacaagagctgttggtgtatgaaagaaagaaatgtgtaacagcaactgagagggaattagaagagagagaagaggggcataacagaatggacagctggcagggggaggttggaggggaggatacgggaatcaagcagcaagaggagagaagggagtacattggagggagaggaaattggtcgggagcatcattcatctggagagtaatttggttggccaggctgaataaagaaacgggttttcatcatgaaaagggggctcctatagtctatatttcttat

SEQ ID NO: 103914 - DNA, 259 bp, Glycine max
cgtaaatagtcatctgtatttccctgaagatggacagctttgcagggttatataaaagttgcattatatattggcttcgcatgcatgatgggttttaagccaaggtccaacagccacatccgatgttttcattggattatgaccgggtggtcgatatatatatatatatgacatatctatatctatgttgttaccattaaatgaaatagttacagaataaattgttcttttctttttttttaatttgtttgttaatttt

SEQ ID NO: 103915 - DNA, 429 bp, Glycine max
  unsure (1)..(429): unsure at all n locations
tcgnccaggcgagcaaagttgcttnctncagtttcaacagccttcttgaggaatcttctggagggcccaagtgggcctggttgctatttacacccccctttttactaaaggcacccccccttttctatttttttgtaattctttttccataacgttatgaaactttacgaatttcgtaacgatacttattttcctttcgcaaggttacgaatccttacggattatgtatttactcttttttggctttcaaagaagttacggaaactcacggattgcgcaaaaacatctcttttcgatttccgccacattacggaatttcacggattatgcaagcctgcttccttttggatttctgagacgtctcgggacttcatttattgcatgtcatcaagtaataatccccggacgaaattatggtatgacacctat

SEQ ID NO: 103916 - DNA, 348 bp, Glycine max
  unsure (1)..(348): unsure at all n locations
gaaccggtttggtgtcacccagatgcagtaaagttatgccatgcatgtcatctggggttttttataaatagtacctacaaaacaaacaggtacaaactcctactacttgactttgttggggtgacaccaacggggatgatattctctgctgggtttgcatatctggagggtgaacatgttaataatattgtatgggctttagaacagtttcgagatctatttttaagaaacgatcgccttcctgttgttattgtcactgacagagacttanccctgatgaatgcagtgaaaactgtgtttctggagtgtataaacttgttctgcaggtttcacatccacaagaatgtg

SEQ ID NO: 103917 - DNA, 431 bp, Glycine max
tccccaaaggaatttctgatgttggagaaaaatgggtgttcataaacaagctgtatgaaacaagtaaggttgtgaagaacaaggctagccttgtagccaagggttactcacaacaggaaagtatagattatgctgaaacttttgctcttggtgctcgtctaatgacaatacgcattttactatcctttgctgctcatcatggtaagatgttgtatcaaatggatgtaaaaatgcattcctcaatggaaaaatcaaggaagaggtctatatggaataaccccctgggtttgagatttctatctaccctcatcatgttttcaaacttaacaaggctttgtatggtttaaaaaaggctcccccgagcctggtatgaaaagctatgctcatctttaactaaaaatggctttattagatgaaaggtggatactact

SEQ ID NO: 103918 - DNA, 284 bp, Glycine max
cacccctccaattgctatgctcaccccatgtttcacacacccgtccaatagctaaggtgacctcttccccccccaaatacatgaaaattcaaaaaaaattctctattacaaagactactcaaaatgccctgaaatacaagactaaaaccctatactactagggtaccattaaattgtagggtagggtgcccttaatttgtagggtaccttacaaacctaaaatgaccaaaatacaaggcccaaaagaaggaaaaccattttaatatttacaaagaaaatgggct

SEQ ID NO: 103919 - DNA, 398 bp, Glycine max
  unsure (1)..(398): unsure at all n locations
ttcttctaccttacccttcatgatatgtcattattgtatgaataagggacatgattcttttaggtgcatggtaaaaaggaatggagttccaagtgggaaattcaattggattctcaagggaactaacaaggtcactaaccaaaaaggacccaacacaacaggggtacctanatctaccttctaaatttgtttgtaggtatgcctaacggcagatacacaactatggtatcatgatagtggttgctcaaggcatatgacaagagacaagtcaaagttcatgtctctaaaagctaaggaagaaagatttctaacatatggtgacaacaacaaaggaaggattctcggtgtaggtaaatattgtaattctctgactattttcatagagaatgtcttatatg

SEQ ID NO: 103920 - DNA, 420 bp, Glycine max
  unsure (1)..(420): unsure at all n locations
ttatatacanagccctcttttattatcaacaacatatagggtcggatgcgtattttcacaatatttaccaacaacatgagaatcatagtatgggttggttttgagaaaatgctcangattgttgttgctgtcaataatgattttacccagggcattatgtacatgtacatcttggattccttcacttacaagatgctccaagaattgagtaagcaagcggagacgattcctatgcataaaaaattaaatgagaaataaacatggcaatgatagtggagatgaaagctagagagaaaactagcacacctcttctcacattcttcaactaaaggcttatttggtaggagagaacaaactgaaagtacaagacctttaataaaatctctatggcattcatcatctaacaactcttctactact

SEQ ID NO: 103921 - DNA, 170 bp, Glycine max
gtttcaaaacacttaaagaaactgtatgtaaattggcacataataatatatataccaaatataaagaaggcaacaatccaacatgatgtaactccattggagcttgtatgccttggatcttcttcattaatggagccctttgcttctttaaggttaatggaagtggaatg

SEQ ID NO: 103922 - DNA, 389 bp, Glycine max
atgattacattctcctctttctaagcaaattttaattcttgtgacatcatcaaaatcttcatgatttacattctccccctttttgatgatgacaaccacctttatgttaggagcaacaacaaagaaaaaatatctatttgcatatagtttactcccccttggttttgcaatgattgcttatatgagacagttgaagatttcatatttttcatatgtaaacaaattgtctcataaacaatagataatttttcttactattttatcttttatctttctctccccctttgtcaacatcaaaaacaaatcatgaatagagaggagaaagatgttaccacttgttgcaatgtatgagaatcaagtgataccaaaaggcattaaaacaatcattc

SEQ ID NO: 103923 - DNA, 418 bp, Glycine max
atcttctaggttagtgtactagattactgcttccccggccaaactatcttgaaagaaatgcatcaacaacttctcgtccctggaatatgcacccatctttcgacagtacatttttaggtgattcttagggcaagtcgtccctttgtacctatcaaagtcaggtaccttgaacttcggagggatgacgacgtccggcaccaagcaaaggtcggtcatgtccacgaacagataatcgccaaatccttcgacaaccctcaatctttcttcgatgagatcgagtttccccgttccttctgctgccaggggtggtcctcccacagacagaaatattggcttgcgtgggtggcttcgaggttctcccgtgatgttgggttgaggtaatgcgtgggcgctaacccctcagtggaaaacggggagt

SEQ ID NO: 103924 - DNA, 317 bp, Glycine max
aagtgagaaagtgtggattattcagtcttcctacttttattcgttgaccacagagtggtacctggagatatgtcgcgggggtcaggagaccttggggacgtcaggtggggtgttattgcccaaaaccaagcttgaccaatcccgacccaccccgggcatagtcagtcagtgagaacctgtgacatacctaaagaggcgagctcctggcagtcaaccgataaaagaacaaagaccacaaagcaaggaggcttgtgtggtggctggccagctatggatcttgagtgatatttgggatatggcctctggtaatcgattac

SEQ ID NO: 103925 - DNA, 422 bp, Glycine max
  unsure (1)..(422): unsure at all n locations
catgcaagntcgcttgtgnatgtgaagattttatgaagaaaggtaanngtggaggaggagaagaaggtggaggatgacaaaccacacctggtaattgaaccagcacctgaaccagtgcaacccttttttgaacttatagaggaagaagaagaagaggaagatgaacagatgatagagacgccaataattttgagtgaaaaacaaatgaatgaaaaagaaaaaaaggataatgaaaaagaaaaagaaaatgaaaaaaatgaaaaagactaagaagatgaataagaaaaaaatgagaaaaatgaaaaagaaaaagagagaaaagaagagatgagaaaaagcacgagtgggtgtgctagagagacaaaaaaagaagcatcttcagctgaagggagaagatgaacatattcttttggaccttttag

SEQ ID NO: 103926 - DNA, 388 bp, Glycine max
  unsure (1)..(388): unsure at all n locations
tcttcgtcggggaaaggatcgattctggtctgaaaagatgcaaatntgatcatgctgctntgatgaatgagaaaaccggggcaaatgaacaggatgagaatgatgaaggaacccatgttgtggctgtcattcctacatggacaaacttcccaccagcccaacaatgtcatcgctcagccaatatcggcccttctcattacccatcacctaatcatccacaaaagccatccccaaatcagccacaaggcatgcctgcttaccacacgcccaatgcccaaacaccacctatagcgcaaaccaaaaaggaattttgcagcataaagcctataggattcaccccagattccgtggcctatgctaacttgctcccatatctacttgataatgc

SEQ ID NO: 103927 - DNA, 358 bp, Glycine max
  unsure (1)..(358): unsure at all n locations
ttctgtgattaactttatttttgtaacttccgttacaatttaaaggtacttggtggaatgagaggaatgacagctttagtatggctaggctcagctgttgacccggatgaggtatataaattaactcagtcttcacttttcaaatttttgtgactatcanagtgaattaactcttgcttatgactattttgattaattgatagaatctctgatgtagcttttgtttgttaatatttactgaatggatctctgagatcagcatgttacgtcttatagggaattcgctttaggggcatgtcaatttctgaatgccaaaaaaagcttccaagtgcttttcctggtggggagcctttggctg

SEQ ID NO: 103928 - DNA, 319 bp, Glycine max
aggcatactggcatattttactttctgctattccttagcagccttttgaaggtggaatcgttgttgttggcagtgccaagcatcttagaagacaaatagagagaagtggaagtggcattggccattccaatcccaaccatgatcacagccaagccctttgggtccgcgtttgcgctgcttggattggatttcatggaggagaaacacagattgtagtacttggtgttcttgcaggttttctctatcaaactgccatctcctttaacaaatacgtgtggctgaagaaagtgtgctacgcagaggagagataatagataga

SEQ ID NO: 103929 - DNA, 370 bp, Glycine max
  unsure (1)..(370): unsure at all n locations
aaaaaaaagaaaacacccgatttgccatttaaaagaacacaggggaaagcnnnatagacactggaacatgtggattttggaggaagtgggaagcgacacgtgaatgtattgcagaaagaaagttaaaaaaatgtgtaatattttgaattaatctatttttaaagtttacaattcattaaaaaaaatcttttaagaacaattatattgattgctattttaaattgaagtgacatgcatgtggacattaaataaagggtatatttggtgctcaacacaaccaaattgaggttgaaattatcaataaagaggagtagaagaggaattggcntgacatgatacttaaatgaaacaaattgggttgaaattatgt

SEQ ID NO: 103930 - DNA, 407 bp, Glycine max
  unsure (1)..(407): unsure at all n locations
gactntgcatctggaacgaatgtggtcactacctcctagctaaagcagcttggtcttttggcactccgaatccaacagaagctgaggcatanggcttactgcatgcgctntcatggctaaaagacaagaattatgataatttggatgtgtagatggatgctaaattggtagtagatagactttacattagcttagatgactcctctgaattacatgatttaataaataaatgtaaagtgcttctatctgattttaaaaactctatggtgagttatgtatgcaatcatgttttccaacaagttccccattgtatttcctctnttattatgaatganatatcttaagtgtctntttttaattaaaagaacaatatccctcaaatagaaataatcacatcgtcagtctac

SEQ ID NO: 103931 - DNA, 393 bp, Glycine max
  unsure (1)..(393): unsure at all n locations
ttatctaatcattccaatccactcaaatcatacagttgctcattcaaatcattctcaaacacctcattcataaaaaacaatctactgcatatcantttcaaccaattcactgttcaaaccagctntttgtacaagcaaacaactcaaagtactaaaatttaaagaactgaaacataaaaactgaaatttaaaagactgaacataaatcataaaataattgaaaataaactaaaatgttcaaaatgcacaaatttaaatgtcctgcccctgtggttgctcctgtgcatgctcattgagatccaacacctgagcagctggtgaatcctgagggatatgctactctaactcaaatgctggggcagatggtatggcatcatcaagtatgggtgctgg

SEQ ID NO: 103932 - DNA, 291 bp, Glycine max
tatggaaactccggctgacttctgtctagctaaggaccattaccgtaatatattcttaataaggcgtcaatttaaccagagtccacaactatcattcatgtaagatcatagcctaatcccttgacatcataggtgacttactatcctattccaataaaccatgaatggactcacgtgagatgtggtgaaagactcatatgagacatcatattgagtttataagcatcttattgaagaggcgaacaagcgtaagacatgatattgatgatcatacaagtactataactatgc

SEQ ID NO: 103933 - DNA, 424 bp, Glycine max
  unsure (1)..(424): unsure at all n locations
ttgatactatttcatacattttgactntatggcatgagatgaagtgcatagattggacctcttgctagttgttactaatgaatagcttaaacccttgtgcttgagtgaaacagtagccgngagactgtggtttaagctactctccttaatatngggcttatgattaacttcatctaatgatacagcttacattttattcttctctttgaaagctgcatattttgtgaaagacaagtgatgagtacataatgcttcatttttttatcatgcaatcagtaatttttgctgcatacacctttgttgatgatcactgcatgttattgtcacttgaggacaactaagttgttctctttntgcttgaggacaagcaaaattgtaaatttgggggagtngntantcgatgaataccactaacttntatgta

SEQ ID NO: 103934 - DNA, 449 bp, Glycine max
  unsure (1)..(449): unsure at all n locations
aactcctagagagtagttcaagctcaacgcaatatgcgcgctaagcgcacttccaagaattcaaaaccctaagagattgatgcttagcgctttgtggcccactaagcccaacttaaaaactcaagttacagaattgatctggggcttagcgcaggatagcgcacttagtgctgctataataaaatttttcccgagatgaaatggcgcttagtgcatcatccatgctaagcccactagttaaagttcaattattgcaacgatgtggggcttagcgcagtgatgtgcgcttagctaatctattcaaccaaacaatcaggggtatatgcacttagcgcgagtaagctcggcttagcgcgtgaagactgagcgcttaacgcaaggtctgcgcttagcggatagagaattgcaaaanaaaaaaaaatatttctaaagtcttattctgtctatct

SEQ ID NO: 103935 - DNA, 447 bp, Glycine max
agctatcaacaaatgtcttcacaaacaatcatcacacagcagaaacctatcaagactactcatcatatctccccaaaccccatacccacgaaaatcaaaggagaaagaagtccacccaaacctgaattttcgaagtcccactcgtagccacgcacttcacgaccccgaaaatgccctcctttcgcgatttggagcagaaatgagcaccaaaggttggagctttgttggggtttcaatggagaatgaaggggaagaggatggcaacgtgagggagagagagagctgtctgaaattttctgttttgctgagtgaggagagagaaaagctttttggtcttaaataaaaaaggttttccctttttccattattttattcaagctctgccacatgtccctatttgagtggaacaagaagggcccactttctctttttgactgtgacccatac

SEQ ID NO: 103936 - DNA, 444 bp, Glycine max
tttggagtagacacatgggaccaactcatttatttataaaggaagtcgtatctagtcaaggtctgagagaccatacaagtttcctaacgatttctaattatgtgggccattaagtctatcatatgctgacaatagccgagaagcccatgaatctcttcgggggcggagtaggtgtctgccatcgccttggccttggctaacaatcggggaagttcttgactcccgttcaaggtaagagcaaaccgatccatccacatggttgcctcttggtgtaaagagtcgatcacccttcctctagcctctttttccgcgtatattcgtccgcaatcctatgctcgtgggccgcggctagacctaactcttcttggtacttggcgatgatagctagcatgttggtctccgtctcgcataaacgctgagacaagcttcttttggaccttgaac

SEQ ID NO: 103937 - DNA, 425 bp, Glycine max
atcaaaacacacttaattattgaagtgacttttataaatactcttattttttgctagttgcactaaaaaatgaagtattgtaagagagaaattcttacgggttattcaaaagtaaggtaaataaaaaagagagatgctatttatactaaaaaaaatgtagcatattttgcaacacaaagagatagaaggaggagtgttaaaataatataagtgatgtaatggaaaaaaaggataaagaaaaataaatatgtttttggatcatatctcaaaacggtttcttgctaagattttcaatacttgacatggcctagcaattgatcaagattcatccatacattgacataattcttggatagaggcccgacatgcgccaagcaaataaggaagccaacatcatattagcctaactaactttacttccaaac

SEQ ID NO: 103938 - DNA, 262 bp, Glycine max
tctgtgaatcatccgcgaactcattaaaacttggaaattcagaagaaagcatggggcttagttgacacatggaaaaaacgtgttgaagctgaaatgattataaatgatgctaggtctggttcagttcagactgtcccctggccagccagacaacggctttctgaagttgctcaaggtgggaataaacattcgagtgggtcagctgatgttgccatgaagagctcagttacacagctttctgcatccaaaactgcctctgcaa

SEQ ID NO: 103939 - DNA, 392 bp, Glycine max
gatggaccttttcatgtcttggagaggatttatagcaatgcctataggttggaccttccaaaagagtatggagtcaacaccacttttaatatttctgatttaattccttttacaggtggagctgatattgaggaggaggaaccaacagatttgaggtcaaatcctcttcaagggggaagggacgatgcaatcctctctaggaagggactagttaccagagccatgagcaataggctccaagaggattgggatagagctactaaagaaggccctagggttctcatgaaccttagggtatatttttgagtccatgggtcaaggttagatccactcttctttgtaaatattaaaataagtttttccttcttctgggccttgtattttggtcattc

SEQ ID NO: 103940 - DNA, 392 bp, Glycine max
  unsure (1)..(392): unsure at all n locations
aatgaagctctgataccacttgttggacaagtggtctcagatatctgaagaaagggggggggtggaattaacatattacaacttatttccccaattaaaaattatatttaactttctattcaagttataaattcccttaataatgaatctcttaaatattgattcaaatagaacaatntgaatatgaatataaaacaataataaataaaggagtttaagggaagagataatgcaaactcagatttatactggtttggccacacccttgtgcttacgtgcaggctccaagcaacccgcttgaaaggtccactatctcgtaaatatcctttacaagtgctaaacacacaaggacaacccttacttagtgtttagaattcttttacaacaagaga

SEQ ID NO: 103941 - DNA, 431 bp, Glycine max
tcgttaaccacaatcacaatgctaaataatatggacaaatttgacatccttgtctctctcatcctctcacaatcacatcttggcttattcaacttccaccggaatgtgagtgtaagccattggtttgtttgcttaagcgacctgcgctcctgagttttttttttttacttccaagatcgttcaaattagagatttctcgtcctacacgttggtgagggtgctgtaaacaacgagtaaagcataaaagttcaaaaagaaaaagaaaaaagcatttgattgactgtgttttcaagtaaaaatatagacattcgtatgacctcattttatcattcctgaaaagtttgtctttttgacagagaagtaaattatcaagaatatcagtcatttgacttaatctatcaaactaaaaaaatccttcaaatgtttctcga

SEQ ID NO: 103942 - DNA, 319 bp, Glycine max
atggtcattttggagtattttttgtaaataaatattgttttatgggtaatgttgtctctagaacatttccgttggatttaatgatgaaatctatgcattttcaggtgaaaaagaggctaagttttgaattgcaaaaagtagcagttgggccaagctcaacagttgggctaagcgcataaccaccgctaagtgcaacttcagcatgcttagcgcaaaggagaatctggcagagcattagcatcaaagccgtgcgctaagcgcgagatcagtgcgctaagcacagaaggtgccttcaacaaggctaagcgcgagactggcg

SEQ ID NO: 103943 - DNA, 302 bp, Glycine max
tggtgtcgtggatgagagagattgaaaactgcaccattgccacgaatgagagagatcgacaaccgctacatcatcacgaacgaggttgtttcaatcctgaactctttcgctcaattgtcgtcaacacaccacatcaaatcctagccaccaccatcaaaagcctactatgaacgagggagactgcaactgcttcatgaccacaatttacggagaaaggtttgaactttgattattttaaaattaagtaaacattcttggtgttttaaagcatcccttgtgaaactagtaaagtgactcatgcc

SEQ ID NO: 103944 - DNA, 278 bp, Glycine max
tttgaagctggaatatttatttatctccgcagttcttggggtgagtgccatccaggtagtcccgaagaaaactggcctcaccgtgatcaaaaataagaaggaagagctgattcttactcaggtacagaacagttggagagtctgcatcgactataggaggctgaaccaggttaccaaaaaggaccattttcccctgccattcattgaccagatgcttgaacgcctggcaggtaaatctcactactgtttccttgatggtttttttggttatatgcaaa

SEQ ID NO: 103945 - DNA, 421 bp, Glycine max
agcttgaggtggtaaactactgtttttaatgcctggctatgtgctcgtggatagtcttactttttttttataagcaaaatttgattattgaaaatacttaaattgtacgcaagttgtgcccagtgcccaattaatttaagactttacattacatcaaattctcctattccaacaataagtagtcctaaagttgtgctctgtcttttccatcttttcaattttatttgcatgttagtttaatttattttaaaataatattttttttgtcaatttcatgagagtcttaaaaaaaattcttgaaaattattcattttcagacatgttagtttagactgtttttcctaaagtggcgtatatatgttgttttccaaatcttagctcgatcatctatagctgaatagtacgaaagtcccaatgaaaa

SEQ ID NO: 103946 - DNA, 421 bp, Glycine max
gtgtatggcaataatgtcaatttctcttcaatttcatgaaaaaaagagttatttcgaagaagtgctaaagttgatgtctcgctaagcgagctcaatgcgcttagcgagtgtcatctgctaagcgaggcatcaacgcacttagcggataggaggaatctgaaagggaatctatcacgcaggcacgcgctcaacgcgtcattagcttgctcagcgaatcgtttaccaccttccaggcttagcacgagtttggcgctgagcgaaacttcacttactcgcgctaagcgcgagaatggcactaagtgcgacgtcgaggtcaatgagcccttttaaagcctggaatagtagaggaggtacacacacaagaaggaatagtcgttagagcttgaagagtgaaatatacagagacaaataacagagcacg

SEQ ID NO: 103947 - DNA, 426 bp, Glycine max
ttcttgagatgaggaagtgttgaatggtgaaacttcctgcttttattgttgaccacagagtggtacctggagatatgtcgcgggggtcaggagaccttggggacgtcaggtggggtgctattgcccaaaaccaagcttgaccaatcccgacccaacccgggcatagtcggtcagtgagaacctgtgatgtacctaaacaggcgagctcctggcagtcaacagataaaaggaacaaagaccacaaagcaaggaggcttgtggtggctggccagctgtgaaacttgattgatatgtgggttatggcctctggtaatcgattaccaagggtgggtaatcgattacaaggcttaaaaatgaagacagggggctaagatggtctctggtaatcgattaccaggggatgtaatcgattaccaggcttgaaaa

SEQ ID NO: 103948 - DNA, 420 bp, Glycine max
  unsure (1)..(420): unsure at all n locations
ngaataactgtctgaactataatctagtaaatagatatatttgtttagtatttgttcattntatgtcccaaaagtcatagctaattaatcatgttacgtttatatgccaaaaaaatcatagtagaataaaagaaatagaaaagccaccttctgtttgtacaaaggagtaactatctccggtgttgccattgttgttgctaccaatttgactttaactttgtgcctttgtatacctagtgtctggattttctttatctgaattcaatcaattttgttgtatgatgggtttaggcttggttggttgaaattgacaaaatcaaatctattaatcaagttttggccattatactgcattccagttctggtcctttggctntgcaatgcatagttgaaatttgaacttggctgagtgaactgatc

SEQ ID NO: 103949 - DNA, 413 bp, Glycine max
  unsure (1)..(413): unsure at all n locations
ccagcttgtttattcatctttttcattcccttctccctttgccaaaaagaattcgccaaggactaaccgcctgaattctttntgtgtctctcttctcccttttccaaaagaacgaaggactaaccgcctgaattcttttgtgtctcccttctcccttgtcaaagaattcaaaacgatacagtctgagaattcttttgattattcccattcccttatacaaaagtgttcaaaggactaaccacctgagaattcttttgtatccccattcacgaagtatcaaaggtttaaccgcctgagatctttgtcttaacacattggagggtacatcctttgtggtacaagtagagagtacatctacttgggtttgactgagaacaagagagggtacatctcttgtggatcagttctagtgg

SEQ ID NO: 103950 - DNA, 390 bp, Glycine max
  unsure (1)..(390): unsure at all n locations
tcatatattataactaaccggttgaagatcgacgagcgatgaagaacaaatgaagaacgacaaagaatggcataatagctgagcatgatccgcacctatctccctgcagcgatccgagtgaactcctgccctggtatgcacaatagctgagcgatggcctcttcatcaaaactagagacctgactcctcctctggctgaatttgcactgctgaccctcttccaagatcagcgggtggcctaagaactgactgagggcatctgcgtcaaagggtgtcacaaatgcatatcccaggagcgcatatctcgagttccctcctcggtaggccaggcatgggtgtaaaactccatgactatctctgggtcgaatntagccatgggtgtcacgagtg

SEQ ID NO: 103951 - DNA, 412 bp, Glycine max
agcttctttcctcttagaaacctctaagctctccttttcttcctagaattcatttcaagtttacactgatctcccatggccacatcttccatctcaactaatagtacactcctcattgttgtttctgctaccaaactcatagagttcgatatgcattccgttccctctcttggtttggaggatgagaccaagaagttatgggaaactcaagtcatgatctcgtattctcttactgaaaaatccttttgtaggtccgtaccaccctaccaacaaagtctttccatttttttccaagtactgcggaagaaatccctattatccatgatgatatcattaaaatggatttcatgaaggatggaaaaaagatttttgtttgaacccctcttctgattgaacccaccatgtatcatgg

SEQ ID NO: 103952 - DNA, 348 bp, Glycine max
taaacaactccttccaaaataaattaacaaagatatggtcccggtcactaataattgatgctggaacaccatgcagcctcaccacctcccggataaatctttcagcaaacatctgcgccgagtaagggtggttcaaagggatgaaatggccatatttagacaatctatccactaccaccaaaatggcctcataccctttaagattttgagagtctggtgaagaaatccattgatatatcctcccagatttgttctggaatattcaatggctgaagcaaccctcctggagcagcagctaagtacttctggcattgacaaacatcatatgccatcacaaatttctgtaca

SEQ ID NO: 103953 - DNA, 445 bp, Glycine max
  unsure (1)..(445): unsure at all n locations
tggagcgctatccgcagacttatcagaagtcagttgggaaagaaatcagactatgtgcatgaatcttacacccagtgggttattgataggaccaagagctttggcctaccctaccgcttacctagatacctatcgtccaccatcccaccatcatccttgcctattccctttgatactaaggaagagtttcatgaacaattaaccaaaaaaaggcaagaaaaagaaacttggaagaggagatgccaggagctcgagcaagagaatgagactttgaaggggaagatagcccaacagagccgtgagctttttatccagaaccagaggatgattgagaaggacgacttgcttcgtcggaaagacgctttgctccaccgagatgctagaaggaagaggaggtntatggatttgttctcccgtgcacattcagattccgaggatccatcta

SEQ ID NO: 103954 - DNA, 241 bp, Glycine max
gggggaaaaccagaaccagccctttgttttcttcaaaaaaaacctacctaaggacccggtctaaccccttcctgcctttcttaaaactttgaacctgaatgtgatgccctggaatgggaagtggagcctgtttgtacaatgtgggcccctattgttattttagtgaaaacttcatagtgccccctcactaccccacctatgataagagcttatgccttaatagagccctcaacttgggaca

SEQ ID NO: 103955 - DNA, 431 bp, Glycine max
  unsure (1)..(431): unsure at all n locations
gagagttttgtttttcgttgatgttactanaaattattgccttctccaattagatgttaataattttttaatggagatttgtttgaagaagtttatatggaacttcccaaaggttacaagtccaaaaattcttcctttgtatgcaaattgaacaaatcattgtatggacttaaacaagcttctaggcaatggttttgtaagttctccactacccttcttagtcatgggttccatcagtccaagcatgattactccctattcaccattagtttaaggaattccttagtcattctactaatgcatatagatgacatcatcctgtcaggaccaaattctgtctttgtgcaagctatttagacccaatttaaatctatgtttcatttgaagatccttggacttttgaatattttcttgcttanaattaacttaat

SEQ ID NO: 103956 - DNA, 350 bp, Glycine max
  unsure (1)..(350): unsure at all n locations
actagtnaggtgacatgctctttgatatttcctatccacaaaaattaactttggctactatcagtcagcacggttcttaacattaaaaaaaaataatgtaattcttaactttggctactatcactcagcaagggtcttaaattacttgcgacagaagccacagttatgagctatatggtatataccaacttattattcctaaattatgttctatactaatttcaagaagaaaactaacgttgtacacctgtctaaactactagcaccaagtatattttttgtaagaaaaaattatctgtgtgaaattgattaatgaagtattctttttgcacaagcatttttttctaaac

SEQ ID NO: 103957 - DNA, 434 bp, Glycine max
gcttgcacgcttgatgcgagaaagcgtggaatagtcagtcttcctacttttatttgttgaccatagagtggtacctggagatatgtcacgggggtcaggagaccttggggacgtcaggtggggtgctattgcccaaaaccaagcttggccaatcctgacccaacccgggcatagtcagccagtgagaacctgtgacgtacctaaacaggcaagctcctggcagtcaaccaataaaagaacaaaagtccatgaagcaaggaggcttgtgtggcggctggccagctatttatcttgggtgttatctgaaaaataccctctagtaatcgattaccattcatgggtaatcgattacagggtttaaaaattgaaacaggatgttaagtagcttctggtaatcgattaccaattctgtgtaatcgattacacagtgtgat

SEQ ID NO: 103958 - DNA, 258 bp, Glycine max
  unsure (1)..(258): unsure at all n locations
tctcgaggtctcatatgcacttctaatttgtataggtggngaaggaatctaagatcaaaattcanagatagtatcaatagttgcaaaaaagagctaaatgagcttatgcatagagatgataatgaatctgtcaaaaaattcaaccgtattaaggatgagctttcaaggtaggtagttcgtgaggaagcattttggaagtagcggtctaaggtttattttgcctctgtgatggagacaaaaatacaggttgtttcatgc

SEQ ID NO: 103959 - DNA, 411 bp, Glycine max
  unsure (1)..(411): unsure at all n locations
gggtgttcatagtaggtgattatatcattccctcatggctcagctcattatcagctggcaaaagccttgaatctgtctacatccattctgcttctccagcagatgtctccgtggcgaactacgtgttggcctgaaaggggcatgggaatggtttactgctttcttgtgtaagactgtgtagccatacaaatgtgcagcgaggggagtgtctttacgtttttccttctataatttggtgtcaaatcttcttcttcttcttcccttgtgtattttgcatttcagtaggttagatcaaaataggtagattatataagatggaaggaccggagcataaaggagtgaagagacaaaaggcagagnctcatcctcttcttctccgctttacaacttatatacagtgagtgatacaag

SEQ ID NO: 103960 - DNA, 424 bp, Glycine max
  unsure (1)..(424): unsure at all n locations
ttttaaacttttgtttatagagctcattcttaacaattcacagagtaatataactcattttaaaatctcactccaagttaccttaatagttttgagcaaagcagcatggtgcctcctaaggagagacaccgtctttctgtacatgtcccgtatcaactcttcagtcctttgtgcaacttgatcatccatcttaaaatttagtgggggttcgatcaagttgtagtcatcataaagagacccttcaaaatccagccttggaccaacaaatttaactgacttcctccaaggtggtggttcaccatgtatgaccattggattctccaaattccatctgcaagtagagaagggaaaaaggagctaatgtatcacgagaaaataagcagaaacttaaatgtataanaatacaaataatcatgctaacatg

SEQ ID NO: 103961 - DNA, 418 bp, Glycine max
tgcgataggcaaacattggaaagttagttttagtgggacattactcttaaagcaaaaatggcatgtaacctcctcccataaatacaaacatcaatgtaaatttagagcaagcttatgcgcatatttccttacaaacgttctcttgcacaagacatttaaccgaaaaaatgcacccatatacaatcaaggcagcttcgttacctagattatttacacgtacctccaaggtgtatttgttacttacatcacacacatctctttggctaaattcacatacatgcatactcaaagcattttggggcaccaaaaattgcacatgtgcacatcttggtgtttctaatacctatacatacgcaaacttcatgatgaatcttgactatccacacaataaggtgctacatttcatgctctttttttt

SEQ ID NO: 103962 - DNA, 251 bp, Glycine max
ggagtttccagtgccaattcgtcttcttcttttgtccagtcttcttctggcttcaattcatcagtgggctttccttctgtgtccagcatcttgggatgttcccagcctttgatgacaactttccaggttctgctatccagtgatttgaggaaggccaccatccttgctttccagtattcatagttggttccatccagaattggtggtctgttcactggtcctccttctttctccatgttcatcagaattta

SEQ ID NO: 103963 - DNA, 418 bp, Glycine max
  unsure (1)..(418): unsure at all n locations
ttcttcctcaagtntatggatggttgctcttaagacgactgcgtatatattaaaccgagttccaaccaaggctgtctcaaagacacctttngagttattcaagggttggaaacctagtttgcgacatatacgcgtttggagatgcccgtctgaagtaagaatttataatccacaagagaagaaagtagaccctaagactattactgggtatttcattggatatgctaaaaggtctaaagggtataggttctattgtccatcccacaacactaagattgtggaatcaaggaatgcaaagtttcttgaaaatgacttgattagtgggagtgatncaattcagaacatttcttctgaaagggatcactatgaagctgaaccttttgngacaagtaataggttggtagtcattccccacccc

SEQ ID NO: 103964 - DNA, 402 bp, Glycine max
  unsure (1)..(402): unsure at all n locations
gtggtactatgtggcggncgggcgatggtgcacaacaagtttttccacatccacaatgtgcgcataaacccaccatcccctgttgcccacctccaactgagctcacgtactcccacgtagcccatatcctcgtttctctcaacaccgggtccccatcaatcctcccaagcttccacaacatcaaagcaaaacaacattcaaacagcacaagctatcacagccaagcaaaacagggcaaggcagaaaattctgctcaacacactaaccaaaatgacagctcttctcacttaaagaccccagtaacaattccttcgatccaattcgttaaccgttggatcgactccaaaattttactggaagtctatagtgcataagcctacattgtgaccggtgggatctact

SEQ ID NO: 103965 - DNA, 428 bp, Glycine max
agctctcgagaattgaaagaaagatttagactcttgaggttcttgaattaaacgtgataaagtatatattggagcaattttatccattgtaatcattagattagaaataaaaattacttgctagtgatagaaatgaatattaatagctaacccacaattaatttctgaatattattattgataattttacagtgcaaaggtatttacattatatacacttaggctcataactgtttgcccagaataaggcaacaaactgttccaactaaaaagggaaataagacaagaaataaaagaaataacaattaagggaagaaaatgattaacaagagcagaagaaatcaactgtccttcaacagattggagttatccatctactccataaaatggattttgctagcataacttttgtggcaaatatgaactat

SEQ ID NO: 103966 - DNA, 434 bp, Glycine max
ctgatgatccatcaagttgattcaagaagtttttattatgacaaagatgattacaaaaagcgcaaagaatgatttcaagattaagtcaacaagttcaagatcaagttcaagagaagtttgatttcaagattcaagaaaagatgaattcaagtttcaagaaaagaaatcaagaagacttcacaagggaagtattcaaaagatttttcaaaaaacaaacatagcacagttttgtttttcaaaagagttttcacaaaattttctaagttaccagagtttttactctctggtaatcgattaccagtttcatgtaatcgattgccagtggcaaagtttgttttcaaaagcttttaactgaatttacaaagttccaattgatttcaaaatggtgtaatcgattacaagatattggtaatcgattaccagtgtgtttgaat

SEQ ID NO: 103967 - DNA, 426 bp, Glycine max
tgcttgagattttcttcattcccattgagttcaaactcagaattacatcataataaaagtgaaatgaagcacgtgtccatggaggcgttggctttgtatgcgagttgctggtacaagatgttgtgggttagggtgagtaagggacggtgaggctttagggtgggaggacctgtggcggtgagtatgaggctttgggttcggtggcaggagtatcgaagggagcctgatcatgaaatgtggagagattcttacctaattagggttcatgacattgagagaagaatgaggcagctagagggcaagagactatgtgttttagaaaatttgacaacattagattttttattaaccattattaacgcacgtctaccaacttcagttttggtcaaaaatgaagttaagggatacacacaagatcggttttta

SEQ ID NO: 103968 - DNA, 442 bp, Glycine max
ctccgcttaaagtacctgaataccattctaggtcaacctgttaaccaataatgagtattatcatttactccacctgctgcttaggttatgtgaataaaataactggtgcacaaataagccattttccagtcccattatgcctcacaagagtcaccaataccaagacttgtactaaacaaggaataccatatctgttggacatatttttaaatagaccattttttggaccaagggttgtcccagtcaggtgcctagtttactatatttccagtctgacaacccaaaattcataaatctaaaccactgggtttgacagaaataaaaatattgtgttatgtattaaaacatgtttataatatcttaaaaaacattctactgtgtaaaatgtacatagttggggtaaatatatatatatatatatatatatatatatatatatata

SEQ ID NO: 103969 - DNA, 73 bp, Glycine max
agcttagctcatcagtggattaagttctcatccaccactaagctctatcttcggtgcgacagaagaatctggt

SEQ ID NO: 103970 - DNA, 296 bp, Glycine max
tgaggcagtgtagaatggtgagacttcctgcttttattcgttgaccacagagtggtacctggagatatgtcgcgggggtcaggagaccttggggacgtcaggtggggtgctattgcccaaaaccaagcttgaccaatcccgacccaacccgggcatagtcagtcagtgagaacctgtgatgtacctaagcaggcgagctcctgtcagtcaacagataaaaggaacaaagaccacaaagcaaggaggcttgtgtggtggttggccagctgtgaactttgattgatatatgggatatg

SEQ ID NO: 103971 - DNA, 274 bp, Glycine max
gttatgatctttgacagagatcctaagtaaccttgactccagaaatatttacttacttcctattactatataatggacataagcccgctgagaggaacagaaagtgctattctaagaattctgggctctctggaagcattggggaacttaaataaaaaatggttctgttttaactatgttcttagactagccattagcgggatatgaaaaagaaaaatatcttcctttgtttaacctcggcccatgcaatggagaataacaacttttatcttat

SEQ ID NO: 103972 - DNA, 367 bp, Glycine max
  unsure (1)..(367): unsure at all n locations
aagtggaacaaagagttttatttaaagagggatgtatgtttagtgagtgttaagaaatatggagtgtttatagagaaaaatatacacaancttatgcgtgtgtatggtaaagcttgtttttggctatcataagtacgttagaagaaagataatttttctcttagagaggaagtaaaacaagttattacacaccaaggtgtactatgagaagctacttgtgagaatagcttattagtcttagtgggcggagatgcatctgaagtggggagctttgtgatatcttattagatgtaattatagtactttaggttattttggtaccaatattggataaaatgaacaagttgagtaacatataagtggaaag

SEQ ID NO: 103973 - DNA, 408 bp, Glycine max
  unsure (1)..(408): unsure at all n locations
agcttcttcattaatatntatatatgagaataaaataagaaggagaaaagcttcttcagaaaactaaaattaacttatgcattagttaaaatcagctttttttccaaaaagttgattttaacttatgttaagttaattgtagcttatgggagaaaatttatttcatcttttttctttttattttcttctcttataagtgcttatggagaaacttattcaaacatggtcttaatcaatgacattacgtttgattggaagacaatattagatgtacatgatctgattaaaattgggtagttaataggatggttggtaattgcaatcagtatcctctctctctctcttatatatatgngngtgtgtgtgttntcttgttttggatcttgaagaggtgtctactcactactc

SEQ ID NO: 103974 - DNA, 340 bp, Glycine max
  unsure (1)..(340): unsure at all n locations
cttgagtncatgtntggacaaaaaatatnagtgtgtatgatttttaataggtttgaactnctntttgcacactttntagacttattaatttacttacctttaatgcaatctacacaagtttcaaaatcagtaaaatctaaagcactaagtacccatttatttaccaatctcttagttctcttaatagagatgtgtcctaatcttcgatgtcacaaactgaatcaggcaaactgtctttgatgttgtatcattggactatcaacctgtgattgttattgttgatgctacagcaacacctacacctaatgttcatcangggtacgtattttgacatgaaaat

SEQ ID NO: 103975 - DNA, 342 bp, Glycine max
gcccctgaagttaaaatttttcccaaggggcctcatacatattctcttttttttttttggttggaataaaatttaagtgagttgaatatgaagactcacgagagtcaagacaaatttcaagacttaaagaacaattacacactcatacctactctaatgtgtgtgctcttgtattaaaatgacgcataatgttcaaatttggatttgccacatctttgtcatacttatattattcaccatccttatttattttttggatatgttcctcttggtgacaatgaaatctaaaagtgctacaatgctgatacaatgacacgttcacgttaattatttatgtcaaaa

SEQ ID NO: 103976 - DNA, 288 bp, Glycine max
  unsure (1)..(288): unsure at all n locations
acagctctatgtatcctcttcttantttataaaagttgccatttgaaaaaaaaacaaaatcaatttgttttctttctcagttgatttatttattataattcagatattntttaaccattgtagttatggtgagactcgatgtatccccaaaattcggtcattcggattcaagacttaagtcatctccaatgaaagatgcttcatgagtttttttttaaaaatattattgttggagtaagtctaattggcattgccggtatttaagttttagcatgggtatcttacaag

SEQ ID NO: 103977 - DNA, 440 bp, Glycine max
accttgtaagattatggggtacccatcacatgtggtactaggtggcggtcgggcgatggtgcacaacaagttttccatgtcaacaaatcgcgcataaacccaccatcccctgttgcccacctccaactgagctcacgtactcccacgtagcccatatcctcgtttctctcaacacgggtccccatcaatcctcccaagctttcccaacatccaagtaatacaacattcaaacagcacaaattatcacagccaagcaaaacagggaaaaggcagaaaactctgcccaaaacaccaaccaaaatcacagcttttctcacttaaagaccccagtaacaattccttcgttccaattcgttaaccgttggatcgactcgaaaattttactggaagtctctagtacttaagcctacattgtgaccgttgggatctactagcaaaca

SEQ ID NO: 103978 - DNA, 399 bp, Glycine max
cctatagcgtgccaataattaaagaaatttagtttgccagaataccttgaaattagtggagagaatatctaggggagcaaaatcaattaccctaagtggaaatgaaacaaatgtataatgaatgtaattatgttgctaattttttggcctccaatgggcataatattaacttatgaacacaatggtgtcaatatcccctagaggaatgaatacctaccttatttgggatgattttgtaggggtgagatatctccgtaaatttctcttcagtggcctctggggcccttgtgttaaaaaagtcaactaccctactttatgataagttctaactagtaacaattaataaatgctacaagattatctatttagataaaaaaatttaataaaatcgaaaagatg

SEQ ID NO: 103979 - DNA, 336 bp, Glycine max
cgggacatcttgacttgctttccaatctgacattcacctataattctgccttcttctattttcagattgggaatgcctctaacagcacctttgtcaatgattttcttcatgcctcttaagtgcagatgtccaaatctttgatgccatattctgacttcattttttttggaggatagacatgtggaggagtaactggtttcttgaggtgtccataggtaacagttgtcctttgatctgctgcccttcattagaacttcactcttctcatttgtcaccaagcattctgactttgtgaagttacatttgaatctttatcacacaactgactgatgctga

SEQ ID NO: 103980 - DNA, 448 bp, Glycine max
  unsure (1)..(448): unsure at all n locations
gctttaaaatatgaaccaaaacattcaataactgctggttatcgattaccatatatgtgtaatcgattacacagtgcaaattttgaattcaaatnttaatagctgttgtaaatcagttttggccactggtaatcgattacatcctctggtaatcgattaccagagagtaaatttctttgaaaaagactttttaagttaaaattcttggccaaaccttttgctacttcaattggaattcccttcctatttaatataccctttctaagactctagagactgtcttgatcatccatcttgaatatctttaatttctttgtcttgaataaagctttgagacgcatgtgaacctttggcatcatcaaaacattcagcttgatcctttgtctacaatctccccctttttgatgatgacaatccctgaaatcaagacaagctatatacaagatga

SEQ ID NO: 103981 - DNA, 442 bp, Glycine max
  unsure (1)..(442): unsure at all n locations
acctngacatgcaaaatgacagtctactatgtactcaacttcacatgaagataaagctactacatcttgcttctttgaacaccatgaaattggtgcaccacaaaatctgaacaatatcccatagtgctattcctattcaccttatctccacaccaattagaatttgagtatccatacatctcaattctgcattggttctcttttttaggaaacaaaactccaaaatatgaagttcccttcaaatatctcaaaaatctcttggctataactagatgtgattgcttagtatctttcataaatctactaacaaggcctacaccataggaaatatctggtttgttgttgcacacatacctgaaggagccaattaattgtttgaacaaagtgttgtcaactaactttnttgcctcatctttgactagtttgatgttggcatctagtg

SEQ ID NO: 103982 - DNA, 318 bp, Glycine max
  unsure (1)..(318): unsure at all n locations
gtgttgaanggtgacacttcctgcttttattcgttgaccacaaagtggtacctggagatatgtcgcgggggtcaagagaccttggggacgtcatgtggggtgctattgcccaaaaccaagcttgaccaatcccgacccaacccgggcatagtcagtcagtgagaacctgtgatgtacctaagcaggcgagctcctggcagtcaacagataaaaggaacaaagaccacaaagcaaggaggcttgtgtggtggctggccagctgtgaaacttgattgatatatgggaatatggccntggtaatncaattaccaggtgggt

SEQ ID NO: 103983 - DNA, 423 bp, Glycine max
  unsure (1)..(423): unsure at all n locations
agcttttctttcacaatcaatctgtctactgactaacaattctaaatgcaagctcacattcttgttctttctttgtctaacatacacacttgctcaactcatgataagaaacacaaactccatcaaaatcatgcactcaattcaaaataaagacatacacccattntcataagtcaataaaagtgcttcactgccatgtcatcaaaacaagttaaactgttcaaaatgcttcagaataagcataccaacgattcataaataaaactatcaaaaaggaattactgtaataagactataattaaaataataataaatcaaaaagcaaaaagtatcattaggaatcaaaattcctgtgactggtcttgggtgtcctgtgtctgaccatcctcctcatttgtcaactgaagcactggagtagttgga

SEQ ID NO: 103984 - DNA, 304 bp, Glycine max
  unsure (1)..(304): unsure at all n locations
gagcgtgtcgattattatagtttcttgatggacattcgtgtcaaaggagatgaccattcgaatntctcgagagctttcgtagttcaatctcgagtgtctcgatatattatctacccgaatcggacatacgtgttaaaagacatgaccattttaatttctcgagtgcttacgtttttcaatttcgagcatctcaatatattatgtccttaaatcgaacatcagtgtgaaaaggtatgaccattcaaatttctcgagagcttccgctgttcaatttcgagcgtcttgatatattgagtccccgaat

SEQ ID NO: 103985 - DNA, 474 bp, Glycine max
tcgccccgggatgattcatgcacctcacgcatgcaagcttcaacggaacttacatcatgtggtatcaagagcatcttcatctatgtgatgttcttttgcttcctctatctttttgttcggtgaattctctttaattccttgttcttcatcttattctccatgtatatcctccatttccttgtggtttggtgctgtttagagtagattcaaaaaaaaaaaatcgattaaatcttagatctacacttgttcttgtatttctatggttcaaattttgtagatctactcttgaatcatgtttttgtgttgattttaggttctatcatttttcattcataatattcttgtgctgaaccttagatctaaagtttattccaaaatattgattagaaaaaaaaaacacaaaaatctaagtgtaaatcacttaatccatgttgtcttagagtcatgtttagtcatagtaattgtcacattatg

SEQ ID NO: 103986 - DNA, 432 bp, Glycine max
  unsure (1)..(432): unsure at all n locations
aggctaagaaagaattacttcatcaattgtgggatgcctcaacagcttatgagtctttattaaggcagaaatctagagataaatggctaaaagaaggggacaacaactcagcttatttccataaagtcatcaatttcagaagacattataacggtcttcaaggaattctcattcagggagagtggattcagaaccctattgatgttaagaaggaggctgttaattttttccttaatagattctctgaacagcagtcttgtagacccactcttgatggagtgcaattctcctcattaaatcaggagcagagagagtttttggtggttcctttttcggatttggagatcaaagaggcagtgtggagctgtgatggggacaagtgtcctggtcctgatggcttcaacttcaaattcattaaagaattntgggata

SEQ ID NO: 103987 - DNA, 441 bp, Glycine max
tgctgcatgcttgcttatgctgtatacatttataatttaccccatcaacaacaaaagaataattatgatctttcaagcaacagatacaatccaggttggagaaatcatccaaatctgagatgggcaagtcctccacaacaacaacaacctgtccctcctttccagaatgctgccggtccaagcaagccatatgttcatgctccaatacagtggcagtcacaacaaagacaacaagaaactgaggctccttctcaaccttccttagaagagttagtgaggcaaatgaccatccagaatatgcaatttcagcaagagacaagagcctccattcagagtctgacaaatcagatggggcagatggctactcagttgaatcaagctcagtcccaaaattctgacaaattgccttcacaaactgtgtagaatccggaaaatgtgagt

SEQ ID NO: 103988 - DNA, 427 bp, Glycine max
  unsure (1)..(427): unsure at all n locations
tccacctgcagttgccattatagtggcatatgtggaaaacaattaatgaatataacttttttgtgcaatggaaatgaaaatataaggatattttgtaaatggaaacttggggactgtttggtttgaccaatttatacagaatcatatacattggaatttatttttctgaggttaatttcagtcatgacctctangaattaattatgtcttttgctttgaatattttgtgtttcccattcctaattcaatttttaatactgccacagggtcaaactcagagctttgatcttcctattaagaaaaggatgtatacatatcgtaccttccactcgcacatacttttgatagggtcattgaggagatattcatatggcattggtgcttcaattggttctggcgtggggtaagtatatgtagtatatgtata

SEQ ID NO: 103989 - DNA, 426 bp, Glycine max
agcttcttctggtcacttgcttcttcttcctcaaattagggtttatcaagcttctgtcctctgaattccctccttgttcttaagtgtgttcctcaaattagggtttgtaaagcttttctcgtctgtaaaggttctacccttggttcttcttcttcacttgatttctccatgtttgcaagtgagagttcttttacattttatggtagaatcattcgccaatgccaccatggaagatgtgcagctattcaaactgcaagaataaggaggaacccaggaaggttattctatacttgtgcattgccccaaacagacctagataattgtcaattttttcaatgggttgaagaagaaaaccaagtttctattccttcttctgtgacaagagaatcaatgatagtggctgatttaaacctacaaattgaagct

SEQ ID NO: 103990 - DNA, 426 bp, Glycine max
  unsure (1)..(426): unsure at all n locations
ttaactgtgcaatcatatgatcaatgttgctntaattatggtgctgaatggtgggcaataaagtgctaacaagagcataagatgtgttgcgcagatgaaatgttgcattggatgagtggtcacactagaaaagataagagagaaattatgagttgcttttattcaggaaaaatggtagaatcaggcctataatagcttggacacaagaaaagaataccaatagaagccccaattataagagttgatcaaattgaggatagcccaataaaaggtagattagactaagaaaaactcccaagtgaaaacagtagaaaaggatttaaaaataaatggactgtttgaagaattggtttttcgcaaaagacaatgacattgtttgatccatgagccaaccttgcccagtaggaaaaggctctgatctttgtt

SEQ ID NO: 103991 - DNA, 423 bp, Glycine max
agcttctacattcaatttcgagcttttcgatatattacgggactcaatcggacatccgagtaaaaagttattgtagtttgaatatgctcagggcttcggtattccatttcgagcgtctcgatatattacgggactcaatcggacatccgagtaaaaagttattgttgtttgaatttgctcagagcttcggtattccatttcgagcatctcgatatattacgggactcaatcagacatccgagtaaaaagttattgtagtttgaatttgctcagggcttcggtattccatttcgagcgtctcgatgtattacgggactcaatcagacatccgagtaaaaagttattgtcgtttgaatttgctcagagcttctacattcaatttcgagcttttcgatatattacgggactcaatcagacatccga

SEQ ID NO: 103992 - DNA, 274 bp, Glycine max
cagcttgagaaaattcaaacgacaataatcttttactcggatgtctgattgagtgccgtaatatatcgagacgctcgaaattgaataccgaagcgctgagcaaattcaaacaacaataactttttactcggatgtctgattgagtcccgtaatatatcgaaaagctcgaatgtgaatgtagaagctcagagcaaattcaaacgacaataactttttactcggatgtctgattgagtcccgtaatatatcgagatgctcgaaatggaataccgaa

SEQ ID NO: 103993 - DNA, 420 bp, Glycine max
agcttgccacccagctcgcccaggttagcagggttgcttcctttcataaaaacagccttctggaggaatcttctgcagggcccaagtgggcctggttgctatttgcacccccatttttactaagtacaccccctgcctttttttggtgattcttttttcgtaaagttacggaaacttatgaatttcgtaacgatacttgttttctttccgtaatgttacggaaccttgtggattacataatcatcccctttttgacttacggaatgttacggaacctcactaattgtgcaacgatgcttccatttgatttccggtgtgtcacggaaccttacggattgtgcatcaatattttcttttgtttggtgctttctccactaaaatgcaaacatgctttagcaaagagacaaatattccaactga

SEQ ID NO: 103994 - DNA, 320 bp, Glycine max
cttcttataagacttattctaattattattccttaagatctttactaaggatgataaccaaatatatctcatttaaaggtttttggatgtaaatgatctgttttaaacaatggaaaagaatctcttggcaaatttgatgcaaaagccgatgaggctagttttcttggttattcattgcaaagcaaagcatatagagtgtttaatagaagaactatgtgtgtggaagaatctgtacatgttgtttgtgataaaactaactctattattcaagaaaatactttggaagatgaagatgcgggtttttcagataaggacattgc

SEQ ID NO: 103995 - DNA, 422 bp, Glycine max
attctctattcttttatttttatgctttagttttaaatgttaaggcttagctacaagtctaatgactctttaaattgaatgcattatactgtaacaaattgatccatctttgtacgtaataacttaattgttatgttgttagagttacaacaacaaacatataatgcagctgaagatgctcattataaatttacatatcaacatcgattttttaaaaaaccgatgttggtatgtaaatttataactttcttttttcaaaattcttatcatataacatcggctatttaaataatcgatgttgtatttattagttaacattggttttgaaaaaccaatgttaacgatattactttcaacatcggttatataaccaatgttgaaagtattaaataaccgatgtaaaaactttattttctagtagt

SEQ ID NO: 103996 - DNA, 437 bp, Glycine max
  unsure (1)..(437): unsure at all n locations
tgttcgaagatcctagagatgtcataagaggggcctatctttcagaaaaaactttcaagaaatttttgaagatttctcttgatgaaaactataacctgcatccttttgagttcaaccattcccacttctgcaccatgggatttgttacctggtgggagaaatattattcgggccgttcagttggagacactactatcatgatctccagacttgagagtggttttacacaaccaacggtcgagaatatccgctcaaaccttcaagctcgaggtattaaattacttttgactntctaaattgatatgtattcttgccttttctaatattcttactttcaggcaaaacaatcatgacgaagaanagcgctgaaacgtctcgagctgatgtgagacccaagaaacccactggggtaaaagatccagaaggganacaagaag

SEQ ID NO: 103997 - DNA, 412 bp, Glycine max
  unsure (1)..(412): unsure at all n locations
agcttcatgcttcttgtcataacttctntacactcttctttggtatttttcttgggatttgctccaaagctgttggatgacttctcagctaacattttggccatttgacccacctggatctcaaggtttttcaaggctgactcagtactcttatggttggacatggtcacttgcataaactgagctagtgtctcctccaatttggtggtcctctgaaaaatatttggcccttgttgaggtggcctgttggaagatccaccttagtccttattgaattgattgccagggtgtgatctccattgcccttactgattgtagggaccttgctggaatcctaaaaatcctccttggttgtatccttgtctctgttgatttcccatgtaatgaacttcctgagtgtgttcttcaatgg

SEQ ID NO: 103998 - DNA, 422 bp, Glycine max
  unsure (1)..(422): unsure at all n locations
tttggtgtagaaacatgggaccaactcattntatgttcaaaaaaaaggaagtcgtatctagtcaaggtctgagagaccatacaagtttcctaacgatttctaattatgtgggccattaagtctatcatatgctgacaatagccgagaagcccatgaatctcttcgggggtggagtaggtgtctgccattgccttggccttggctaacaagcggggaagttcttgactcccgttcaaggtaagagcgaaccggtccatccacatggttgcctcttggtgtaaagagtcgatcacccttcctctagcctctttttccgcgtatacttgggcatactcatccgcgattctatgctcgtgggccgtggctagacctaactcttcttggtacttggcgatgatagctaacatgttggtctccgtctc

SEQ ID NO: 103999 - DNA, 405 bp, Glycine max
  unsure (1)..(405): unsure at all n locations
tgcagcttaaacacatctagagngggtgttagaagatgaatctagcttttgcatagtgtaggttgtcttcaaccttctctctcatgttttgtagcaatcattggtcctcttttaagccccacatgtcaaactagtcattatgacagttgggtgacttcttttctaagtagacagattacttttaactttacagttctcaactccttttctatcaatccattatattgttttcattctaattgtcaaattttgagcaactttctaatggtatatcaggattatattttgatgttgttgagaaaggacatattctgatgtaggttccttctaatgaagataacatgatatgacattgtagatagttcaaatccattaatccaaacacttcgtcacaacgcatattat

SEQ ID NO: 104000 - DNA, 391 bp, Glycine max
  unsure (1)..(391): unsure at all n locations
tcaaatggtcataacttttcactnggaggtgcgattcaggcgcataatatttcgagatgctcaaaattgaacaacggacgctctcgagaaattaaaatggtcataacgtttcactcagaggtccgattcaggcgcctaatatatcgaaaacactcaaattgaacaacgaaagctctcgagaaattcaaatggtcataacttttcacttggaggtccaattcaggcgcataatatatcgagacgctcaaaattgaacaaggaaagctctcgagaaattcaaatagtcataacttttcacacggaggtcagattcacgcgcataatatatcgagatgctcgaaattgaacaatggaagctctcgagaaattcaaatggtcataactttacact

SEQ ID NO: 104001 - DNA, 414 bp, Glycine max
  unsure (1)..(414): unsure at all n locations
taaagctccatgtttaatttgagcgtctcgatatattatgcgcctgcattggacctncgagagaaacgttatgaacatttgaatttctcgagagcttccgttgttcaatttcgagcatctcgatatattatgcgcctgaatcggaccttcaagtgaaaagttatgaccatttgaattgctcaagagcttccattgttcaatttcgagcgtctcgatttattatgcgcctgaatctgacctccgcgtgaaaagttatgaccatttgaattgctcaacagcttccgttgttcaatttcgagcgtctcgatatattatgcgcctgaatcggacctccgagtgtaaagttatgaccatttgaattgctcaagagcttccgttgttcaatttcgagcgtctcgatatattatgcgcctg

SEQ ID NO: 104002 - DNA, 415 bp, Glycine max
gtgaaaattgttccttatgtgttttaggcctgtcttatcgtaaggccggccctgtatgatatgtgacggagataaaagcgattgtgtgcaccccaaatccaaatgccccaaattcccgtcccaaaacaacacgttctcaataggaaattacaaaaattataacgacggctgataggaaatgcgttttgaaacgattcctgaaacggcacctggaagcggcgagtggtgacggcgccgccggtcgaagtgaggccctagctatggacattaagaagcgcgacagagaaccccaacgaaaagccatttgtgtttattagaatgcaatctcggatatgaggaacgtattattaaggctttgcgagggtttaatggtggctgcacctgaaacgaagacgttttagtttgcttttaattt

SEQ ID NO: 104003 - DNA, 430 bp, Glycine max
  unsure (1)..(430): unsure at all n locations
ggcgctagtaaatgtttttcatggcagcatgttctgttaacatccatccaccaaggcttgttctaagtgacagagcgagagagagaggcaattgaagtttttggagttttcttaaaggtttctctgatttcgagagtgactccgtgactcgttcagtacaatccgtgacctggttcgagttctgaaacctgtgtgcagtctcacagattttcattgtaaattttccatacataatttgcaatattcggcctctctggtgaaagatgttttcgttatatctccattcatttctttccgacttgttaatcagaggaagcatatataattagagtgataacgaatttaagggtaattaataagtgtgactacacatatagatagacggagagagctagatattgagtttcttaacaatactaanatcttaaat

SEQ ID NO: 104004 - DNA, 371 bp, Glycine max
atggggctctattcttatgtggtgatagatgtgttctcggcgaagagccacttcaattgattgctgtgggtcccagagatcaagagacagacatcttttacttacccgcttggagtatctgcttgtctgcgcatgccttcctgtctgtgtaatgcttcactacattcccaggtgcctgatggccatttcttctattctggtggagaaatgtatcaaagtttccattgatgatttctttgcctttggggatattgtgatgcttgtgatcaaatctggaacaagtattgtgcagatgtgaatagtctaccttggtgcttaactgggagaaatgtcacttcatcgttcgagaaagcctaatgctggggcgtaaa

SEQ ID NO: 104005 - DNA, 295 bp, Glycine max
gctcgagcttaactacacacacccctgtattagcatagctcgcccccatgccaagatacatgaaaatgcttagctacatgcatctcttggatagcaaagctcagccgcctgccaaaatacatgataatgagaaaagaccctactgcatatactacgtaaaatgccctgaaataagaggctcaaaccgtatactactataatggccagaacacaagggcgacaagaaggaatacctgtactaatatctacaatgaagaggggacccaactgtgggagcacaatctgtgtggggact

SEQ ID NO: 104006 - DNA, 428 bp, Glycine max
tttttatcaactcaaaatacaagaaaccacgttttagtgtcttattcacaagcaatgtacaaaattacaaatttcaacggaaagtaagctagattagtgataactgctaaataattgtattttgataatagaaaattagtcaaatattagcctgaaattaattatttagcagttatttgtgattaaaagttagaaaattaattaaattgaatttttgggtgcagatataaaaattggaggtgtaacaagcaaaaagggcagaaaaattgaagaaaagaagaaaatttgaaaaaggtccaatccaatacgcgcgctcagcgcgcgtcacgggctaagcgggtcaggaagtacacgcgctaagcgcagggtgtcacgctaagcgtgcctacaaaggtccaaagcccacttcagcagctataaatagagag

SEQ ID NO: 104007 - DNA, 354 bp, Glycine max
  unsure (1)..(354): unsure at all n locations
ttataagagaatatggatttttgaaacagatttttatttatgatccagaatatcatttaagagttttttttctttcagaattcacttgcttatgttgctaacaatcatgtgaatatagtttattcttaccatagaattttcaccagttctctaaatatagaataaagaacaaaactaaccattgtttccttagttctcgcctttcttgccccctgaagtgttttattgaatgagttgcaactaattaacctgaggaccccatttttaacagattttatattttgtgtttcagttcagccttgattgtagcaacctgttaaaagcataaattnanaagctgtttttgctactgtt

SEQ ID NO: 104008 - DNA, 450 bp, Glycine max
  unsure (1)..(450): unsure at all n locations
gcatgcaagcttntccagtgagacaattgattcaatgggacacgtcaacttgcttgacacttttggagacgataaagattccaagaccatcatgatcaggtatctcctagccaatgctttcacttattataatatattaattggtcgacctacactcaatgaattgggggtcattatttcaactccccatctggcgatgaaatacccgagtacgagtggcaagattatcatcgctagagccgaccaagcaatgacataggaatgttatgcttcaagcctcaagattaccaagggaaagaaggtagcagaactcaaagtacaactgatatcatgcacctctccaacaatctaggagaagcagagctcgaccctagaaaagccaagagcagagcccactgaagaagtgaagcctttccaactcgacaaagaaccatctcaatgcactaagct

SEQ ID NO: 104009 - DNA, 341 bp, Glycine max
gcaactaactcctctatcatatccatgctgtgttcttcgactggtccctctcttaccgggacagtttgagttcactatagctaccccatctagctccgttagaattatacctgccatactctgccttgtgagacttgttagctggtgggagaaagactattgcgggaattgcattgtatacccgtatatcgggacactcatacttgatatgtgtagcggccaacttgaagttgtgaatgtccagtcaaacctttactaactaggtattgagagcctggagactttctgaatcgatatgtgttctagaactctcttcgctgacgacttttaagctggcgagc

SEQ ID NO: 104010 - DNA, 427 bp, Glycine max
  unsure (1)..(427): unsure at all n locations
ttcttnctcagtgccattcctgcgttggcaaacatttggaaagttagttttagtgggacattactcttaaagcaaaaatggcatgtaacctcctcccataaatacaaacatcaatgtaaatttagagcaagcttatgcgcatatttccttacaaacgttctcttgcacaagacatttaaccgaaaaaatgcacccatatacaatcaaggcagcttcgttacctagattatttacacgtacctccaaggtgtatttgttacttacatcacacacatctctttggctaaattcacatacatgcatactcaaagcattttggggcaccaaaaattgcacatgtgcacatcttggtgtttctaatacctatacatacgcaaacttcatgatgaatcttgactatccacacaataaggtgctacatttcatg

SEQ ID NO: 104011 - DNA, 424 bp, Glycine max
gtgcctattcgtcttcttcttttgtccagtcttcttctggcttcaattcatcagtgggctttccttctgtgtccagcatcttgggatgttcccagcctttgatgacaactttccaggttctgctatccagtgatttgaggaaggccaccatccttgctttccagtattcatagttggttccatccagaattggtggtctgttcactggtcctccttctttctccatgttcatcagaatttatctccctagatctcactcagtgatttcgagtgcctgctctgataccaattgaaattctgatacagaggtcagatgtcgtaccggatgtcacgacatcacgcttcagaacatggagattatatttgactgtatggacagattaaaacaagtaaataacacaagagaattgttaacccagttccg

SEQ ID NO: 104012 - DNA, 419 bp, Glycine max
  unsure (1)..(419): unsure at all n locations
tgcttattgtaacttaattgtagtttatggtttgaggaaggggggaagggagnaagggaatgaatgagaatttgtgtaggtgagagaaggggttcttctttaatctccaatccatctcatcttaatagtgtctagataaaaatgatagtgaaatatggcccaagcatcatacaataaaccctacaaaggatagttgtagtcctatatggtggatgttacccttcaagtaactgttcgtttagccttctacgggagagttggatgttcctttgaggaacttggccttaaccctatatgggagtgtaacgttcctttaatgaacttattcttggcactataaggaggaagtgcgtattctttatggatttgccctaagtctcctaggagagttgaccattccacatggaatgtatcccacc

SEQ ID NO: 104013 - DNA, 428 bp, Glycine max
  unsure (1)..(428): unsure at all n locations
aagtntatgtggcttgtaacaagcaccgagtcagtggtacaagttgtttaatgagtggatgagcaactcaggattcaacagatgtgacatggaccattgctgctatgttaagaaatatactaatagttatgttatccttgtcgtgtatgttgatgacatgttgattgcaggatctattatggcagaaattaacaagttgaagcagcagttggcagaaaactttgaaatgaaggatcttggtccagctaaacaaatccttggtatgagaattcttagaaacagatcagaaggaattttgaagctgtctcaggagaaatatatacacaagttgcttgacaggttttaccttggagattctaagaccaagaatacccctttaggatctcatctgaaagttttcaagaagcaatctntgcaaacagatgaag

SEQ ID NO: 104014 - DNA, 412 bp, Glycine max
ttcttgccgtccagctcgcccattctagcaaggttgcttcctccagaagcaacagccttctggaggaatcttctggagggcccaagtgggcctggttgctatttgcaccccctttttactaaatgcacccccttctatttttttgtaattctttttccgtaacgttacgaaactttgcgaatttcgtaacgatacttattttccttccgcaaggttacgaatccttacgaattatgtatttactcttttttagctttcgaagaagttacggaaactcacggattgcgcaaaaacacctcttttcgatttccgccacattacggaatttcacggatcgcgcaagcctgcttccttttgatttctgagacgtctcgagacttcatttactgtgcaacaaaggaagccaagtatc

SEQ ID NO: 104015 - DNA, 317 bp, Glycine max
  unsure (1)..(317): unsure at all n locations
ataagtganatcaggtgttttcatttcctttagtgtcctctcacgaggtggaggttgagccatattttcttaatgttcaaaatcagaatgctcaaagtcagaattctcaaaatcaggatgttcaaaatcaccaaccacagaatgatcaaactcaccaataacataatgcccaggatgaggtacaaaatgttcagggtaatcatgatgcacactatgcctaactaatctatgaaatgtcctttctatttcaggatcaaagggttgtaagtcacctggattgcctcaagtcatgcactatatgcaacagtttatgtgtt

SEQ ID NO: 104016 - DNA, 398 bp, Glycine max
ttcttctaccttaggtgctcagctttgctccaaatcgcgagatgtgagcatcctcggagtcctgaagagcgtggctactagtgggacttctaatattcacgttggggtggacttctttccctcttgattttcgtgggtatggggttctgggagacatgaggggtacgtttgaaattgtctgctgtgtgaggattatttgtgaatacattcgttgaaagcttgtctaacttgccatgtttgggtgagttacacatacccattctgttttaaggttatcgtgatgaagggtgtgatgtttatatgctgaaattgcagatggaaatctggtatagacccaaggcataactaccccaatgttagaaagtgacaatgtgatgttatgagtggaaaatttacaa

SEQ ID NO: 104017 - DNA, 421 bp, Glycine max
atctcttcgattcattctatgcactcatagaggtccacattgtgtttagtgcattttttctcgttttgtttactttttataccccctgttgacgtgcttaagccattttacttaagtcgtttctcgcttaacttaaaaataaaataaatttccaccgaacgtttgaattgtattatccattaactttggttaaaatcaattccgactgttcggtcgtgccgtaaccacgttggaaatcaaaaagaggtaaaaaataatataataatcaaaaagacatcttttagtgaaataaagcggaaaatcaattggacattttctctttgggatttctcattcttaatcgaattgattaataactaaagtgaaactaaaggctaaaatcaatccacctagtcaagctcgtccacaaaaataagctttt

SEQ ID NO: 104018 - DNA, 419 bp, Glycine max
tcgcacatgataatggagacacatgaacagcgctaggctatgacattcatggtgctccgaacaaaggcggagtatggaggattggcttgagggtccacacttaagcaattatgaaactcagctccaaactacaaagtggaggacacacgaacaaccctaagcaagaacattcatgtggctccgaaaaaggacgagaatggatgattgccttgagggtcctctcttaggcaatcatgaaacacagctccaaactcaaaagtggaggacacacgaacagccctaagcaagaacattcatgtggctccgaaaaaagacgagaatggaggattgccttgagggtcctctcttaagcaataatggaacacagctccagactcgaaaatggaagacacatgaatgacaacgcaattcattcatgt

SEQ ID NO: 104019 - DNA, 413 bp, Glycine max
  unsure (1)..(413): unsure at all n locations
agctttctcggggccattcctgcgtatgcaaacatttggaaagttagttntaccagtgggacgttactcttaaagcaaaaatggcatataacctcctcccataaatacaaacatcaatgtaaatttagagcaagcttatgcgcatatttccttacaaacgttctcttgcacaagacattctattaaccgaaaaaaaatgcacccatatacaatcaaggcagcttcgttacctagattatttacacgtacttccaaggtgtatttgttacttacatcacacacatctccttggctaaattcacatacatgcatactcaaagcattttggggtaccaaaaattgcacatgtgcatatcttggtatttctaatacctatacatacacaaacttcatgatgaatcttgactatctac

SEQ ID NO: 104020 - DNA, 389 bp, Glycine max
  unsure (1)..(389): unsure at all n locations
tataataacaaaattgccttattcatttccaaatatttatgtgaattaagacgcatcaacaagaatcaagccaaagctattgtgcaagcaatcaatggggcaaaacacaccaaatgattataatgatggatggctcaaattctcacaaaggtaaaatcatcactttcaaattgagctttcaaaactatcatgacatgtagagaagaatcaaggatttcaagtcacaaaatgtcaagaacttttattttcaaagcaattacccatttcttgaacatatcctataattcaaagaaaaacatgcaaagtcgtacgtgcacacaaaattgaacccaaatattaaactgaatatncgacgaaactaacaacattaacaaattaacacaactaac

SEQ ID NO: 104021 - DNA, 398 bp, Glycine max
agctttattctacacctgaaaaagtggatgagctatctgcacaaaagaaaagctctctgatcatgatggagctaacaaaaattttcatgcaggtggactttcttcgagtagttctgacttgcagcagcctcctatccctcttccatttccacctagagcaattccaaacaaaaagatggaagaagttgataaggagatcttggagaccttcaagaaagtagaggtgaacatacctctgctagatgccatcaagcaaattccaagatatgtcaagtttctaaaggagctgtgcacccacaaaaggaggctcaagggcaatgaaaggattagcatgggcagaaatgtgtcagcattgataggtaaatctgttcctcacattcctgagaaatgtgaggacc

SEQ ID NO: 104022 - DNA, 347 bp, Glycine max
tgtagcacacttgagacatattctgaaagatcccatctgttagatcatgtgaaattgtcttgtgaagttacaaaccaaatttagagaagatgcaacggttaacgaaggctggacaacgtttttaccgcggcagcttcatgtagctttctctagaagcttcattaagaggcttcctccagaagcttcctcgtggcttctttgagaagctttcacaagaggattctttgagaagctagatctttatctatccacacccctctattaactaaattaacttccttaaaaataattacggatgaaaataacgcaacaaataatcaaacatcaaacataattactaataatat

SEQ ID NO: 104023 - DNA, 424 bp, Glycine max
cttgcaagcttaaatccattggccaaacctcttgttgtttcaacttggaattttcttcctaaatcactagttatcttcttgatgatgtatcttgtatttcttggatttttgtcttgaattaaacttgagaagtgcatgaccacatggcatcatcaaaacatcaaagtcaaagtctttgcttttgtttctacaaatgcaaactcaattaataccagttcagccacttcccgtgcctacatccaatcctcaagcaacccacttgagattttccactatctctgtaaatatttatagactttgaacacaccttgggatccttcacccttgtgttcaagattttccaagagacaaccagtctcttgattacaactgagtttctgagatgaacagaaagaattctcccctttagagtagatgatacaaa

SEQ ID NO: 104024 - DNA, 411 bp, Glycine max
  unsure (1)..(411): unsure at all n locations
ttgtgtcttcgagctaagcgccagctttgttgcgcttagcgcctgagtaaaattcataaggcgtgctaagctcagcctgctgcactaagcgcccagtcaaaatttcagttttatttttatngttttgtgaaaataacttgtgctaatctcttgtgtttgtcttatattttgcagatgacatctaagaataggaaagctccttctacaactacccaggccagatttgatagatccaggttcacatccctagaggcttgggagagatatgctgacattgtggtgcctcgaaagctactaccagagaggaatgttgtaatttattacacaaagtttgacgagttcaaggaggaactcaagagaagacattgngataagaagctgactgatttttctgataatagcatagacatc

SEQ ID NO: 104025 - DNA, 460 bp, Glycine max
ccgggatgatacatcgacctgcggcatgcaagcttgtagcattatggggtacccttacatgtggtactaggtggctttcgagcgatggtgcacaacaagttttccacatccacaatgcgcgcataaacccaccatcccttgttgctcacctccaactgagctcacatactcccacgtagcccatatcctcgtttctctcaacaccgggtccccatcaatcctcccaagcttccacaacatccaagcaaaacaacattcaaacagcacaagctatcacagccaagcaaaacagagtaaaggcagaaaactttgccaaaacaccaaccaaaacacagcttttctcacttaaagaccccaataacaattccttcgttccggttcattaaccgttggatcgacttgaaaattttactggaagtctttaatacataagcctacattttgaccgttgggatctact

SEQ ID NO: 104026 - DNA, 428 bp, Glycine max
ttcttcccacttgtatcccttgtggctgactcgtgcctctctccctcctttctagggtgatcctcctcatgtcggcgtgcataggttcgtatcccagcccaaacctttcgcgattctgtgtgaactctactagacatgctatgccatttccgttctggcccaaacccatttcaggctcatatccgtgccccaacatcacccaagctaccatcaacgcggcaccagatgagtgcggttgtactgggggagactccacctaagcattgctcacaacttccaatgcctgaaagaacgtttccaaggactcctccacagcctcctcataaggcgtggaagaaggacaactcacaagtatatcttcttctcctgaaactataatcaattgcccctccaccacaaactttaacttctggtgtagcgtgacagga

SEQ ID NO: 104027 - DNA, 445 bp, Glycine max
  unsure (1)..(445): unsure at all n locations
tgcaagcttctagccaaatggacttaccttgaattaattcctttgatagcttttttgagctttgtttccctttccttgttttgaagctcactacaagccttaaatgaaaaaccatgatatcaccatatccttaaggaattttggagctttggaattgttttgggaataagtgtggggggtttttgtttcattggataacttgttttgttggctatgcttcatgatgtattttgggccatacttgatgtacattgtatattggttaaatgttggacatgctgaatgaaatattgtttctcaaaggctatagagtaaaaaaaaatcgaaaagaaaagaaaaagaaaagcaataaagttgagtgaataagaatttaaatggcacaagaatgatgaaactctnggntctactctntatgtttaatttttatctttacttctttttattt

SEQ ID NO: 104028 - DNA, 433 bp, Glycine max
cgcatgcaagctttaggcttaatagccccaatcacatctatgcctcacattaaaaatgaccatggtgccgacaacacattcaacgacattggaagatcgttaacattatccgcaaaagcttggcacttatgacatttccttacatgaatacaataatcattcttcatcgtgaggcaataatatccaacccttagaatctttcgagccatggcatgcctattggcatgggtgccaaaggagccttcatgcacctttcttagtatctgttcatcttcacttgcatccacgcaccagagtaacaccatatcattgtttcttttatatagtacatccccattcaaaaggaagctagccaccaacatctatagtgtcctcttgtcattctcagagaccctgggtggggactccctatctttgatatatctcttcatat

SEQ ID NO: 104029 - DNA, 304 bp, Glycine max
  unsure (1)..(304): unsure at all n locations
tgaaaggacagtgtnttatgggaataacaaagccaagtctagtctttatgaaacacctaaattagtgttacctaggagtttccatattcgatattatcccagtttccgaagctgtttgttccatgcctcctctatgattgttcagcatgatgagaatctgtaaggcttgtttattcatgaccacactcgaatttattctccattatccttctaatggcttccaccatgtctaaccgctgctgagggttgctttcagtgcaagcaacaccaatgtggaggagttgctctatctcagcaagccaat

SEQ ID NO: 104030 - DNA, 447 bp, Glycine max
  unsure (1)..(447): unsure at all n locations
catgcaagcttgatccatcttgtcaataacggccatggcccaccccctaaatggccaagcttgaccattgcatgcatctctttagttgaaatcttttttaaggtccaaatctttggcattcttcacatcttttagcttaatgataacaatcagctgttaacattgggcaatattatccatgcctaattattaaccacttcatcctgggtctaaacctgtgagcaccacacaatccttcatgtatttctcccatgaaccgcattgattcaacttggtttacacatttcaacaaaaccccctattaaagttccttctatacaacttgtctcctgtcatggtatacttcaaagctttctattntgtcttgaattcaactntgttggatgggcttcataaataatccattatttattactacaatgggtctggtgatctgatctccattat

SEQ ID NO: 104031 - DNA, 423 bp, Glycine max
actggagaaataatctaagtgggtctgagaagatgtctatttgattatgctgcttcgacaagttctagcaatatgaagcctgcggcaaatggagagaataagaaggagggagaaacccatgttgtgactgttgtccctacatggccaaatttcccactagctcaacaatatcaatactcagccaatatcagtccttctcattacccaccaacctatcagccaagaacacctaatcatccacaaaggccacccctaaatcagccacaaaacctgtctgctgcacatacgataccaaacaccacccttaacacgaaccaaaacaccaaccagggaaggaattttccaaaaaagaaacctgtagaattcaccctgaatccagtgtcatatgctaacttactcctatatctactcaatagtacaatg

SEQ ID NO: 104032 - DNA, 426 bp, Glycine max
  unsure (1)..(426): unsure at all n locations
ttctngcttgtggagctnttatggttgctggatctttgagcttcaatgaggtccttcaatggtgatttttcaccatggagatgcagcggaaggcaaaggagaagaggagaagggaggcgccatccactatggaataagccatggaagaaggagcttcaccaccaagatgagccttggataagaagcttggaaggatgcttcaatggaggaaaagaaagagggagagaaagagagaggggggagcacgaaattgaaggaataaaagagggggagaagtagaactttgaagtgtgtctcataagactttcattcatcatagttacaacaagtgttacacatgcttctatttatagactaggtagcttccttgagaagctttcttaagaaaacttccttgagaagctntcttaagaaaacttccttgag

SEQ ID NO: 104033 - DNA, 429 bp, Glycine max
  unsure (1)..(429): unsure at all n locations
tggttcgaggtacttacccgttgaagatcgaagaatgatgaagaacgaatgaagaacgtcgaagaacggttgaaacctttgcgagattcctcacggaaaacgttacggaaacgtttcggaagcgcctcggcttagattttcttcacggaaacaatttttccaagcaaattcgaaagagagagaagtgcctaaggggctggacctttttcttcttgcattcctcccctatttatagcaaaataggggaggtggttgccgcccagctcgcccaggcgagctcagctcgcccaggcgagcagggttgcttcctccagaagcaaccgccttctggaggaatcttctggagggcccaagtgggcctgggtgctatttgcacccncatttttactaagtacacccccctctgctgtttttggtgattcttttttc

SEQ ID NO: 104034 - DNA, 426 bp, Glycine max
  unsure (1)..(426): unsure at all n locations
ttcttcaagttgctcattgactcctgattgctgcanagaaggacaaagatctgtatggtgatctgcagaagaacatagaccacaaactcttgcaataagtgcagatctctgattcatggcaagctgagttactaggttgaccaaggcatcaagttttccttcaagctttttattttcagcatatgaagatgaatctgtggccacctcattgactcctctaaggataatagcatcttttcttgcactgaattgttgagagttggaagtcatcttctcaatcaaattcctagcctcagcaggggtcatatcaccaagagctcaaccactgacagcatcaatcatacttctctccatgttgctaaatccctaatagaaatattgcagaatgagttgctcanaaatctggtggtgaggacaacttgcaca

SEQ ID NO: 104035 - DNA, 431 bp, Glycine max
  unsure (1)..(431): unsure at all n locations
ggagtttccaagtgccaattcgtcttcttctttagtccagtcttcttctggcttcaattcatcagtgggctttccttctgtgtccagcatcttgggatgttcccagcctttgatgacagctttccaggttctgctatccagtgatttgaggaaggccaccattcttgctttccagtattcatagttggttccatcaagaattggtggtctgttcactggtcctctttctttctccatgttcatcagaatttatctccctagatctcactctgtgatttcgagtgttggctctgataccaattgaaattctgataccaggggacagatgtcgtacaggatgtcacgacatcacgcttcagaacatgcagtttatgtgtgtctgtatgaacagattaaacatagtaataacacangagaattgtaacccagtt

SEQ ID NO: 104036 - DNA, 408 bp, Glycine max
  unsure (1)..(408): unsure at all n locations
agcttatcttacctatctatctcctagatgtctttgcaaagattcaatagataaaaaacatgaagttctaattcaagatgttttctttgttgcatgggcataatgcaatcactctatgtctagcaatgattttattaagatgtccctacctttgagttctactaaaaattatcctctctcaagcgactaatccctaaaactgatgcatataaaaccttcaatgtatttctaccaaggattaccctctttcaagcgccaaacccctaaagatgatgcaaggatgaagcatataatacatttgttggcattttaggcctgccaagccctaactaaaggggtttagcctttcattgtcatgagagactcttacactntanggggttgatatggatggaagaagatggatgg

SEQ ID NO: 104037 - DNA, 354 bp, Glycine max
  unsure (1)..(354): unsure at all n locations
tgttcaatttctcaatgatcaaactgtttcaaattggaatcatagntttctaagacatgtttgagtgttcgggaaaaagagagggttttgaaaggggggaaggaaaaaccaatttgagagcatgatagagcgtaaagacatatggtaaatgtaaaactgacctattatatctctatttagaactattatactctcaacctattatttactctatttttctttattatattattttataaaaataaactatattttactcccaatcaaatgaataaattaaatattcattttattttataagaacatataatattttatttacctaaaatattattttatataataaatattttt

SEQ ID NO: 104038 - DNA, 424 bp, Glycine max
agcttactaaggcacctgttctatctcttcctgacttttctattacttttgagctagaatgtgatgcctctggagtgggagttggagctgtattgttacaaggtgggcaccctattgcttattttagtgaaaaacttcatagtgccaccctcaactaccccacctatgataaagagctttatgcattaataagagccctccaaacttgggaacattaccttgtttccaaggaatttgtcattcatagtgatcatcaatcacttaagtacattagagggcaaagcaagttaaacaagaggcatgcaaaatgggtagagtacctagagcaatttccatatgttatcaaatacaaaaagggaaaaacaaatgtggtagctgatgccctctctaggagacacacattgttttgctccctaggagctca

SEQ ID NO: 104039 - DNA, 364 bp, Glycine max
tctatagaacactcacgcttcttatccaaagctcatcttggtggtgaagctccttcttccatggcttattccctagtggatggcgcctcctctctcctcttctcctttgtcttccgctgcatctccatagtggaaaatcaccattaaaggacctcattgaagctcaaagatccagcctccatagaagctccacaagcaagcttccatcaaacctttccttaaaatgtgtgcttggttcaaccccataatctgaggaaaagaaattttgattggcaatactttagcagcctatcatagagatgaatgactcaggcatacttatgttgtgcatggcaaatgcaattatgggattgacatgagatgc

SEQ ID NO: 104040 - DNA, 409 bp, Glycine max
agcttaagctccttcaactgcacatggctcttaatatttgaaaagtatccttgtggaaccttcacccgacgaagacactgacaaaaacttatcttctcctttttggacaaagtatgacaagcagggggcaagtaaattttcttcccatcaaaccttggatgcaactgtgatcgtatccccatatcagctagatcttgacgggtattcaagccatccttcgtcttgccttgagtgttaaggagtgtcccaatgacactgtcacaaacatttttctccacatgcataacatcaatacaatgtctaacatctagatcagaccagtacggaagatcaaagaaaatggacatcttctttcatatgctactcttacttttatccttcttttggatccttctaaatacaatattca

SEQ ID NO: 104041 - DNA, 420 bp, Glycine max
tctttgagataacttccttgagaagctagagcttatctacacacacccctctcataactaagctcacctccttgagaagcttccttaagaagattcctaaagaagctagagcttagctagacatacctctctaatagctaagctcacctccttgagatgaaaagctagaacttagctacacaccccctataatagctaagctcacctccatgacaaaaaacatgaaaatacaaaaaaaggtccttactacaaagactactcaaaatgcccagaaatacaaggctaaaaccctatactactagaatggccaaaatacaaggcccaaacaaaggagaaacctattctaatatttacaaagataagcgggctcatacttagcccatgggctcgaaatctaccctaaggctcataagaacccta

SEQ ID NO: 104042 - DNA, 367 bp, Glycine max
  unsure (1)..(367): unsure at all n locations
cgcgatatgtgaagatgatgttccaagtgcttcngatttggtccgaccatgccctcctgatttccagctgggaaattggcgagtggaggaacgccccggcatttacgcaacaagcataatgtaaacctttacggttttaaaagctctatagttgggcctaggctttagagttttcgttttgttaaggctttgtgtcttttgtttttgaatttataatacaaggatctttcttcatctgttcctggtctctacccattctcattcatttgcatgtttacttctttttctgaaacggcagattcgatgacgagtcccccgaaggtacttatacctgtgacccgtctatcaacttcgagcaagaaatgaa

SEQ ID NO: 104043 - DNA, 299 bp, Glycine max
  unsure (1)..(299): unsure at all n locations
aatattttatacaatgataacaaaactttgcgaaaaaatttcaaaaaaatatttcaactcacctgngcgagcaaggtctgacaaaaaataaaaaaggtgggaggggtgaggtcctattataccccatctttcccaattttcttcagaactctacacaagctctataggaacccaccgtacctccataggtggaacaaattcaaactattatctgcatattagtctcaactattcacgctttccatacatcccacatcactaattgccatctgcatctatcttcgcttcttcatccttgt

SEQ ID NO: 104044 - DNA, 407 bp, Glycine max
agcttctagccaaatggacttaccttgaattaattcctttgatagcccttttgagccttgtttccctttccttgtgttgaagctcactacaagccttaagtgaaaaaccatgatattaccatatccttaaggaattttggagctttggaattgttttgggaataagtgtggggggtttttgtttcattggacaacttgtttttttggctatgcttcatgatgtattttggtccatacttgatgtacattgtatattggttaaatgttggacatgctgaatgaaatgttgtttctcaaagactaaagattaaaaaaaaaaaaattcgaaaaaaaaaattcgaaaaaagaaaaagaaaagcaataaagttgagtgaataagatcttaaatggcacaagaatgatgaaac

SEQ ID NO: 104045 - DNA, 324 bp, Glycine max
tgtaggattatggggtacccatcacatgtggtactatgtggcggtcgggcgatggtgcacaacaagttttcctcatccacaatgcgcgcataaacccaccatcccctgttgcccaccgccaactgagctcacgtactcccacgcagcccatatcctcgtttctctcaatactgggtccccatcaatcctcccaagcttccacaacatccaagaaaaacaacattcaaacagcacaagctatcacagccaagcaaaacagagcaaaggcagaaaactctgctcaacacaccaaccaaaatcacagcttttctcacttaaagaccc

SEQ ID NO: 104046 - DNA, 421 bp, Glycine max
ttaagatatatcccgttgcttcaacaaacaagcattgcttcaagattatattaagattaagtttttcctcaaaacaagtgtttcctaagagatcaaggctccggtaatcgattaccaggcagtgtaatcgattaccagaagacaattttgaaaatcaacttttaaaaagggttttgaatttgaattttgaataatgtaatcgattaccagcaacggcacttcaaaaaacactttgaaaagtcatgacccttcaaaatataattgtgtaatcgattaccagaaacctgtaatcgattaccagcaaaaaatttcagaaaaaagctttttgaaaagacacatcacttcaaaccattttgaaaaaggacaaagggcctatatatgtgtgtgtttgacttcgaaaagaaaatgagagatattcacg

SEQ ID NO: 104047 - DNA, 434 bp, Glycine max
  unsure (1)..(434): unsure at all n locations
acttcactagttaccatttaaaccctattcctctcatgcctaagaacctttagaattgaatcatagtgatgtatggggtccagccccaatcttgtctccatctaatttcaagtactacgttcactttattgatgatttcatcagattcacttggatttttcccttgaaacaaaaatcagaaacaataacggcttttattcaattcaaaaacatggttgaaaatcagttcaacaggaaaataaaagttcttcaatgtgatggtggaggtgagtataaacctgtccagaaaatagccagagtcaggaatccaatttagaatgtcttgcccatatacctcccaacataatggtagagcaganagaaaccatagacatgtagctgaactatggctcacactactagcacaggccaaaattcctttacactactggtgg

SEQ ID NO: 104048 - DNA, 427 bp, Glycine max
gcatgtaagctataaccacatgctttctactatccaagtctgtagagtttcaactaccttcacctttctctctgcatcctctccctttaattcaggttagttaacttgaatttttctgaattattgctcagtgagtaacagaactgaggtgctcgcggctttgatatgcttcacgtgtgcgttgaacaatagagctgcgagcatcataatatgcttaagaaacaaaatttgcaagcaataaaaaggtgtagtagcctgtcttcattgcaacacgaattttattttatttgaaacataaattttatttacaaacagaaaacttcaagtttggttatcttattttgttttatgatcagaaaaattgatgaactaaaaaattcggtgaaaagatttgatgaaattgggatcaaagttcttggagatgctg

SEQ ID NO: 104049 - DNA, 266 bp, Glycine max
  unsure (1)..(266): unsure at all n locations
cactaccattgtcactatgagttacagtaatgtactataccaaatagtcatgatcactttagatcaaagaaataaaaacaggtcaggattgacgtaactgatgggagacttaacatctgatngggcaaggcctaaacaaacaagtggtccctatacacgtctacgtggctgaacctaacatcatatgctcaccagaagaatcccagaaaatatatactaggcactctgagactaaacaacatgagtgtactgcattgcttcgacag

SEQ ID NO: 104050 - DNA, 424 bp, Glycine max
  unsure (1)..(424): unsure at all n locations
tactccaattccaaccttgtactgcacaaattcatgcttctcgtcagcagcatcccaattctcanggaatgcctccttgatattatgaatactctccaatgcatgatccactccggtggtacgaacagatgtaccaacctgcatgcgtcacattttacttttaattctaatgtatgtatttcaaagggcgaaaaaacaaagacctcacacagtcaaaatttacaaatatttctacctaatgcaagaataagaacacgtgagtttaattaacaaatgaatatgaatactttaagtcgttccattcaactaactatatcaaaattagaaagctcaaattctaagtgtgcgtgtatccaaatgcaacttaaaatgtcaaggaagtctagctcagttggttaaacaggatgcatgagttgttgtaact

SEQ ID NO: 104051 - DNA, 298 bp, Glycine max
  unsure (1)..(298): unsure at all n locations
cactgaganaatgaaactggtgcagtatcatgaaatgaatcttggaatgaatntcttggagaaatcatgaaccaaaactgagagaaagtaagaaaaaagaagggacatagagaaaatttagcaggaagagcttctgcaaattctgattttaaagatacaaaatgaatgaaactgtattatgactacaactttgaatatatagtgaagtgtgtagaagagaaggttgtagctaaattacttcaggtgaaattctgtgataattcagtcataacagatatagaacgcgatacttacataa

SEQ ID NO: 104052 - DNA, 446 bp, Glycine max
catgcaagcttctggcggtttgatttgtgagtccaaagaatgttctggtttatccttggaaaagctggaatcagcaacaggctttgcattgttatgttgagttaatccaaccattgcctgaattcatgtgattatcaatgtttactcctgctgcactcacttcctgaccttctggtttgtgattcttgacatcaagaaaaattaaatgcttgattacaatcagcatccctgtaatttaagtgtgaaagaactactcctgctgcagtcacttcctgtctccttgtctgcctatcataacatacaagaaaaaaggtaaaattttgtttggagttatgatggatttgaagatgcaataagctcttgaggacaaatgcaacaagtggtcaagtcaagtcaaccagcacccaacactcacatgaagtgtgacattttgaacttgacacagc

SEQ ID NO: 104053 - DNA, 332 bp, Glycine max
gaatctgtcttagaatttctaactagaacacaattctttagttggatattccatgaaggtttaaaatcatcagcagcatcacagaggtttatgtgtttttgttctacattgtgcaaaaggcatgactggatattttctttaatccatattgacgtctgaacttgtcgagcaataagtctccagcacattgctgtagtcaaattcatcgacttatcccaaatgacaggataatctttatcttttctataagcagggggggctgaataaacaaagtacccattaaagcgacagaagcgattcaactccttcagtaaaatcccatctgcagaaaa

SEQ ID NO: 104054 - DNA, 344 bp, Glycine max
tgactccatcctgcattgtcttgatgctctcactcttacaccctctcctcctaccttacctccacctgatgcacccatgcccaatatgcttcccatgctaactccacttccatgccctgcaccccgacaacaaagccccacacccatcccgactctgcttcccatggttggaaaaggagatggtcctgctatcagaatcgattccagcaccacctacttccccgtcaaagtgtggcagcaccaccgtgttgacatcatcgccactgatcggcgtaactaaaccatgtcgtcttacgttgcttctccatatctcgaacctaaaatagtttcatttacgattgaca

SEQ ID NO: 104055 - DNA, 424 bp, Glycine max
  unsure (1)..(424): unsure at all n locations
atcttacattcctggttctttcttgtctagcatacacactngctcaaactcatgataaaacacaatcttcattccaatcatgcattcaatccataatcaccatttcaaaactataccaaaactgcaatttcaagagtcaagttaaactattctatatacatcaggaattgcatactactatccataatcaaaagtataaacccatatcacaaaaaagggtactaaaggcataattataataatcataattgtcatcaaaacaaaagaaagaatttaaaattcatgtgacaggtcctgtgactgagtatcctcatcctgagtgtcctcctcatctataagatgtagcacatgagtggccggaggagtggtagtcaatcccaggactggtgtagaagggtcctctagaagatcaagtaatggtgta

SEQ ID NO: 104056 - DNA, 435 bp, Glycine max
ggaacgaatataagacatcttcttcgaccttggtgattcttgactccatctcattgaagtgcgtgtccacttgtaactccaaagtatcaaacctttcaccaacaaaagtttgaagaccatcgaacctatccaaaatctttgaaagaagagattaatcttctccatcatgtccttcttcaccaacatgtcgagcaccctttttcacccaagagccatcatgctctttttgataaccaaaggatgcaatgactgaagcacctattagaaaggatctcttgattggaacatagggttcagaatcaagagggatgttaaagtgttgaaggaagagggtgactaggtgtggatatggcaatggagcattcaatcacaatgccttatgcatgtgatatctaacaagatgtgcccaatcaatttgtaggcccttatgaaaag

SEQ ID NO: 104057 - DNA, 380 bp, Glycine max
  unsure (1)..(380): unsure at all n locations
atcttcgatagtagcaattncgggataatctagagcttatcgtctcactaaattcacatgacttggctgctaatcttgcctgggagaaatacactgcatttacttgagttcagagcttgcttctctcaatgttatcatctaatattggaaggataaagaatacttgagtaaaaatgattctttttatatcttataaaactcacactataacgggcacttattctaattgcttgctacactggacgggtgactactgatcaatgtgatcgttaaatctttggtgtggaattatacatcctgaatgtatgatgttcaacgacgtttatagagtatatcctgccctactatatgactggtgagcatgctgctcaaccatctat

SEQ ID NO: 104058 - DNA, 410 bp, Glycine max
  unsure (1)..(410): unsure at all n locations
taagaattacgcacgccattctctatggatatgttgttggtgaanagtgtgtaaagagatgtgctggcgtatactaactaaaatctacccctaattgaaaaaaacaaagtaattttatctacttaagcttgaaacaataacatttgagttcctatttaataacagaccactaacataataactactatgttatagagcgtagaacaactgatcctataaacttggtctgctaatttatagaaaataacaaactaacaggcaactactcatatacgctcgacacttcgccttgtatcagaggttgataagtgcaagatggtctctcagcagctcaagatataatgtagatgtatgcatgtctatctaaatgctctctttatcaacacacattgactttgctctaatagcta

SEQ ID NO: 104059 - DNA, 405 bp, Glycine max
ttcttgtagaacggctggacatgatatatgtcaaggtgttggtttggccagcggttcaaggataaaggaatgtcccgcattatttccatggcaagcatgcaacaatgatgattcagaaatttatgcaaaactggtcatgcatgcacctatatggagactcaagcatctagttattatggtcatgtgacactagggcttaagattcattttccctatttaagtcaacccagtgtttccaaaacatgctcttttatcaattcatgcctttatctgagtccattttgggcattcggaaaaaatttgcacagcattcacccttcatgtgtacacacatttttttcaaaaaaaaaccttgtgttttaatcggtgaatctttccaaggaaaattggaatttatttcttttc

SEQ ID NO: 104060 - DNA, 333 bp, Glycine max
  unsure (1)..(333): unsure at all n locations
ggcctaattaacctgaaattgagaganaatgattattaaacacacaaaatgaaaatactaagtatttattacccatacttaacagaaaatacttatatcactacaaaataaccataaattgggagagtttgatacaatttatacaagttttatacacaaaagttagtcgttttcaccgactaacaactcccccaaatttacagttttgcttgtcctcaagcaaaaagagaacaactcacttgtcctcaagtgacaatgacatgcagtgactatgtacaaaggtgtatgcaaccaaagttactgattgcatgataaggggatggagtaaaatgc

SEQ ID NO: 104061 - DNA, 425 bp, Glycine max
  unsure (1)..(425): unsure at all n locations
agcttgactactttggactgaacatattctcaaatgaaatgatgatcaatgtcaatgtgtttggatcgttcatgatgagcagggtttgaagcaagacttatagagatttgttatcacaaaataacatcacagagggcacatcaacttcaaagtaaaaaaataacttgtttaaccaaacaatttcactagtaacagaagacaagacacgatattcagctttagtggatgatagagaaggatttgtttggctccatcaagaactgcatagcatactccatttgttcaaaatcgcaccaaggtttaattcctccacaggtgcaactatgtgagggctttagttntgataatgactcccacaaagaatgaagcttggagtagaaagaggaaacatacatggaaccttgttgcagagtgatcaagtcatg

SEQ ID NO: 104062 - DNA, 313 bp, Glycine max
agtctgacattccttctcgactactacacttgctctatataatcagtagacgagtaatgttagcagagctggatgcggatcaaataactggaatacacaaaaaccttcaaaagctggaagaggtatgtcctgccatggaaaaacaaattactaagtggacaaaagttcttctcagcactgaaagagagctccgtgaaaggcttgtgggttatagatattatgctttccgaactagcatgtccaatccagaaacaaattccacatctggttgttggtatcctgttggactagcacagatggaacaatggattgc

SEQ ID NO: 104063 - DNA, 408 bp, Glycine max
agcttttatggaggctggatcttttatcttcaatgaggtccttcaatggtgattttccaccatggagatgcagcggaagataaaggataagaggtgagaggagacgccatccactatggaataagccatggaagaaggagtttcaccaccaagagagtgccttggataagaagcttagagaggaagcttcaatggaggaaaagaaagagagagacaggggggggggagcatgaaattgaaggaggaaaagaaggagagaagttgaactttaaagtgtgtctcacaagactctcattcatcaaagttacaacaagtgttacacataattctatttatagcctaagtaacttcgttgagaatcttcatggagaaacttccttgggaagcttccttgagaagctagagctt

SEQ ID NO: 104064 - DNA, 289 bp, Glycine max
  unsure (1)..(289): unsure at all n locations
tgttgttacctaagacacaattgtttgctgaagaatctatggggtgggagttntgtaataaaactgctcctatagtggtgttggaggcatctgtttcaatggtgaatagaatgttaaattctagagtggcgcggacacgggcctgagtcatcatggtttttaactgttgaaaagcttcttgagctgtatggctccatgaaaanttgtccttacacaagagcttggttaacggtgctgctacggcgacataatttctaatgaattttcaatagaatntgttggatcaagt

SEQ ID NO: 104065 - DNA, 377 bp, Glycine max
  unsure (1)..(377): unsure at all n locations
agctttaagtgagccacaacccatgctaagctntagtgagagacgacttcaaggttgacatcaagcacaactgtgagaatgaccttcgagggtcacaaatgtgaagcacatgtgggtcatgtggaagacaaacagaaaacatgtgacaaaaaagtcaagaaacaaaaaggtgtatgaagaaacaaaaaattttccatgtttctacataccttaatgaagaactctgccttaaggttggtaataatagaacatacctaagatatgaattgttgcctaagaaccaaaaaaggttgcatgctgcaccatactataattgtcaatcctgtttgaaaaaaaaactgacatctagcgttatgttctatatttatgttagtttt

SEQ ID NO: 104066 - DNA, 415 bp, Glycine max
  unsure (1)..(415): unsure at all n locations
ntgtggatgcttagaaagtctattccacatctacaacaagatcgttaatggagaagatagtttcaaagttcctgctgaagactctctgaggtagtttggttcctttaaatatttgcatctaagattgtctgctattgtttatatcttgatgggggcattgatggcaaatttacacataggaatataagatttaagctaggtggcaaatggaaaaatactcactagacaagactagtcatgctttgtggcagtgaatgttaagaagttaagtacaaacaagggcaaaaaataagtatggcagagataagaatgctgagaccgataattggacaaataaaaaagaaaaggattaaatcacgtgtcagacagaaattttgagtagcattacttgaagacaaaactatggaaactcttt

SEQ ID NO: 104067 - DNA, 408 bp, Glycine max
agctttcacattgtcagaattgacttcagattctgccatagtgaaactgtcaataaaaaaaaatttggtaacagaaacattaaagaccaaatgcccaagaattctcaatacgaaccccctctttcagtttcacaaggaaagaggggttcaatataaagaccaaaaacagaaggaaactaaaggtcatgtaatcacgttattgacatatagatgtttaatccactcaatcagttgcagcacagcaacattaatttataataatatgtggattttgtatgaacttcaaactattgaaaatcaaaagaataatttaaaattttgaaaaactgaaattatgttagtacgagtatatgtggacttacctctttcagccaagaatgatatatctctcttatattagttcttctc

SEQ ID NO: 104068 - DNA, 289 bp, Glycine max
ttgatttcctttgttctggaaacctttcttttctcatgtgcacccaaacccaatctccgggttcgaagacaaccttcttttctcctttgttggcttgcttagcatagcttttatttttcctctcaatatgatctttgactctctcatgaagcttcttcacatagtccgcctttgcttgaccttctttatgcttaaaaacagaaacattatgcataggcaaaagatcaagaggagttagtaggttaaaaccataaacaacttccaaaggagaacaattagtggtgctatg

SEQ ID NO: 104069 - DNA, 449 bp, Glycine max
  unsure (1)..(449): unsure at all n locations
agctntacagcagattntagtaatgacccacttatctatatttaatataacttaatgccattaacctagggaattaaaaaaaacttaatggctgagtgtaactgaaattgtggcaaccaaaagtcacccccaacagccaacaagtcagccaccatttggtctcccaaaaggctgatgcctaggttgccaattgggcccttattacaacttgaactaaacctaactaaagcccttttagttgattaacccanaacatatttttggtcagccaactttacaaggattgggccattatttagacagactaaacactctaaaattgaaacaaagtggtgtcatttagtcctccttcatttgggccatgatacaactcacaaccttggacttttctccttgaaacttgggcttgtattcaaatagtatggaccagcacttgtgaagagctttct

SEQ ID NO: 104070 - DNA, 446 bp, Glycine max
  unsure (1)..(446): unsure at all n locations
atataagctgaaccattntatcaataaacacaaggggagttttatncattttttagagactatctcttttatcttagcgagagtgattctcctaaattcttgagtgagtcaagaacaccctggctgtatcaaaggactntcacaacctttgtgtgttgccctcgctggagagagggattctttccttcctttcatcttcacccttgttctttcataccacaattccagaaaatccacctctgcccagatatatctcgtggccataacttccattttacgcactcaaattaagtgattcttgaacctaaatggactttaaaacgagacctttcacctcgtttcggaatcatcttatttggagccctgtagcttcaatattgccatatctatatatctgtccagccaccacttaacctacattttaccatcccattcttccttttatg

SEQ ID NO: 104071 - DNA, 368 bp, Glycine max
catgcaagctcgctgtataattacacgtaacactcacatatatgattatcctctactaacgaatacgaaagtcactgcaatgacaacaaacttattcctactttatctgctgacataaaatcactagaagatcaactaacgtgcagctacaacagtttattgaatgggctatctcaaactatcccttgaacaggcctgcgacatatggagaaccttcactttaacgatgatgcaaatataatttaccaccagcttagtgcataactgacgcttgacatcattattatcatataaaatcacatgatgaggttgggctaccacgaaataatacactgacgaacctccatgtaaatgtccatgaccaatcc

SEQ ID NO: 104072 - DNA, 392 bp, Glycine max
tacctgcttctgccatcttcaatagttactctcttcattcttggcatctattactacctacttatagttaagaaaaaaaaaacccacaaaaatcaaatatacatattcttttgtttctatgctacaggattttataaacaaaacgatttctctgctttctatttttggataaataattctagggacttgcttaatttatcaatcaagctctcgtgcaagctattttaacttacagctaggttggttgaaaaattgtgcatgcaggtatgttccacgtggcgagaggtgtcgcggtcggatctgctgtggcagcggctcacgagacgcatatggcgacgcacctatcgactgacggccacgtggcagctggagtacatgtattggcatccgac

SEQ ID NO: 104073 - DNA, 322 bp, Glycine max
caaataaaagtgaggacattgatcaattcactttttgttaggaacaaaagctaaattctttaataatagtttaggacttaacccaacaatctttgttattgactaaaaattgatatcttaaaaagtaggggttaaaatttctaacaccaatataatttgagacgattgaaactaacagcggggttatattataaatagcggtgacaaattaatcacggtgatggatgatccactctttgtgcagtagcacctctctgaggacagtttacatgccctatgaaaattttctataaaaaaatataatttatacttttaaagaaaa

SEQ ID NO: 104074 - DNA, 430 bp, Glycine max
  unsure (1)..(430): unsure at all n locations
agcttctcggctcatgctgaggacatctctttataacacccgngcagcctaaggcacccacccagagggaagctccccaagttccaactccgaacacggctcgaccggccgagaattccaacacgacaaggaacttccctccaaggccatagccggaattcaccccgctcccaatgacgaacaaagatcttctaccatcccctatcgccaatcatttggccgtggtaacacccggaagggtcctcgaacccactctcccgaagtggtatgaccctaatgcaacctgcaagtaccatgggggtgccccggggcataccatacaagaatgcttgggccttaaatacaaagtcccacatctaatggatgcgcggatggctgactttccaagaggatcgcgccaatgtgaggaccaaccccgctcgccaatcat

SEQ ID NO: 104075 - DNA, 455 bp, Glycine max
  unsure (1)..(455): unsure at all n locations
aacctagaggagacggaccattccaagtgttgttgaatatcttcgacaatgcctacaagaatgacttgcctagtgagtataatgtaagtgccactttcaatgtgtctgatctatctctttttgatgcagatggaggagccttggatttgaggacaaatccttctcaagaaagagggagtgatgaggacataaccacaggcacggaccatgaagcacttgaaggtcccatgaccagaggcagacttaaacaagcccaacacgtcatagagacaaggctggtcatttgtatagctgccattgatgatgattgaaggcccaagtggagaaagatgattgcccacaggcagatgcactatcaagactactaattgttgntgaatgtccaactaacttgaaggcccaagtaaataagtcttagctataacttatttctattgtaatttggcccaactgtt

SEQ ID NO: 104076 - DNA, 298 bp, Glycine max
ggaccctaagcgactgagctgcagctttaacaaccatttaattttacttgagtttcctctacctaattccaaacctttataaaaatactccgcgttttgataaaaaccatattttgtctccacaagcttcaattctatacaacagcaccaacaaattgaagggttagaacctataagggaaactccaaattactaccgcctatatcccatacatgcataatacatctaactatatattcggttttctgccgcgcaaatactattacaccattatattccccccgtatttaggtgcccc

SEQ ID NO: 104077 - DNA, 113 bp, Glycine max
aactcaagcttgtacgccataagcatgttgatttattctatgccgccgttttcaacagcgagacatgctgtgacttactgcccatgccgccattcatactggcgggacatgct

SEQ ID NO: 104078 - DNA, 383 bp, Glycine max
agcattagctatgtccactgagctttatgtattctatgtccaaatcgtcaagtgaacctctgatccctgtcggatacaatactggaaggaattccatgcaaccttattactttcttgatgtacaactccactagcttctccatactatactctatattcgccggaatataatgagcatatttggagagcctatctactataacacacacagcgtcatgcccatgactagtcttgggtaaactagatacacaatccatagatatgctctcccattccattccggaataccaatggcttcaattatcctgaaggtcgctggtgctcaaccttactcttttgacatttaaacatcttgctatataatcagccacatcattctttat

SEQ ID NO: 104079 - DNA, 314 bp, Glycine max
agcttgtaatgattgacaatcattgccgaaagttatgtattttggttgaacacactacaattgacaatcagaattccaatgtatttacgctctacagcggttttagctaaaagctcatcaatggcaccaaacatcacggtctcggcttcttttctagcttctttcattgaaaggttgcgaggaatgttgaggacggcctcaagaacgtaagttgtctccccaacgccagatctctcaagaatcctccgctggaattcaagactttcctccgtgaaagaactggtcaaccgggactgctctataaatattatttt

SEQ ID NO: 104080 - DNA, 329 bp, Glycine max
  unsure (1)..(329): unsure at all n locations
aagctgttacataatacacgcgaaaatgaatctatctttatgtcaatagccaaataatctaatactggagagagtgtaggtttgtaatcaataattatcaacaacgaagttctagcgttgtttatgattgattaacacttagcatcagagatacaacgtaatacgaatactataaacacaatttgcagctgacctgtaatttaagtctgcaacccagggttttcacatcaaanatggatacgacattatccactgcagctgcaagaagcccttccaagcaaggtgaaatctcatctgagttgcaccaccctcgataaaatatggaaaat

SEQ ID NO: 104081 - DNA, 451 bp, Glycine max
  unsure (1)..(451): unsure at all n locations
gccgcttgggaaagggaacgaaaagactttaattgttttagttgcgcactcactagacgcaacactcgtgctaagctccaagtcttcacgcgctaagcaagcacttgctcatgctaagcgcttagacccctgactagtggatggatggtagcgctaagcgtgcttcgcggcgctaagcccaaatacctctctggagtttaatntcttgtattgggcttaacgaggtgatgcgctaagcgcaaatccctcttgatcgaggccgtacccgcatcaaataaatattaaaatgcattaactaggaggtgatcctaggtcattcccaacacgcaatgatccaccaaattgttctaacagatagtatgaatataataactaatgggggggctgtttgtaaacaaacagccagttaaattgactaaagattatcaaattaaacacgttgttctcttga

SEQ ID NO: 104082 - DNA, 331 bp, Glycine max
ggattaccaatttttgatttttttccatctagaaaaggctgaacaccaaaacaaatagacatatagtactaaatctcatatacagctgtaacataaccgcattataggataatacataaactctaagcggcaacctatcatattttaagagagacacagaatacaggcttatgtcaaaaccatattcataagtctccaatggacagatcactctatcattatcccacattgttgaacaggacatactgttgaaccaccatacacatgcaggtaatttaccaaacagcacactgctggataaactaatacatattactatctacatgataca

SEQ ID NO: 104083 - DNA, 317 bp, Glycine max
ctcatcaaccttgccaagatttgccttactttcttgtatagttcaaagcagtctttttgagcagctgcgcattcctttggaaaagaaacacattggaaaaaagggatcagctcttcttgccagtaaatatacttgtactccctcttgaggttcacaaacgggttgctagctttgctgtgccagatgtaagggcatactgtcttcactcccaatcctaggtgagcacttatcacctccataaatcaataaaacggtcaattgagcctacatgagtgcggcgagtgctaattattcacataaatatctactagaccttt

SEQ ID NO: 104084 - DNA, 398 bp, Glycine max
  unsure (1)..(398): unsure at all n locations
agcttctatattcctggatctggngaaatanttactggttatcactttntcagcctatcatgtggcaagctctttgaacgaaccccacagtaggctgtttcacattgtactcgtcctcttcttctttttttcttctcttaaggttcgagatttctatccactaataggttgttgcttcttcgcacgtgtcttattcttatatcttgttctatccccttgccacaagtgcttgaaattttatgtaccccgcccaaacaacttgtttttgaacattctattatatgaggactttgatgaactatggataattatttgactttatttttggcacgccctatctaaaatcatgttaggactcaggaaagattctccctaactgaattataatatatatatat

SEQ ID NO: 104085 - DNA, 315 bp, Glycine max
tacaccatctgtctcaagttggacttaatatgtgtcgaattcgtctttataactttcttaaaatagaaattctaataaataattggaattgctagaaaactatctaactaaacatggtgatatgataacattattctatgcccaccataaaatcgatagtcctataaaccaactatccttccattcccacggaagggaaacatagtataccaccatttggattggtctcatcgtaacgccaatgcgataaatgagggaaacactatggggtacgcccaaactggacggaccacagcggtgataacggtgatttac

SEQ ID NO: 104086 - DNA, 324 bp, Glycine max
gcgcatgcagctcgctgaatagccgactccttttcctttcacttatctcgcactaccaatgctagacctctccttttgaaccatctactcaaatggattatgatgtggggtggattagattggggtcatgatagataggctttgatggtgattgggggtttgaatgagatgtcactggatttgggttgactcgtatagtctatattcttggattgaagttcttgtctgattctagaaggaaagttacaaaaaatatattaagacattttaacgccaattttatatactacatcttaattacctaacgaggctattgaaccttta

SEQ ID NO: 104087 - DNA, 413 bp, Glycine max
gcacgcaagcttgccacccagctcgcccaggcgatctatgtttgctttggtgccttcaggaggaacttgctggaaggcccaagtgggcctgtgtgctatttgcaccccctatttactaaatacaccccctgccaccccctttttttgctgattctttatccgtaacggtacggaactttacgaattttgcaacgatactcgtgttcattccgtaatgtcacgaaaccttacggattacgcaatcatcccttctgtggctttcagaatgttacgaaactttacggattgcgcattaacacttctctttgacttccggcgtgtcacagaactttcacaaattgtgcacaatgctttcttttgacttccggtatgtcacagaacttcacgaatagcctaacgatgggtgccaagca

SEQ ID NO: 104088 - DNA, 411 bp, Glycine max
  unsure (1)..(411): unsure at all n locations
actganttatgagtggcagtcagaaggaatattatactatttgcccaattctactgaacgtgctgctttgattgttggtgacaagcacacacgtaaccacagggatatcataatagaaaagcaaacaggattgttgaaaataatcaatgaacttcatcctgcatatttgcttttgcaatatcccctattgtaccctacaggggaagatggctataggccagatattcctcataaggatcatccaaatatccatgcagcaaagagaaaaaaggttaccatgcgtgaatatttntgttacaggctacaatcaatgaacaatgaagctcaaacaatactgcattcaagaagattgtttcacaatggattgttgatggttactgtttgattgagtcgccaagactaaaatatgtt

SEQ ID NO: 104089 - DNA, 148 bp, Glycine max
cagcatgcaagctaagaacccgaaacgaactttaccatttatggtcttcgatttacgaacaaaaattataaaataaactcaccccttacaaatactgtaccgcgcggtcgcgacccgcgaagatcactaacctttgatcgagggagca

SEQ ID NO: 104090 - DNA, 452 bp, Glycine max
agcttcttatccaaggctcatcttgttgtgtgattctccttcttccatggcttattccctagaggatggcacctcctctcacctcttctcatttgtcttccgctgcatctccatggtggaaaatcaccatataaggacctcattgaagctcaaagatccagcctccatataagccccacaagcaagcttccatcacaagataccttggacacgcatgtatatggcaaaatatctcacacaatatacgtatgtttatgttgcaaaatacctcaaacaaaaagagagagagcacaaagagagcgtagcccaaaagaataataaaaaaatattaatataaagttgtctagctataaaacaacatgcttgtgaaaaagataatttccaacttttctttgagagattttactgatcttaaccagctttttgaaaaaaaaaatgtgtgacatatttga

SEQ ID NO: 104091 - DNA, 465 bp, Glycine max
  unsure (1)..(465): unsure at all n locations
cgcagggttaaagtctcacgattgtcacgtgctcatgccctttttgttagttgtggctatacgagacatcttgccaaacaaagtcaggttagccataactcgctggtgctttttcttccatgctatatgtagcaaagtcattgatcctatgaagtttgatgagctggaaaatgaggccgcaattatactgtgccagttagagatgtattttccccctactttctttgacatcatgattcacttgattgtgcatctggtcagagaaatcaaatgttgtggtcttgtttatctacggtggatgtacccgactgagcgatacatgaagatcttaaaagggtatacaaagaatctatatcttctagaagcatctattggtgagaggtacattacagaagaagccattgaattnntgtcagaatacattgagaaggctaaacctgttggccttctgagtctcggcatgat

SEQ ID NO: 104092 - DNA, 441 bp, Glycine max
  unsure (1)..(441): unsure at all n locations
catgcaagcttatgacctntgtcatttgagagtccacttctatacctacactagcaacctgatataagattcaaaaggctttattcgatcacatatcactgtattcaatcaatatttctaaagaacataaataaatctttgatatcaatcatcaatatcatatttttcgactgttacaaaaattagtggtattctacacaaatcttcaatagaccaatgtcacttacaaagaatacctattgattttcatgacagtttagtataatatataatgcacatctatctagcaatttcacccacaccggtggtgactttgctaaactctcaatctttcttatttagcggataattaaacttttctttatccaatcacatataatgcattctctcatactgaaggctgtctagacattggtatactgagtcatctttcctttcaat

SEQ ID NO: 104093 - DNA, 123 bp, Glycine max
gataaagaagaattctctacatcataattggcattatatccggatccactacaatgacggaacatatgaggataaaagccactaatcaaacaatgatgagcatactgatggacaagataaaca

SEQ ID NO: 104094 - DNA, 476 bp, Glycine max
  unsure (1)..(476): unsure at all n locations
ggatcttaagcaccgcggctgcagctgagttattaggaagaagttccctgatgaatcattgctggaaagcatggtggatacaaactctgaaatgaaggtgaaagatattggattggatcatttgcattgaaaaggatgaaagtatccttggaaagtcagtttctgaaaatactaatatatctgacaaatctgaagttctacccacatctctggaaaaacagaatgttcaatctgtaaaaaattcaccattggagtttcaagatgaaaggttatatatttcccaacgtttgaagaagttggagaagcaagtttactttttcctgaatattcatcaatctcgggataattggctaaattctgaaaacgatgaanaggaatctctggaaaattgtgagaagttggataataatattctaatgcaagaaactgtttgttctcctaaattaaatacagatgacatgggtgatgattcctca

SEQ ID NO: 104095 - DNA, 272 bp, Glycine max
agcttcaacctcaacagggcgcaaacgaccattataggtgttctgatgaaggagcccatataatgacgaatacacaagtacaaccatggcgcacgaaatcactcaagaaagaggcttatgccacctgacagacctagcagaaccagacaaaatggctatatctgggagctatttacaaacatcagcactgtgaaggcactgaagatcacatacaattcagaagacagaaggggaccaacaaaaaaccaccatactcaaatggttaaaaaaac

SEQ ID NO: 104096 - DNA, 320 bp, Glycine max
ctcaaccttatcaccttaatcaaccacaacaaaacaacaatgacctctccagcaatagataaaccctgagaagaagaaacaccctaacctcagatggcccagccctcaacaacaacaaccgcagcctgcttcttccttacaaaatgctgctggcccaagcagaccatacattcctccaccactccaacaatagttacaaccccagaaacaaccaacagtcgaggcccctccacaaccttacctcgaagaacttgtgaggcatatgactatgctaaacatgcagtttccaacaaagaccacaccctccattcacagcttaa

SEQ ID NO: 104097 - DNA, 442 bp, Glycine max
  unsure (1)..(442): unsure at all n locations
taactatgcctattcttcaacgtcactgcacagaattctataactaataaaaatgctcccatatacaatcaaggtagctgcattacctaaattatttacatgtacttccaaggtgtatttgttatttacatcacacacgcctccttggctgaatntacatacatacatactcaaagcantttggggtaccataaactgcacatgcgctcatctttggtattttaatacccatacatatacaaacttcacgatgaatcttgactacctacacaataaggtgctacacttcatgctctcttttttttattcaagttttgctacctaaagccacatgcaaattcaagcatatattcctttgctgactaaaatngtatccaaattagaaagtatatantttttgtaatatgtgttcttcacataacatgcaacatatttatatata

SEQ ID NO: 104098 - DNA, 480 bp, Glycine max
  unsure (1)..(480): unsure at all n locations
tctntnggaccttgaacaagcaactaactcctctttcaaaattatgctatgtgctcgcgactggtccctttcttcccttcgcaacttgagttcactattgctaccccatagagctccgcgaaatttgttccggccatactcttccttgcgagccctcttggtctcttgttcaaaggctcttgcagtaattgcattctcttcccgtaacccggcacactccttccgaatgtgtgtagcggccaacttgaacttctccttggcaagttttgcctttcctaactcgcttttgagagaatggacttcttcgtcctcttncggtgcttcaaaatcctcttcgctgacgacttttaacttggcgagccaatctaaacctcgtatatgaactttcagccattcgtggtacccaccaatgataccattacgaatgcctctagctcttgatctttcttaacggngttnccatgcttatcgattctttga

SEQ ID NO: 104099 - DNA, 448 bp, Glycine max
  unsure (1)..(448): unsure at all n locations
gccgacctgctgcatgcaagcttcctggatgcttactctggatacaaccattttatgttgcacactctaaacgaggagaaaacatcattcatcactgaagatgccaacttctgctacagggtcatgccctttggtctataatatgcaggtgctacatactagagattgatgaaccaaattttcatgcatcacatcggagaaacatcgaggtctatgtcaacaacatggtcggcaagtttcatagcatatcccaacacatggtcaacctccaagaattcattggagagctctgtaaatacgacatgcacctctaccctgaaaaatgtactnttagggttggcgaaggcaagttcctaggcttcatgatcacacatcaaggaatagaagccaacctcaacaaatgcacttcttcatggagatgcgtagtcctactaacatccaggaagta

SEQ ID NO: 104100 - DNA, 123 bp, Glycine max
  unsure (1)..(123): unsure at all n locations
ttttagcagagcactttgttttatagccatnatagtatttgctgnnnnactagcccactaagnntgcccattaactcattcaatctatcattgctgggtaagtggaaatggaacctggttcat

SEQ ID NO: 104101 - DNA, 405 bp, Glycine max
  unsure (1)..(405): unsure at all n locations
tgttcgcacatcgttcgcgtgtatgatatccactcgacaagtgtttaagtagaggagaccttcaatcctataacgcaacgtggcggacaaaaatgggcagttaacttgaatggccattactgtcaatgcggaaggtattctgcgcttcactatccatgttcacacattattgcagcttgtggttacgtgagcatgaactactaccaatatatagatgttgtttacaccaatgagcacatcttaaaagcatactccgcacagtggtggcctcttgggaatgaagcggcaattcctccttctaatgaggcatggacactaatccctgacccaactacaattcgtgcgaaaggtcggccaanatcaacaacgataaggaatgagatggattgtgtcgaaccatctgac

SEQ ID NO: 104102 - DNA, 295 bp, Glycine max
accgagctcaacctaaagcaactcaagctggttttgctattcctcaacgtacttctaaggaattatgaatggtaggggaccttgctggtcgccatattctgccaataaaaaattgagttagaaaaatttatattaacaacatataaagcattaagttgtaaatatcccaatataataatcgtatacaattatgcgagatgttatatacattactttgtgttaacactcttaacgtacagttttctcccataaaccttcatcatgatcaataccaatttgatgtacatactctttc

SEQ ID NO: 104103 - DNA, 470 bp, Glycine max
  unsure (1)..(470): unsure at all n locations
atagaccggcccatatatatgtatatattcttatattattttttgcgcactattaattatttttttaacgttctattatcctttaacttttctattacagtcctgctccagagcaaaagaatattaaagatttaatgtgaagaaggctcttaaaaaggttatcacgtcaggctaagcttttataatggccagactgagctcaaataaaaatctntaatatgctataggccaagcgcaggactcacaaattcatcgtaagctaggctcaagccttttaaagcctagtctggcctggcctattcccatccctaattgtaaagaatgtgccaatgtagaatgctcttcattgtgtgggagtttggagagagtcaaatacatgaaccccatcanagggacacttttattgacttcaacattngaacatcacgttgagctacacagttggagagacagcaatgcatgataatagt

SEQ ID NO: 104104 - DNA, 462 bp, Glycine max
agcttgtaggattatggggtacccatcacatgtgtgtctatgtggcggtcgggcgatggtgcacaacaagttatccacattcacaaatcgcgcataaacccaccatcccctgttgcccacctccaactgagctcacgtactcccacgtagcccatctcctcgtttctctcaacaccgggttcccatcaatcctcccaagcttccccaacatccaagtaattcaacattcaaacaacacaaactatcacagccaagaaaatagggcaaaggctgaaaactatgcccaaaacaccaaccaaaatcacagcttttctcacttaaagaccccagtacatttccttccttccaattcgttaaccgttggatcgactcacaatttttactggaagactctagtacataagcctacattttgaccgttgggatctgctagaaaacatccagaactcattctgcactact

SEQ ID NO: 104105 - DNA, 236 bp, Glycine max
  unsure (1)..(236): unsure at all n locations
cgacatctcaagctaagcgcanattgcaaatatattttaagtgtatgccagctgtgccaatcccaaaactcgctagaatatgaaaatatggaatagggcttaacgcgagggcgggctaaacgcaaggctttgctaaaaccaaacgtcatattgactcgctaagcgcgactgtgcgctaaaaaagcaacacatcctntgcttaaaaggaaattacttacgcaggttcattcacccac

SEQ ID NO: 104106 - DNA, 378 bp, Glycine max
  unsure (1)..(378): unsure at all n locations
agcttngagcatattcaaacgacaatttctntttactcggatgtccgattgtgtcctgtaatatatcgagacgctcgtaattggaaacagaagctctgagcaaattcaaacgacaataactttttactcggatgtccgattgaatcccgtaatatatcgagacgctcgtaattgaaaacagaagctctgagcaaattcaaacgacaataacttctaactcgggtgtccgattgtgtcccgtagtatatcgagacgctcgaaattgaaaacagaagcactgagcaaatacacacgacaataaccttttactcggatgtccgactgtgtcccgtaatatatgcatacgcttgtaattgaaacagaagctctgagcaaatt

SEQ ID NO: 104107 - DNA, 63 bp, Glycine max
aattggctcacagcttctgtttcaattacgaacgtctagatatactactggacacaatcggaa

SEQ ID NO: 104108 - DNA, 442 bp, Glycine max
  unsure (1)..(442): unsure at all n locations
cgcttgcgtgaggagcttctatggtcgccggatctttgagctacaatgagggccttcaatggtgatattccaccatggagatgcaacggaaggaaaatgagaagaagagaggggaggctccatcctctanaaaataagccatggaagaaggagcttcaccaccaagaatgtgtcttggataacaagctatgaaaagatgctttaatggaggatatgaaatagagaaggggggacacgaaattgatgaataaaaagggagacaagttgaacttgaagtgtgtctcataagactttcattcatcaaatttccaacaagtgttacacatgtttctatttatatccttagatgcttccttgagaaacttccttgaaagacttcttgaaagctttttgaagagctctttgtaatcttccttgaaactagacttactacacaccccct

SEQ ID NO: 104109 - DNA, 451 bp, Glycine max
agcttatagtatgcccgtgtcatctattcctatgtgatgtggacgaagtataggcgatcagaacatccattctttggatttagggttgaacctagctcatgcttttacacaaagggtcatcaagtcaaggttgaatatggatgctaccgtcttgcaataatggggccaaagatgaatcgagtcacattactgcttctcttatgtctaacatttttaagattgcggattgccttggtactttcagattcaccatggcaaagatgttcttggaccactgttgaaaatctaaatcggttctaccccatatacttgcgaaaaattcacaattcttcgactggacattattcgcatgccatcatgcttttatatggtgcatagctcaatgcattctttcttgaaacacagtataaataaaataaatgacttatcaaaagaaaaggatcactttccc

SEQ ID NO: 104110 - DNA, 441 bp, Glycine max
  unsure (1)..(441): unsure at all n locations
aaagcttaaaatcaagtgatcatcaatttcaaacttttgggagtgaacgcaatatatcatgcatatacattacttgtatcttgatttcaggaactaaattgtcatcataaaaaagggggagattgtagaagcaaagcctttgtctttgatgttntgatgatgatcgcgatgatttgatgaaaatgcgcttctcaagtttaattcaagacaatgattcaagaatacaagatacaacatcaagaagatctctagtattttaggaagggaattcctaattgaaattgcaaaaggtttggcaaagaaatttaagttaaaaagtctttttcaagagatttactctttggtaatcgattaccagtggccaaaaattggttactacagctattaaaatctgaatncaaattntagactgtgtaatcgactacacaatattggtaatca

SEQ ID NO: 104111 - DNA, 421 bp, Glycine max
  unsure (1)..(421): unsure at all n locations
agctntanaatgtgcaagtaacaagaaagtttttattttatctgtagacgcaggtacataaattgtgtgtcgaaccacgttaaaattttatgtcttctctctcttatccttattcctgtctcttcttcttattgctttatactaacatcaattgttggagtacaagtgtgaggtgaagtcccacatcgggtagaaataataaagtcgagcaccatataagtgaggagaagacccataaacctaagcctcaaggttttgggttaaagtggggtgtcaaagttccttatgtaatggctcgtgctacaccggtgttaatctatccatagtttaatcccctcgaattacccaacaactggtatcagagccgatggttcgcttggtgaccgactcatacaagttaaatgccgacaatggatcttgg

SEQ ID NO: 104112 - DNA, 471 bp, Glycine max
  unsure (1)..(471): unsure at all n locations
acactaacaaactcagctagctgctctaatatacggcacanactaagcccagggttctctgttgttttcttcccaccctcctcanttttctggatcaatttcttgacagagtacaaaatgaaagcaaaccaatacctctctgcttcttcagactgaaaaagaattatataaactcatttagttaaaataaaaaatttcataagatatgcgttaaaccaaaaagaataatgttcttctgtaccggtccattccccatngatgaaaaanttgacagtagaatatgcttggtttcaccaaacagattctntgcttttttacagcttttctcttccaatgctagcccattctgtcataaaaagagcacattaatgtaggatttaatgagtaaaggatccaacaatttaaaccctactcaatctacctaaatgcatancaaatatatatggacatttcttatattccaagtctcac

SEQ ID NO: 104113 - DNA, 470 bp, Glycine max
  unsure (1)..(470): unsure at all n locations
agctntannaattgaattaccatatatggtaatcgattatacagggcaaattntgaattcaaattntaatagctgtttgtaaatcagttttggctactggtaatcgattacatcctctggtaatcgattaccagagagtaaatttcttgtaaaagactttttaacttaaaattcttggccaaaccttttgctacttcaattggaattcccttcctatttaatataccctttctaagactctatagactgtcttgatcatccatcttgaatatctttaattgctttgtcttgaataaagctttgagacgcatgtgatcttttggcatcatcaaaacatcggcttgatcctttgtctacacatccaccgtagataaacaggaccacaacatttgatttctctgaccagatgcacaatcaagtgaatcatgatggtcaagatagcagggggaaaatacatctncaactgacac

SEQ ID NO: 104114 - DNA, 470 bp, Glycine max
  unsure (1)..(470): unsure at all n locations
ctannaattgaattaaaaacattcagaaactgctggtaatctattaccatatatgtgcaatcgattacacaatgcaaattttgaattcaaattttaatagctgttgtaaatcagttttggccactggtaatcgattacatcctctggtaatcgattaccagagagtaaatttgttgaaaatgactttttaacttaaaattcttgaccaaatcttttgctacttcaattggaattcccttcctatttaatataccctttctaagactctagagactgtcttgatcatccatcttgaatatctttaattcctttgtcttgaataaagctttgagacgcatgtgaaaactntggcatcatcaaaacattcaacttgatcctttgtctacaatctcccnctttttgatgaatgacaatcctgaaatcaagacaagctatatacaagatgatagcacgttcacacaatccttact

SEQ ID NO: 104115 - DNA, 471 bp, Glycine max
acctaaaatggccagagaatgattattaaactttctaaatgataatactaagtttttattacctatacttaacagaaaatacttataacactacaaaataaccattaattgggagagtttggtacaatttatacaagttttatacacaaaagttagtcgtttttaccgactaacaactcccccaaatttatagtgttgcttgtcctcattccatacagtcagaaatgtataaacagaatcagaagggctttctcacgcttgtagtgaggcttggctacaaaaaattcattggtttttcaaggattcaaaggtttagaatctaagagagcacaattcctagacttattccaatggtctttttcatgcgcttagctagctcactaacttttcactttcatttgcttttgaccttgttacatcaacacactatattcttttcttcttattttttgaacatacaacttatttggt

SEQ ID NO: 104116 - DNA, 473 bp, Glycine max
  unsure (1)..(473): unsure at all n locations
atctctanagcgcctgcagcatcaagcttggtgaggcgctgggagcaattcatctttaatgtaagctcgagaagcttccgccacaagtcataggagagagggatggacacgtctcctacaaagtttactacgagatgctgcgccgtgtccggcgttgactagcccgatcccattgacttgactgaatcaanaaaacgtttctttttttgagtgcggcggttcagggaaacggattgtggaatcacggtggaatctaaaagggttggattgggagatgaacagcgaggcgggtcttgaaaatgacgggagttgatgcaccacatacaccactagaggaggaaggagcactgactttaataccaatgtgtttgtgtccttcccaacaaactacttgtatattctatgtttagcatcacatattagtatgtcaggctaagagacaaaagaatactatattttgtttttatgcttat

SEQ ID NO: 104117 - DNA, 451 bp, Glycine max
cacagttggtgtatccctacagcattattatccattattaatgagcaataccgggatgacaatattaagtatttcttttttttggagttcttaaacatgatttgcactaatgttcaaaaagattgttcatctccctagttcagtgaaccttgctaccttaatatttctcccagcattatcaatcagtattaactttcttggaatgattagtgatgatgaggagcttagtttctatatctccttgtaattcaacacaataaaaaaataaaatgtcatatatcaattatttcattaatatagtcttaatttatctaatgaaaattatgctattaaataacaatatgcgtatattaaccatcaatacatcatactattagtgtaaattcataacatctatttaacttttattatggtaaaattataatgagaaaattctccttcctaacatatc

SEQ ID NO: 104118 - DNA, 374 bp, Glycine max
agcttgacatgtcgaccaattactctatgtgagtcaacaatcctttcaagataacgacgcacatcccacaacggatatctgattgaagtctataaaaggatgtcttcctcaatgaagcaccttgacaaaaaacatataaggaaaaagaacacgagcacggcaaatattgagacagtgaaagtctattataaacactacatgttctacattgttattattctttgtaaagcacagtagattatatatgtgcttaattgtatatttactattcgagtgttaagaatatttgtattcaatcaaacaattgtttgtgaaagtcaaaacgtggttagtgtaaaaaaatacttgagctcttagatttagggggagtctaa

SEQ ID NO: 104119 - DNA, 124 bp, Glycine max
gtcacgagaccttggcgacgtcatgtggggtgctattgccaaataccagcttgaccaatcctcacccaacccgggcatagtccgcctttgagaacctgtgatggacctatgcaggcgagcttct

SEQ ID NO: 104120 - DNA, 431 bp, Glycine max
  unsure (1)..(431): unsure at all n locations
agcttcaacattcaacttcgagcgtcttattatattataggactcaatcagacttccgagtaaaaagttattttcgtttggaattgctcaaagcttcaacattcaacttcgagcgtctcgttatattataggactcaattagacatccgagttaaaacttattgtcgtttgaatttgctcagagcctcaacattcaatttcgagcgtctctatatattatgggactatatcagacatccgagtgaaaagttattgtcggttgaatttgctcagagcttcaacattcaatttcgagcgtctccatatattacgggactcaatcagacatccgagtanaacgttattgtcgtttgaatttgctcagagcttcaacattcatcttctagtgtcctggtatattacgggactcaatcagacatccgagtaaaatg

SEQ ID NO: 104121 - DNA, 390 bp, Glycine max
  unsure (1)..(390): unsure at all n locations
atatatcgagacgctcaaaatggaatgttgaagctctgagccaattcaaacgacaataactttttactcggatgattgattgagtcccgtaatataatgtgacgctcgaaattgaatattgaacctttgagccaattcagacgacaataaatttttactcggatgtcctattcagtgacgtaatatatcgggacgcttgaaattgaatgttgaacctctgagcaaattcaaacgacaataactttttactcggatgtctaattgagtcccgaaatatatcgagacactcgatatatcgagatgctcggaattgaatgttgaacctcagagccaattcaaacgacaataactttntactcggatgtctgatngagtcccgcaatatatcga

SEQ ID NO: 104122 - DNA, 466 bp, Glycine max
acctcaagcacctgaggcatgcaagcttgcaaaaatccaaaggatttgcctttaagttttgttgctctaacacaatcaaaatatatgtgttgattggcacattgactagtatctaattgtcttacaaacggatgtacaaactaagtacttagttttttctctcaagatactcatagtgttttgagagcttttgaactttacaagaatttacaaagagctttttacacaaacaaaaattgaatggtggtgcttaaggtcgtatctatttcttcaaaacttttagtatttataggtcgttgacttcatgtgtctgttgtctctataaacaaatagatctatcacttgagattttgtctaaagctcttgatcattgaagcaatttatgcttgcattaaatgtacgcctcattcatgctaaaacaccactctctgtagcttttgtgttgaacacttcaggagaaaatcac

SEQ ID NO: 104123 - DNA, 204 bp, Glycine max
ttccgcttggtgaatgagcaagatacattcggtactctctcatccttctcacactatgtatgaatcttctttggaattaatatataccgatttgtgggggattaggggggggcggctgcacctcaaattcctcaccaacatcttcgccactttcattggaattgccttcctatctactataccctctcaatactctaaacacac

SEQ ID NO: 104124 - DNA, 428 bp, Glycine max
acggacctaagcacgagctgcactcatgcacaaataatcttatctattgcccgaactatggccctcatcgggttatttaaaaagttggaaatgtaacattccagattgcaattactcgactctgctcaaattcaccttgtttttcacgtcttctaattgaaaattgcagcgggagaacatcaaattgatgcactatttccaaaggaactacaagctatagaacaagggaaacaaccggaacaaattctatgaacaaaaatgtttggggcaacaggaacagaaattccacaagttataatcatgtggaaaggacaacatgtttaaggagcaacctatgagggatagatcaatatgatgcttccatttcctggcttcacacttgaggacaaagttctttctcacgggggattggtaggcaagaggaatca

SEQ ID NO: 104125 - DNA, 440 bp, Glycine max
  unsure (1)..(440): unsure at all n locations
tgctctaaatntacattgatgtatgtatttatgttaggaggttgtatgccatttttgtttaagagtagtgtcccactggtaaaactaactttccaaatgtttgccttcgcacgaaatggccccgagaaagcttgcctcaaagaggtccaggaaggacaaagcatccgaaagaactattttcgcaccggagtatgacagtcaccgctttaagagcgctgtacaccagcagcgcttcgaggccatcaagggatggtcgtttctccgggagcgaggcgtccagctcanggacgacgagtatactgatttccaggaggaaatagggcgccggcggtgggcatcactggttactcccatggccaagttcgatccagaaatagtccttgagntttatgccaatgtttggccaacagatgagggcgtgcgtgacatgagatcctggg

SEQ ID NO: 104126 - DNA, 426 bp, Glycine max
  unsure (1)..(426): unsure at all n locations
agctngtgatgttaaatcaataacatgtagtctttgattgtaaatatgtaaacatctatgtgccactttttgaatgcttagtgggacaaatgggtaatgacaaatgcttctattcccagtttcccactacatgtagtggttagtgaaacaagttgaagattttgtcggtgaatacctttctaattatgtagcaaggcgtttaatagtctctttgggatagattaatatcatccatttcaactatctttagaagaaaaaaaagttttttataaaaaaaatctctctatataattaattatgttatatacatggtgatgcatttcagcctcaaaatattctttcaagtaactatatcaactacctagaaaatgcagttagcgcccgaaattagcgaccgacattagcacccgatagttttagtcgata

SEQ ID NO: 104127 - DNA, 481 bp, Glycine max
  unsure (1)..(481): unsure at all n locations
tcaggctgttcaattgcttcagattgttgcacaaaagggcttatatctgtgttttggtcggcagaggagcataaaccacagagtctggcgacaggtgcagatttttgattcatggccagttggcttaccaggttaaccaaggcatctagtttaccttcaagcttcttagtctcagctaatgaagatgaatttgtggccacttcatgcactcctctaatgacaatagcatcattnttggcactaaatttcggagagtttgaagccatcttctcaattaaatttctggcttcagcaggggtcatgtcttcaagggctccaccactatcagcatctatcatacttttctccatgttactgagtccttcataaaaatattggaggagaagctgcttagaaatctggtggtgagggcaactggcacatangttcttaaatctctccaagtattcatataagctctctccacttgagtgtctaatgg

SEQ ID NO: 104128 - DNA, 309 bp, Glycine max
gacccctaagcaccgcggctgcagctttaaggatgttctaataagcttttttgtactccggctaaaaagaacagtgtatcctgcgtacttgatgaatagagtctttgagaccaactcacaggaacttcttctgcttatcttactcttaataaaagctcccccctttctttatctgtccctctttcctttcctccatagaagcatcctctccaagcttctcatccaagaaatatctagtgggaaaagctacattttcctggcttatcccaattggatggccccttctctaaccttttactctctggcttc

SEQ ID NO: 104129 - DNA, 433 bp, Glycine max
  unsure (1)..(433): unsure at all n locations
agctntgaaatatnaacttatttgaatataatttcctgaatacgtttcccaagctggacttcaacatctgtaccaaatgataaattatccgcaagctacgtgaaaagatctactgttgcaccagaaaaaacctaactaggaatctgaggagccgtaaccaacttccacttagccagaccaaactggccctttccttctattcgtggattagcttttaagaatagcagttgcaagctttcaaatgcaagttgaccatatgtttccanaatggattctgctaactgactatcaagtcttttggcaacctgcatgggttgaaataattaacaagaccatgctgtcagaaagaaaaatcatgaacattgatctttcatatatgaaactattgactaactttacaactttagaataattagggcaacttttacatcca

SEQ ID NO: 104130 - DNA, 409 bp, Glycine max
  unsure (1)..(409): unsure at all n locations
tattacaaataaacacaattcatgagcccttttaaacntgtgaataaatcaactagggcgctagaactagtataacaagtagaaataccacgagagaactttctctaatgaaatgataatcaactaaaatattttcttggtctgataccatgcaaaggtcacttgaaaagaattattaatctggaaagttaagtaattattaatctggaaaggtaaaggtacatgacagattatataactaatgacctgaactaatgggcctatgggcccaatgatattctaactaccatatagtattatttgatttgattatactttccatctacaaaggtggtttctgaccttgatcgtttatgcttggtaaaaaaatggttaaccaggttattataaactctgaagtctgggatct

SEQ ID NO: 104131 - DNA, 494 bp, Glycine max
  unsure (1)..(494): unsure at all n locations
ttagagacgacccccacgcatgcaagcttatactcggcctcaaacaagtgcttcactgcgaactccaaatgcttcccccactgagcgatatacccctcaatgctctgcacatcattaaactccgacaaagaaatctcaaggtaatccaaattcagcgcctgcaaactcgccctcacattcgaactcctcacctcaacataaatccccacacacctatccagcctgtcattggcaatcaacctcccgagaatcgcctgcagcttgtgaacaaccgacaccggcaatggtgatggcgcaatgcacgcctgatccccgctcgcggacgccataggcaacggcacactattctcactcaacagcaacctaaactcatcctccaatttacccaatgcagcatccagcaaccctccatcaagctccccgtgctgcgactcgcgaagattcttcaactccttcttcannatcgcaagataaaccttatcagcaacagaatt

SEQ ID NO: 104132 - DNA, 188 bp, Glycine max
cctcgaataacactaatatgtgtaatactaccagggttcctacgcctaaagccatcgttgacatgattgtacctatttataagactgtcaccactagaatgattgacgtgaaaattaaatcgttctctcacatacaataaaacggttctccagctagcgattctccctgtttacggctcttttataaa

SEQ ID NO: 104133 - DNA, 457 bp, Glycine max
  unsure (1)..(457): unsure at all n locations
taagctngaacaatatacttgtccttcattaactttctttgggcttggcagccacgctcaacaaagtactttctacacctactgtacgttgatatgaccaacgctgttatgggaatgatgctacaatccttcaaaaccttattgatacattctgagagggtggttgtcatgtggccatattgacgctcttctctatcataagtcatcgtccatttttccttggaaattacatcaatccatgttgctatggctggactcatttgacgaaacttttctaaattatgatcaaaaatgtgcttgcaaggagtgtatgctgcatacatatagttatgaataacaattntaagtatatatgaaacttaaataaacgtgaccatcaaatatgagatcttacccatcttcttcaacaattctttatgtttggcattattgaatttgcgaatgacattgcttgcta

SEQ ID NO: 104134 - DNA, 419 bp, Glycine max
atctaaagaaatggcgatgaccacatttctcactcttgtaaaacattttatttagtgcaacacgaaatgcgccatcttatccctcattgatggaattcaagcgctcttgtctcaagaaggagtctgtggggctgccttgtgaccatattttgacagtattgacgaatctagatattataaaattgtcgtagtgcttgattatggctatgtggacaaaacatgctaacaaaagaattcatggtacgtattctgatggatcttcctattagaattctcattatattggaaggtacgcaacgttggtcaagatattcaaccatgcaattcactatgcatatcgccttgatcattatgaacatttggcggatttgctaagtgaggcattgaatcaagtaaagcaagacaacaatgtgcaacat

SEQ ID NO: 104135 - DNA, 418 bp, Glycine max
  unsure (1)..(418): unsure at all n locations
agctngtcgccacggagtattccgactatgctcttgtgttgtggaacaagctacaaaaggagagagcaagaaatgaagagccaatggttgatacatggacggagatgaaatagatcatgaggaagcgatatgtgccgactagttactcaagggacttgaaattcaagctccaaaaactaacccaaggcaacaagggggttgaggagtatttcaaggaaatggatgtgctcatgattcaagcaaagattgaagaagatgaggaggtaactatggctcgatttcttaatggtttgactaatgatatccgtgatattgttgagctgcaggagtttattgaaatggatgatttgcttcacaaagcaatccaagtagagcaacaattaaaaaggaaaggagtggctaagaggagttttaccaa

SEQ ID NO: 104136 - DNA, 449 bp, Glycine max
  unsure (1)..(449): unsure at all n locations
actcaagctctataagcgcgggtctgggagacaaaggtcaagtggtcgctatatgcgaatatttgttccaagtacattggatttggtacgaccatgccctcctgatttccagctgggaaattggcgagtggaggaacgccccggcatttacgcaacgagcataatgtaaacctttacagttttaaaagctctatagttgggcctacgctttagagtatttccttttgttaaggctgtgtgtcttttgtttgaatttataatacaaggatctttcttcatctgttcctacgtctctacccattctcattcatttgcatgtttatttctttttctgaaaatggcagatccgatgacgagttccccgaaggtactaatacctgtgacccacctatcaacttcgagcaagatatgagtccnaccgaagatcaatgaaacgaggatgtgggact

SEQ ID NO: 104137 - DNA, 429 bp, Glycine max
tactataagggctaaatgctggataatagtcttcataagattgaatttaatatatcacagtctgtgatcgattacagcttgtgtgtatccgattactataatctaacattcaaatttcaagtctgaaaaggcacaacttcttaaaaataactgcgtaatcgattacaccattttggtaagcgattctaccaagaaattatcaaaattaacctccaacgatcacatttattcaaatgaatttgaacggccataaaggcctatatataggtgacatgggacacgatattcttaaaagttttgctacacaaagagtcttaatcctctcaataactaaatcctcttatcctctaaaatattccttgggcaagcacttgccaatcaataaagaatccagaatgatcttccattcgtatattctttctcttaaaa

SEQ ID NO: 104138 - DNA, 304 bp, Glycine max
atagctaacaagcattaaactagattttaccgtatttttgtttcaggctgagaggaaatgagatgagtatttgagccaactattcaaaagctacattattaacttctaactgtttacggaaactcccgatcaaattgacccttacactattacctaaaaggctttgttcacttgcactatttttattgcttgccactaccacatctatgaatttaataatactccttaactcattacctcccaatacttttacctaaattaacttcactcaatgctttaattacctatacttcatacttacagt

SEQ ID NO: 104139 - DNA, 345 bp, Glycine max
  unsure (1)..(345): unsure at all n locations
agctcgtctttgagttagaagtggtttatacattatacatgactngtacgacccaacttgcgccatcattggatgaaggcataagtgaattcgaatatctgcaccttcatgcagacaattgctgaagaaatgtgcaacataattttgcgcttgtgcacaatatgcctatgcatagctggtagcggaaagggtagtacataacgggatctggacattctttatcacaacccaacggtcaaaatgtcgatgtacgcattacggacctccagaaatagattcgagtccaaccaacggttaacacatctaaacgaatacaatgccactggggtatctgaccgaagaaaa

SEQ ID NO: 104140 - DNA, 461 bp, Glycine max
  unsure (1)..(461): unsure at all n locations
tcggaagaaagtgatgaggtacaagccctatttgcagagctttgttatagcccgggtagncgaagagaagttcaagtccatagccatcaaagtctgaaaagagtatgatgaactaagggatgtcaatatggccacagctgaagccttggaatgagaaaccaataaggcccgacaggaagaacacgaccaaagcaaagttntgaggggctttatatggcagcaatagtgagctcaagctccgaagaggtgaaaggaatcatcacgggtcaaaggcatgatcttgatagacgagctaaaggcttgccttatgtcgaaaagaaattcgtcccaacagttaagcgagactgaagggaatatgtgggccatcatcgatgagtgcanagagaagctatatctatcagcgactcacgagcaaaggctagatgatgagtacgccaagatatcaccaaaaagggaagtat

SEQ ID NO: 104141 - DNA, 385 bp, Glycine max
agctttgagccaaaatactgactcttcataattcttgacgcagggcgagaatgtgaatccttaccctcggaagcgaaaagaatagaagggaagatgtcaatccaagaaaatgagagaaggaagatctcccatccaagagaaagccaaaaacgaaaagaaggaatattcccactcaaagagtgggagaaagcaaaaagaaaagaaagaaaattcccaatcaaagaatgggagaaagtaaaaaaggtagaagaagaaggcaaaaaagctcctgagcatggaacgacagacaatataaaaattgtgcaaaaaggtctttggaccggacaaaatctgaataatacagaattgtcaccaactgaacaaaaagaaggaaaggagaccacga

SEQ ID NO: 104142 - DNA, 450 bp, Glycine max
  unsure (1)..(450): unsure at all n locations
agctcggcgaggcgagtattcaattttgctctattagcatccaaggcatcaatatggatgtccaataagacaaagcgctcaccgatgaaagtgaggagtccatccaaactgcaagaatgttgcgcttaagagatgacaaatcatctctctaaggaggaggtgatggaaaacggactgctgtggcctgtgcataaacgtccttctatacacaagaaccattcctctttttgcgggatccaacgatgagaccaccttcgtatcgatagaaaaagaactgctgactttaacaaagggcttagagtcgagagggacattataatgatgcatatacatggcgtacagacgtggatatggaagaggagcaattaaaanccatgctctatgcatgcgaaatataacataagtgggccaagcgaaatgatgaccggttataaaaaccccctatatttc

SEQ ID NO: 104143 - DNA, 469 bp, Glycine max
  unsure (1)..(469): unsure at all n locations
cgatcctctaagcacctgagctgcagctntggcatactaanggctncnctaaagtcacgttttccttcactcacatttgtgctgcgtggccaaaggttcaaattaataaggatccaacgcatgtatgttgagggcaatcattacattttctttatggaccatgtttggggtgtttcttacacggagggcacaaaatcttttaccatatgaagggctgtgaatagtttcccctaacaatgatgttaacaagaaagttcttgtcatacattctaaggtggaacaacaaagccgagaatgatagatagatattccgtgctgctttctgaaactgaagatactaaagatgaaaaaaagtatatgtggtgatgtgtaagggcataaatggttatctatgaattaagatctatgctacattattggatttgtgggcagacatgcatttatagggatgaactgcctataactaatg

SEQ ID NO: 104144 - DNA, 441 bp, Glycine max
cgaagatgtgtagcccaccatcttgtcatagtagaagactgtgtatgtgtctactatcatgggcatcagactcttctccgtcattgaggtgtcacttgagctgccacgtctctccacctttgggcatattcttatgaaagattcgtgccccctttttgcacatgttctgtagttgcatcctatctgaagacattatactgacactgcctaacgaaggcgaccactaggtccttccaagaatggactccggaaggttccaagttagtgtaccatgtaacagctaccccagtaagactttcttggaaggaatgtatcagcaattcctcatctttttcgtatgcgcccatctttcgacaatacatctttagatggttcttggggcaagtagtccccttgtacttgtcgaagtccagcacctttgactttggacgggtgatgata

SEQ ID NO: 104145 - DNA, 480 bp, Glycine max
ttaagtcacctgaggctgcaagctgctgattacatctccctctctctcattctaattcttcttgatatcatcaaaagcttcgtgatttacattctccccctctttgatgatgacaaccacctgtttgttaggagcatcaacaaagaaaatatctatttgcatatagtttactcccccttggttttacaatgattgcttatatgagacaattgaagatttcatattttttatatataaaaagttgtctcataaaacaatagataatttttcttactattttatcttttatctttctctccccctttgtcaacatcaaaaacaaatcatgaatagaaaggagaatgatgtttccacttgttgcaatggatgagaataagtgataccataaggcctttaaaccatcattccatattaatccagccaaaatctttacaagtacacatctatccaacacattcaaaacaattaattctcaatatt

SEQ ID NO: 104146 - DNA, 462 bp, Glycine max
  unsure (1)..(462): unsure at all n locations
actatacaacactcaagctntgcagatttggtgttcgccagtgaaaggatcgaagcggattatttagatttttatttaatcatcctgcttggacgaatgagaaaactggggcaaatgaagagggtgagaaagaaggagcatcccatgttgtgactgccattcctatacggccaagtttcccaccaacccaacaatgtcattactcagccaataacgaaccttctccttacccaccacccagttatccacaaaagccatccctaaatcaaccacaaagcctgtctaccgcatttgcaatgacgaagaccacctttagcacaaaccacaaacaccaacaaaaaggaattttgcagcaaaaagcctgtagggttcaccccatattccgttgtcatatgctaaacttgatcccatattcactcgataattcaatgggagccataacccccaaccatggttctcacc

SEQ ID NO: 104147 - DNA, 463 bp, Glycine max
  unsure (1)..(463): unsure at all n locations
agcttccaagagtngaagaggtggttgacaacttttccagtgttatatttgcccgaccctaagagacctattgaagtgtattgcgatgcgagtaggcaaggcttagggtgcatattgatgcaggagggaagggtagtggcttatgattcatgtcaattgtgtcctcatgaagttaactatccaacctatgacttggaactagcagcggtggtctttgccttaaagatttggaggcactatttatatggtactcgntttgaagttttcagcgatcacaagagcctcaaanactggggcgatcagaatgaactcaatatgaggcaacgaaaatggatggagttcctcaaggattattgatttggtctttcctaccatccaggaaaggctaatgtagtagtcgacgcgctgagccgaaagttcttacatgttgcgaccatgatgagtctggaatataaattgatag

SEQ ID NO: 104148 - DNA, 467 bp, Glycine max
  unsure (1)..(467): unsure at all n locations
tcatgatgatgaatcaagttgattcaagtagttntgatgattttctttatgatgacaaaaagcccaagaatgatttctagattcagtcaccaagttcaagatcaagtttaatttcaagtttcatgagaagaaatcaagaagattcaagaatcaagagaagtttgatttcaagattcaagtgaagaagaattcaagattcaagaaaagaaatcaagaagacttcacaggggaagtattgaaaagattnttcaaaaaacaaacatagcacaattttgtttttcaaaagagtttttctcaaaattttctaagttaccagagtttatactctctgataatcgattaccagtggaaaagtttgatttcaaaagcttntaactgaanttgtaacattccaattgtttttaaatggtgaatcgattcaatatattggaatcgataccaatgatctgaacgttgaattcaaatca

SEQ ID NO: 104149 - DNA, 372 bp, Glycine max
cgcttataatggtagtttgattgaagcttaatattttgtttaacatttaacacgcatatctttatgtacagcaaaatcaaaatcaaacacaaaaatcatattcaagttactcctatgggataaggaaccatggaatgatctaacttatatcaggatggtttaatcacacacaaagaagaaatcattcttatcttaatttacgaaccacaacattctaagtaatttattaatatgcataagatacaaatgtaaggctcaaacaaaaaaggagaacgggaggggtggagaagcccactgcttgaggctctcattattgtgggatttggagaggattatatgtacccaacattacatatatgtgcatagattgtg

SEQ ID NO: 104150 - DNA, 445 bp, Glycine max
  unsure (1)..(445): unsure at all n locations
agcttatnngcattgctgcactttgctgttggtcttctccagcatttgaatggtgggtgacccattatgccacaatggtgacaaggtgggtaatatttatttttacccttacttttactttggtcatttacagtacttccacctttatattgcttggctggtaaagcaccatcaaccacacaatcttgtctcataagccttcgctgctcctgggcttgcaaggcatgtaacactcttgccaaagtgatcttggacagatcctttgtgttctccaacgtggttatagatgcttcatatttctaaggcattgcaaccataaatttttctataattctagaatcaaccaatttagtgcccattaatctaaccttattagcaatgccaagcaatctgccaaatattctttaattgtctaagactctttcattctttggagctcaaattc

SEQ ID NO: 104151 - DNA, 355 bp, Glycine max
  unsure (1)..(355): unsure at all n locations
gctaagatgccgatattcatccatgttatttggtgtttattggcgancagaattgccattccttggattatagggttgaaccaagctcatgcttttacaaaaaggttcatcaagtcaagttgaaatatggaagtaaccgtcttgcaaaattggggcaaaagatgaatcgagtcacatcactgcttcatctactgccaaacatatttaggattgttgatgtccttgtttcttccagtttcactttgacaaagatgtcatggaccatgttgaanatctaaatngattcaaccncatatcctgcgtaaacattcgcaatacttcaactgtacatcattcgcatacatccatgcttttc

SEQ ID NO: 104152 - DNA, 379 bp, Glycine max
  unsure (1)..(379): unsure at all n locations
aaaacccatggtatcatatcatgttgatccttcatatcttctatatcgcttttatcggtagattgtgatctactcgcatctgcattatactttttagaatacgtgtttcggatatacctttaattaattatgggtcaactttcttgtcggaaatatcttatttccaatgctacttatttgataaacactataacatancaatctaccatttgcagaagcttgcatgatagatatttgcttggaaatctagcataatttgcattctacgagattaacaattaattataacgagagagaataacgtgctgagccatggttatcaactataagcagctgtctctttctcaataacgatattacattgctcatgggaaatgga

SEQ ID NO: 104153 - DNA, 237 bp, Glycine max
tgtctatggtgacgcgggcacttaacatttctttgaaagtgcaaagaattccaaccctcggacttcttgagaaaacttccaaactctttaccatttagcccacattctatgcgacttcttcactactggaacactctttgtaatctctttagaagagatgggtctaagtgcaaatcctttttatgtacttttctatcgtctctgcacgagattgtagaatccactcttgttcatatg

SEQ ID NO: 104154 - DNA, 302 bp, Glycine max
  unsure (1)..(302): unsure at all n locations
cttaggctctacaagagaaacttatgttcaccctgatttctttacttttttatattagaacgctaatgtactcctcgtgtgattcgcttatttgatcgacttagatgactccaggtatagtgtgagttatccatgtgtgacttgcttgatgtggatgttgagttaaatggagtttattgacctangctcgatatatgagatttaaagtcttttccacacacgctgtcgcaaaagcgcgatctcgcgttcattcaattgtcagatccgccctcgaatttatactctaggtccataacccacgt

SEQ ID NO: 104155 - DNA, 336 bp, Glycine max
  unsure (1)..(336): unsure at all n locations
gtaaactcactacttaataggatagcgggataaagaatacatgcatccaaaaattcatgcgtatatatatatcatatatatatatatattatgggtatatataattatacatacgtgtcttttttccaaggaaagtcacgagancttaggaggcatctgtcctgataccacggatatgactggttataaaatgaaccccggtctaagcctaggctctttttaccaatacatttaaaggaaaagtcttgactaaaggcacatttttaccctgccccatttgaactacataacatatgcacgggggccacctattgaatcccacaaaggacccccttt

SEQ ID NO: 104156 - DNA, 346 bp, Glycine max
agcttgacatgaggaagtgtttattgttgaatctttctgcctttattgtcgccacagagtggtacctggagatttgtcttcggggtcatgataccttgtggacgtcatgtggggtgctattgccctaaaccctgcttgaccaatcccgacccaaccctggcatagtcggtccttgtgaacctgtgatgtacctaagcatgcgagcttctggctgtctactagatataaggataacattactccactatcatgtggcttgtggtggctggtctgctgtcgaactcgatagatatgtggattggggccctggcaatccataccatggtggagcaataatttcatgctt

SEQ ID NO: 104157 - DNA, 328 bp, Glycine max
  unsure (1)..(328): unsure at all n locations
tatgcgcatatttccctactaacgttcacttgcacaagacttctctattactaagaaaaatgcacccatatacaatcaagggagcttcattacctagattatttacatgtacttccaaagtgtatttgttatttacatcatacacgccatcttgtcaaaatttacacacatgcatacgcaaagcatttcggggtaccaaaaattgcacatgcgctcatcttggtatttctaatatctatacatatacaaacttcatgatgaatcttgactacctacgcaatnaagtgctacatttcatgctcttttttttttttttttttttttttta

SEQ ID NO: 104158 - DNA, 457 bp, Glycine max
  unsure (1)..(457): unsure at all n locations
agctngtgcattcaatatcctgataagggtgtttcatatgttctcaagactggactaatacatttgctgcccaagtttcatggtcttgcaggtgaagatccttataagcatcttaaggagttccgtattgtttgttccaccatgaagccccctgatgtccaagaagatcatatctttctaaaggcttttcctcattctctggagggagtggcaaaagattggctatactaccttgctcctaggtctattttcaactgggatgaccttaatagggtgttcttggagaaattcttccctgcatctaggaccactgccatcagaaaagacattttatgcatcaggcaacttagtggagaaaactttgttgagtactgggaaagattcaagaaaatgtgtgcaagctgccctcatcaccagatttattagcaactcgttctttcatatttctatgagggac

SEQ ID NO: 104159 - DNA, 464 bp, Glycine max
  unsure (1)..(464): unsure at all n locations
actggttcagggaaacaatattttccaatgacggtgcttcgaaatcattaagatttttagttgttgggccaaatctaaatgtaccaacttggaaaggatatgatatcaataattattccttctacaccaagtctgaagatgacaaaagctcaatgtagaacaatggtgtgactattgatgccaactccgatcacntttctagtgcatcagacaacaatccaatttgagcaaccatgccttactttggagttattcaagaaatatgggagcttgactatactgaatntagagtttgtgtctttaagtgtaagtgggtcaatgccaataccagtgtccttcaagatgaattcggatttaccttagtagacctaaataaggtggcttatattggcgaacccttcattatggcacaacaagcaagacatngtgtntacgtccaagatctttgtgattcaagatattca

SEQ ID NO: 104160 - DNA, 429 bp, Glycine max
  unsure (1)..(429): unsure at all n locations
agctngccgcccagctcgcccaggcgagcaaggttgcttcttccagaagcaacaaccttctgaaggaatcttctggatggcccaagtgggcctgactgctataagcaccacctatttactaaatagcccccctactatttatatggtaatactgtttccgcaacataacgaaactttacaaaattagaaacgatacatatatcccttccgcaaggctacgaacacgtacagatgaagaactacctctatttagcattcgaacagaaacggatactcaccgatggcgcaaaaacacctcttctcgacttccgcctcactacggaaaattacggatcgtgcaagcctgcttccttctgaattccgagaacgctctggacttcatatatcgtgcaaccaacgacgccaagagctactaagcgccaatacaaa

SEQ ID NO: 104161 - DNA, 479 bp, Glycine max
  unsure (1)..(479): unsure at all n locations
tgaataatactatcaattacntaattcacactttgggtgatttgtttgacttatacaaacgaagcaatccaacattcccttatcagtgatttcgacaaaaaaaatataatgatttaagcaaaccattcagataatatcagaagcaacaccacactcgatcaagctagatctgaatcaacgaattcaaggacaaaccctgaaataacacaaatcggaacacgatcacgaattcaaaaccctaatcgcacgccatcaatcgacaattcacacacgacatgttcattcacaaacaacgcgcgcgagacttcaagattatcgacgcacatgcaatcatttacagaaccagaaaaagattaacggatgacaaatgcagatcaaacgaagccagaaatgccacagatctgtgaatctgaaaattctcggaaccgaatcgtagaaaagagagagaattaccggttgctgagatcttgatcaattga

SEQ ID NO: 104162 - DNA, 488 bp, Glycine max
atcttagagccacctgcggcatgcatgcttgtctttcagtgtctgaaatgctgctgtttattcttcatcaaacttgaaggccacatctttattcagcaggttgcttaggggtctagcaatctctgaaaaatccttgatgaatctcctgtagaaccctgcatgccccaagaaacttcggacacctttaacattcagtggtggtggcagcttttctataacctctatttttgcccggtcaacttcaatccctctatctgagatcttgtggccctggactatgccttctcggaccatgaaatgacacttctcccaattcaggactagattattctctacgcacctctgaagtaccatctctaggttcctcaagcaactgtcgaatgatgatccgaaaaccgagaagtcattcatgaacactttgatgcttttctccaccatgtctgataaaatggccagcatgcacctctgaaatatggctggtgcattac

SEQ ID NO: 104163 - DNA, 397 bp, Glycine max
  unsure (1)..(397): unsure at all n locations
tgtagtgtacaagacactgaccttctatggaatgatgatgcaatgggacatctaacgaaatttatagttccatgagaaggactctctgcggcacaagatctctttactatttaataataataatgacgacgatgatgatgatggtggtgatgactacataatcatcataacaagcttgctaagcatctgtgaggtagcatggatgcttactagaaagccattgtgcgaggacgctgactgtgtttcaaaacttttatacatgtaaatagacgacccatgatgttggtatctctctagaatcanggcgtactataactaatttccacttataactatctaaatgagccctatcacgactnacatatggcaatgatcgacatactttctcgatattata

SEQ ID NO: 104164 - DNA, 430 bp, Glycine max
  unsure (1)..(430): unsure at all n locations
agctntacagtagattntagtaatgacccacttttctatatttaanataacttaaagccattaacctagggaattaaaaaaacttaatggctgagtgtaactgaaattgtggcaaccaaaagtcacccctaacagccaacaagttagccaccatttggtctcccaaaaggctgatgcctaagttgccaattgggcccttattacaacttgaactaaacctaactaaagcccttttagttgattatcccaaaacatatttttggtcagccaactttacaaggattgggcaattatttagacaaactaaacactctaaaattgagacaaagtggtgtcatttagtcctcctccatttgggccatgatacaactcacaaccttggacttttctccttgaaacttgggcttgtattcaaatagtatggacagca

SEQ ID NO: 104165 - DNA, 433 bp, Glycine max
tctcatgatgcacatttatgtgacactagtataactattattattgagaactagacttgtattgttgcaaatctaattatgtatgcatgtacctataatatcatagatgtagctctggaatggaaaaacattttggagggtgatatgatgttcattttcttggtgtaagttgcccctattataagaaaaagcagtacaaccactaaacagagaagcgtcacttccaaacaacatatggcagatatcacaactcaaacaatgcaagttgcacagcttgatgtgaagtgacccaaccatgagtaagaaattcacttgggcttcagccatagaacgttgtgaatgaagataggtttaacttgtagccaaaaaagaagttgcattactggacaatgacttttggagaaatcataagtctatttgaagactcttaaat

SEQ ID NO: 104166 - DNA, 375 bp, Glycine max
agctgaggaatcttatacaaccactagagatttctctattgctgtcggactagatacatgagcctacatagaggtaagggatgaagttatcgcacatgggattataatgaacatgcgtagggatctttagaggataaaattggggtatattctgggatatttgttgaattataattcttccttcatatatataactatggtattgacgaatttgacggaccaatcgaggtcttaatgcgaatcggatgataaaatgagtgctcttggtgttaacatgtctctgacccatgattctaataccctgactttgatatgattatgcgaaattatttgaggagttttactccccgtgttgtgaaaaacattttggcataa

SEQ ID NO: 104167 - DNA, 376 bp, Glycine max
caccatcttttattagaaaatactgtttatgtgtctactatcaacatcatttccactccggcagtgaggtgccattagagctgcctggtctcttcacctttgggcgtatcttttgaaagatccgtgcccccttttttgcacatatatctgtagtgtgcgtcactaattcgatagccattatactcgacacctgctctaacgaagggcaactcattcatgttccttctccaagaattggactccgtgaaagggatctcactagttacgtgtaccacggtatacaaactacctccactaaagacttgtcttcgaaggaatgtatcaacaattcctcatcttttgcgtatgcttccattatccgacaatacatctttag

SEQ ID NO: 104168 - DNA, 455 bp, Glycine max
  unsure (1)..(455): unsure at all n locations
agcttccatcaagtggtaatcagagcacaagatcttcaagtatgtgctccttaaacctccattaattgtttgctctaccttctcttccattgntgtttcttcattattttctccatgtatctcctcacatgtcttgtgctaaatgtttttaacatgattctttagagtntccaccgattaaacttgctatagaagcttgatttgatattctatggatcaaatttcttgttcttgttcttgaaccatgaattgtgttgagtttaagttcctttgagttctgtcttgctatattttgtggctgaaacctaaatcataaaattcttacaaaaatattaaagcagaagaaaacctcaaaaatctagagtgacttgttcacctattgtagtttcgtcatagaagtcatgtctagtcatgaaacttgccacatagatttcttatgttgtgctgaattttat

SEQ ID NO: 104169 - DNA, 487 bp, Glycine max
  unsure (1)..(487): unsure at all n locations
cctataaaactcagcttccnattagtgtaccaaatgatcgcggctctatccaagctatcttggaaaaagtgcatcaacaacttttcatccctagaatatgcccccatcttgcgacagtacattttgagatggttcttaggacaagtcatccctttgtacctgtcgaaatgaggtaccttgaattttgggaagatgacgacgtctggtactaagcaaagatccgccatgtctgtgaacgaatagtcgtcaaagccttcaacagctctcaatctctcttcgatgagatcgagtttccttctttcttccactgtcggaggcggtccttctgtggacaagaatattagctgtgctgggaggtttcgaggttctcccgtgaggttgggctgaagcactgtgttgggtgccggcccctcgacagggacccgggggtagaaatcgatgtctccttgggcatactctctatgatcctcgtgaacatcgtccgact

SEQ ID NO: 104170 - DNA, 413 bp, Glycine max
  unsure (1)..(413): unsure at all n locations
aagcttatgctgcgaatattgacaatagacctgctttatctcagcatataaatcaaccacagcagaacaattatgacctctccaacaacagatacaaccctggatggaggaatcactctaatctcaaatggtctagctctcagcacaacaacagcagcctgctccttccttcacaaatgctgctggcccatgcagaccatacattatctcaccaatccaacaacagcaacagccccacaaacagtcaacagttgaggcccctccacaaccttccctcgaagaacttgtgaggcaaatgactatgcagaacatgcagtttcaacaagagaccagagcctcccatcagagcttaaccaatcagatgggacaatntggctacacaattgaatcaacaacagtcccagaattctgac

SEQ ID NO: 104171 - DNA, 381 bp, Glycine max
agacaatgctgcaaacagacacaatatatccttctcacattatatccaacaacaacatactgagtatgaccttacaagcaatagatgcaagccacggtggaggaagcatccaaatctgagatggacaaggccttcacaaagacaacagcctgtccctccaattgaaaatgccaatggtccaaacaagccatatgatcctcctccaatgtacgacaacaacagcagctagagtcacaacaaacacaacacagcactgaggctcctcctcaaccttgcttagaagaagtagtgaagcaaatgaccatccagaatatgcaacttcagcatgagacaaaagacttcattcagaggctgacgatccaatgggacagatggacactc

SEQ ID NO: 104172 - DNA, 346 bp, Glycine max
gctctgttcatactctcacaatacctagagtgtttatcttgttttctatcagacattatgctagatggcacaccatgtaatctgacaatttcactaatatacagggaggtcatcttctttaacgaaaacctaccattgatggggataaagggtgtggatttggtcaatctgtcaacaacaacccaaatagaatcaaaacctttgggggtcatacaacgaaatccatggagatattgtcccacttctattgtggtattgattgaggccgtacccgaatcatataaacattataaatgcagtatctacgaagagatcctaggtcatctcccaatgagttatgatcaac

SEQ ID NO: 104173 - DNA, 252 bp, Glycine max
agctttgagcaacatcaaacaacaattactttttactcggatgagcgattgagacccgcaatatatccagacgctcgaaattgaataccgaagctcttagcacatttcaacgacaatgactttttacttggaagacagatagaggctcgtaatatatctagacgctccaaatggaataccgaagctctgtgcaattaaacccaatacttttaccgatgttgaaaactccgaaaatatcgagagctcatattg

SEQ ID NO: 104174 - DNA, 314 bp, Glycine max
  unsure (1)..(314): unsure at all n locations
tcgataatcaatttcgagcgtctngatatattactggacgttgtcatacatccgcagaaaaagatatcggcattataattagctcagagcttccttcttcaatgtcgagcgtctcgacatattactgtactcaattagacatctgagtaaaaagttattgtcgnttgaatttgctcagagcttcggcaatcaagttcgagcgtctcgatatattacgggactcaatcagacatctgagtaaaaagatatagccgctcgacttgctcaagcttcggaatccattcgagcgtctcgaatataccggactaatagac

SEQ ID NO: 104175 - DNA, 147 bp, Glycine max
agcgtttactctatagtgtttgtgcctacctctgttcttctgagcaacactctgtgtgtgctttgagtttattatccagctgtcatgctctcatcttacatctttgacctcaatcccacatagccttacatgttattatctttttcc

SEQ ID NO: 104176 - DNA, 365 bp, Glycine max
gtgcaagctttgacggactataccaagctctaggaactatgggactgagaaaggtctatatataggcttgctaagggtagagagaggaagactatagatttggatcaagtaaagtgtgttaaggatgaagaaagcaaagtcttagtgcatgaaaaagatatcaaggaaaggtggaaggcgtatttccacaacttatttaatgatggatatggatatgactctagcagtctagacacaagagaagaggaccggaactataagtactatcgtcggattcagaaacaggaagtaaaggaagcgttaaaaagaatgagtaacggtaaggcggtggggccagacaacatacctattgaagtgtggaaaac

SEQ ID NO: 104177 - DNA, 410 bp, Glycine max
  unsure (1)..(410): unsure at all n locations
cgagatgagggaagtgtgaagggtgaaacttcctgctttttttgtgaccacatagtggtacctggagatatgtcgcgggggtcaggagaccttggggacgtcaggtggggtgctattgcccaaaaccaagcttgaccaatcccaacccaacccgggcatagtcggtcagtgagaacctgtgatgtacctaaacaggcgagctcctggcagtcaacagataaaaggaacaaagaccacaaagcatagaggcttgtggtggctggccagctgtgaactttgattgatatgtgggttatggcctctggtaatcaattaccaagggtgggcaatcgattacaaggcttaaaaatgaagacaggaggctaagatggtctctggtaatcgnataccacggcgtgtaatcgattacc

SEQ ID NO: 104178 - DNA, 391 bp, Glycine max
  unsure (1)..(391): unsure at all n locations
ctgcaagcttgaataatgaataacataacagaatgcttttcactattcccaaggctgctatttaaaaagagtcacttaattcactgggccctattacaatactctggcccanaacaaaataaacactgaacaacataatataaaattgcgaaatttcctaattaactaaggtaagcgctgcttaatttgccctcttcaagtccataaccaaaatccggattaagcccaatgtttcattaattcctgaaattagattaaaaacatcaaattagctaaatgagcccaaataataaaactgcctgattaattgactattaacaccaatcagttattaaaatggtgcacaaaggtgttagacaatagaagaggatgatggcacatcactcatcta

SEQ ID NO: 104179 - DNA, 464 bp, Glycine max
  unsure (1)..(464): unsure at all n locations
ntctcagagccaattcctgtgaagacaaacatttggaaagtttgtctacaatttatcgttnattntaacgcaaaaatgacatgctaatctttccgatttagaacaaacttgtgtacacatttaatgtaacacatttatgaacatgcgtatgcgtaaaatatcctactatttatgtcaacatacaaggatattcaaaatattctagttaccacacatatatatttttttgaaaagaatacacatacgcgtgctcaaggcattgtgtcaaaattacatatgttcatatcctaagtatttttctatcacaaactacctacacacatttgaagtattttatttaacatatcaaattttgttgtttcattcacatttatttataaatatatgcacattggaaagctaatctcacgtcatgtacatacttgcatttgaaaaggagacttcatgccatctatatacatttg

SEQ ID NO: 104180 - DNA, 380 bp, Glycine max
agctttaactgaattaagaacattccaacgattctcattatggcgttatccaccacaagacattggtgatcgattaccagtgtgatcgaacattgaaattcaaattcaatcgtgaagagtcacatcctttcacaaaaatgctctgtgttatcgattaccaggattcggtaatccattaccagtgacaagttttgaacaaaaatcaaaagatgtaactcttccaatggttctcagttttttaaaagagaataactcttttaatggtgctcttgaccagacttgaagagtctataaaagaacgaccttgactcgcattttgagattggaaatacaatctatgacaccctttatcagaaactttccacatactcttttacaac

SEQ ID NO: 104181 - DNA, 305 bp, Glycine max
  unsure (1)..(305): unsure at all n locations
ctcaaaaacacatatctgaccctattatctttggtaactcatattctaattactacctaaccaatantttgaaagaaaataactcttaatatacgcgggataggagcacgtagatccatattaaaaagctgcacaatttggcaaaggatacatcccgatcttatgcgatcgagttctccattgaagataatcagatttcgttcagtggtcaagaccgcctctttataaagttctttcacaacaagtcattctgaaatacaagggagcagacatcatgatactttcattggttaaatcaacaagaa

SEQ ID NO: 104182 - DNA, 462 bp, Glycine max
agcttattgcatgcaagatgtcaggccttgatttactttattacattaggcagcctataaggctccaatacagcttttcatccactcttttagctccatcttctttgcaaaacttctccttttgattcattagagatgcagctgggttgcacccttccatgttgaacttcttgaaaacttcatttgcatatttctcctggcaaagaaatatttcattctgtctttgatacacatgtataccaagaaagaatgccatccttccaaggtctgtcatttcacaagcatctttcatttcttccttgaatttatcaatatgctccccgctgcttctcgataccagtagatcatccacatatagagatactacaagtatttcaccatcactcttcttcacatatatagtagattcacttaaactttttttgaagcctagtttaccaaatgtgcatcaattctgctatc

SEQ ID NO: 104183 - DNA, 277 bp, Glycine max
  unsure (1)..(277): unsure at all n locations
agcttctagatattatttttatatctcttcgcatctagnaacaacctatttatatgtntgaggagccatatcttaccgcaacgggttagtatcagctaaccctaaccaactatgccactactaactaccctacccgcctaaggatcacatgatcagcttctacctaaacccattcaccctaactggtaaacgtaccaatgcttaggtaactgcctcactcttctccaaacgcaacgatgcatgggtttgtctaccacgttcatatcatacaccctct

SEQ ID NO: 104184 - DNA, 351 bp, Glycine max
  unsure (1)..(351): unsure at all n locations
cttggcctttatgttgttcactcatgtngctccccttatctctatcatataagacttttatacctacccgtataaggattcaagtgattttggtgtctaatttagattctgtcatcctaatttccttactagcttggtcaatgcacaaagctctaataaaatgaaataaatatattcacggcattacattccgtatatctcatgcttcttatatagaaataaatgcatctaacttaaatttcaaatgcatatttcatatgttgttcatggctaataatatcatgcataagaatcatataatatattgtcaatcatgtgacattgatgacgatcaacaaccaatgatcccta

SEQ ID NO: 104185 - DNA, 192 bp, Glycine max
gcagcatcaaaattatcttgggagtcattgcttccacaatctctccgctttttatgatgacaatcctgaaatcaagaggatacataccaagtttgttctaccgtgcactgatctctgtttccccttttcttttgaaaacatgcttaatgttaaagcctttgaaatactatattttgatttctaaaattacca

SEQ ID NO: 104186 - DNA, 394 bp, Glycine max
  unsure (1)..(394): unsure at all n locations
tccagattggtataccatgctacagctgccttggtcnagcatttttgaaagaacaggaccaacaatttttcgtccgcagaatacgcccccatctttcggcaatacatacgaagatgccctttcggacatgtcgtccctttgtacttatcaaagtccggtacttngaacttgggaggaatgacgatattgggcacgagacatanatccgctaaatccgagaatgggtaattgccaaggccatcaactgctcttaacctctcttcaagcacctcaatctttcccttatcttccacgaagggaacagattcttttacgggtgtgggtgacagccggatatggcggactatgttcgattgggggtagtcatggggagatggatccttgaagtggagca

SEQ ID NO: 104187 - DNA, 406 bp, Glycine max
  unsure (1)..(406): unsure at all n locations
agcttatcaactcccacagacaacctcttatatatgttgttgctgtgacgagaaaggtagggttggcagtagcttggcgaagatgaagtcaccatcgattcggaccacaaactaacaatggccatcatgacantttaatggtaaggcatgttaacatgattatcaaatctcttttgatatattattttgntttgaatggttgaacacatctttatcaaataccttttttttatatattattcaatttcgaagtttttgataagcattaatacgcctcttttattttattgttccatttttttgcgtatccaatactttttccacacaaaatacgaaaaacataataagcttctacaagattatgtttcattaaaactaattatagaacagagtcaactaactagat

SEQ ID NO: 104188 - DNA, 469 bp, Glycine max
  unsure (1)..(469): unsure at all n locations
tgttgttttaaaaataagcttagaagggatctaaaatggtttctcaataaattgtcttcaacacaaagtgagcttgataaattgaagcaagataatgaaagacttgtttcaagttataaagccaccgggtgtgtttgtgtttctacatctcttaatattcattattacaaatctttgcaagatgagtttgaaaagtttaaaaaggatcactataaagaactacgaaactgcaaactgagctttcctatcttaaagatcattttagaaaaatgaataaaggaaagagtgatcttaatcacttactttgtgtgcanaagaaaattgacctttctaagaaaaccaagttngcatcctccgaaaggtgaaccccatagagtctccaaaaagaanaacatagtgcatcataagcctacagcaaagacttgacattattgcatgataagaggacacacatcttataaacactatg

SEQ ID NO: 104189 - DNA, 422 bp, Glycine max
  unsure (1)..(422): unsure at all n locations
agcttcataattatgggtctctgagatatattttttattgagtcctaccanaattccttgccgctggttcaagtttgctgggagccgtatatatgatgataataatgggaatgtgtgcaccgccacaatctatttaggacttacaacgagttcactcaaactttgcccacggaattctctaatcacataccatgtattataaaaccgccactcaaccaatatgtaatgcgactattatacttcgatttgcttacaataacagaaataaataaaccacatatgtaatagcttaaatgcaagaccttaaatattgtctatgggccccttcatccatgtcctctatcatcggccacaaattgtctaaggagataactagatctcagattttttcatagtagatattcccccggaagcccaaacta

SEQ ID NO: 104190 - DNA, 424 bp, Glycine max
  unsure (1)..(424): unsure at all n locations
acctatactctncatttttttgctttctgttctggaactctgaaaaagtatattactataccaaaacttacctatatatatatatatatatatatatcacgctaaagattctgcatgtaaaaacttaaaacaatgacattcacatgtttggcatatttctcgagcctctgcactaatgaaacgaatcgtctccggtagaaaaaaaaaaaaacttaacccctattttataataataaaaagtttttaaagcattagagtgttttagtttgatgctgaaaaaaattgagaatgttattattaagtaaaatcgattgagtcattaaatctcgatttgataaaagtgatttagaaagtatctttatattaatttgaaaatttacacactaaacataaatcacttaactgataaaacattaaatttaca

SEQ ID NO: 104191 - DNA, 346 bp, Glycine max
  unsure (1)..(346): unsure at all n locations
ggatcctctaagcaccgcggctgcagcttaatcatattctcttaaggcattgcaatttattttagatggatgngancaacaacatccaactttccacatagttagagccataatggattctcttgaacatacgctgacatatactgcgaaatatgttcttcgcgagtaaagctattggtgaatctatggataaatatgggctatcaattcaaggcctctcccactttttggatccaccaatgtttattggctactaattaaaggttgatatctccaccttggctcactttgtatagatttaagatcgttattggggcttgagcccctcttatcaggaaaaaaacaa

SEQ ID NO: 104192 - DNA, 430 bp, Glycine max
  unsure (1)..(430): unsure at all n locations
gattatataataatgatctgtgtattgcgtntctgcagccatggagaatagtgaaacagtcacagaaaagagtggtttaaatggtattatacaaattgactgccatgtaagctttatgtaattttgctgatctattttattcatgaacgttgtaattattatttttaacctttaaattacaatgttaatatgaagctggctttttattgtgtcactttggaaatgatgatggtcttattagagaaggacaatcataggttgatgatgtctatcttgatttgtgttacacctacgaatgttggtatgcaaaattgaatagtataaactttgtcaataagtacttgtattttcccatgacggagaatacttgtgcatggaggcatgtcactcggtgtgtaactaccttgagactcactctgatcaccatgga

SEQ ID NO: 104193 - DNA, 390 bp, Glycine max
agcttatagtaatgggatggagaattaaacattccataatcaatcgtgcctttcaagtaacgaacaattctctttgcggcttttagatgaggagaggtttgagcctccataaagcgacacacaactcccaccgcatatagaatatcgggccttgtattggttagataccttaaactccccacaagactcttgaagatcgtggaagttaccttctctccttcatcaaactgtgataacttcaagccacctttcataggtgtgttcacgggattgcaatcaagcatatataatctcttcaacactctttttgtgtacctttcttgtgagacaaagataccattctccgattggttcacttccatttccacataatatgacatgagttccatt

SEQ ID NO: 104194 - DNA, 280 bp, Glycine max
attacgtgacactataaaactaagcttaactccttcacagccatggttctatttttgaagagtatcccgcggaaccttcacccgacgaagacactgataataacttatcttctcctctatggacaaagtatgacatactacgggcaagttaatttctttcccatcaaaccttggatgcacgtatgatcgcatccccatatcaactaaatcttgacgggtattcaagccatcccttctctctccttgaatgttaaggagcgcgcgaaacacactggcacaa

SEQ ID NO: 104195 - DNA, 258 bp, Glycine max
tctcccacatccacacatcatacatgacaccaccatccccagttgcccacctctaactgagctcacgtgaccccacataggaccttatatctttttcctgtacacacacagggccccataaacctctccaagcttccacaacattcaagcaatttaatatctcaacattatgaactatcttaaactaagaaaacaaggccgaggcggacaactgtgccaaaaacacaatttaacaccaccagttttcctactcaaata

SEQ ID NO: 104196 - DNA, 327 bp, Glycine max
  unsure (1)..(327): unsure at all n locations
ttgctctttaattggtgatgaatgaagctgtccaatgttttatttccaggntagagnccacactgaatttggatactaagccccatcctacgccatacagactacaatggcttagtgaatttgaagaggtaaaagtgactcatcaagttgaggtgtgtgtcaccattggaagatacaatgagaagggtgtgtgtgatatggttccaatggaggtgagtcatataatgttatgaagaccatggtagtatgacattgaagcagagtatgatggcttcaccaactagatttctttctagcccctgaccagaagatactctctaacctcta

SEQ ID NO: 104197 - DNA, 270 bp, Glycine max
  unsure (1)..(270): unsure at all n locations
agcttatcanaacctctataagatttcaaattatatccaaggatccttctaagcttgagaaaactcttcaggaccaagtatatggctctctatacataattgctcaagcatgatgcgcttgagaaactcataaagagaaagagtctaggttatgctctgagattgagagaaatgctaacgaaaaagcttccccttttagaagcttcacgagtcggtaaacaaactgaaagatctttcaaaggatctgaacgagcctaatgaacttcacaa

SEQ ID NO: 104198 - DNA, 270 bp, Glycine max
atgcgccgctaggcataaataaaaatcaatgggctcgttctgttcattatcgtcataaaccatcaacattgggacagttagatagttttaaatattgaattggttttatagctaagtatatgatgactattacaaagtgtaaacccgaaattagcttgcatataggaactttgtccgagaaataaagaaattcaaagcaagcaagttattgcacactctggtggatcagaagctaatcctataacaagaaacgagttggtaatgacacta

SEQ ID NO: 104199 - DNA, 254 bp, Glycine max
gcaaaccaccgcgcaaatattatgactttcagcacagataccatcaggttggagaatatccaatttaaatgacaagtcctcacaccacaacaagctgtccttctttccagaattctgctagtccaagcaagccatatattcctccttcaatgcagcaacagcagcagcaatcacaacaaagacaacaagtaactgaggctcctcctcaaccttccttagaagagttagtgaggaaaatgacaatccagaatatg

SEQ ID NO: 104200 - DNA, 320 bp, Glycine max
accggttggaacaagtcaggccattcttatatgtccagcctgattgccacagcctctattcactggaatggatgagaacccgcttaccacagctatgaacttacgttaacttatatggcctagcttaagttttctttgtaaagcttgtgcttttggttttgaatccataatacaaagatctttcttcatctgttcctacgtctctacccattctcattcatttgcatgtttacttctttatttctgaaacggcagatccgatgacgagtcccccgaaggtactaatacctgtgacccgcttatcaacttcgaacaagaaa

SEQ ID NO: 104201 - DNA, 217 bp, Glycine max
  unsure (1)..(217): unsure at all n locations
gacttttnttccatttattgcctgcaagtgagaccanagaaggagtccgttagaaaattggtgaaaatgttgtggaatgttaaacttagaacattcgactttttacaatcacttaactttagaaagagtttacaaatatgtcatgatcatatttcagtcatcatatatttttctacattattttaacagtgcagtggtaaaatttaggacagggaga

SEQ ID NO: 104202 - DNA, 340 bp, Glycine max
  unsure (1)..(340): unsure at all n locations
ttatccggagaatgtacaacactctcgctgcatatcttctgcgtcttttatgcaggtgtgactgatacatcttttattatactataacttctttctattattggttgtttgaataaccggttaaacccggtgaaccacccgtcctcatcgatttacccagnttaattcttgtttactggttttagtctggttttctgggagggtggttcaatgttgcttttggattggatgcctggttcccggttggaccagttgaaccggtcgatccgatcttgttttgaaaaccttgattaaaatataactaatgggtctgtgaagcgtaaatatccatattaatgta

SEQ ID NO: 104203 - DNA, 409 bp, Glycine max
tgttctgttgagtcccgtaagatatcgagacgctcaaaatttagatccgaagctctgagaaaattgaaatgacaataactttatacaccgatggccgggtgaagtctggaatatatcgagacgctgctaaatgaaaacggaagctcgtaggaaattcaaacgacaattaactatttacttggatgtccgactgaatcgggtaatatatcgagacattcaaaattgagactagaagctttgagcaaattgaaatgacaataactttttacacggatgtccggttgagtctcgaagatatcgagacgctccaaattagaacccgagctctgagaaaattgaatcgacaataactttatacacggatgcccggctgagtgctgtaatatatcgagacactctatattgaaac

SEQ ID NO: 104204 - DNA, 484 bp, Glycine max
  unsure (1)..(484): unsure at all n locations
cgaccatctcgatatattaccggactcattctgacttccgtgtataaacttattgtcaattcaattttctcagagcttcggatcaaaattntgagcatcttgatatattacgggactcatttagacatccgagtaaaaatttattgtcgttagaatttgatacgagcttccgttntcaatttggagcatctcgagataaattgtgacactctgtcgggcattcgataaaaatgttattgtggtttgatatttctaagagtttccgttttcaatttggagcgtctcgatatattacgcgactcaaccggacatccgtgtataaagatattgtcatttcaatttgctcagagcttctagtctcaatgttgagcgtctcgatatattacncgattcaatcggacatccgagtaaaaagttattgtcgtttgaattttctacgagcttncgttttcaattatgagcgtcttgatatattacaggactc

SEQ ID NO: 104205 - DNA, 237 bp, Glycine max
  unsure (1)..(237): unsure at all n locations
aacttcttaagccatttcttggccttcagcatgcacctcaccatattcatgattggtctaattttcctttcagcttactcattctgctaaggcatgtattntgttgcaatggatgcntaaattcatgttgatcaaagaaagntntgcaagcgagatattcttgtcctttggcagttcggagtactttgattctgcacctactttgcttctctacgaacgccgtgaacatcttgaaag

SEQ ID NO: 104206 - DNA, 135 bp, Glycine max
tcagcttcttccgaagaatccattgtcttccggaagtcttccggatgaagcttcttccggaaacattccggatgacgttcttccggaaattgtctgtgagtatttccggaagacacacattaatcttccggaaga

SEQ ID NO: 104207 - DNA, 460 bp, Glycine max
  unsure (1)..(460): unsure at all n locations
agcttatcctaatggcactcgttgtgtagctagtcttactaattactttaaaggcctgccgaatgaatacaaagtgacttgttacagtctggtgagcaacctatcattgtatataatcaggataaaaatacctctggctatcaaattttaaaactctataccatatttagatgaaacttatggtaatttttggatgtttcgagtaccatggtcttatttataaaagtgtgggattcacccatgtgaatttggaaggattacnaaatgtagattgttataatcattagagaaagtttggaataattggctactgacggaggacttttgcacaatcaccaaatttggaagcttcccagatgtaacatctaaccttggnttattttggatttggttggaatcgaagacattatatatactaatatcataaattttgttatactcttgtgtatattttagggaa

SEQ ID NO: 104208 - DNA, 462 bp, Glycine max
  unsure (1)..(462): unsure at all n locations
catctcatgatgttccctctatctctaataatctccccctttttggctttgatgatgccaaacaaaattatgacagagtgcatttggagggtttgagtcttgagaatggagctttgatccttagacctatcctgaanaattcttaacacttaagaagagaataattcatcattatcatcatcatcatcatcatatatcatatatataacttttatatgtgttaatgcaatgctcaatgcttatgcaatgtaatcaatatccaaatatgcaacaatgtatattctgccccttttggcattaacaacacccaaaagttggattatacacatgacataacatacaagttagaagagaaatataaccatattgtattaatcataaagcaatacatagcgctttaatcataaggcanatataaaaaaactttatcattttctattgaccgagattgacatattctta

SEQ ID NO: 104209 - DNA, 517 bp, Glycine max
  unsure (1)..(517): unsure at all n locations
cactaagctcttcttagctnttctacacctttctccccttggctatataaaaagccaaagacctcggaaatcaacacagatatgacaaaggagtagaaaaatatataaatatcagagtataaaacacaagaagccaaactcacaaagaagaaataatcaaaccagaatccaaataactgaaaatgtcaacaatcacaaaacatccaagactgaaatttanaaaccacaagataaataagcaaagtacttagcataataatgtaaattctaagaaactaaaagccaaaatacacggcttataaaagataaataatcagaaactaaaatctaagaagacggaggtggtggtggaagatcgaaactctgacgaatgtatccgacaccctcttcaagctgtgtaagacgaatgtccataccggcaaagcgtgaatctaatgagtcgaagcggtcaccaacataagaacgaagaccccgtaattcggagaggacttcattcatgagtgcggaatcttcacgt

SEQ ID NO: 104210 - DNA, 444 bp, Glycine max
  unsure (1)..(444): unsure at all n locations
agctttgcagatttggtcttcgccagtgaaatgatcaatgtgggtccgaaaagggcaaatttgatcatcctactangatgactgagaaaactggggcaaataaagagggtgaggatgagggagaaacccatgctgtgactgccatttctgtacggccaaagtttccacccaacccacaatatctttacttcagcaaataacaaaccttctccttacccaccacccagttattcacaaaggccatccctaaatctaccacaaagtctgtctaccgcacttccaatgacgaacaccacctttagaacaaaccanaaacaccaaccaagaagtgaattttgcagcgagaaagcctgtagaattcacccaattccagtgtcctatgctgacttgctcccatatctacttgataattcaatgtagccataaccctagccaaggttcatc

SEQ ID NO: 104211 - DNA, 448 bp, Glycine max
  unsure (1)..(448): unsure at all n locations
ttaacggactaaatcagcctcagatgcaagggttgggagctaagcacttgagactcgcggcttagcgcatgaacaaatatgagcttaacgcgaggcttgcacttagcgaaaggactganttttcagaanatattttctaagttatttttcagtcccttccttcaacaaatgaaacccttatagctaacattcaaagataggctgatatactcctatgtatatattatgcagcaagttcccaatgatctaatgcatgaaaacaaaaattacaaaaattaaaactgggttgcctcccaggaagtgcttctttaacgtcattagcttgacgcttttacctcactgggcgatcttatgntttggttcttactttcagaacctcttgacctccttccattacctgtaagcagacattgtgttctggagcanggcttgtttcaacaaacaaatc

SEQ ID NO: 104212 - DNA, 469 bp, Glycine max
  unsure (1)..(469): unsure at all n locations
agcttgaggagtatggagtacccatcccatgtggtactaggtggcggtcgggcgatggtgcacnaacaattttnttttcacatccacaaatcgcgcataaacccaccatcccctgttgcccacctccaactgagctcacgtactcccacgtagcccatatcctcggttctctcaacaccgggtccccatcaatcctcccaagcttccccaacatccaggtaattcaacatctaaatcatcacaaactaacaaaccaagcaaaacaaggcaaaggaagaaaactctgcccaaaactcaaaccaaaattacagctttttctcacttaaagaccccagtaacatttccttcgttccaattcgctaaccgttggatcgactcgaaaattntactggaagtctctagtacataggcctacantttgaccgttgggatctgctagcaaacatccagaactcattctgcataactc

SEQ ID NO: 104213 - DNA, 506 bp, Glycine max
  unsure (1)..(506): unsure at all n locations
gcaagacttacggaaagatcttagagttgaccttancataggtatccatagaagccattgcatcactcacccaatactacgaccagcctttgagatgcttcacattcggagacttccaattagtaccaaccattgaagaatttgaggaaattctaggatgtcctctcgggggaagaaaaccatatctttcatccgagtgtctcctctctttgagcagaattgcaactgtggtcaaggattcagcaagaggtttggaccgcataaaacagactcagaacggcatagcgggcctaccacggaggtacctagaagacaaggcgaggggtatggccaatcaaggagaatgngtcccgtttatggatgtgttagctttgctaattnttggggtcgtcctctttccaaacgtggatggttnggtggacctagcagcaatcgacgctttcctttgcctaccaccatagcaggaaagtccggtggtagctgtcttggcagatctatttgacaca

SEQ ID NO: 104214 - DNA, 476 bp, Glycine max
  unsure (1)..(476): unsure at all n locations
cctgcggcatgcagcttggacatatacaagagatcacactgctatggatggctganaggaaaatgtgactaaaacactattacatggctgctgtcaatggttacataacagcaagtacacaagataatgggaagtctcacaagaacgacttagcgggaagggggacctatccataagagaagtcatgctctgggatagacaaggaaggttcttctgcccccataaactcttcaaaacgtttaaagcttctgctgggtgtgattagccgttgaaactctattcaagggagatcctacaaattcttgtagtcacgtttggtgcctatatgaacgtgtgcaatggataacataatggtaaaacaaacacaaactttaactgtagaagaagcatctaacacatgcccataattttgttttactgcaagacacgatactatttgattgatcgtatgagcaagtatgcccattttgtggctt

SEQ ID NO: 104215 - DNA, 518 bp, Glycine max
  unsure (1)..(518): unsure at all n locations
cacatgacatataagtgtaagacattatgttttangtatggcctaccaataatgcgaatcaatataactatcacagtttcaattaattctctgatgaatcgatttgcaacaatgaaagcttctataatgtctcattagtcacagagatgacaggtatcataattccccatctaagcactcacaagtgcacgtatagattgcgatttatactatccattgcagttgttatcatcacctcacccccacataatcaatttacccctcatcatgctgtcaaacagaacaagaattctacacaaacgaaagtaacaactcactttctactttgcataccgtaatatgaaactgaaatattggatcaagcatgctgcatgtccattattagtctcatgtggggtgcctttggctttgatgtgagatgatgaaaaactacacgaaattttgtgctgacaatacccccacattaatctatttatttatatgaagaaatttaaagataattgtgtgaaataatttcc

SEQ ID NO: 104216 - DNA, 477 bp, Glycine max
  unsure (1)..(477): unsure at all n locations
agcttgctgatatgacatgtcgacaagggcttatttaagtggctaaaatgtaagtagcctgattattggctatagntcttgtagttnttataatattcttaaatcgagattttcctatgctgcattttgaatgtattgctatgtctctttatataccaattgtttttttaatcagctaaagaaaatatattactgatggtacaaggagtaccatgtctcgtatacaattgtgtgtatgatgcccttcaacccaaaacaatgcagcctccctaatgcagagaaaaatttacatcccatttaaaccaaaacatatctcagcaactgcaattgaaacccgcagccagcaaaacaacaaatcaaagctgtccaactaactaaactaanaactaataaagtttacaacaatacanaagtaaaccagcactaactacaaccacattgtatcagctgaaatataccaatcacagaagctgcatg

SEQ ID NO: 104217 - DNA, 487 bp, Glycine max
  unsure (1)..(487): unsure at all n locations
ttatgaaattaattttttagggtatatataaaaacctaaacaacaagaaaaatagaagatacaaaatcaatatctctctctaaatgtctccttactttatttcatcaattcatattaattagaaaaagtactcgatgtatacgggtcacgctcaacacaatagcatatcaatttcacaaagattggtctatcaaacatatataattcactgtaataattataaggataaaatgaaaatggcaaaaacacccaaaactcattccaatggatatctctaaggatccctacacatgttctcactaattcccaattgtgaataactcatcccttatctctgagcggactcacgtgtcttcagctagcgatagtaacatctctagcgggtccctgagattccttcagttattcctccgactgctcccgatagaatcccaaacgtcagagagacggagaagaagatganacctcactggtactatcttcatga

SEQ ID NO: 104218 - DNA, 397 bp, Glycine max
agcttctaagttctatttgtagattagaaatctattagttacatctatgccattaatgagtttactctgaccagataatttatttttgaactatccttattctttctaaactttagcttaaaaactgaagagtttaaccatgctaatatcttatcttctaccattttaataatataaaaatactttcccatcacccaataaagaaataacactatctaccccaaacatatgagaaattggaatgatacaatttgcatctccctctctgaaccatgtcaccctagtttttcgttggagtagagattcatgcctcctagatttcctccataattcccctattaggatccttctcctccaagccattctcttcacaagttagatcataacattaattttt

SEQ ID NO: 104219 - DNA, 480 bp, Glycine max
tgaccgcagctagattattgataacttatcctcaaccacagtctcttcacttatgtctcggctagggcatcatcagttaggcctaagttagggcctcttccacttgatctcgattgaaacatattttgtttggtcttgattgaggcatctttcactcaactttaactaattaagacatcttcaaagagttaggaaacatttgtcttacgtttctaagtcttacaatttaaaagtgaattaactcaaagttgaccctagctcacttggccttattggtcatttttccctagcctacatgtgtcaggactaaatggattaagactgactcattttttattatatttttgttcatagcaattgaaggtagcatcacgagatatataataagtcacactcttattcaactaattaactaagttagaccccttgacaatattagaatagacgcatctgataactctatttagaaaagttaaatct

SEQ ID NO: 104220 - DNA, 449 bp, Glycine max
  unsure (1)..(449): unsure at all n locations
agctttagctttgacccagcgcttcatgtttacttgnncaaantcaacaagtgaacctcggatccctgttagatacaatactggaaggaattccctgcaaccttattactaccttgatggacaagtccactagcttcttcattctatacttcataatcaccggaataaaatgaacagaattggtgagtcgttctactattacccacacatcgtcatgcacatgactagtcttgcgtaaactagataccaaatccatatatatgctcttccatttccattccggattttacaatgagcttaattctcctgatggacgatggcgctcagcactaccctttagacatgttgaacatcttgctacatattcagccacatgtttcttcatgccgtgccaccagaaacttctctataaatcttgcgtcatcttatgcattccaggatggaaacta

SEQ ID NO: 104221 - DNA, 271 bp, Glycine max
  unsure (1)..(271): unsure at all n locations
atatcttttagttgttgcaagtgtagcaagtggctgacaaaagtcgtaacaacgggaatatttggtctatctgagcctacgtgcgaagtctaacggtttgtgggtccaacagtggccggttgcgtatgngacacctactcttgaagagtaaggactcgtacgtaactcaaggttagggtgaaccactataaaattacttgtgcaacatcttcttcctctatttcttaactaattctaaattgacaatggtcacttgttttgtttatcacta

SEQ ID NO: 104222 - DNA, 364 bp, Glycine max
  unsure (1)..(364): unsure at all n locations
ttcacaacactaatccacacatcaagaaaaaaataatcttattaacaacctacacgcaggaagattagggcttattaaggcgttatcaatcaatatcaaactacctgcatacctaatggattgccataatggtcaaccgcactttacanattatagagatgaccaatctcataattcatgacgtaatggtgaatttatggtataacatacattaaggatgcaacgcacatcacaagcattactcagtctcatttaatcatggagaggaaaatacaattaataattcaagcatactcaacanaagcattcataagtaatcacacacagtgcacaccagaatatggtaagcacataacacattggc

SEQ ID NO: 104223 - DNA, 469 bp, Glycine max
  unsure (1)..(469): unsure at all n locations
aaactgggcttgaatcttctgatntggtttcaacttctatcttgtnttttttctgacaaaatgagttcttctttttcctcctcctcttctgcttttcaccaactgcaacttccttgcccttcatgttctgtgacaatttccctgcttcagaatcatcaaaacacttcttttcagatgaagccttggaatgatgcacagtgttggtgatttcttgaagcttaccaccacttccaacactcccactagacacatgagagacccttttctttccaagttccccttctcaatcaaaaccttctcatcacacactttttctctcttgtgttccctcaattcacctctctctgatcgcacgttctgcttcaattctgcacaaacaggctccctctttctcctgttggatctgaattctctactcttaccacctncaccttcgaaactcagctncaaaaacttctcactttcatgt

SEQ ID NO: 104224 - DNA, 379 bp, Glycine max
  unsure (1)..(379): unsure at all n locations
tttttcttgctggaaacagtgacatgattgaaccacacaaacctcttatgttgatctggagtttcaggtgacaattgatcttacataaaaaaggtcttccaagtgctggctaagcctgaagatgtcgagatgggttgttaatgattaccagtaccttctttttaatgactcctgtcatctaattgatgaataaaatcctcagtaaacttgagcgacccttcaaacagtaacatatatgcattagaatgtacattgtaaaatggcatttcctttctaaagaaaccacaagtgtgctntttcttctcataatctggtccatatgttcttcaacatcatgattcatcatctaatttttatgttacatactcatcgtataaag

SEQ ID NO: 104225 - DNA, 365 bp, Glycine max
gttgaatatacttaattgaaccaaccaataaactttgcagtttgggtggattctatctgacttctttaatctattatcataatttaaaatctattgactaaacttacataattatcatggatattttttttaatttggttaatatattctaatgaagaattattattttgacttctagttagcactaatagaaaatgatatcaccaactctctttgtatcataatagcagcatatgcatcacttggtatctaacactaattgttaacaatattaatacatcctttctaccatatggaagtaaaatatgcatctaaatattaagcagatgaggaggtatacattattcactccttattattaatca

SEQ ID NO: 104226 - DNA, 264 bp, Glycine max
  unsure (1)..(264): unsure at all n locations
gctttgtgatgagcgacatcggcatagatactatgttaattgtgttngtatgcacaagcttcccttatgtgaaagatgccacattgtacaataattggcatgctgtgtacaagttaatcctgatatgatatcacaactcgagagtgctggtctatcttttggtggccaagaccaaactgggaaacgcatggaggtgtgtctttgctttgaacccctacggcatggatcttgaatttgccacatattattaaatatttcccttat

SEQ ID NO: 104227 - DNA, 398 bp, Glycine max
  unsure (1)..(398): unsure at all n locations
cgtactgatgggtaccatgaggtgtntgttggtgttngactcatgcgggtgttgaagagacggcatgggcatctncttccttcctttntgcccctggtgccccgaatcttttggcgttcacgtttgtggaggaaacgtaatcaaactttcctctcttcaaacccacctcgattctttccctcgcaaacaccaaatccgcaaagctggacggcatgtaacccactagcttctcatagtagaacactggcagagtgtctaccatcatggtgatcatctctctctcaaccatgggaggagctacttgtgccgccaaatcccttcatcgctgcgcatattctttaaaaagttcaccctctttcttgaacatattctgcgagtgagtacggtcaggagccata

SEQ ID NO: 104228 - DNA, 192 bp, Glycine max
aaaaaatggaataaggtctaaagcaaaaatgattttaatacattgaggatactatattggctaatttctgctttgactactctaaatagaacttatttttgattttttttttttgcttagctggagattatgccaaataaaacccatgcatcaatcttttataaaaaaggtttaatattatccttaaaaatt

SEQ ID NO: 104229 - DNA, 346 bp, Glycine max
  unsure (1)..(346): unsure at all n locations
agcttgtnggattatggggcaccctgtatatgttgttctatgtggcgatagggcgatggcacaaatcaactctcccacttctgtgaatgtatgtatacatgattntgatgatgtcaaagaagaatcaaacaaggctgcttcaaatgataaagcatttgcttcaagaataattcaagagtgcttcaacaagcaaagccatgtttcaagattcattaaagaccaagccttgccttaaaacaaagtgttttcaagacattcaaggctctagtaatcgattaccaggaagtgtaatcgattaccaaaagacagggttgagaaatagctgttgaaaaatggtttgaatttg

SEQ ID NO: 104230 - DNA, 543 bp, Glycine max
  unsure (1)..(543): unsure at all n locations
ggtgtcgagaagaaacacatgtgtgcatcatcattatggggagaatgggaatgtatgtatacatgattntgatgatgtcaaaagaagaatcaaacaaggctcattttgcttcaagataatacaagaatttttcaacaaacaaagccttgattcaatatttcttcaagatcaagccttgcctcanaatgtagagatttcaagtcatccaaggcacatgtaatcgattaccaatacatgtaatcgattaccaaggcacatganagtgtgtaatcgattacacatcatatgtaatcgattaccagagactctgaacgttgggaattcaaattataactgtgtaatcgattacacaaacattgtaatcgattaccagtggaaagttttcagaaaatctgccaacagtcacatcttttcattagaattgtgaatggccatcaaaggcctataaataggtgacttgngcaccgaatttatgcagagagatttttgctggccaaaatgtcttatcctctcanaagaaaatgagagagattccaagagaac

SEQ ID NO: 104231 - DNA, 481 bp, Glycine max
  unsure (1)..(481): unsure at all n locations
gcaagcttgcttctacaaaaactccactagaaactttggaggaatttatgaacaaggctgaanaatacatcaactataaaaatgtcttggaagctagaaagttaaagtcatcaaaaaaacaaaatacacaaaagacagaaacacaaacaaaaaactacaagcttgcttaatcgaatgaaggaactacttataaagtcagaacaaaaaatgacgactattatacacccttaaacgcttcacaggggagaatattgaatgaaatcatgaacatggagtcaaaagatatagatcttgatgtacctaagccattaagaaccgggaatggcaatagagatccgccaaattattgtcgctaacaccgtataatggggcatggcactaatgactgttttcaattgaaaaatgccattgaaatccttatacaatagggcaaactagacatatacgtgcgagctagaggaggtaattataggcctcgata

SEQ ID NO: 104232 - DNA, 495 bp, Glycine max
  unsure (1)..(495): unsure at all n locations
agaagctttatggaggctggatgcttgagcttctatgaggtccttcaatggtgattntcaaccgtggagttggagtggaaaatgaaggagaagaggtgccatacactagagaataagccatagaaggaggagcttcaccaccaagtgagtgtcttggataagaagcttaaagagggagcttcaatggaggaagaatataagagagagaaagtggcatggaaaattgaaggaagatagggcgagaagttgaactttgaagtgtgtctcacaagactctcattcatcanagttgtgacatgtgttacacatgtttctatttatagcctaggtcactaactaaatgaagttcactttcatgtgaatctaanaagaatattctaaggatatgccaaaggcatcttatcatattctaaaaatatgtcanaggtatcttagcatattccaagaatatgccaaaggcatcttagcatattccctttagatgccataagaatg

SEQ ID NO: 104233 - DNA, 432 bp, Glycine max
  unsure (1)..(432): unsure at all n locations
caatgaagaatacttgtaacttttgataagttagtggaaacatggtgggttgccaagaactggacgtagtctcggggtggagacaaacatgtataaattcttgtgtgttattctttactgcttttctttgnggttgattgacaaaaggtttgaatttatttttacatcttatatnttgtttgatctgataaagaanactattgtctaataaagctattttcgaaatcctttatctgttttttgtaaaatgtgtattagacgataaatgtgtctttggtcaaagaaaaattttaaatttataaagacataattcaactcctctttttgtgttacacctcaagacctctagagctattacatcttgggacctctagagttgttacatctaagaacacaattctgaagcatctaaggcatacaaagtttacaact

SEQ ID NO: 104234 - DNA, 519 bp, Glycine max
  unsure (1)..(519): unsure at all n locations
actaagcttaagaacaagatggcctcagcaaattccttatttccagaatgtaattctatcaatagacctccaatctttaatggagagggttaccactactggaaaacccgaatgcaaattnttatcgaggcaatagatctaaatatctgggaagccattgaaatagggccttatatacccaccacagtagaaagagtttcaatagatggtagttcatcaagtgaaagcataaccatagaaaaacctaaagatagatggtctgaagaggatagaaaacgagtacaatacaacctanaagccaaaaacataataacatctgccctaggaatggatgaatatttcagagtttcaaattgcaagagtgctaaggaaatgtgggacactcttcgattaacacatgaaggaactacagatgttaaaagatctaggataaatgcactaactcatgagtatgaattatttagaatgaatacaaatgaaaatattcagagtatggcaaagagatttacacatatagta

SEQ ID NO: 104235 - DNA, 418 bp, Glycine max
  unsure (1)..(418): unsure at all n locations
tcttcntcttccatggcttattccctcagggatggcacctcctctcacctcttctcatatggctgtcggtgcatctccatggtggattatcaccattaaaggacctcattgaagctcaaagatccagcctccatagaagccccacaagcaagctctcatcacaatataccttggacacgcatgtttatggccaaatagctcacaaaatatacgtatgtgtaggtagcaaaatacctcatacaaaaagagagagagcataaagagagcgagctagaaaagaataagaaaaagataattataaaaagttgtctagctaaaaaacaacatgcttgtgaaaagagattatatccaacttttctttgaaagattttactgatcttaaccagtttcttgaataaaaaaaatgtgtgtacatatt

SEQ ID NO: 104236 - DNA, 371 bp, Glycine max
gctatacgagacatgttgccaaacaaagtcaggttacccataactcgcttgtgctttatcttccatgctatatgtaacaaagtcattgatcctatgaagtttgatgagctggaaaatgaggccgcaattatactgtgccagttagagatgtatttttcctctactatttttgacatcatgattcacttgattgtgcatctggtcagagaaatcaaatgctgtggtcttgttatctacggaggatgtacccgattgagcgatacatgaagatcttaaaagggtatacaaagaatctatatcttctagaagcatctattgttgagaggtacgttacagaagaagccattgaatcttgttcagaatacattgag

SEQ ID NO: 104237 - DNA, 425 bp, Glycine max
accatacaagggcagcgtgaattatgatctcaaaggctttattcgatacaatattatggtattcaatccaatttttcaaataatataaataaatcttgtgatattccatcctcactatcataatattgctcgaatagtaacaaaatttggcggtatactaaaactatctaaaataataaatgtcacttacaaatgaattccatagatcactcatgacagtctcgtataatatataatgtcacatctatctagcaatttcacccaaactgttgagacttttctaaactctcattctttcttttttagtggatagttaaactcttctttatcccatcacatataaatcattctctcttatagaacgttgtctagacattggtatacttagtcatctttacttccaatctacatagctactctatgat

SEQ ID NO: 104238 - DNA, 298 bp, Glycine max
  unsure (1)..(298): unsure at all n locations
ataagagtatgaacttttctcttatctctccatnncagcaaaacaagaattgtctacattatatctggcattatatctggatcaactacaatgacagggcaaatgaggataaaagtcatacatcaaacgatgaggagcatactgagggacaagacgaacatattgtgcagagacacaatctgatgatacctcctacaaactgatataccacagcgatatttcttgaaatgcccacatgcttgttagaattgtatttttccctcaaaatgcacggcctcacctatgtgaaagacactga

SEQ ID NO: 104239 - DNA, 442 bp, Glycine max
agcttctaaggaagctacctagtctataatagaacatgggaacacttggtggaactttgatgaatgaaagtcttatgagacacacttcaaagttccacttctctccctcttttattccttcaatttcgtgctccccccttctctctttcttttcctccattaaagcatcctatttaagcttctggcacattcttggtggtgaagctccttcttccatggcttaattcctaggggatggggtctcctctctcctcttctccttttccttctactgcatctccatggtggaaaatcaccatggaaggacctcattgaagctcaaagatccagcctccatagaagctccacaagcaagcttccatcaagtggtaatcagagcacaagagcttcaagtaggtgctccttaaacctcaattaattttcagctttaccttctcctcca

SEQ ID NO: 104240 - DNA, 452 bp, Glycine max
  unsure (1)..(452): unsure at all n locations
catgattgatacacgatttgngactttgttgattcgannngggcaaaattggatgagggcaagagtggttttcgaaatctgcactttatgcagaattttgctgttgaaatgtgcagcaaaattttgtataagtgcagaaaaatgcttgtgtatggctggttgtgaaaagggtaatacatatggagttctggatatttactagcagatcccaacggtcaaaatgtagacttatgtactagagacttccagtaaaattttcgagtcgatccaacggttaacgaattggaacgaaagaaatgttactggggtatttgtatgtgaaaagctgtgattttgagttgtgttttgggtagagatatctgcctttgccctgttttgcttggttttgttagtccatgatgaatggatgtggaattacctggatgttgtggaagcttggaggattgatggga

SEQ ID NO: 104241 - DNA, 289 bp, Glycine max
tgatagaagatctacctctcgatactttactcttgtaggagaaaatcttataacttggaggagtaataaaaaaaacaaattgtagtaacaagatctagtccttgagtaggattcagaggcatgacactcagtatatgtgaacttttgtgggttaaaaatgtgctattagatttgggctttaaaccaaatgaaactatgagtttgtactatgacaatacgttggccatagcaattgctcacaatcctgtcgaacatgatagaacaaagcatgtgaagattgatagacatg

SEQ ID NO: 104242 - DNA, 117 bp, Glycine max
  unsure (1)..(117): unsure at all n locations
aatgagaatttaccaacatgtgttgtaagttttcaatttaattatatgtagtttaggggaaatatttangaaaattgtagaacatcttgatattataggtgtttgtgaaaaatatgg

SEQ ID NO: 104243 - DNA, 435 bp, Glycine max
  unsure (1)..(435): unsure at all n locations
tcatcaagaagattcaagaatcaagattcaagactcaaagattcaagaatcaagagaagacttaattaagataagtattaaaaagtttttcnaaacatggagtagcacatgaagttttcacaaaatcattaccaaagagttntactctttggtaatcgattaccagattggagtaatcgattaccagtgttttaaaatgttaagattttcaaaattcaaaatctaaagtcacatctgttgatgtgtnatcgattacacttttatgggaatcgattaccagtgactggtttcgaaaaaattcatttcaaaagtcacaattcttcaagtggactggttctgaagattctttcnaaagtcaccaactttctaagtgactacgtttaaaagaaattgcaagagcacaaactctgcttgagtatcaagaaatataaatat

SEQ ID NO: 104244 - DNA, 319 bp, Glycine max
gtaagtgaaataaacgcccaaacttgagttataacggttggcaaatctttttggatttgcaccacctaagcttgtttaatttgaagaaacttagggttaataaggtggaaactctaggcttgggctgccttttggtggctaggagttcacattttccacatggtttgggcttaattctaatttaagtaaggataatgacaccatcattgttgtattggtgatcatctgtctgatcttatttaattaggtatatgacacatcaatggttgtattgtgaaaattcatcttccccttttgaatcaacttgtgtcatcctatt

SEQ ID NO: 104245 - DNA, 432 bp, Glycine max
  unsure (1)..(432): unsure at all n locations
atcatgagcaactttgtgtgtcctactatgacttgagaaacaaaggtgatcatataacgaacagaaatntataaggtactaagttgtctccaagtaacgcttctttaacgacttgagctagacgcgtgatgacttggcggacacgaacctagtacttttgcttacctttggctatggacttggtcgcctgctggtcggacacaagtcgcatgcaacgctccaacctttgtagatgagctaaagggctctggaggtggcggcggtgcgtctattgcccactatcggccaaccccaggctgctatggggtctcgccctgcgcctgcctgggggcgcaatacttcttgatgaaagctcanttagtagggggcctgatgaccttgctggnggcaacaggcactcctttgaactgacagaggcctgtaattaaagct

SEQ ID NO: 104246 - DNA, 141 bp, Glycine max
  unsure (1)..(141): unsure at all n locations
ggaccagagcacgagctgcgcttgngattctttcagtggaagtcgactcttttaacctaagatcacccggctggttgacacatttactcttgtggttaaaacatttgtattttgcacaaatgaaaattgaaccctcttttc

SEQ ID NO: 104247 - DNA, 519 bp, Glycine max
  unsure (1)..(519): unsure at all n locations
cctctgattngcactcaccttcgctttgctctcacaatgttgatgaatcttcgtacgaagattcttacttttgtactatcaatatcgtcttttctaatgaagtccttgaaataaattttagaaaaaaaatcactatcaataaatgtaataatttattgtaggtcataaatgtcagttaaaacaaataatctattataggagcttataataataaataccataaatgtttggacgcattaatgtttaaaatatttaaattgataaaggtacacttattgattgttgatatttatttcanatattcagaaaaattaaatctttttatgaacgttcttatctcttttctaaataatctaatcaattattgtatggtcataaatgttcattccaaacaaataatttattataggaactatttaaaaataataatgttaaatattttgtttgaataaaaataacattanatattctggatcattcatattcttaagatattaaattaattgatacgtatcatca

SEQ ID NO: 104248 - DNA, 436 bp, Glycine max
  unsure (1)..(436): unsure at all n locations
aacgaanaattanggaacttaganaacctatatccttaattgaaggcataggtgataaccatagtgaattacttaacaagattggtagtttacttaaggtcattccagatactccccaagcctcggaaaatacttccaaaatggtaacaagaagtacctccaaattaattaatgttattaatgaagatagtgacctanactcagacaacacaactgagataggatcagtgtcagataagaatataagtccaattaatttcaaacactggaaaacaccctccaaattatattatcaacgtccgactgcccctgacctactattagaggaaagaggtgaaaacaattttaagagttttagtgcanacaacatctatgaatggaacatagatgcacaaacggagtataacatcatgaatacactccaacatatgaccat

SEQ ID NO: 104249 - DNA, 223 bp, Glycine max
  unsure (1)..(223): unsure at all n locations
tcccctcanaaccattacatggagtcttgataacttctttaagaaccatggaaaatccaccattaaggggattatttcccagaattaatgcttctaatgacctcccattcccaagagagttggtaactggtcccttccataaattctcattgacatctaaagtccttagagcacaagatgctgaanatgtgactggaatgttgccatgaaacttgttctgtgt

SEQ ID NO: 104250 - DNA, 297 bp, Glycine max
  unsure (1)..(297): unsure at all n locations
ttcatccctagccatgatatacactcattattgatggggtctttctgtgaatataagagctgaaaacaatggcttcacggtgtccacctctcaatcatgcctgagcaaagtttttttcttttatgccaaaataaaggaccctgttggcctatnttgataacctacataacgttgaanatacatagagttttcttgttctctgatatagggccaatgttaagttctggcatgtngcactgaagtttccagtttgatggttctccatgtactggagcaatagttcctataacatcaata

SEQ ID NO: 104251 - DNA, 473 bp, Glycine max
  unsure (1)..(473): unsure at all n locations
agctgggttcgaggcacttacccgttgaagatctaataacgatgaagaacgaatgaagaacgtcgaagaacggttcaaacctttgcgagattcctcacggaaaacgttacggaaacgtttcggaagcgcctcggcttagaatttcttcacggaaacaattttttcaagcaaattccaaagagagagaagtgcctaggggctgggatcccttccttcttcatttcctcccctatntatagcaaaataggggagggtggtgccgcccagctcgcccaggcgagctcagctcgcccaggcgagcagggttgcttcctccagaagcaaccgccttctggaggaatcttctggagggcccaaatgggcctgggtgctatntgcacccccatttttactaagtacacccccctctgctgttttttggtgattctttnttcgtaaagttacggaaacttacgaatttcgtaacgatactt

SEQ ID NO: 104252 - DNA, 457 bp, Glycine max
  unsure (1)..(457): unsure at all n locations
aagcttctcctcgttccctataatagggggaggaggtgtataacatatatgttcaaccctccaggtatctgagaattacttaaaattagtgagaaaaattgtttccgtgaagaaaatccaatccgaggcgcttccgtaacgcttccgagacatttccgtgggtgatttcgcgaagatatttcaccgttcttcgttcgttcttcatcgatcttcggtcttcaactggtatagtcccgaaatcgaatttttcaattcattctatgtacccttagtggtccctacttgtttcgcatgctttcattttcatttcatttactttccgtacccccttttgcgtgcttagtcatntattaagtcattctctcgcctaatcaaaaataaaataaatttcaacgatcatttgaattgtacatctttaattctattaaatgaaatccgccgttcgatcatgctgtac

SEQ ID NO: 104253 - DNA, 433 bp, Glycine max
  unsure (1)..(433): unsure at all n locations
gcttnagaatatagtgacatggtataccttttgtttgaatctaccttacacgaagcaaacgagggggaggaaacttttgccaagatcatcagaatcaccaaggggtgctaaccacataccttaagaacatgccctttagtccgatatgattaccattggattcgcttgacatatgaactgaacggtccctactcataaacattagttctgaccttgagacctacttatggatgtctagaacacgacatatactgccttatccttggctagcacagcacaaccattattctgcatgagtggtaagatatgctgcacatcttgacagatctctacgcataattcggccgatttatattctagaccgcatgtctctatatcactcaaatcgtggcctacatgtactagtccatgttaaatcacgttcaaaccacat

SEQ ID NO: 104254 - DNA, 321 bp, Glycine max
ttgatttactctttcttacaccccactctccgtacattgtggtacttcctgaaagaggatgggccttattgctctactaatagataactagttgggaaccatcggatactgccatatttcaaatggtaaggactacctttatcgactctcagaacatggatacctgccatacaaacctcagataatgccttggatgaagtagcgactccatgaccttggccctacctatcactcttcgtcgaagtatgagtgaatccaaataactacctctgttatggaaatattattaaatgacgacccaaattaaggttcataatctca

SEQ ID NO: 104255 - DNA, 438 bp, Glycine max
  unsure (1)..(438): unsure at all n locations
tagggccatggcaggtataatgggtggtgtgttctctaaagttggtctggttgatgaattgttgaaactcttacaagacatgaaagcagaaggaaaaagactagatcagaggctgtaccaatctgcttggaatgcttttaaagatgtcgggttgcaaattcaagcaaggtggatgaaagagatctttnttgtgacataatgttcttttcaatttgcaaacagtggccaaatgtgaagctgaaatattcgaaaccggtgagtaatttgacgcttgcttcttcaggcactttgaggtgtacaaaaagatctatcatagatatatatcatgtataggttttggtgatgaaaggtnggtgcttgtacattntttagctttataccatttctattgtatgcttccaaaatcagattgtactcaagaaacgtattttaaatatg

SEQ ID NO: 104256 - DNA, 508 bp, Glycine max
  unsure (1)..(508): unsure at all n locations
tctgctgacgcacgacgtaatatatcttcatcattggcaacatctatattatttcctactgagtcagattcttgtttaatatctccaaattctttaaactcacaaagatctttactcccagtgctggtgattttctcatccgcccaagtaacagtgcgactaaatttcttttcaccagcagatttaagggaagatctgggtttagtctttaatgatccacctgcttttccacttggaatttctcttcaacattggcaggatctaaattggaagtggaagcatcatcattagcaataactctactcgttntccctttgacttgacagatttctagcagaatattctgttcacatcacattgctttctgattggagatgaatgacatcttcttttgatagccaaccggggagaattgagccagcttacatgattagtacttcttctcttttctgggtgcgtaaataaactgctttaaagatgaaacaatcttgatgcatatcatctttct

SEQ ID NO: 104257 - DNA, 456 bp, Glycine max
  unsure (1)..(456): unsure at all n locations
agcttgagagagaagntgaagatctgaagactctcattcaatgcgccatatgcgattagcaggaagcactcacttagcgcaaagaagtcacatatagaagcctgatacgtgaaggcgtgcttaacgcgactcgcgcactaagcatgtgaccaccaactcacttgctcaatgcagcggtttgcataaaagttaagcagactacacctatcaaaagaggaggaaggaaaggaaaaacacacacaaaatacccatgaaaatagagcttcccatagaaagcaaaggctacgattcatgcaggaataggggtaatcaaccattaggagccattcctttcccccatctctattcttcttctctccccatcaaccccttgcaattgtaagcctctcatgacaatgagaggctaaatccccctattgtgggagcntaacaaccaaacgctcttgatgaaatctt

SEQ ID NO: 104258 - DNA, 428 bp, Glycine max
  unsure (1)..(428): unsure at all n locations
ctaagctttacattatattggccttatatttaggctatgtttcatttntttccgctaggcaaatgttactaatttgaaanaaatattttattaaaaagtgttgttaatgcactctgacgcaatttttaataaaaaatttatatttattaattctttaaacctatgtttaatttttataagatctcacttatntgatgtctataacgaaatagggtaaaaaacctacacacaaccttgtcatttgaaattatatttaataattaatattattaattataaatccttgacgaatactatgaagaaaataacttataagattgatacgctggtataagatcatgttaaggtcacgttatatttaaaattatatatttgattcttanttattgtaaaatttcttagattaatggatattatgaactacaagt

SEQ ID NO: 104259 - DNA, 468 bp, Glycine max
  unsure (1)..(468): unsure at all n locations
agcttcaacctntgctcaccatttctgccccttatcgcgaaaggaagccattntcggagtcgtgaagcgcaactctacattgtgggacttcaaaattcaggtttgggtagacttcttttgatgcaagctccattggagcttgtaggcctagtgtcacaccctaattttgtccggggattattacttgatgacatgcaacctttggttagccgctttgagatacttggcgtcctttgttgcacaatanatgaagtcccgagacgtgtcagaaatcaaaaggaagcaggcttgcacgatacgtaaaattccgtggtgtggcagaaatcgaaaagatgtgtttttgcgcaatccgtgagtttccgtaactccttcgaaagctaaaaaagagtaaatatatattccgtaaggattcgtaaccttgcggaaggaaaataagtatcgttacgaaattcgtaaagtttcgtaacg

SEQ ID NO: 104260 - DNA, 368 bp, Glycine max
  unsure (1)..(368): unsure at all n locations
tacgtgggagtacgtgagctcagttggaggtgggcaacaggggatggtgggtttatgcgcgcattgtggatgaggaaagcttgttgtgcaccatcgcccgaccgccacctagtaccacatgtgatgggtaccccataatcctacaagcttgagatgaggaagtgttgaagggtgaaacttcctgcttttattgttgaccacagagtggtacctggagatatgtcgcggnggtcaggagaccttgnggacgtcaggtggggtgctattgcccaaaaccaagcttgaccaatcccgacccaacccgggcatagtcggtcagtgagaacctgtgatgtacctaagcaggcgagctcctggcagtccacaga

SEQ ID NO: 104261 - DNA, 541 bp, Glycine max
  unsure (1)..(541): unsure at all n locations
actcagcttgatccaactagtacattcatttgtagggatggactatgatgttntatatggttacttcgatcctgcggcatttgcgcacacacaagcaaaacaaagcaatttcaaataaacaaaattcaaatctaaaaacccttttaaaattagaaccatgtgaacgtcaatagagaactctgtaatcaacattcaacagccacacatacaaaggaaagaagctntattaaggtgtgaaaaccagaaaattaattgaaggaaaacgtacttcttggttagtgttatatcgggtaacaaagtcaaatgaatatggngtaacaaagtcaaatcaatgcaaatgcataaagaccaatcgcaaaaataacttggacccataaataagaaactaatggagggtgttggaagtttgaaccatgaagcttcaatctttggttggaggcttatcaaagatcaattgtgacaccctctacctccaacatatatgtactactaataaaagaaataattannaaaaataaacttaattcaagtnttaaaacat

SEQ ID NO: 104262 - DNA, 440 bp, Glycine max
  unsure (1)..(440): unsure at all n locations
gcagcttataagagncaaatcttacgttagagcgtgtagtatgagtatctttaatagggcaaaaactttattttcaattagcttgcgagtttgactatttaagtgggttaacatgactgattagggtaatatatgaagtttaccatattaacaaattaatataataattatgctaataaaaaaaataaatgtatttctatttacttaaatagtcaacctgttaagataataaattaccaagtggctaggcttgactttttattaaccataactctttaaaaaaatatgggtatagttattgctaaaaagataagcagcctgactgagcatgaataagtaaccataacctgttgatggacagactatttcatcctaattggagataggtgtaattacctccaaagataatataagacactttaaaaattctattgaagaat

SEQ ID NO: 104263 - DNA, 384 bp, Glycine max
aagcctttttttctttttttcaagacatttaggccagcctttttcttaccacagcacccttagcacataaccggtgtgtcttccgtgaacttcacaacgagaggaacccgtcgattggagcgggaatcttcaacttgacttgcgatttcggtagagaacgaaaccctaatctgacctttcatttcctttgagggaaccatgattccatgtttgttccttggtagtttcagcttatctttgcatcttttctgaccttggaaccaccattgtatgttttacgcttcctttgtaaaacccgaaatgctctcagctctttcatgtagtgacgtgggtgtttgacccagagcattgttgtagctttgtttctgaaatctatattaagtc

SEQ ID NO: 104264 - DNA, 429 bp, Glycine max
acaatagccacaagccttggcacaagctcaggcacaaaataaccttgggaattctaattatggtgacatggatcctcgtaaactttttgggcttcctcgaggtagcttaagtgcaaaggatggccagtctaccagaaatgatggatctatttgctctcaaatgcagtcagatcacctaagggtgcactagctttcaaaaattaaaaaaggtcaattagaatttagaaatattaatggttgattaacatgtataatataatatctttaaattcaacgcacatgcaccacacacacatataagttctatgaattgcttgagtgagtctccagaacccttgatagttgatacttctatacataaacaaataagtacattttactctttgaaaaatactaataaagaattaaaatagttcatgactttataat

SEQ ID NO: 104265 - DNA, 444 bp, Glycine max
  unsure (1)..(444): unsure at all n locations
atgcagatgggtgtgtagctacctcatgcactcttctaatgtctatggcatcannnatggcgctaaactgctgggagttggaggccatcttctcaattaaatttctggcttcagcaggagtcatgtcttcaagggctccaccactggcagcatctatcatacttctcttcatattactgagtccctcataaaaatattggagaagaagctgttctgaaatctgatggtgggggcaactggcacatagtttcttaaatctctcccagtactcatacaggctctctccactgagttgtctaatacctgagatatccttcctgatggctgtggtcctggaagcagggaaaattntttctaagaatactctcttaaggtcatcccagctcgtgatggaccttggagcaaggtaatacagccagtcctttgccactccctctaatgaat

SEQ ID NO: 104266 - DNA, 494 bp, Glycine max
  unsure (1)..(494): unsure at all n locations
atcctctgagtcacctgcggctgcagcttctagcccaattgacacccagaacctattgtttggcatcacaatagcaacaagccttggcacaagctcaggcacaaaataaccttgggaattctaattatggtgacatggatcctcgtagactttttggtcttcctcgaggtagcttaagtgcaaaggatggcccgtctacccgaaatgatggatctaattgctcttcaatgcagtcagaatcacctaaggttgcactagcntttaaaaaataaaaaagggcaattagaatttagaaatattaatggttggataacatgtataatataatatctttaaattcaacgcacatgcacacacacacacatataagttctatgaatggcttgagtgagtnctcagaacccttgatagttgatacttctatacataaacaaataagtacattttactcttgnaaaaatactaataaagaattaaaatagttcatgacttta

SEQ ID NO: 104267 - DNA, 407 bp, Glycine max
  unsure (1)..(407): unsure at all n locations
tgcagatgggtttgagctacctcatgcactcttctaatgactatggcatcatttatggcgctaaactgctgggagttggaggccatcttctcaattaaatntctggcttcagcaggagtcatgtctccaagggctccaccactggcagcatctatcatacttctctccatattactgaagtcttcataaaaatattggagaagaaactgttctgaaatctgatggtgggggcaactggcacatatgttcttaaatctctcccagtactcatacaggctctctccactgagttgtctaatacctgagatatccttcctgatggctgtggtcctggaagcagggaaaatttttctagaatactctcttaggtcatcccagctcgtgatggaccttggagcaaggaatac

SEQ ID NO: 104268 - DNA, 465 bp, Glycine max
  unsure (1)..(465): unsure at all n locations
atccttagagcaccgcggctgcagcttgtgttgnaccaacgaatgtgaaccattaagatctcanaacaacgttgcgaggagctaacatagagatatagataggtgaggggagtttatggtttgtttagagcttttgatactatagttggggttagggaacctaattatgggggtgtatgtttgtccttattggatgttnggtttcaagaaaaactatgatttaaactaatgggatgcgatatatttgtgtcgcaacatgcccttntgcaggcgagcgagacgaggctctcgggtgccgtttccanaggaggaaaatgcgcggagtcaccaccaatgtttatttgcggaaaacgtcggaaaaaccgaaggaaactggtcaaaaagaatattccaagtttgggagttgtantttacgttgacgaaggtattagcacctctcacgtttgtctcagaggacaacaacct

SEQ ID NO: 104269 - DNA, 356 bp, Glycine max
  unsure (1)..(356): unsure at all n locations
actacctgataatgctngatatccttttagcctgttcctttcttgtttgaactcatacagccttaatgacaaccatgatataccatattcttaagattttggagctttgaattgtttggaataatgtggggggtcttgttctggatactgttgtgcttctctgagattggcctcttagactgatatgtaaagtggatctaataatgcgtttaaagcttataacaaatcgaaagaaaaaacatagtgataatttatggcaatataacctggtacttagtaaatatctactttattctattttttaacatatccatgtcttttttgataccctatctatttctactgctgctatcact

SEQ ID NO: 104270 - DNA, 416 bp, Glycine max
cactaaaaaaaaactagatctgtcactgactagaatgattggaactgcacatggacttaagttttttgaaccaccctttttgcatcaaatcttcaagttgaatttgaatcttcttggtctcttagggattattcctatatgctagcctattaggctatgatgctcctggaatgagaacaatttgatgttctatgcctcttagaggacgtagaccacgagacacctctttgggaaagacattttcaaattcatgtaacaaagaagaaatcttatttggaagagacttgcaacctttaaattactatctttattgaaaagtaagagcattggtttttcaaatgcatagtctttttcacctcttttctttaataaacaaatttgatggttttgtctctttttcttgctctcttacactt

SEQ ID NO: 104271 - DNA, 397 bp, Glycine max
  unsure (1)..(397): unsure at all n locations
atgcgtgattgtattgaatgagatgatgngcaatgtcggaaatgttaatttcagtagctttgattgacatacacgtaactgaaacactcgtgtgcttaagagaacactatccttgtgaaagtgaagcatggttaatcttctttgatgcatgccatacttgctaacctattttatctacaagtgcattcttgcatgcttctatcatganaactatgacaaatgtgaactcgagagttggaaattgaagttgcttgaaagatatgcagttatctcggttattatggttggttacattctatacatcgtcattgacctaaattagtgtagtttagcttacttttgcttgaggacaagcaaagctataaatttggcggagattgataattgttatgtatat

SEQ ID NO: 104272 - DNA, 420 bp, Glycine max
  unsure (1)..(420): unsure at all n locations
atttctaggataccccctcacgctggagccctttgggcttgaagcttggacaatgcataaacccacctatcttaagttaaaattaaaggtttcttttttctcacaaaaaaagatttntattggaaaattggggcagcaaccaatgaactttgactgcttggtctgtgaagctttgatacccatttcaggaaccaacaatcctaaaagcgtaacctattaagtaaagacacatcgattttatattatatttctaatactaccaatagtccaggattggcagtggtcttatgttcagcagatggtaaagtcaattttaggtctttttaacttcctacacttggtgcctagagttctagcacacaagactcaacccttggattaattcacactttgaaatcctaaagtcattaaaccaatatg

SEQ ID NO: 104273 - DNA, 435 bp, Glycine max
  unsure (1)..(435): unsure at all n locations
cacaagaatattatgaatgagaaatgatagaacctattatcaacacanaaacatgattcaagagtagatctataaaattagaaccatagaaatgcacgaacaagtgtagatctaagatttaatcagtttattttttttgaatctactctaaacagcaccaaaccacaagacaatgtagcgtatacatggagaataagatgaagaacaaggaattaaagagaattcaccgaacaaaaagatagaggaaacaaaagaacatcacctagatgaagatgctcttgataccacatgatgtaagctccattggagcttgtaggcctaggatcttcttcatcaatggattcctttgcttcttggaagatgaatggtagtgcaatagagaaggaagagagacaggagacgccacttcaaggagaagatgagtctagaagaagc

SEQ ID NO: 104274 - DNA, 477 bp, Glycine max
  unsure (1)..(477): unsure at all n locations
agctngcatgcatctggatccctaataatcatgttacctacatagatttcctacatctactgtccaatctttttgaatttggaatgaccgaccctctcaatgagtcaatctcttgctttctcataagggtggacccttgggtactagtacccttaccttcaaagggctacacgcccttcccatcagaggactacacgttctcgccttcagagggttgcacgcccttgccttcagaggactacatgttctcgtctttagaagactacacatcctcaccgccagaggactacatgtccacaccctcagaggactacacgtcctccactttagagggctacacatcctcgccttcagagggctacacgccctcgccttcagaggactacacatcctcgccttcaaaggactacacgtcctcaccattagaggactacacatcctcatcttcagagggctacacgtcctcaccttcagagg

SEQ ID NO: 104275 - DNA, 450 bp, Glycine max
  unsure (1)..(450): unsure at all n locations
gcttataagcgcgggtctgggagacanaggtcaagtggtcgctatatgcgaagatgatgttccgagtacattggatttggtacgactatgccctcctgatttccagctgggaagttggcaagtggaggaacgccccgacatttacgcaacgagcataatgtaaacctttacggtttttaaaagctctatagttgggcctaggtntagaagttttcctttgtaaggctttgngtctttggtttntgaatttataatacaaggatctttcttcatctgttcctacatctctacccattctcattcattngcatgtttacttctttttctgaaacggcagatccgatgacgagtcccccgaaggtactaatacctgngacctgcctatcgacttcgagcaagaaatgagtcaaacggaagatgaaggaacgaggatgtggactttctccaaat

SEQ ID NO: 104276 - DNA, 435 bp, Glycine max
  unsure (1)..(435): unsure at all n locations
gctgcttgggttgatcacccttttgtttcttttgaactntacatgacaatgtctgtttcttgaacttgatgagcaggctagatactgtatgctagacataatgcgagggtctagtttttattatgtgacttataatgctgttaaattggctaagttaacaagaacatatgcaatgaagcttatttaaatagtcgaactcacgaacatcgggttggattttgtctcacatataccatgaatatttcaataagaaaccctattgatcaagatctcggggaagaccacactttactatttgttcaactcattgtcacgtttactcntctttgatacaaagatatcctttgtttcattatgaacttattttttacaacactgatttgaatgcgtttccagtaaacagtctgagtcatctcgacattctttaatattact

SEQ ID NO: 104277 - DNA, 444 bp, Glycine max
  unsure (1)..(444): unsure at all n locations
agcttaggaaaagataagtngcatattgtaatttactggacatgtcanggcgcgagatcatatccttcgtccatggaaaaagagagaataaaaaaagagtttgagttggtagccatatttcacagctggtgtaaaccttttagtaaaagacaacacacaaattgaaagaagaaaaaaaatattaccttattactttgacacttttttactttattctcaaaacttagcaaaagctttcactcacatcacaatcctattaccatagaggtcaccctggcaatggcatcactcttcaataattggatttccttgtcattgatgtttctcattaaaacgagttaacaacacaagactcgagcaacatgctactttttcttcggtaaatgtgtgacatgggcatagcataagattaatttaaagataataccccaacaattatctcac

SEQ ID NO: 104278 - DNA, 506 bp, Glycine max
  unsure (1)..(506): unsure at all n locations
tgatttccttttatggataatagacatgttacattntgatttgatagttcactaagattaatcttataaagattaccttttctattaccagtgaaaagttgtgttccatttttgtgttggacaacacaaccttctttgctaaagaanacatcaagtccactgtcacataattgacttatcctaagcatatntatgttaagccgtttaacaaacagtacattaaaaatgggaggataaggatcaatacttatctttcctactcctactatcttccccttctgatttcctccgaaactgattgttccaccatgcatgagagttgggcattggaacatacacttttcttttatcatgtgacatgagcagccaatgtcaaagtaccatgggtggtgtgccttattatnggtgaatataggaattattttctctttaggtatccaaatattcttgggtcctttcttgtaattctgaaacattggatgatcttgctttcgtagatgctacac

SEQ ID NO: 104279 - DNA, 473 bp, Glycine max
  unsure (1)..(473): unsure at all n locations
agctntactatgcaaagaataaccaaggaaaattccttcatctgacttagcattcaaatttcctatggtttcttttccattggttaatacaaaacacttgcaaccaaagacatgaagatgtgagatgtatggtttcctaccattgaacaattcatatggagttttctttaagatgggccttattaaagccctattcatgatgtaacatgcagtattaacggcttcagcccaaaaatattttggaagaggaatatcattcattaaggttctagcaatttcttccgaagacctatttttcctttcaacaactctattttgttgaggggttctaggtgcagaaaaattatgttcaatgccatgctnttcacaaaataaatcaaattctttattttcaaactcacccccctgatcactcctaatagatataattntaggatttttcttatnnttgaataactttgcaagtttcctaa

SEQ ID NO: 104280 - DNA, 319 bp, Glycine max
  unsure (1)..(319): unsure at all n locations
tcttttctttcgtctttaacgcgnttttaccgnttatgtaagccggtttctcatctaaataatgataaaatgaatttcaaccgatcatttgtgttgtaatctcatttaatcactcttaaaatgaaatctaaccgatcgttcacgctataacctcggttaaaccaaaaaaagtaaaataataataaaataattccaatatctcgaaaaaataataataaaataatcacaatatctttgaatataataaattaaaaaaatcaatcggaccgttttctttggaagcttcccttgatgaattgttaataacccaagtgaaact

SEQ ID NO: 104281 - DNA, 404 bp, Glycine max
tcgatgtctgattgagtcacgtaatatctcgagacgcttgaaattgaataccgaagctctgagcgaattcaaacgaccattactttttacctcgatggtctgatgggtccccgtatatatcgagaccgctcgaatttgatgttgaaactctgaaccaattcaaacgacaaataccttttactcggatgtctgattgagtcttcgaatatatcgagacgctcgaaattgaatgttgaagctcaaagcaaattcaaacgacaataactttttactcggatgtctgagtgagtcccgtaatatataaagacgctcggaaatgaatgtttaagttctgagcaaagtcaaacgacagataacttttactcagatatccgattgagtcatctaatatatcgagatgctcg

SEQ ID NO: 104282 - DNA, 473 bp, Glycine max
  unsure (1)..(473): unsure at all n locations
tacgagcgtctcgatatattacgggactaaatcagacatccgagtaanaagttattgtcgtttgaatttcctcgaagcttcaacattcaattacgagcgtctcgatatattacgggactaaatcagacatccgagtaaaaagttattgtcgtttgaatttcctcaatgcttcaacattcaattacgagcgtctcgatatataacgagactcaatcagacatccgagtaaaaagttattgtcgtttgactttgctcataactttatcattcaatttcgagtgtctttatatattacgggactcaatcagatatccgagtaaaaagttattatcgtttgaatttgctctgagcttcaacattcaatttcgagcgtcttgatagattacatgactcaatcagacatccgagtaaaaagttattgtcgtttgactttgctcagaactttaacattcaatttcgagcgtctttgtata

SEQ ID NO: 104283 - DNA, 417 bp, Glycine max
  unsure (1)..(417): unsure at all n locations
actctggacctctggccactcctcttaagggtacgataattntgtaatgtaccttaatcacaatgtcattagttttttctctaaatatatgatattgggcttcacttgattgctcctacatgtctttctctttgcctttcgtatcttgactgggtctgactactatcgtgaccaaaattcaagatcatttgacatttttcttgttggatttgcaggagttatgaactcatggaatgcacactcaaagtttatatttacaaggatggaaataaacccttntttatcaacctataatgaaggatcctgcaaaggcccatctattntatatgccatacaattcacgtatgttagagcactccctttatgtacgtaactcttataatcgaacataccttcgtcaggttttgaatgactata

SEQ ID NO: 104284 - DNA, 318 bp, Glycine max
  unsure (1)..(318): unsure at all n locations
taatataagcaagcaaaagcccaacccagcggggaaaaacaaactctcctagtcctaagaatcccnctaacaagggngatgcttntgtttctttccatcctagcattttcctaagttttatcacccacacattgtagtttttatcgcaacaaggggatgaagacaactatttntttatatcactacaaattgtacttacaagtatatgaaagtgaagcaggttgtttccattctttgactaatattacttntaaaaatatgaaataaatgcctctctatctcttaatcccaccagaaaggtacaaaaaaacatgattg

SEQ ID NO: 104285 - DNA, 486 bp, Glycine max
  unsure (1)..(486): unsure at all n locations
atcccatcgaggagtcaaaaatcttatttattatgattaaaaataaaacttaagagcagctccaacgatacgttgttcactaacatggagatgcaaaataaactcanaggcagtttcttaaccattggagtactgtatgagtttctcacttcgggctagtgagttctttgcaaagaaataagtttctaccgcacaagtaggtccattgcaataaaaagtaatattattatatttaagttaagtaatggtgaagtttttttatcatgcatcaattnttctacctttaaaaaatatatccattgcaaaataatggcaataaatgaatagtaaattntggtagtgtaaattggaacatttttgtaattttttcacacacaacaatctttcaatggcgtctatttgttctctntaaatttgcttgattgtaacctttctttgatacacaaatgggagattccatcccaataatatcctcctatattacta

SEQ ID NO: 104286 - DNA, 504 bp, Glycine max
  unsure (1)..(504): unsure at all n locations
agtcacctgcggcatgccaagcttgaatgttcatcattgcaacaaagcgtcactggttcttaatttgtagaaagcagaattgtctaacagaaatcgaaatgctggaagtaactcgacgaggaaaggaaaattgcagaatttaaaggctcagcgagttcattcgatcgaatgaactatttaaaagacaggaattataaagtaaagcgtaaattgcattgcattcgaaatgtaaagtttacagaattttaaaatggttcacaatcatacatcttccttgcgtactcgtttctctctgcgctgggtactttgagtgtataaggattngtgtaaatgaattgcgaccctgaaatctgactaaaaaactgctatatatagacattcgaaaataaactgccctaacggtcgaacactatcctagtgccaagtgtcctgccacgtacactcttgatgcacataactgctccttataacggttatccacattgctcgaagtcgagctgattt

SEQ ID NO: 104287 - DNA, 372 bp, Glycine max
  unsure (1)..(372): unsure at all n locations
gaaacaatgaaggatttactgttaatattaattgcattcccatacctagatcttcttctaaattccaccgaatttatatatgttaaatgcatggagcaggattcagactagctgggatctttatggtcttgagggtgtttttgaaagcactatgtgatctttgctgcacaacggacagatgcaacatgcatntttggatgctatgcgagtaatgtgagataaatactgaagggtctacatgtacatagacttgaactgagcatatgtgaattatgtaactcaaaggcataatgttgttgacatcatattaatgtgaattgatgctctgctaggaagtggcagcaaataaaatgtattcggaaatttagaaac

SEQ ID NO: 104288 - DNA, 460 bp, Glycine max
  unsure (1)..(460): unsure at all n locations
agctngaaggcatgtaacccaccattttctcatagttaacactgataacatgtcaactatcattgttatcatctccttctctatcatggagggcgctacttgagctgccagatccctccacctttgggcgtattctttgaaagatttatgctccttcttacacatgttctgtagctacattctatccggatccatatcanaattgtactgatactggctaatgaaggcaaccattaggtccttccaagaatggactcgggaaggttccagattagtataccaggtgacggctgccccagtaagactttcctggaagaaatgcatcaacaatntttcacttttcgagtatgcccccattttcctactgtacatcttcaagtgattcttggggcaagtagtccccttgtatttatcgaaatccgacaccttgaacttcagagggataacaacgtcgggcact
